United States Patent Application Publication US 2024/0327476 A1 - sequence listing, part 72

SEQ ID NO: 135852 - DNA, 13740 bp, synthetic construct
  misc_feature 1..13740: note = Description of Artificial Sequence: Synthetic coding sequence
  source 1..13740: mol_type = other DNA
atggagaccaaggagaaccggtgggtacctgtcaccgtgctgccagggtgcgtgggttgccgcaccgttgcagctcttgcctcttggaccgtcagggatgtgaaggagaggattttcgccgagactggtttccccgtgtctgaacagcggttatggaggggaggccgggagctgagcgactggattaagattggcgatcttacatcgaagaactgtcacctattcgtaaacctgcaaagtaagggcctgaagggcggcgggcggtttggtcaaaccacccctcctctggtcgactttttgaaggatatcctgaggaggtaccctgagggcggccagatactaaaggaactgattcagaatgcagaagatgccggagctaccgaggtaaaattcctttatgatgaaactcagtacgggaccgagactctgtggtccaaggatatggcaccgtatcagggcccggcactgtacgtgtataataacgccgtcttcactcctgaagattggcatgggatacaggagatcgccagaagcagaaagaaggacgatcccctgaaggttggccgctttgggataggattcaactctgtttaccatatcactgatgtgccatgtatatttagtggagaccaaatcggaatgctcgaccctcaccagacgctctttggaccccatgagtcaggtcagtgctggaacttgaaggacgacagcaaggaaatcagtgagttatctgaccagttcgctccattcgtgggaatattcggctccaccaaagaaactttcataaatggaaacttccccggcaccttctttagatttcccctgaggctgcagccaagtcaactctcttcgaacctctacaacaagcagaaagtgctggagttgtttgaatcttttcgcgccgatgcagacaccgtcttactgtttttgaagagtgtgcaggacgtgtcgctatatgtccgagaggcggacgggactgagaaactggtcttccgagtgacttcatcagaaagtaaggctctgaaacatgaaagacctaactccatcaagatcctcggaaccgccataagcaactactgcaagaaaacaccgtcaaacaatataacctgtgtgacctatcacgtgaacattgtgcttgaggaggagagcaccaaggacgcccagaaaacctcatggctcgtgtgcaattctgtgggagggcggggtatctccagcaaattggactcgctggccgacgagctgaaattcgtgcctatcatcggcattgccatgccactatcaagtcgggacgatgaggccaagggggctacatccgacttctccgggaaggctttttgtttccttccattaccgcccggagaggagtcttccaccggattaccagtgcatatatctggattctttggcctgaccgacaatcgtcggagcattaagtggcgtgagttggatcaatggagggatcctgcagcattatggaacgagttccttgtgatgaatgtggtacccaaggcatacgctacacttattttagattctataaagagattggaaatggaaaagtcgtctgacttcccactgagcgttgacgtaatatataaactgtggcctgaggcttcaaaggtgaaggtacactggcagcccgttcttgagcctctatttagtgagctcctgcagaatgccgtcatatacagcatttcatgtgactgggtgcgcctggagcaggtgtatttttctgaacttgatgaaaacctggagtatacgaaaaccgtactcaactaccttcagagctctggaaagcagatagctaaggtaccaggcaatgtggatgcagctgtgcaacttacagcggcctcagggaccacacccgtgcgtaaggtgactcccgcctgggtgcgccaggtgctgagaaaatgcgcccatcttgggtgcgcagaagaaaagctccatctcctcgaatttgtcctctccgatcaggcttactctgagctcctcggactggaattgctgccactgcaaaacggcaacttcgtgccattttctagcagcgtctcagaccaggacgtcatctacattacatccgcagaatacccgcgatcgctgttcccctcactggagggccggttcatcttagacaatttaaaaccccatcttgtggccgccctgaaggaagccgcccaaacccggggaaggccttgtacccagttacaactccttaatcccgagcgctttgctcgccttataaaagaggtgatgaataccttctggcccggacgggaactaatcgtacagtggtaccccttcgacgaaaaccgtaatcaccccagcgtgtcatggctgaaaatggtgtggaaaaacctgtatatacatttctccgaggatctaacgctgttcgatgagatgcccctcatccctagaaccattctggaggagggacagacttgtgttgaattgattcgcctgcggatcccatccctggtcatcctcgacgacgaaagcgaggcccaactgcccgaattcctggccgacatcgtgcagaagctgggaggcttcgtcctgaaaaaactggacgcatcaatccagcatcctctgataaagaaatacatccattcaccactgcctagcgctgttttgcagataatggaaaagatgccgttacaaaagctttgtaaccagatcacgtctctgttgcctacacacaaggacgccctccgcaaattccttgccagcctgactgactcctctgagaaggaaaagcgcatcatccaggagttggctattttcaagaggatcaatcattcaagtgatcaaggaatttcttcttacacaaaactaaaggggtgcaaggtgctccaccacaccgcgaaactcccggcagaccttcggctttccatctcagtgattgattcctctgatgaagcaaccatcagattagctaacatgttgaagattgaacagctgaaaaccactagttgcctcaaactagtccttaaagacatcgagaatgcattctactcccacgaggaagtcacccaattaatgctgtgggtgcttgagaatctgagttctctgaagaacgagaatccgaacgtgctggaatggctgactccattgaagttcatccagatcagccaggagcaaatggtgtcagcaggcgaactgttcgatcccgacatcgaagtgctgaaagatctattttgtaatgaagagggtacgtactttcccccgagcgtatttacctcacccgatattctgcatagcctacgtcagataggattaaaaaacgaagcgagtctcaaagaaaaggacgtggtgcaggtggccaaaaagatcgaggcgcttcaggtaggtgcctgccccgaccaggatgtattattaaaaaaggccaagacactgctgctcgtcctgaacaagaatcacactctgctgcagtcatctgaaggcaaaatgacgcttaagaaaattaagtgggtacccgcctgcaaggaacgcccgcccaactaccccggttcactggtctggaagggggatctctgtaacctttgtgctccacctgacatgtgtgacgttggccatgcaatattgatcgggagtagtctgccactggtcgaaagcatccacgtaaatctcgaaaaagcactaggaattttcacaaagccctccttaagtgctgtgctaaagcatttcaagattgttgtggattggtattctagcaagaccttctcggatgaggattactatcagttccagcacatactactcgagatctacgggtttatgcatgatcaccttaacgaaggtaaggatagcttccgcgcactgaagttcccctgggtctggactggcaagaagttttgtcctttagctcaggccgtaattaagccaattcatgatttggacctgcaaccctatctgcataatgtgccgaagactatggcaaagttccatcagttgttcaaggtgtgtgggtccatcgaggagctgacaagcgatcacatcagcatggttatccagaaaatttacctgaagagcgaccaagatctgagtgagcaggagagcaagcaaaacctccacctcatgttgaacattatccgatggctctacagcaaccagatccccgcatcccctaacaccccagtgcccatccaccatagcaaaaacccttctaaactgattatgaaaccgatacacgaatgctgctattgcgatatcaaagtggacgacctcaacgaccttttagaggactccgtggaacccatcattctagtccacgaggatattcccatgaagaccgctgagtggctcaaggtgccctgtctgtctacgaggctgatcaatcccgagaatatggggttcgagcaatccggccagagggagcctttgactgttagaataaaaaatatcttagaggaataccccagcgtcagcgacattttcaaagagctgctccaaaacgcggatgatgcaaatgctactgaatgctcctttctgatagacatgcggcggaacatggatattcgggaaaatttactggaccccgggatggcagcctgtcatggcccagcactgtggtccttcaataactcccagttttctgactctgatttcgtgaacattacaaggctgggggaatcacttaagagaggtgaggtggacaaggtaggcaaattcggcctcggattcaacagcgtgtaccacataacagatattcctatcatcatgtctcgagaattcatgatcatgttcgatcctaacattaatcacattagcaagcatatcaaggataaaagcaatcctgggataaaaattaactggagcaaacaacagaagcgactccgcaagtttccaaaccaatttaagcccttcattgacgtatttgggtgccagcttccactgactgtggaggctccatactcctataatggaactctgttccgccttagcttccgtacgcagcaggaagcaaaggttagtgaggtctccagcacttgttacaatacagcagacatatacagtttagtagatgagttcagcctgtgtgggcataggcttataatttttacacagtccgtcaagtccatgtatctcaagtatctcaagatcgaggaaacgaacccctccctggctcaggatactgttatcatcaaaaagaagagttgctcctctaaagccctcaacaccccggttctttcagtattgaaagaagccgccaagctaatgaaaacctgttcttcttccaataagaagctgccctctgacgaaccgaagagctcttgcattctacagatcaccgtggaagaattccaccacgtctttaggagaatcgcagatctccaaagcccgctcttccggggcccggatgacgatcccgcggctctgtttgagatggccaaaagcggccagagtaaaaaaccctcggatgaactttctcaaaaaactgttgagtgcaccacttggcttctgtgcacctgcatggatacaggcgaagcactaaaattttcgctgtctgaatctgggaggagactcgggctcgtcccttgcggcgctgtcggcgtccagctgagcgagatccaggatcagaagtggactgtaaagcctcacataggcgaggtgttctgctacctgccactccgtatcaaaacaggtctgccggtgcacattaacggctgcttcgccgtgactagcaaccggaaagaaatatggaagacggacaccaagggacgctggaatacaacctttatgcggcacgtaattgtaaaggcctatctgcaggtcctctctgttttgagggatcttgccacaagcggggagttgatggattatacgtactatgcagtctggcccgatcctgacctggttcatgacgatttcagtgtgatctgtcaggggttctatgaggacatcgcccacgggaaaggtaaggaactgacaaaagtattttctgacgggagcacatgggtttcaatgaaaaacgtcaggttccttgacgatagtattctgaaaaggagagacgtgggatctgctgctttcaagatcttccttaagtatttaaagaagaccgggtctaaaaacttgtgtgctgtagaactgccctcctcggttaaattgggcttcgaggaagcgggttgtaagcagattctgttggagaatactttttccgagaagcagttcttttctgaggttttttttcctaatatacaggaaatagaggctgaactccgggatccgctaatgattttcgtcttgaacgaaaaggtcgacgagttcagtggtgtgctccgggtcaccccatgtattccatgtagtttagaaggccatcctctagtcctgccttcccgactgatacacccggagggccgagtcgctaaactattcgacataaaggacgggcgatttccatacggcagcactcaagactacctcaatcctatcattctcatcaagcttgtacaattgggaatggcaaaggacgatattctgtgggatgacatgctagagagagccgtatcggtcgctgagattaataaatccgaccatgttgcagcctgccttcggagctccattctactcagccttatcgacgaaaagctgaagataagagatcctagggccaaggactttgctgccaaatatcagaccattcgctttctgccctttctgacaaagccagccgggttttctcttgactggaaggggaacagttttaagccggagacaatgtttgcggcgacagacttgtatacagcagaacaccaggacatagtgtgtctgctccagcctatattgaatgagaattcacattctttccgaggctgtgggagcgtctccttggcagtcaaagagtttctgggcttgctaaagaaacccaccgttgatctcgtgatcaaccagctgaaggaagtggcgaagagcgtggatgatggaattactctgtaccaggagaatatcacaaatgcctgctataagtatctgcatgaagcgttgatgcagaatgagattaccaagatgtccataattgataaactaaagcctttctcattcatactggtggagaacgcttatgtcgatagcgaaaaggtgtctttccacctgaactttgaggccgccccctatttatatcagcttccgaataaatataagaataatttccgtgagctcttcgagaccgtcggggtccgacagagttgcaccgtagaagattttgcccttgtcctggaatccatcgaccaggaacgcgggactaagcaaatcaccgaggaaaactttcaactgtgtagaaggattataagcgagggaatttggtctctaatcagggagaagaaacaggaattctgcgagaagaactacggaaaaatcctcctgccggatactaatctgatgttacttcccgcgaagtccctgtgctataacgattgtccttggatcaaggtgaaggataccaccgtgaagtactgccacgccgacattccaagggaggttgctgtgaaactgggcgccgtgccaaagcgtcataaggctctggaacgctacgcatcgaatgtgtgtttcacaacacttgggacggagtttggccagaaagagaagttgactagccggattaaatccatcctgaacgcgtacccgtccgagaaggagatgctcaaagaacttctccagaatgccgacgacgctaaggcaactgagatttgcttcgtatttgaccccagacagcaccccgttgaccggatcttcgatgataagtgggcacctctgcaggggcccgccctgtgcgtctacaataaccagccgttcactgaggatgacgtgcgaggtatccaaaacctggggaagggaactaaagaaggtaatccttataagaccgggcagtacgggattgggttcaacagtgtgtaccacattactgactgtccttcgttcatctcaggcaacgatattctttgcatattcgacccacacgctcgctatgcgccaggggccaccagcattagccccggtcggatgttcagagacctggatgccgacttcaggacccagttttctgatgtgctcgatctttacctgggtacccacttcaagttggacaactgcacgatgtttcgttttcctttgcggaacgccgaaatggccaaagtgtctgagatctcaagcgtgcccgccagcgaccgcatggtgcagaacctcctggacaaattgcggagcgacggggccgagctgctgatgttccttaatcacatggaaaaaatctcaatttgtgaaatcgacaaatccacaggggcccttaatgttttgtacagcgtcaaaggaaaaattacagacggagacaggttgaagaggaagcagttccatgcctccgtgattgacagcgtgactaaaaagcggcaacttaaagacattcccgtccagcaaattacttatacaatggacaccgaggactccgaggggaatctcacgacatggctgatttgcaaccgatctggcttctcttcgatggagaaggtgagcaagtcagttatttctgcccacaaaaatcaggacattacactttttccacgtgggggggttgcagcgtgtataacccacaactataagaagcctcaccgcgccttttgctttctgccgctgagccttgagactggcctgccattccacgtgaacggtcactttgcccttgattccgctcgacgcaatctgtggcgggacgacaacggagtgggagtgagaagtgattggaacaactccctgatgacagcccttatcgccccagcctatgtggaactgctaatacagttgaagaaacgatacttccctggttccgatcctaccctctccgtcctccagaatacacctattcacgtggtgaaggacactttgaagaaatttctctccttctttcccgtaaataggctcgatttgcagccagacctgtattgtctcgtcaaggcactatataattgtatccacgaagacatgaagcggcttctccctgtcgttagggcaccgaacatcgacggttcggatctgcattccgccgtcataatcacatggatcaacatgagtaccagcaataagactagaccgttcttcgacaacctgctgcaggacgagctgcaacacctgaagaacgcagactataatattaccactcggaaaactgtggccgaaaacgtttacaggctgaaacatcttttattggagattggctttaatctcgtttacaattgcgatgaaactgctaacctttaccattgcctgatagatgccgatataccagtcagttatgtaacgccagcagacatcaggtcttttctcatgactttttcttcccctgacacgaactgccacatcggaaagctcccctgcagactacagcagacaaatcttaagctcttccacagcctaaaactcttagtggactactgtttcaaggatgcagaggaaaacgagattgaagttgagggactgcctctgctcatcaccctggactccgttcttcagacattcgacgcgaagcggcccaagtttctcacaacataccatgagttgatcccatcaaggaaggacctgttcatgaatacattatacttgaagtacagtaacatccttctaaattgcaaggttgcaaaggtcttcgacattagttcttttgctgacctgttgtcaagtgtgttgccccgcgagtacaagaccaaatcctgcaccaagtggaaggacaatttcgccagcgaatcatggctgaagaacgcttggcacttcatctctgagagcgtcagcgttaaggaggaccaggaggaaaccaagccaaccttcgacatcgtggtcgatactcttaaggactgggcactattgcccggcactaaatttacggtatctgctaatcaactggtggtccctgaaggtgacgttctcctgccactttccctgatgcacatcgcggtgtttcccaacgctcaatccgataaggtattccatgcgctcatgaaggccgggtgtattcagctggccctgaataagatttgctcaaaggactcggctttcgtgccgctcctttcctgtcatactgcaaacatcgagagtcccactagtattctgaaggccctccactatatggtccaaacctcaaccttccgcgccgagaaactagtcgaaaatgatttcgaggccctcctgatgtacttcaattgtaacctgaatcacctgatgagtcaggacgacattaagatcctcaagagtctgccctgttacaagtccatatccggtcgttacgtcagcataggtaagttcggtacctgctatgtgctgacgaaatctatcccctcggctgaagttgagaaatggacacaaagttcgagtagcgcattcctggaagaaaaaattcacctgaaggagctgtacgaggtgattgggtgcgtgcctgtcgatgatctggaggtttatctcaaacacctgcttcccaagattgagaacttgagctatgacgcaaaattagagcacctgatctacctgaaaaataggctgtccagcgctgaggagctttccgagattaaagagcaactgttcgagaagctggaaagcctcctgatcattcatgacgccaatagcagacttaaacaggcgaagcacttttacgatcggacagtaagggtgtttgaggtaatgctacccgaaaagctattcatccccaatgacttctttaaaaaattagagcaactaattaagccaaaaaatcacgtcacattcatgactagctgggtggaattcctccgcaacatcggactcaagtatattctgtcgcagcagcaactgcttcagttcgccaaagaaatatccgtccgtgcgaatactgaaaactggagtaaggaaacattacagaatactgtggatatcctgcttcatcatatctttcaggagaggatggacctgctcagtggaaattttcttaaggaactgtctctgatcccctttttgtgtccagagcgggcccccgccgagtttattaggttccacccccagtaccaagaggtcaacggcacattgcctctgatcaagttcaacggggcgcaggtgaaccccaagttcaaacaatgtgatgtactgcagcttctgtggacctcctgcccaatactccccgagaaggccacacctctttccatcaaagagcaggaaggctccgacctggggccccaagagcagctggagcaagtgctgaatatgttgaacgttaatttggatccaccactggacaaagtgattaacaactgtcgtaacatctgcaacatcacaactctcgacgaagagatggtcaaaaccagggctaaagtgctgagatctatctacgagtttttatcagccgagaaacgtgaatttagatttcagctgcgcggtgttgcctttgttatggtagaagacggctggaaactcctgaaacctgaagaagtagttataaatctcgagtacgaatctgattttaaaccatatctctacaaactgccattggaacttggcaccttccatcagctgttcaaacacctgggaactgaagatatcatttctacaaagcagtatgtggaggtcctcagtaggattttcaaaaatagtgaaggaaaacagctggatcccaatgaaatgaggacagtgaagagggtcgtaagcggcctttttcgctccctacaaaatgatagtgtgaaggttaggtctgacctggaaaacgttagagatctggccctgtatttgccttcacaagacggtagacttgtgaaatcctctatcctagtgtttgatgacgcaccccactataagagccgcattcaagggaatattggagtgcagatgctcgtggacctgtctcagtgctacctgggcaaggatcacggcttccatactaaactgattatgctcttccctcagaagctgcgccccagactcctgtcatcgatcctagaagagcaactggacgaggaaacccctaaagtctgccagtttggcgcactttgttcacttcagggacgcctacaactgctgctgagctctgaacagttcattaccggattaatcaggatcatgaaacatgagaatgacaatgcattcctggccaacgaagagaaagcgattcggctgtgcaaggccctccgagaaggcctgaaggtttcttgcttcgagaagctgcaaactaccctgagagtcaagggcttcaacccgattcctcattcacggtcggaaactttcgcattcttgaagcggttcggtaatgccgtgatacttctgtacatacaacacagcgatagtaaagacattaactttctcctggcgttggccatgacactaaaaagcgccacagacaatttaattagcgatacctcttacctaatagctatgcttggatgcaacgacatctacagaatcggcgagaaactggattccttgggagtaaaatacgatagttccgaacccagtaagttggaactccctatgcccggcacccccatccccgcggagatacactatacactgctgatggatcccatgaacgttttttacccaggggagtacgtgggttacctggtggacgcggagggcggagatatatacgggtcctatcaaccaacgtacacttacgcaattatcgttcaggaggtggaaagggaggacgctgacaacagttcttttctcgggaaaatctaccagattgatatcgggtactccgaatacaagatcgtgtcaagtctagacctgtataaatttagccgccctgaggagagcagccagagcagagatagcgctccttctactccaacctctccaaccgagttcctcacacctggcttaagatccatccctcctctgttctcaggacgggagtcacacaaaacctcgtccaagcaccagagtccaaagaagctcaaggttaactctctgccagaaattcttaaagaggtcaccagcgtcgtggaacaggcctggaaattacccgagagtgagagaaagaagattatccgcagactgtatctcaagtggcacccagacaagaatccagaaaaccatgatattgcaaatgaggtctttaagcacctgcagaatgagatcaatcgccttgaaaagcaggcttttttggaccagaacgccgacagagcctcacgtcgcacctttagcacgtctgcatctaggttccagtccgataagtattcattccagcgcttttatacctcctggaatcaggaggccaccagccataagtccgagaggcagcagcagaacaaagagaagtgtccacccagcgccggccagacgtattcccagaggttcttcgtacccccaacattcaaatccgtgggtaatcctgtcgaggcgaggagatggctcagacaggccagagccaatttctcagccgcaagaaatgatcttcacaagaatgccaacgagtgggtgtgttttaagtgttacttgtccaccaagctggccctgattgcagctgactacgcagtgcgggggaagtctgataaggacgtaaaaccaaccgcactggcccagaagatcgaggagtattcccaacagttggaaggactgactaatgatgtgcacaccctagaagcctacggagtagatagccttaaaactcgttatccggatcttctgccttttcctcagatcccaaatgacagattcacctctgaagtggcaatgagggtcatggaatgcacggcatgcatcattatcaagctcgaaaactttatgcagcagaaggtctag

SEQ ID NO: 135853 - DNA, 11490 bp, synthetic construct
  misc_feature 1..11490: note = Description of Artificial Sequence: Synthetic coding sequence
  source 1..11490: mol_type = other DNA
atgaacactttttggcccgggagggagctcattgttcagtggtatccttttgacgagaatcgcaaccatccatctgttagttggttgaaaatggtctggaagaatctgtacatacattttagtgaagacctgacactctttgacgagatgcccctcatccctagaactatcttggaggagggacaaacctgcgttgaactgatccgactgcggattccgtccctggtgatcctggatgatgagtctgaagcccagctgccagaatttctcgctgacatcgtccaaaagcttggcggttttgttctgaaaaagctggatgcctcaatccaacatcctcttataaagaagtatattcattctccactgcccagcgcggtcctccagattatggagaaaatgccactccagaaactttgtaaccagatcacatcattactgcccacccacaaggatgcacttcggaaattcctagcatctctcactgactcctctgagaaagagaagcgaattattcaggagttagcgatcttcaaaaggatcaatcactcatcagatcagggcatttcatcgtatacaaagctgaagggatgcaaggtgcttcatcacactgccaaactgcctgcagacctgagactgtctatcagtgtgattgattccagcgatgaagctaccatacgtttagcaaatatgctgaagatagagcagctgaagacaacgagttgtctcaaattggtgctgaaggatatcgagaacgccttttattctcacgaggaggtaacacagttgatgttatgggtgcttgagaatctgtcctctctgaaaaacgagaatccaaatgtgctcgagtggttaacccccctgaagtttatacagatttcccaggaacagatggtttctgctggagagttgttcgaccccgacatcgaagttctgaaggacctcttttgtaacgaagaaggtacctatttcccgccaagtgtttttacaagtcccgacatacttcatagtctccggcaaatcggactgaaaaatgaagcctctcttaaggaaaaagatgtggttcaagtcgcaaaaaagattgaggcgcttcaggttggagcctgcccagatcaggatgttttgctcaagaaggccaaaacactgctgctggtgcttaacaagaaccacacactgctccaatcctccgaagggaaaatgacgcttaaaaagataaaatgggtcccagcatgcaaggaaaggccccccaactatcctgggtctctggtgtggaaaggagacctctgcaacctctgtgcaccaccagacatgtgcgacgtgggccatgccattctgattggctcaagcttacccctcgtggagtcaatccacgtcaatctagaaaaagctctgggaattttcaccaaaccgtccctgtcagctgttttgaagcatttcaagattgtggttgactggtattcgtccaaaacattctctgacgaagactattaccagtttcagcacatattattagagatttacggcttcatgcacgaccacctgaatgagggtaaagactcatttcgagcgcttaagttcccttgggtgtggacaggtaagaagttctgtcctctggcccaggctgtgataaaacctatccacgatctcgaccttcagccatacctgcacaacgtgcctaagaccatggctaaattccatcagctgttcaaggtgtgtggctccatcgaagagttgacctctgaccacatctctatggtgatccagaaaatctacttaaaaagcgaccaagatcttagtgagcaggagagcaagcaaaacttacacttgatgctaaacattatcaggtggctatactccaaccagatcccggcctctccgaacacccccgttcctatacatcactccaagaacccttctaaactcattatgaagcctattcacgaatgctgctactgcgacattaaggtggatgaccttaatgaccttctggaggactctgtggagccgatcatcctggttcacgaagatattcctatgaaaaccgcagaatggctaaaggtgccgtgtttatcaactcggttgataaatccggagaacatggggtttgagcagagcgggcagagagagcctctcacggttcgcatcaagaacattctggaagagtatcccagcgtgtctgatatcttcaaagaactgctgcagaatgccgacgacgctaacgcaacggagtgtagcttcttaatcgacatgagacgcaatatggacataagggagaatctgctcgaccctgggatggccgcatgtcacggccccgctctgtggtcctttaataacagccaattctctgattctgacttcgttaacataaccagacttggcgagtcgctcaaacgcggcgaggttgataaagttggtaaatttgggttaggcttcaactccgtgtaccatataacggacatccctattattatgtctagggaattcatgataatgtttgacccgaacataaatcacatcagcaagcacattaaagataagagcaaccctggtatcaagattaattggtcgaagcagcagaagagactgagaaagttccctaatcagtttaagccattcatcgatgtgtttggctgccagctgccgctgaccgttgaggcgccgtactcttacaatggcacccttttccggttatcttttcgcactcagcaggaggctaaagtaagcgaagtttcctctacgtgttacaataccgctgatatctactcactcgttgacgaattcagtctttgtgggcacagattaatcatcttcactcagtctgtgaagtccatgtacctgaagtacctgaagatcgaggaaactaatccttccttagcacaggacacagtcataataaagaagaagagctgcagtagtaaggccctgaacacacccgtcctgtctgtactgaaagaagcggccaaactcatgaagacgtgttcatcgagcaataaaaaactgccatcagatgaacctaaaagttcttgcatactgcagattaccgtggaggagttccatcacgtgtttaggcgcatagccgacctacaatctcctctgtttaggggcccggacgatgatcctgctgcactgtttgaaatggctaagtcaggccagagtaaaaagccatcagatgaactgagccaaaagacagttgaatgtaccacttggctcctttgcacctgcatggacacaggcgaagctttaaaattttcactcagcgagtctggccgcagactcggcctggtaccatgcggggccgttggtgtgcagcttagtgagatccaggaccagaaatggaccgtaaaaccacacatcggcgaggtcttttgttatctccccttacgtataaaaaccggccttccggtgcatattaacggctgtttcgctgtcaccagcaaccgtaaagagatttggaagaccgatacgaaaggccggtggaacacgacttttatgcgccatgtgatcgttaaagcttacttgcaggttctgagtgttctccgcgacctcgccacaagcggtgaactaatggactacacatattacgcagtctggccagaccctgacctggtgcacgatgatttctcagtaatctgccagggtttttatgaagatatagcccatggcaaaggcaaggaactgaccaaagtgttttcagatggttctacatgggtgtctatgaagaatgtgcggtttctcgatgatagcatccttaaacggagagatgtcggctccgctgccttcaaaatctttctaaaatatctgaaaaagactggttccaagaacttgtgcgctgtcgagctgccatcctctgtgaagttaggatttgaagaggcaggctgcaagcaaatactactagagaacactttcagtgaaaagcagttctttagcgaggtttttttccccaatattcaggaaatagaggccgaacttagagaccccttaatgatctttgtgttaaacgagaaagtggacgaattttcaggggtgctccgggttaccccttgtatcccatgctctctggagggacacccattagtcctaccttcaaggctcattcaccccgagggtagggtcgctaagctcttcgacatcaaagacggcagatttccctacggctcaacgcaggactacttgaacccaataattctgattaaactggttcagcttgggatggctaaagatgacatcctgtgggatgatatgctcgaacgggcagtgtcagtggctgagatcaacaagagtgaccacgtggctgcctgcctgagaagttctatccttttaagccttattgatgagaagcttaaaatcagagatccaagagcaaaagatttcgccgcgaaataccagacaatccgcttcctgccatttctgacaaaaccagccgggttctccttggattggaagggtaatagttttaaacctgagactatgtttgctgctaccgacctttatacggcggaacatcaggacatcgtgtgtctgctgcagccaatacttaacgagaactctcactcatttagaggttgtggcagcgtgtccctcgccgtgaaggagtttctgggactcctgaaaaaaccaacagtggatcttgttataaaccaactcaaagaggtagcaaaaagtgtagacgatggaattacactctatcaggagaacatcactaacgcttgctacaagtacctccacgaggccctcatgcagaacgagatcaccaaaatgtctattatcgataagttaaaacccttctcgttcatactggtcgaaaacgcttacgtagatagtgagaaggtgagcttccacctcaactttgaagcggccccatatctttaccaattgccaaacaagtacaaaaacaattttcgtgagttgtttgagacagtaggggtccggcagagttgcacagtggaagattttgccttagtgctggagtccatagaccaagagaggggcaccaaacagattactgaagagaatttccagctgtgcaggaggattatctccgagggtatttggagcttgatacgggagaaaaagcaagagttttgcgagaaaaattacggcaagattctcctcccagacaccaatctgatgctgctcccagccaagagtctttgctataacgattgcccctggatcaaggttaaagataccaccgtgaaatactgtcacgccgatatccctcgggaggtagccgtgaagctcggcgctgtgcctaagcggcacaaggcgcttgaacgctatgcctcaaacgtttgttttactacactggggaccgaatttggccaaaaagaaaaacttacatctaggattaaatctattctgaacgcttacccctccgaaaaagagatgctgaaagagctcctccagaacgcagatgatgccaaggctacagaaatctgttttgtatttgaccccagacagcatccagttgatcgcattttcgacgataagtgggctccactccagggcccggcactgtgcgtgtacaacaaccaacctttcactgaggatgatgtgagaggcatacagaacctgggtaaggggacaaaggagggcaatccgtacaagacagggcagtacggcatcggtttcaactccgtgtatcacatcactgactgcccatctttcatctctggcaacgacatcctgtgtatattcgatccacacgcaaggtacgccccaggtgccacttcgatctcaccgggaagaatgttcagggatctcgacgccgactttagaactcagtttagcgatgtactagatctgtacttggggactcactttaagctggacaactgtacgatgtttcggttccctttaagaaacgccgagatggctaaggtttctgaaatttccagtgtgccggcaagcgatcgaatggtccagaaccttttggacaagctgagatctgatggcgcggaattgctgatgtttctgaaccacatggaaaagatttctatctgtgaaatcgataagagtaccggtgcgctgaatgttctgtatagtgttaaggggaagatcactgatggggacagactgaaacgtaagcaatttcacgcctcagtgatcgactccgtgacaaagaagcgccaactcaaagacatccctgtccagcaaattacttatacgatggatacggaggacagtgagggtaatctgacaacctggctgatttgcaacaggtcaggcttctcaagtatggagaaagtgtccaaatcagttataagcgcccacaagaatcaggacatcacgctgtttcctcgcgggggagtcgcggcctgcataacacataactataaaaaaccccatcgggcgttctgcttcctcccactcagcttggaaaccggtctcccctttcacgtgaatggccacttcgccctcgactctgctcgaagaaacctttggcgggatgataatggggtcggtgttcgcagtgactggaacaactctctgatgactgctcttatcgctccagcatacgtcgaattgctcatccagctcaagaaacgctattttcccggtagtgaccctaccctgagcgtccttcaaaatacacccattcacgttgtcaaagacacactgaaaaagttcctctcattctttcccgtaaacagacttgatctccagccagacctatactgtctggttaaggctttgtacaactgcattcacgaagatatgaagcggctgctgccagtggttagagctcccaacatcgacgggtctgacctgcattccgccgtgattatcacatggatcaatatgagcacttccaacaaaacccgtccgtttttcgacaatctgctccaggatgagctccagcaccttaagaatgccgactacaatattaccactcgaaaaactgtggcggagaacgtttataggttgaaacatcttctgttggaaattggcttcaacctggtctacaactgcgacgaaacggctaacctttaccattgccttatcgatgccgacatacctgtcagttacgtcacacccgcagatatcaggtccttcctcatgacctttagcagcccggacactaactgccacatcggaaaactcccttgcagactccagcagacaaacctgaaactttttcacagcctcaagctcctcgtggactattgcttcaaggatgccgaagagaacgaaatagaggtcgagggcttgccgttactaatcaccttagattctgtactccagacgttcgacgcaaaaagacccaagttcctgaccacataccacgaattgatcccctccaggaaggatctgttcatgaacactctctatctcaaatactctaatatcctgctgaactgtaaagttgctaaggttttcgatatctcctccttcgccgacttacttagctcggtgctccccagagaatataagacaaagagttgcacgaaatggaaggataacttcgcctccgagtcttggctgaagaatgcttggcacttcattagcgaatctgttagcgttaaggaggatcaggaggaaactaagcccacgtttgatatcgtcgtggacacactcaaagattgggctctgctcccaggaaccaagttcaccgtatctgctaatcagctggtggtgcctgagggagatgttttgcttcctttgagcctgatgcacatcgctgttttcccgaacgcccaatccgacaaggttttccatgctttgatgaaggctggttgcatccagcttgctctgaataagatttgttccaaggactccgcattcgtgccactgttgagctgccacacagctaatattgaatcgcccacctctattctgaaggccttacactatatggttcagacctctacgtttcgggccgaaaagctggttgagaacgacttcgaggctctccttatgtatttcaattgtaacttgaaccacctgatgtcccaggacgacatcaaaattctcaagagcctgccttgctacaaatcaatatctggcaggtatgtttccataggcaagttcggcacctgctacgtcctaactaagtctataccctcagcggaagttgagaaatggactcagagctcgtccagcgccttcctagaagagaaaatacacttgaaagagctgtatgaggtgattggctgtgtccctgtggacgacctagaggtgtaccttaagcatctgcttccgaaaatcgagaatttgagttatgatgcaaaattggagcacttgatctacctcaaaaatcgtttgtccagcgcagaggagttgagcgaaatcaaggaacagctgttcgaaaaacttgaatcactgctgattattcatgacgccaacagcagactgaaacaagccaaacacttctatgaccggaccgtacgagtttttgaggtcatgcttcctgaaaaactgtttattcccaatgatttttttaagaaactagaacagctcattaagcctaaaaaccatgtgacgtttatgacctcgtgggtggagttcttgagaaacatcgggctgaagtacatcttgtcacagcagcaactgctccaattcgctaaagagatctcagtaagagctaatactgagaattggagtaaagaaacccttcagaacacagtggatatcctgctacaccacattttccaggagcggatggaccttctatcgggtaattttctgaaggaactgtctctgataccctttctatgtcctgagcgtgctccggctgagttcatcaggttccacccgcagtatcaggaagtgaacggcacgttgccactgatcaagtttaatggggcccaggtgaatcccaaattcaaacagtgcgacgtattacagcttctctggacctcctgccccattctgccagaaaaagctactcccctgtcaataaaggagcaggaggggagtgacctgggcccccaggaacagttggaacaagtcctcaatatgctcaacgtcaatctcgatcctcccttagataaagtgataaacaactgccgcaacatatgcaatattactactctggacgaggagatggttaaaacacgggcaaaagttctgaggagcatctatgagttcctgtccgctgagaagagggagtttcggttccagttacgcggggttgctttcgttatggttgaggatggctggaagctccttaagcccgaagaggttgtgataaacctggaatatgagtcagactttaaaccatatctctacaagctgcccctggagctaggaacgtttcaccaactgttcaagcacctgggcaccgaggatatcatctccactaagcagtacgtagaagttctgagccgcatttttaagaactctgaaggaaaacagctagatcctaacgagatgcggaccgtcaaacgggtggtgtccgggttgtttcgctcactccaaaacgattctgtcaaagtgcggtctgacctggagaatgtaagggatctagcgctctatcttccctctcaagacggaagactggtcaaaagttctatactggttttcgacgacgctccacactataagtctagaatccaggggaacatcggggtgcagatgctcgtcgacttgtcgcaatgctacctggggaaggatcacgggttccatactaagctgataatgctgtttccccagaaattacgcccccggctcctgtcctcaatcctcgaggaacagctggacgaagaaacaccaaaggtgtgccagtttggagcgttatgtagtctacaagggcgcctgcagctattgcttagtagcgaacaattcatcacgggactgatcaggattatgaagcatgaaaacgataacgccttcctggccaacgaagagaaggccattagactgtgtaaggctctccgggagggtctgaaggtgagctgtttcgagaaactgcagaccaccctgagagtgaaaggctttaatcctatcccgcattcaagatctgaaacctttgcatttctcaagaggttcggcaacgccgttattctgctgtatattcagcacagcgattccaaagacatcaactttctcctcgccctggccatgacccttaaaagcgccaccgacaacctcattagtgatacctcatacctgatcgccatgctgggctgcaatgacatttacaggatcggggaaaaattggatagccttggcgttaaatacgacagctcggagccctcaaaactagagctgccaatgcctggcacacctattccagctgaaatccactacacacttctgatggatcccatgaacgtgttctacccaggggagtacgttgggtatctggtcgatgccgagggcggtgatatctacggaagctatcagcctacttacacatacgccattatcgtccaggaagtcgagcgcgaggacgccgacaactcctcattcctggggaagatataccagatagacatcggctactccgagtacaaaatcgtaagtagcttagacctctacaaattttctcgacctgaggaaagctctcagagcagggatagtgcccccagtaccccaactagccctacagagtttctgacgcccgggctgagatctattcccccacttttctctgggcgagagtcacacaagacttcctcaaagcatcagtctccaaagaaattgaaggtaaatagcctgccagagattttgaaggaagtcacctccgtggtcgagcaagcatggaagctgcccgagagtgagagaaaaaagataatccggagattatatctaaaatggcacccagacaaaaatccagaaaaccacgacatcgccaacgaggtgttcaaacaccttcagaacgagattaatagactcgagaaacaggcttttctcgaccaaaatgcagatagggcatcccgcaggaccttttccacctcagccagccgctttcaatccgacaaatactctttccagaggttttacacttcttggaatcaggaggccacctctcacaagagtgagcggcaacagcagaataaggagaaatgtcctcccagcgccgggcagacttactcccaacgtttctttgtgccgcctaccttcaagtcagtggggaacccagtggaagcccggcggtggctgcgccaagcgagagcgaatttctccgccgcacgtaatgatcttcacaagaacgcgaacgaatgggtctgcttcaaatgctatctgagcactaagcttgctttgatcgcggctgactacgccgtccgcggaaagagcgataaagacgtgaagcccaccgctctcgcccagaaaattgaggagtattcccagcagctggaaggcctgactaacgatgtgcataccctggaagcttacggtgtcgattcattgaagactagatatccggatctgctccctttcccacagatccccaacgatcggttcacctctgaagtggccatgcgtgtgatggaatgtactgcatgcatcatcatcaagctggagaacttcatgcaacagaaagtatag

SEQ ID NO: 135854 - DNA, 7332 bp, synthetic construct
  misc_feature 1..7332: note = Description of Artificial Sequence: Synthetic coding sequence
  source 1..7332: mol_type = other DNA
atggcagcagaggagggggtggcttcagctgccagcgccggtgggagctggggaaccgccgccatgggccgcgtgcttccaatgctccttgttcctgtgcctgctgaagccatggggcagctaggctcccgcgcgcaattgagaactcagcctgaagccttaggatccctcacggccgccgggagtctccaggtattgtctctgaccccaggcagccggggaggaggcaggtgttgcttagaaggccctttctggcactttctgtgggaggattctcgaaacagctcaacaccaaccgagaaacctaaactgctggcccttggagaaaactacgaactgcttatatatgagtttaatctcaaagacggaagatgcgatgcaaccatcttatactcctgctctagagaagcactccagaagttgatcgatgatcaggatatctccatttcactgctttcccttagaatcctaagcttccacaacaacacatcactcctcttcattaacaagtgtgtgattctccacattatcttccccgaacgtgatgctgccatcagagtgctgaactgcttcaccctgcccctgcctgcacaagcagtcgacatgataatcgacactcagctgtgccgggggatactgtttgtactatcttcccttgggtggatctatatattcgacgtggttgacggcacatacgtcgctcacgtagatttagctttacacaaggaagacatgtgtaatgaacagcagcaggaacctgccaaaatctcaagctttacttccctgaaagttagccaagacctggatgtagccgtaattgtttcaagcagtaacagcgccgttgcactgaacttaaatttgtatttcagacaacaccccggacacctcctctgtgaacgaatcctggaagaccttccaatacagggtcctaagggggttgatgaggacgacccggtgaactcggcctataacatgaagctagccaagttttcatttcagattgatcgatcatggaaagcccagctcagttcactgaacgagaccattaaaaactccaagctggaagtttcgtgttgcgctccttggtttcaagacatcctgcaccttgagtcacctgagtccggcaaccactccacttctgtgcaatcttgggcattcataccacaagatattatgcacggacagtataatgtcttgcagaaggaccacgccaaaacttccgaccctggtcggtcatggaaaattatgcatatttccgaacaggaagagccgattgagttaaaatgcgttagtgttacaggcttcacggctttgttcacttgggaggtggagcgaatgggctacaccatcacactctgggacctcgagacccagggcatgcagtgtttcagccttgggaccaagtgtatccccgtagattctagtggtgaccagcagctttgctttgtattaacggaaaatggtctaagcttaattcttttcggactcacgcaagaagaattcctcaaccgcttgatgattcacgggtctgcctcaacagtggataccctgtgccatctcaacggatggggacgatgtagtatccccattcacgccctggaggcaggtattgagaatcgacagttagatacggtaaacttcttcttaaagtctaaggaaaatctgtttaaccccagcagcaagtcatccgtttctgatcaattcgaccacctatcctcccatctgtacctgagaaacgtggaggagctgattcccgcactcgacctgctgtgcagtgctatcagagagtcctacagcgagccccagtctaaacacttttctgagcaattattaaatcttacactgtcattcctgaataatcagatcaaggagctgtttatccacaccgaggaactggatgagcacctgcagaagggggtcaatattctcacctcttatatcaacgagctgcgaactttcatgattaagttcccttggaagctgacagatgctatcgacgagtatgatgtgcacgaaaatgtacccaaggtgaaagaaagcaacatctggaagaagctctcgttcgaagaagtcattgctagtgccatcttaaacaacaaaattcctgaggcccaaacattcttcaggattgattcgcactcggcccagaaacttgaagagctaataggcatcgggttaaaccttgtgtttgacaacctgaaaaagaataacattaaagaagcatctgagctcctcaaaaacatgggattcgacgtgaaagggcaactgttaaagatttgtttttatactactaataaaaacattagggacttcctcgttgagatcctgaaagagaaaaactattttagtgagaaagagaagcgaaccatagactttgttcaccaggtagagaaactctacctcgggcattttcaggaaaacatgcagatacaaagcttcccaaggtactggatcaaggagcaagacttctttaaacacaagtcagtcctggatagctttttgaagtacgactgtaaggacgagttcaataagcaggaccaccgcatcgtgttgaactgggcactgtggtgggatcagctgacacaggaaagcattttgctccccaggatctcccctgaagagtataaaagttacagcccagaagcgctatggcgttatctcaccgctcgccacgattggttgaatatcatactgtggatcggagaatttcaaacacaacatagttacgcctctctgcagcagaacaagtggcctcttctgactgttgatgtaatcaatcagaatacctcgtgtaataactatatgcgcaacgaaatattagataagttagctcgaaacggtgtgttcctggcctccgagctggaggacttcgagtgcttcctgctccggctgtcaaggatcggaggtgtcattcaggatactctgcctgtgcaaaactataagactaaagaaggatgggattttcatagccagtttattctgtactgcctcgagcactccttacagcacctactgtacgtgtacctcgactgttacaagttatccccagaaaattgtccattcctggagaaaaaagaactgcatgaagcacacccttggttcgaattcctcgtacaatgccgacaggtggccagtaacttaacagatccaaagttaatatttcaggcctccttggcaaacgcacagatcctcattcctactaatcaggccagtgtgagttcaatgctgctcgaaggtcacacactgcttgcattggcaacaacaatgtatagcccaggcggcgtttcacaggtggttcagaatgaagagaatgagaactgcttgaaaaaagtagatcctcagctcctgaaaatggcacttactccatatcccaagctcaaaaccgcactattcccgcagtgtacacccccttcagtgctgcccagtgacattactatctatcacctcatccagtcactcagtcctttcgaccccagtaggctgttcggatggcagtccgcaaacaccttggcgattggggatgcgtggagtcaccttccacatttctcctcaccagacctggtgaataaatacgcgatcgtggagcgactgaatttcgcatactacttacataatggtcgaccttctttcgccttcggaacgttcctggtgcaggaactgatcaagtctaagacccctaagcaactcatccagcaggtgggcaatgaagcttatgtcatcggcctgtcctccttccacattcccagcataggggcagcatgcgtgtgttttctcgagcttctggggcttgattcactgaagctacgtgtagatatgaaggtggcaaacatcattctcagctataagtgtaggaatgaggacgcccagtacagcttcatcagagaaagtgtcgcagagaagctgtccaagctcgccgatggggaaaaaaccacaactgaggaactgctggtccttctcgaggagggtacatggaacagcatacagcagcaggaaattaaacggctgtcatcggaatccagttcccagtgggccctggtcgttcaattttgcagattgcacaatatgaagttgagcattagttacctccgggaatgcgcgaaagcgaacgattggcttcagtttatcatccactcacagttacacaattaccacccagcagaagttaaaagcctgattcagtacttttcaccagtgatacaagatcacctcagattggccttcgagaatctgccctccgtgccaaccagcaagatggacagtgatcaagtgtgcaataaatgtcctcaggagcttcaggggtccaaacaagaaatgaccgatctgttcgagatcctgttacagtgctctgaagaacccgacagctggcactggttgcttgtcgaggccgtcaagcagcaggcccccattctgtctgtgctcgcctcttgtctgcaaggcgcttctgccatatcatgtctgtgtgtttggattatcaccagtgtggaggacaatgtggccaccgaggccatggggcacatacaggatagtaccgaagaccacacttggaacctcgaggacctgagtgttatctggagaaccctgttgacccggcaaaaatcgaaaacacttattcgaggcttccagctttttttcaaggactcgcccttattgctggtcatggagatgtacgagctgtgcatgtttttcagaaattataaggaggccgaggctaaactcttggaatttcagaaaagtctggagactttgaacacggctgccaccaaggttcatcccgtgatccctgccatgtggctcgaagatcaggtttgcttcttattaaagcttatgttacagcaatgcaagacacagtacgaactagggaagctcctgcagctgttcgtagaaagggagcaccttttcagcgatggtcctgacgtcaaaaagctttgcattttatgtcagatactgaaagataccagtattgcaattaatcacactatcattacgtcatacagcatagaaaacctccagcacgagtgtagatctattttggagcggcttcagaccgatggacagtttgccctggcgcgaagggtcgctgaactggctgaattacccgtggacaacctagtgattaaagagattacccaggagatgcagacgctcaaacatatagagcaatggtctctgaagcaggcacgtattgacttttggaagaaatgtcatgagaacttcaaaaagaatagtattagtagcaaggccgccagttctttctttagcactcaagcccacgttgcttgtgagcatccaacaggctggtcttcaatggaagagcgtcacctgctcttgacgctggctgggcattggcttgcccaagaggacgtcgtccccttagataagctggaggaactagaaaagcaaatctggttgtgtaggatcactcaacacacactggggcggaatcaggaggagaccgaaccccgctttagtcgtcagatttctacttctggcgaactgtccttcgattcattagccagcgaatttagcttctccaaactcgcggccctcaatacctccaagtatctcgagcttaacagcctgccatctaaggaaacttgcgagaacaggctggactggaaagagcaagaatccttaaattttttgattggtcgcctcttggatgatggttgcgtgcatgaggcctcgcgagtgtgccggtactttcatttttataatcccgacgtggctctcgtgttacactgccgggctctggcatcaggcgaggccagcatggaagacctgcatccagaaattcatgccctcttacaatccgctgagctgttagaagaagaggcccctgacatacctctacgtagggttcatagtaccagctcccttgatagtcagaagttcgttaccgtccctagctccaacgaggtggtaaccaatctggaggtactgacatcaaaatgcctgcacggtaagaactactgtaggcaggttctttgtctgtacgatctggcaaaagaattgggctgtagctacaccgacgtggcggctcaagacggggaggccatgctgagaaagattttggccagtcagcagcctgaccggtgtaagagggcgcaggctttcatatcaacccaagggctcaaaccggacactgtagcggagctcgtggcagaggaagttactagagaattgctgacctctagccaaggcactgggcacaaacagatgtttaaccctacggaggaatctcaaaccttcctccagctgacaacgctctgccaggaccggactctggtcggcatgaaactccttgataagatctcctccgtgccacacggggagctgtcctgtaccaccgaattacttatcctagcacatcactgctttacgttgacatgccacatggagggcattatccgggtgttgcaggccgctcacatgctcacggataaccatttagccccaagtgaggaatatggcctcgtcgttcggctgttgaccggtatcggacggtacaatgagatgacttatatttttgatctcctgcacaagaaacactactttgaggtgctgatgcggaagaagcttgacccctctggaaccttaaaaactgccctgttggactacataaaaaggtgccggcccggcgactcggagaagcataatatgattgctctgtgctttagtatgtgtagagagatcggcgagaatcacgaggctgcggcccgcattcagctgaagctcatcgaatcacagccatgggaggactccctgaaggacggccaccagctgaagcagctccttctcaaagccttgaccctcatgttggatgctgccgagagctatgctaaggatagttgcgtgaggcaagcgcagcactgtcaacgcctcacaaaactgattacactgcagatccatttccttaatacagggcagaataccatgttgatcaacttaggcagacacaaattaatggactgcatactggctttgcctcgtttttatcaagcttccatcgtggctgaagcttatgacttcgtgcccgactgggccgagattctataccaacaagtaatcctgaaaggggactttaactatctcgaagagtttaagcagcagcggcttctgaagtcctcgatatttgaggagatctctaaaaaatataagcagcaccagcccacagatatggtgatggagaatctgaaaaagctcctcacatattgtgaagacgtgtacctctattacaaactggcatatgagcataagttttatgaaatcgtaaacgttcttctaaaggatccacagactggttgttgtttaaaagacatgcttgccggatag

SEQ ID NO: 135855 - DNA, 6993 bp, synthetic construct
  misc_feature 1..6993: note = Description of Artificial Sequence: Synthetic coding sequence
  source 1..6993: mol_type = other DNA
atggcagccgaggaaggcgttgcgtctgcggctagcgcaggcgggtcctgggggacggcagccatgggaagggtgttgccaatgttgctggtgcccgtgcccgcagaagcaatggggcagcttgggagccgcgcgcaactaaggactcaaccagaggccctaggctcattgaccgccgccgggtcactacaggtgttgagtcttaccccgggctccagagggggcggcagatgttgcctggagggccccttctggcacttcttgtgggaggattccagaaatagcagcactcctaccgaaaaacccaagctgctggcattaggggagaactacgagttgctgatatatgaatttaacctgaaggatgggaggtgtgacgccacaatcttgtacagctgttcccgtgaggccctgcagaagcttatcgacgaccaagacatctccatatccctgctttccctccgaatcttgagttttcacaataatacgagtttgctgttcattaacaagtgcgtcattctacatatcatatttcccgagcgggatgcggccatccgggtcctgaattgcttcacactgccattgccggcacaggccgtcgacatgataattgatacacagctttgcagaggcatcctcttcgttctgtcctccctcggctggatctatatcttcgacgtggttgatgggacatatgtggcccacgtggacctggcattgcataaagaggacatgtgcaatgagcaacagcaggagccagcaaaaatcagctcgttcacctcactgaaggtgagccaagacttggatgtggccgtgatagtgtccagctccaatagcgcggtggcactcaacctgaacctctatttcaggcaacacccagggcatttgctgtgtgaacgcattctcgaagatctgccaattcagggccctaagggcgtggatgaagatgatcccgttaattctgcttacaatatgaaactggcgaaattctcattccaaatcgaccggtcatggaaggcacagctgtcttcactgaacgagaccattaaaaacagcaagctggaggtcagctgctgcgccccctggtttcaagatatcctccatttagaaagtcccgagagcggaaaccactcaacaagcgtgcagtcctgggcttttatacctcaggacataatgcacggccaatataatgtgctacagaaagatcatgctaagacttccgaccctgggcgctcctggaaaatcatgcacatcagtgagcaggaggagcccattgaactcaagtgcgtttccgtcaccggttttaccgccctgttcacctgggaggtagagcggatgggctacactattacgctttgggacctggagactcagggaatgcagtgtttctcactgggcacaaaatgcatacctgtggactcatccggagaccagcaactgtgttttgtgttaaccgagaatgggctgagtctgatcctgttcggtctgacccaggaagagtttttgaaccgcttgatgattcacggatccgcatcgaccgtcgacaccctctgtcatcttaacggatggggccgctgctccattcccattcacgccctggaagctggaatcgagaaccgccagcttgacacggtgaacttcttccttaagagcaaggagaatttgtttaacccgtcatccaagtcttcagtgtcagaccaattcgatcacttaagttcacatctgtacctacgcaacgttgaagagctgatccccgccctagatctgctctgctctgccatcagagaatcttactctgagccacagtccaagcacttctcagagcagttacttaatcttacactgtcttttctgaataaccagattaaggagctcttcattcacaccgaagagcttgacgaacaccttcagaaaggggttaacattttaaccagttatattaatgaactcaggacgttcatgattaaattcccctggaaacttactgatgcaatagatgagtacgatgtgcatgagaatgtacccaaagtgaaggagtctaatatctggaagaagctctcctttgaggaagtgatcgcttccgcgattctgaataacaagattccagaggcccagactttcttccgtattgattctcatagtgcgcaaaagctggaggagctgattggcattggactgaacttggtgttcgataacctcaaaaagaacaacataaaggaggcctcggaactcctgaagaatatgggtttcgacgtcaaaggtcaactcctgaagatctgtttttacactaccaataagaacatccgggactttctcgtggagatcctgaaagagaaaaactatttcagcgagaaggagaagcgcacaatcgacttcgtccaccaggtggaaaagctgtacctgggccattttcaagagaacatgcaaatccagagtttcccacgctactggatcaaggagcaagatttttttaagcataagtctgtcctggattcctttctaaagtatgactgcaaggacgaattcaataagcaagatcataggatcgtgttgaactgggcgttgtggtgggatcagctgacccaggaaagcattctcctgcctaggatctctcccgaggagtataagtcatattctccagaggccctgtggcgctacctcaccgcgcgacacgactggctgaatattatactatggatcggtgagtttcagactcaacactcctacgcatccctccagcagaataaatggccgttgctaacagtagatgttattaaccagaacaccagctgcaataactatatgaggaatgagatcctggataagctcgccagaaacggggtcttcctggcctctgagctggaggacttcgagtgctttctgttgaggcttagccgcattggcggcgtcatccaggacactctgcccgttcaaaattacaagaccaaggagggatgggacttccattctcagtttattctctactgtctggagcattctcttcagcatctgctctacgtgtacctcgactgttacaagctgtcacctgagaactgtccttttttggagaaaaaggagctccacgaggctcatccatggttcgaatttctggtccagtgcagacaagttgcaagtaatctgacagacccaaagctgatcttccaggcgtctctagcaaacgctcagatcctcattccgacgaaccaggcaagcgtcagcagtatgctgttggagggacacacgcttctcgcattagcaaccacgatgtattcccccggaggcgtaagtcaggtggtgcagaacgaagaaaatgaaaactgcctgaaaaaggtggacccccagttacttaagatggctctcactccttacccaaagctgaaaacagctctgtttccccagtgcacccctcccagcgtcctgcccagcgatattacaatatatcacctgatacagagcctgtctcctttcgatccgtccaggctgttcggatggcagtcggccaacacacttgcaattggggatgcctggagtcacctgccccacttttcatccccagatctggtgaacaagtacgccatcgtcgaaaggctgaatttcgcttactatctgcacaatggccggccgtctttcgcctttggcacattcctggttcaagaactgatcaagtccaagacaccaaaacagctgatacaacaagtaggaaacgaagcctacgtgattggtctctcttcttttcatattccctctatcggagcagcttgcgtttgcttcctcgagctgctgggtttagactcactgaaactgcgggtggatatgaaggtcgccaatatcatcctgtcttacaaatgtcgcaacgaggacgcgcagtacagtttcatccgagagtcagtggctgagaagttatccaagctggcggacggcgaaaagacgactaccgaagaactcctggtgctcctggaagagggcacctggaactccatccagcagcaggagatcaagagattgagttcagagagctcctcacagtgggcgctagtagtgcagttttgccggctgcataacatgaagttgagcataagttaccttagagagtgcgccaaggccaatgactggttgcagttcatcattcactcccagctgcacaactatcaccccgccgaagtgaaatcgctgatacagtatttctcgcccgtgatccaagaccatttgagattagcgtttgaaaatctcccttccgtcccaacatccaagatggatagcgaccaagtgtgtaacaaatgtccacaggaactccaaggcagcaaacaggagatgactgatcttttcgaaatcctgctccagtgcagtgaggagcccgactcatggcattggctactggtggaagctgttaagcaacaggccccaatactaagtgtattagcttcctgtctgcagggagcgtctgccatatcgtgtctgtgcgtctggataatcacctcggtggaggataatgtggccacggaagctatgggtcacatccaagactccactgaagaccacacgtggaatctcgaagatttaagtgttatttggcggacgttacttactaggcagaagagcaagacacttatccgagggtttcaactgttttttaaagacagccccttacttctcgtgatggagatgtacgaactgtgcatgtttttcagaaattataaggaggctgaggcaaagttgcttgagtttcagaagagtctcgaaactctgaataccgccgctaccaaagttcaccccgttattcctgccatgtggttggaggaccaggtgtgctttctgttgaaattgatgctgcagcagtgtaaaacgcaatatgagcttggcaagcttctgcagctctttgttgagcgcgaacatctcttcagtgatggaccagatgttaagaaactctgtatcctctgtcagatattaaaagatacatctattgccatcaaccataccataatcacatcttattcaatcgagaacctgcagcacgagtgcaggagcattctcgagagacttcagacggacggtcagttcgccttggccaggagagtggcagaattggcggagctccccgtcgacaacttagtcattaaagagataacgcaggagatgcagacactgaagcacatagaacagtggtccctgaagcaggctaggatagacttttggaagaaatgtcacgaaaattttaagaagaactccattagctcgaaagccgcttcttcatttttcagcacccaggcccacgtagcctgtgagcacccaacaggatggtcttcaatggaggaacgccaccttctactgacactggcaggccactggttggcgcaggaagacgttgtgcccctggacaagctggaagagttagaaaaacaaatttggctgtgcaggatcacgcaacacactttaggtcgcaatcaagaagagacagaaccgagattttcccgccagatctcaacctctggtgaactgtcattcgattctcttgcaagcgagttcagtttttctaagctggcagccttaaataccagtaagtacctggagctgaacagcctccctagcaaagagacctgtgaaaacagactcgactggaaggaacaggagtccctgaacttcctgattggccgcctcttggatgatggatgcgtgcacgaggcaagccgcgtctgtcggtattttcacttctacaaccccgacgtcgccctggttcttcactgtcgggctctcgctagcggagaggcctccatggaagacctgcaccccgagatccatgcgctgttgcagtcagccgagcttctggaagaagaagccccggacataccattgagacgcgtgcattcccggcacaagcagatgttcaaccctacagaggagtctcaaaccttcctgcaactgactaccctatgtcaggataggaccctggttgggatgaagctcctggacaaaatttcatccgtccctcatggcgaactgtcctgtaccactgagctccttatcctggcacaccattgctttaccctgacctgccacatggagggaattatacgagtgcttcaggccgcccatatgctcaccgacaaccatctagccccgtccgaggagtacggcctcgtggtgcgtctcctcaccggtattggcaggtacaatgagatgacttacatctttgaccttctgcacaaaaagcattatttcgaagtccttatgagaaaaaaattagatccatcgggaactctcaagacagcccttctagattatattaagaggtgtcggcccggggattcggaaaaacacaacatgattgcactgtgcttttccatgtgtcgggagatcggggagaatcacgaagccgcagcccgtattcagcttaaattgatcgaatctcaaccttgggaggacagtttgaaagatggtcatcagctcaaacagctcctcctgaaggcccttactcttatgctggatgccgctgaatcatatgccaaggattcctgtgtcagacaggcccagcactgccagcgcctcaccaagctaatcacgctgcagatccatttcttgaatacaggccagaatacaatgttgataaatttgggacggcacaaactgatggactgcattctggccctccctaggttctaccaggcctctatcgtcgctgaagcgtacgacttcgtacctgattgggcggagatcctctatcagcaggtgatcttaaaaggggatttcaattatttggaggaatttaaacagcagaggctactaaaaagctcaattttcgaagaaatctcaaagaagtataaacagcaccaacctacagatatggtcatggaaaatctgaagaagctgttgacatactgcgaggacgtttacttatactataaattagcatacgagcacaagttctatgagatagtaaacgtgctgttgaaagacccccagacaggctgttgcctgaaggacatgctagccgggtag

SEQ ID NO: 135856 - DNA, 6240 bp, synthetic construct
  misc_feature 1..6240: note = Description of Artificial Sequence: Synthetic coding sequence
  source 1..6240: mol_type = other DNA
atggccgctgaggaaggtgtggcctccgctgcatcagctggcggtagttggggaaccgctgcaatgggtagggtattgccaatgcttctcgtgcctgtgccagcagaggccatgggacagctggggagccgggcacagttacgcactcaacccgaggcactcggatcattgactgctgccggatcattgcaggtgctctcacttacacctggtagcagggggggtgggcggtgctgcctcgaaggacccttctggcactttctctgggaggattcccgaaacagctcaacacccactgaaaagcccaaactgctcgcccttggggagaattacgaattgttaatttatgagtttaatttgaaagatggtaggtgtgatgctaccatcctttattcatgttcccgcgaagccctacagaaactgatcgatgatcaagacatctctatctccctcctcagtttgcgaatcctgagtttccacaataacacaagcctgctattcatcaacaaatgtgtcatcctgcacatcatttttcccgagagggacgcagccatccgggtgttgaattgttttactctgccgttgcctgcccaggctgtcgatatgatcatcgacacgcaactgtgtcggggaatattatttgtattatcaagcctggggtggatttacatctttgacgtcgtggatggtacatatgtggcacatgtggatctggcccttcacaaagaggacatgtgtaatgagcagcagcaagagcctgctaagatcagttctttcaccagcctgaaggtgtcacaggacttggacgtcgcagtgattgtctcttcatcgaatagtgctgttgctctgaatctgaacctctattttcgccagcacccgggacatctgttgtgcgagagaattctggaggatctcccgatccagggacctaaaggggtggatgaagacgaccctgtgaactccgcgtataatatgaaactggctaagttttctttccagatcgatcggagctggaaggctcagttatccagcctgaacgagactatcaagaattctaaattggaggtgagctgctgcgccccgtggtttcaggacatccttcatctggagtcaccagagtctggcaaccactcaacttccgtccagagttgggcctttataccccaggatattatgcacggccaatacaacgtgctacagaaggatcacgcaaaaacaagtgatcccggtcgttcttggaaaatcatgcatattagcgaacaggaggagcctatcgagcttaaatgcgtgtctgtgacaggctttacggcactgttcacttgggaggttgaaaggatgggttataccatcactctttgggatctggaaacacagggcatgcagtgcttcagtctgggcaccaaatgtatacccgtcgatagctctggggaccagcaactttgctttgtcctaaccgaaaatggactgagtctaatcctgttcggcctcacacaagaggaatttctcaataggctgatgatacacggctccgcaagcactgttgacaccctgtgtcacttgaatgggtggggccgttgcagcattccgatccacgccctggaggccggcatcgaaaacagacagttggacacagtgaattttttcctcaagagcaaagagaatctgttcaacccatccagcaagagcagcgtgagcgatcagtttgatcacctgtcctcacacctctaccttagaaacgtggaggaactcattccagcactcgatttgctgtgctccgctatccgggagtcttactccgagccccaaagtaaacatttctctgagcagctgctaaacctgaccctgtcgttccttaataatcagatcaaagagctttttatccacactgaggaactggacgaacacctgcaaaaaggggttaatatactcactagctatatcaatgagctgaggacattcatgatcaaattcccctggaagcttaccgatgcgattgatgaatacgacgttcatgagaatgtcccaaaagtgaaggagagtaatatttggaaaaaactctcctttgaagaagtgatcgcgtccgcaatcttaaataataagatccctgaggcccagacattcttccgaatcgactcccactcagcccagaagttggaggagctcattgggattggactgaacttggtgttcgataacctaaaaaaaaataacataaaagaagcctcggagctcctaaagaacatgggcttcgacgtaaagggtcagctgctcaagatttgtttttacactaccaataagaacataagagattttctagtagaaattctcaaagagaagaactactttagcgagaaggaaaagcgaactatcgacttcgttcaccaagttgaaaagttatatctggggcattttcaggagaatatgcagatccaatctttcccacggtactggatcaaggaacaggatttcttcaagcacaaatctgtgctggactcattcttgaagtacgattgtaaagacgaatttaacaaacaggatcaccgcatcgtgctgaactgggcactatggtgggatcagctgacccaggagagtatcctgctgccccgaatctcaccagaggaatataagagttattccccggaggcattgtggcggtacctcactgctcggcacgattggttaaatatcatactttggatcggcgaattccagacccagcactcctacgccagcttacaacagaataagtggcccctcttaactgtggatgttatcaatcagaatacgtcgtgtaataattatatgagaaacgagatcctcgataagctggcaagaaacggcgtgttcctagcgagtgaacttgaggacttcgagtgctttttactccgtctgagccggatcgggggggtgatccaggatacactgcccgtccaaaattataagacaaaggagggctgggacttccactcccagttcatcctatattgtttggagcactccttacagcaccttctgtacgtgtacctcgactgctataagctttcgcctgaaaattgccctttcttagagaaaaaagaactacacgaagcccatccatggtttgagttcctagtgcagtgtcgtcaggtggctagcaatctcaccgatcctaagcttattttccaggcgtctctggcgaacgcccaaattctgattccaacaaaccaggcaagcgtgagttccatgctattggaaggtcacactttgttggccctggccacaactatgtactcacctggtggtgtgtcccaagtcgtgcaaaacgaagagaacgagaactgtctgaagaaagtggatcctcagcttctgaaaatggcactgactccatatcctaaactgaagactgcactctttccccagtgcacaccccctagcgtgctaccttccgacatcacgatttaccatctgatccagtccctgtcgccatttgacccctctaggttgttcggttggcagtctgctaacacactcgccatcggggacgcttggtcgcatctgcctcattttagctcacccgatcttgttaacaaatacgccatagttgagcggctaaactttgcctactatttacacaacggaagaccttcctttgcattcgggacttttctggtgcaggaactgatcaaaagtaaaactccaaaacagctgatccagcaggtggggaatgaagcttacgtgattggactcagcagctttcatattcccagtattggggccgcttgtgtttgcttcttggagctcttgggactggacagtttaaaattacgagttgatatgaaagttgcaaatattatcctctcttacaagtgcaggaacgaggacgcccaatatagcttcattagggagtcagtggctgagaagctttcgaagctggcagatggagagaagactacgaccgaggaacttcttgtgctgctcgaagagggcacctggaatagcattcagcagcaagaaattaagaggttgtcttcagagtctagttctcaatgggcattagttgttcagttctgcaggttgcacaatatgaagctctctatcagttacctcagagaatgcgccaaggcaaacgactggttgcagttcataattcatagccaactgcacaactatcaccctgcagaggtaaagtctttaattcagtacttctcccctgttattcaggaccatctgaggttggcctttgagaacctgcctagcgtccctaccagtaaaatggattcagatcaagtctgtaacaaatgcccgcaagaactgcagggtagtaagcaggaaatgactgacctattcgagatcctgctccagtgttcagaagagccggacagctggcattggctgctggtggaggctgtcaagcaacaagcacccatcctgagcgttttggccagttgcctgcagggggcttccgctatctcctgcctgtgcgtgtggattatcacctctgtagaggacaacgtagctaccgaggcaatgggtcatatacaggacagtaccgaggaccatacgtggaatctggaggacctcagtgtgatctggcggaccctgttaactagacaaaaatccaagacgcttattagaggatttcagctgttctttaaagacagtcctctgctgttggtgatggagatgtacgagttgtgtatgttctttcgtaattacaaggaggcagaggccaagctactcgagttccagaagagtttggagaccctgaacaccgccgcaactaaagtccacccagtcattcctgctatgtggctcgaggaccaggtctgcttcttgctgaaactgatgttacaacagtgcaagacccagtacgaacttggcaagttgcttcaactcttcgtggagagggagcacctcttttcagatggtccggacgtgaagaaactctgcatcttgtgtcagatcctcaaagacacgtctattgcaattaaccacacaatcatcactagctactctatcgagaacctccagcacgaatgccggtcaattctggagagactgcagacagatggacagttcgcccttgcgcgaagagtagcagaactggcagagttgcccgtggataacttggtgataaaagagatcacccaggaaatgcagacgctgaagcacattgagcagtggtctctgaagcaggctagaattgatttttggaaaaagtgccacgagaactttaaaaagaactcaatcagtagtaaagcagcctccagcttcttcagcactcaggcccatgtcgcatgtgagcatcccactgggtggtccagcatggaagaacgccacctgctgctgaccctcgccgggcactggctggctcaggaagatgtagtgcctttggataagttagaagaactggaaaaacaaatttggctctgtcggatcacccagcataccctgggcagaaaccaggaagagactgagccccggttttcccgacagatttccacgagcggggagctttcgtttgactccctcgccagcgagttttccttctctaaattggccgccttaaacacgtctaagtatctggagctgaactctctgccctccaaagaaacatgtgaaaatcggctggattggaaagagcaggagtccctcaactttctgatcgggaggctgctagatgatggatgtgtgcatgaggctagccgcgtctgccgatacttccacttctacaaccccgacgtagctttggtcctccactgtagagctctggcaagcggggaggctagcatggaagatctccatcctgagatccatgccctgctgcagtccgccgagttactggaggaagaggcccccgacattcccctcagaagagttcattccacgtcctcgctcgacagtcagaaatttgtcacggtccccagttcaaacgaggtggtgacaaacctagaagttctgacgagtaagtgcctgcacggcaagaactactgtcggcaggtgctgtgcctgtacgatcttgcaaaagagctcgggtgctcttacacagatgtggcagctcaggacggggaggctatgctgagaaagatcttagcttcacagcaacccgataggtgcaagagagcgcaagcctttataagtacccagggtttgaaacccgacaccgttgccgaactggtagcagaggaagtcactagggaactgcttacctcatcacagggtacaggagctctcccaccgggagacagccagcccctctag

SEQ ID NO: 135857 - DNA, 2001 bp, synthetic construct
  misc_feature 1..2001: note = Description of Artificial Sequence: Synthetic coding sequence
  source 1..2001: mol_type = other DNA
atggaacaagagcctcagaatggggagccagccgagattaaaataattcgcgaggcatataaaaaagcttttcttttcgtgaataaaggcctcaacacggacgaattgggccagaaagaggaagcgaaaaattactacaaacaggggatcgggcacctacttcgaggcatcagtatttctagtaaggaatctgaacacaccgggcccggatgggagtccgctaggcagatgcagcagaagatgaaggaaacgcttcagaatgtgagaactcgcctggagattcttgaaaaggggttagctacgagtttgcaaaatgaccttcaggaggtgccgaagctctatcccgagttcccccctaaggacatgtgtgagaagctgcctgagccacaatctttcagttcagctcctcaacacgcagaggtaaatggaaacacatccacgccgtctgctggtgcagtagcggctcctgcgagcctgagcctaccttcccagagctgccccgccgaagctcctcctgcatacacccctcaagcagctgaaggccattatactgtgagctatgggaccgattctggtgaattttcctctgtgggagaggagttttacagaaatcattctcagcccccccctctggaaacgctgggcttagatgcggacgagctgatcctcatccctaacggtgtgcaaatatttttcgttaaccctgccggcgaagtgtccgcgccgagttaccccgggtaccttcgcatcgtccgctttctcgacaacagtttggacacggtgctgaatagacctcccgggttcctgcaggtctgtgattggctttaccctctggtgccagatcgttccccagtccttaaatgtaccgcgggcgcatacatgttcccagatacgatgctgcaggccgctggctgttttgtaggggtcgtgctgtcaagtgagctcccagaggatgaccgggaattattcgaggacttacttcgacaaatgtccgatcttaggctacaggccaactggaaccgcgctgaagaagaaaacgaattccagattcccggccggacgaggccatctagtgatcaactgaaggaagcttccgggaccgatgtcaagcagctcgaccaggggaacaaggacgtgcgccacaaggggaagcgggggaagcgggccaaagatacatcgtcagaggaggttaacctgagccacatagtgccttgcgaaccagtaccagaagaaaaacctaaggaacttcctgaatggtcagagaaggtagcacacaatatcttgtccggggcctcatgggtctcatgggggcttgttaagggcgcagaaatcacaggcaaggctatccagaaaggggccagtaagctgagagagcgaatccagcccgaggaaaaacccgtcgaggtcagtcccgccgtgactaaaggcctctacatcgctaagcaagccactggcggcgcagccaaagtgagccagttcctcgtggatggcgtttgtactgtcgcgaactgtgtggggaaggaattggcccctcatgtaaaaaagcacggctcaaaactggtccccgagagtctcaagaaggacaaggacggcaaatccccgctcgacggggctatggtagtggctgcctcgagtgttcaaggtttcagtaccgtctggcaggggcttgagtgcgcagccaaatgcatcgtcaataacgttagtgccgagaccgtgcagacagtcagatacaaatatgggtacaatgctggggaggcaacccatcatgctgtggacagcgccgtgaatgtaggagttaccgcttataatattaacaatatcgggatcaaggcgatggtgaagaagaccgcaacacaaacaggtcatacgctgctggaagattaccagatcgtcgacaatagccaacgggaaaaccaggaaggggccgcgaatgttaatgtcagaggtgagaaagatgagcagacaaaggaagttaaggaggcaaaaaagaaagacaaatag

SEQ ID NO: 135858 - DNA, 2001 bp, synthetic construct
  misc_feature 1..2001: note = Description of Artificial Sequence: Synthetic coding sequence
  source 1..2001: mol_type = other DNA
atggagcaagaacctcagaatggggagcccgcagaaatcaaaatcatcagggaagcatataagaaggcattcctgtttgttaacaaggggctaaataccgatgaacttggtcagaaggaggaggctaagaattattacaagcaaggcatcgggcatcttctcagaggtatatctatttcaagcaaagagtctgaacacactggccctgggtgggagtccgctagacagatgcagcaaaagatgaaggaaactctgcagaatgtgaggacaaggctcgaaatcttagaaaaggggttagctacatcattacagaatgatttgcaggaggtgcctaaactatatcccgaatttccccccaaggacatgtgtgaaaaattaccagagccccagtcgttctcatccgctccacagcacgcggaagtgaacggcaatacttccacacctagcgcgggggccgtcgcggcccccgcgagcctgagcctcccctcccaatcctgccccgccgaagcaccccccgcttataccccccaggccgccgaaggtcattacaccgtgtcttatggcacagactcgggggagtttagctctgtcggcgaagagttttacaggaaccatagccagccaccccccctggagacactgggtctggatgctgacgaacttattcttatccctaatggggtacagatcttctttgtgaatcccgccggtgaggtcagcgctccttcctaccccggatacctccgcattgtaagattccttgataacagcctcgacactgtgctgaatcggccaccaggctttttgcaggtgtgtgattggttatacccactggtgcctgacagaagtcccgtactgaagtgtactgctggtgcctacatgtttcccgataccatgttacaggcagccggttgcttcgttggagtcgtgctgagcagtgagctacccgaggacgaccgggaactctttgaagacctgctccgccaaatgtccgaccttagacttcaggccaattggaatcgcgcagaagaggaaaatgagtttcagatcccggggcgcacgcggccgtcatccgaccagctcaaagaggcttccggtacagacgtgaaacagttagatcagggaaataaagacgtacggcacaagggaaagcggggtaaacgagctaaggataccagctccgaggaggtcaacctctctcatattgtgccatgtgaacctgtccccgaggaaaaacctaaagagctgcctgaatggtcggagaaggttgcccacaacatcctctccggggccagctgggtctcatggggtctcgtgaaaggggcggagataactggtaaggccatccagaagggggcttctaaacttagagaaaggatccagccagaggagaaacccgtcgaagtcagtccagcggtcaccaaggggctttacattgccaagcaggcgaccgggggcgctgccaaggtgagtcagttccttgttgatggcgtgtgtaccgtagcaaactgcgtgggaaaggagctggcacctcacgtgaagaaacacggttctaaactggttcctgagtccctgaaaaaggacaaagatggtaaatctcctctggatggggccatggtcgttgcagcatccagcgtgcaaggcttctccaccgtatggcaaggtctagagtgcgccgccaaatgtattgtcaataacgtaagtgccgaaaccgtgcagaccgtgcggtataagtacggatacaacgcaggtgaggccactcatcacgctgtggacagcgccgtgaacgtaggcgtgaccgcatacaacattaataatatcggaatcaaggccatggtaaaaaagaccgccactcagactggtcacacccttctggaagactaccagattgttgataatagccagagggaaaaccaggagggggccgctaacgtgaacgtcaggggcgagaaagatgagcagaccaaggaggttaaagaagcaaaaaagaaagacaagtag

SEQ ID NO: 135859 - DNA, 2001 bp, synthetic construct
  misc_feature 1..2001: note = Description of Artificial Sequence: Synthetic coding sequence
  source 1..2001: mol_type = other DNA
atggaacaggagccgcaaaatggggagcccgcggagattaaaatcattagagaggcatacaagaaagcgttcctgtttgtcaacaagggattgaacactgatgagctagggcagaaggaagaggcaaagaactattataagcagggaataggccacctccttaggggcatctccatatcatccaaggaatctgagcacacaggtccaggctgggagtccgcgcgccagatgcaacagaaaatgaaagaaactctgcagaacgtgcggacccgactcgaaattctggagaaagggcttgctactagcctgcaaaatgatttacaggaggtgcctaagctttacccggagtttcctccaaaagatatgtgcgaaaagcttcctgaaccgcagtccttcagtagcgcgccccaacatgctgaggtgaacggaaatacctctacccctagcgctggcgccgttgcggcccccgcctctctctctttacccagccagtcatgccccgccgaggcccccccagcgtacaccccccaggcggcagagggccactacaccgtcagttacggcactgattccggggagttcagtagcgttggtgaagaattttacagaaatcactcccagcccccacctttggaaacccttggccttgacgccgacgagctgatcctgatcccaaacggggttcagattttcttcgtcaatccagctggggaggtgtccgcacccagttaccccggctacctgcgtattgtgcggttcctcgacaactctttggacaccgttttgaacagacctcctggctttttgcaggtgtgtgactggctgtatcctctagttcccgaccggagtccagtgttaaagtgtacggcaggcgcctacatgttccctgacacaatgttgcaagccgccgggtgttttgtgggagtcgttctgtcctcggagcttccagaagacgacagagagctgtttgaggatctgctgaggcagatgtcagatttacgcctgcaagccaactggaaccgcgcagaagaagaaaacgaatttcagatccctggccggacccggccaagttcagaccaattaaaagaagccagcggaacagacgtcaagcagctggaccagggcaataaagacgtgcgccataaaggcaagaggggcaaacgggctaaggatacatccagcgaagaggttaacctatctcacatcgttccctgcgagcctgtgccagaagagaagcccaaggagctacctgagtggtcagagaaggtagcccataatattctgagtggtgcaagttgggtgtcttggggtttagttaaaggcgccgaaattacaggaaaggccattcaaaagggcgcctcgaagctgcgggagagaatccagccggaagagaaaccagttgaggtgagtcctgccgtgactaagggactgtatattgctaagcaggctactggtggcgcagccaaagtctctcaatttctggtagacggtgtttgcacagtggcaaattgcgtggggaaggagctcgcaccccacgtaaagaaacatgggagcaaactggtgcccgagtcacttaagaaagataaagacggcaaatcccccctcgatggcgcaatggtggtggctgccagttctgtgcagggtttcagcaccgtatggcagggcctcgaatgtgccgccaaatgcatcgtcaataatgtgtctgcggagaccgtgcagacagtcagatacaagtatgggtacaatgccggggaggccacacaccatgcggtcgattcagctgtcaacgttggcgttactgcttacaacatcaacaatatcgggataaaagctatggtgaagaaaacagccacacagaccgggcataccttactggaggattaccaaattgttgataactcacagagggaaaaccaggaaggagccgccaacgtcaatgtgcgtggagaaaaggatgagcagaccaaggaagtgaaagaagcaaagaaaaaggacaaatag

SEQ ID NO: 135860 - DNA, 2001 bp, synthetic construct
  misc_feature 1..2001: note = Description of Artificial Sequence: Synthetic coding sequence
  source 1..2001: mol_type = other DNA
atggaacaagagcctcagaacggtgaacctgccgaaataaaaatcataagggaagcttataagaaagccttcctgttcgtcaataaagggcttaacaccgacgagctgggacaaaaagaggaagccaaaaactactacaagcaaggtatcgggcatctgctacgaggaataagcatctccagtaaagaaagtgagcacaccggacctggctgggagagcgccaggcaaatgcagcagaagatgaaggagaccctgcaaaacgtgagaacgagattagagatcctggagaaagggctggcaacttcactgcagaatgacctgcaagaggtgcctaagctgtaccccgaattcccaccaaaagatatgtgtgagaagctacctgaacctcagtctttttcctccgccccacagcatgctgaagtgaacgggaacacatccacaccctctgcaggagccgtggcagctccggctagtctgtctctgccatctcagtcgtgccccgctgaggcccctcccgcctacaccccgcaagcagcagaaggtcattacacagtctcttacggcacagactccggggagttttcctccgtgggcgaggaattctaccggaaccattcccaacctccccccttggaaactctgggtctggatgccgacgagctgattctgattccaaatggggtgcagattttttttgttaacccagcgggcgaagtttcagccccatcttaccctggttacttgcggatcgttagattcctggacaactcactcgacactgtgttgaatcggcctcccgggtttctgcaggtatgcgattggctgtatcccctggttcccgatcggtcacccgtactaaagtgcaccgcaggcgcctacatgttccccgacactatgctccaggccgctggttgctttgttggtgtggtgctgagctccgagctccctgaagatgaccgggaactctttgaagatctgctgcgacagatgtcggatcttcgtctccaggccaattggaatcgtgctgaagaagagaacgaattccagatacccgggcgcactagaccttcaagcgatcagcttaaagaggccagcggaacggatgtgaagcaacttgatcaggggaacaaggacgttagacataagggcaagagaggcaagcgagcgaaggacacctcaagcgaagaagtcaacttgtcacacattgtcccatgtgagcccgttcccgaggagaagccaaaggaacttccggagtggtccgagaaggtggcccataacatcctgagcggagcttcctgggtgagctggggtttggtgaagggcgcagagattactggtaaagctattcaaaaaggagcttcaaaactgagagagagaattcagcccgaggaaaagcctgtggaggtctcccccgccgtgactaaaggcctgtatatcgccaagcaagctaccggaggagccgctaaggtgagccaattcctcgtcgacggagtgtgtacagtcgccaattgcgtggggaaagaactggcaccgcacgttaagaagcatggatctaaacttgtccctgagagcctcaaaaaagacaaggatggtaagtcccccctagatggagcaatggtggtcgccgcgtccagtgtgcaaggcttttcaacagtatggcagggccttgagtgcgctgcaaagtgcattgtcaacaatgtgtccgccgaaaccgtgcagaccgtacgatataagtacgggtataatgccggagaagcaacgcatcacgctgtcgatagtgctgttaacgtcggcgtaacagcttataacattaataacataggcataaaggcaatggttaaaaagactgctactcagaccgggcacactctgctggaggattaccagattgtcgacaactctcagagggagaatcaggagggagctgcgaatgtgaacgtacgaggtgagaaagatgaacagacaaaagaggttaaagaagctaagaagaaagataagtag

SEQ ID NO: 135861 - DNA, 846 bp, synthetic construct
  misc_feature 1..846: note = Description of Artificial Sequence: Synthetic coding sequence
  source 1..846: mol_type = other DNA
atgggggagatcaaagtgtccccggattacaattggtttaggggcacagttccgctgaaaaagatcatcgttgacgatgacgattccaagatctggagtctttatgatgcaggcccacgttccattcgatgtccgctcattttcttgcctcccgtgagtggcaccgcggacgtcttttttagacagattctggctctgactggttggggatatagggttattgccgtgcacctgttcggcgcgtcactcggaggcttcctggcccagaaattcgctgaatatactcataaaagcccccgtgttcactctctcattctgtgtaattccttctctgacacaagcatttttaaccagacctggaccgcaaacagcttctggttgatgcccgctttcatgctcaagaaaattgtattgggcaatttttcatctggcccagtggatcccatgatggcggatgcgatagacttcatggtggatcgtttggaatcgttagggcaatcagagttagctagcaggctgaccttgaactgccagaattcctacgttgaaccgcacaagatccgagacataccagttaccataatggatgtgttcgaccagtccgctctgtctacagaggctaaggaggagatgtataaactgtatccaaacgcgagacgggctcacctgaagacaggagggaatttcccctatctgtgcaggtcagcagaggtgaatctttacgtgcaaatacatctgctgcagtttcacggaacaaaatacgcagctatcgacccatcaatggtgagcgccgaggagctcgaagttcagaagggatcactggggataagccaggaggaacagtag

SEQ ID NO: 135862 - DNA, 927 bp, synthetic construct
  misc_feature 1..927: note = Description of Artificial Sequence: Synthetic coding sequence
  source 1..927: mol_type = other DNA
atgggagaaataaaagtatcacctgactataattggttccgagggacagtccctctgaagaagatcattgttgatgatgacgacagtaagatttggagcctctatgacgctgggccaaggagtatcagatgccctctgattttcctccctccagtgagtggcactgcagacgtgttctttagacagatcttggccctgactggatgggggtatagagtgattgctttgcagtatccagtgtattgggaccacctcgagttttgtgatggattcagaaagctactggaccatctgcagctggacaaggtgcacctgtttggtgctagcctgggcgggtttctggcccagaaatttgctgaatatacccataagagtcctcgagtccactctttgatactctgcaatagttttagcgatacatctatcttcaatcaaacctggactgcgaattctttttggctgatgccggcctttatgttgaagaagattgtgttgggcaacttcagctcaggcccagtcgacccaatgatggccgatgccatcgattttatggttgatcgcctcgaatctttgggccagtccgagctggcatcgcgcctgacattgaattgccagaactcctatgtggaacctcacaagattagagatatccccgtgacaattatggacgtgttcgaccagagcgctcttagcacggaggctaaggaagagatgtacaagctgtaccccaacgcccggcgtgcccatctgaaaacagggggcaacttcccttacctgtgtaggtccgctgaggttaacctgtacgtgcagatccacctgcttcagtttcacggcacaaaatacgctgcaatcgacccatcgatggtgagcgcagaggagctagaagtccaaaagggctccctaggaatctcccaggaggagcagtag

SEQ ID NO: 135863 - DNA, 927 bp, synthetic construct
  misc_feature 1..927: note = Description of Artificial Sequence: Synthetic coding sequence
  source 1..927: mol_type = other DNA
atgggggagatcaaggtcagtcccgactataactggtttcggggaactgtgccactcaaaaagattatcgtggatgacgatgactccaagatttggtcactgtatgacgctggcccccgctctatacggtgtccattaatttttctgccacccgtttctggcaccgccgatgtcttctttagacagatccttgccttgacaggctgggggtatcgggtaattgcactgcagtaccccgtctattgggaccatctggagttctgtgatgggtttcgtaagcttttggaccacctgcagctcgataaagtacacttgtttggtgcctctctcgggggcttcctcgctcagaagttcgcggaatacactcacaaatcccccagggtgcacagcctgatcttgtgcaattcgttctcagatacatcaatcttcaaccagacctggaccgccaacagcttttggctgatgcccgccttcatgttgaagaagattgtgctcggtaacttctcatccgggcctgtggacccgatgatggcagatgccatcgactttatggtagaccgcctggagagcctggggcaaagtgaactagcttcaaggcttacactgaactgccagaactcttacgtggagccccataagatcagagacatccctgtgaccatcatggatgtttttgatcagtcagcgctttctaccgaggcaaaggaggagatgtacaagctctatccgaatgcaagacgcgcacacttgaaaactggaggcaacttcccgtacttgtgtcgaagtgccgaagttaatttgtacgtgcagatccaccttcttcagttccatggaactaagtacgccgctatcgatccgtcaatggtctctgctgaagagctagaggtgcagaaaggttcactgggtatctctcaggaggagcagtag

SEQ ID NO: 135864 - DNA, 2388 bp, synthetic construct
  misc_feature 1..2388: note = Description of Artificial Sequence: Synthetic coding sequence
  source 1..2388: mol_type = other DNA
atggccgttctgctgctcctgctgcgcgctctcaggaggggtcccggtccgggtccaaggcccttatggggtcctggaccggcatggagccccggattccccgctaggcccggacgaggccggccctatatggcaagtcgtccgccaggtgatctggccgaagctggaggacgagccctgcaaagtcttcagctgagattactaacgccaaccttcgaaggcataaatggtctcttactcaagcagcatctggtgcagaatcctgtgcgcctttggcagctgctggggggaactttttactttaacacgtcccgtctgaaacagaaaaataaggaaaaagacaagtccaaaggaaaagcacctgaggaagatgaggaagaaaggcggcgacgtgagcgtgatgaccagatgtatagggagaggctccgtacactgttggtgatcgccgtcgtgatgtcccttctgaacgccctctccacgtcaggaggcagtatatcatggaatgactttgtgcatgagatgcttgctaagggagaggtgcagagggttcaagtcgtgccagaatcagatgtggttgaagtctatcttcatcctggggctgtggtcttcggcagaccgcggttggcactcatgtaccgcatgcaggtggcgaacatcgataagtttgaagagaaactgcgggccgctgaagacgaattaaatatcgaggctaaggataggatcccagtctcctacaaacgcaccggattctttggcaacgccctttactcggtggggatgacagccgttgggcttgcaatcctgtggtatgtgttcaggctggcaggcatgacagggcgcgagggtggattttccgccttcaaccaactaaagatggcccgttttacaatcgtagacggcaaaatgggcaagggcgtttcctttaaagacgtggcaggaatgcacgaggcaaagctggaagtgagagagttcgtcgattatctaaaatcacctgaacgctttctgcagctcggcgccaaggttcctaagggagctctgctcctgggtcccccaggctgcggcaagaccttgctagccaaggccgtggcaactgaggcgcaagtgccctttttggccatggccgggccagagttcgtggaagtcatcggggggctgggtgcggcgcgcgtacgaagtttatttaaggaagcgagggccagagcaccatgcatagtgtacattgacgaaattgatgcagttggtaaaaaaagatcgaccactatgtctggattttccaacacagaagaggagcaaaccttgaaccagctcctcgtcgaaatggatggcatggggactactgatcacgtcattgtgttagctagcacaaacagagcagacattcttgatggcgccttgatgcggcccggcagacttgacaggcatgtcttcatcgatctgcctacactgcaggaacgtagagagatatttgaacagcacctcaaatcacttaaactgacccagagttctacattttatagccagcggctggccgaattaactcccggcttcagcggcgccgatatagctaatatatgtaacgaagccgcacttcacgctgcgcgcgagggtcacacttctgtgcacaccctaaacttcgagtacgcagttgaaagagtgctcgccggaaccgcgaaaaagtccaaaatcctgagtaaagaggagcagaaggtagtcgcttttcacgaatcaggacatgcactggtaggctggatgctggagcatacagaagcagttatgaaggtgtcaattacccctcgaacaaacgccgcgttagggttcgcacagatgcttccccgggaccaacacctgttcactaaggagcagctgtttgagaggatgtgtatggccctgggcggccgcgcatccgaggcactgtcgtttaacgaggtgactagtggggctcaggacgacctgaggaaggttacccggattgcctatagtatggtgaagcagtttggaatggctcccggaatcggccctatttccttccctgaggctcaagaaggactcatgggtatcggtcgaagaccgttttcccagggactgcagcagatgatggaccatgaagccaggcttctggtcgccaaagcgtatcgccataccgaaaaagtgcttcaggacaacctcgataagcttcaggctctcgcaaacgcactgctcgagaaggaggtgattaactatgaagacattgaagccctgataggcccccctcctcatgggccaaaaaaaatgattgctcctcagcgctggattgatgcccagcgggagaagcaggacttaggcgaggaagaaacagaggaaactcaacagccaccgcttggcggcgaggagcctacatggccaaagtag

SEQ ID NO: 135865 - DNA, 672 bp, synthetic construct
  misc_feature 1..672: note = Description of Artificial Sequence: Synthetic coding sequence
  source 1..672: mol_type = other DNA
atgaggctcaggtgtacccgcagagggagagataccttaccgtgcacactgtctacatcgagcaccccatggagcgctagtagccaggtgcccagggcacaactcggaaaggcagtggggagctgcagaggagtggggagctgctgcgcaagacactgtaaaacacacttggctagccttcgccagccatgcggggagagaacaggagcagcctgtgtcttgctgatttactttcgggttactatttatttctacgtcgagatcgaaaagctactcatcatcgtcgcaaagcaggaaggattaagcggcaaccacaaacccgtcgagcggaaatatatgacttacctgtccgcccaggatcacgagcttattcaggtggtccagaacggccacctacaaatgtgtggcaagtcagagactggaaacgaagccagcccaggtctgcccaaacgtgctcgaagctgccctaggaaaaatcggaaatggcttcggttcatgagcagagctaccccgtggtgggccgggtgttggtcaaccaggcgggatgagggcttgcacaatcccagtacaaatgccgcactgggattcgcacaggcccctcagagaccagctcctttgcatgaacagttgtttgaacggatgtgtatggccctgggaggccgcgcctcctag

SEQ ID NO: 135866 - DNA, 618 bp, synthetic construct
  misc_feature 1..618: note = Description of Artificial Sequence: Synthetic coding sequence
  source 1..618: mol_type = other DNA
ttgggtccccaggcatgtaccgtggtgcctaggtctaaatgctttgaccttgagatggtgtcgagccggtgggagcccctgctcttactgactgaagttacatctgcaaacgaggtctgggttacctctaactctactgctctagttttcgttagcgataacgtgagggaggagctcgaggaggtgcaagatctcctgtgcagaacgctgcctctgcccgtccaactgtcatttcccgaggaagccctggacgtggcgagggtggctcacgtctttgtctcccccttctgcttttccgctgggtctgaggagagacgccgacgagagagggatgatcaaatgtatagggaacggctgaggactttgctggtcatcgcggtcgtgatgagtttgttgaacgcactcagtacttccgggggcagcatcagttggaatgactttgttcatgagatgctggccaagggcgaagtgcagcgggtgcaggtggtgccagagtcagacgttgtggaggtgtatttgcaccctggcgctgtggtgttcggcagaccaaggctcgcccttatgtaccgtatgcaggtggcaaatattgacaagtttgaggaaaagctccgagcgtag

SEQ ID NO: 135867 - DNA, 1470 bp, synthetic construct
  misc_feature 1..1470: note = Description of Artificial Sequence: Synthetic coding sequence
  source 1..1470: mol_type = other DNA
atggctgtgctgctgctgctactgagggcactgaggagaggccctgggcctggccctaggccactgtgggggccaggacctgcatggtctcctgggttcccagccagacctggaagggggagaccttatatggcatcacgcccgccgggggacctggctgaggcaggtggccgtgctttacagtcgttgcagcttcgcttactcaccccaacctttgaggggataaacggactgcttctgaaacagcatctggtgcagaacccagttcgcctctggcagctgctcggagggaccttctacttcaacacttcccgcctgaagcagaagaacaaggagaaggataaaagcaaggggaaagctcccgaggaggacgaggaagagcgccgaaggcgcgagcgagacgatcagatgtacagggagaggttacgaactctcttggtgattgcagtcgtaatgtcattactgaacgccttgtccacatccggaggaagcatttcatggaacgattttgttcatgaaatgctggctaaaggagaggttcagcgagtgcaagtggtgcccgaaagcgacgttgtggaagtgtacctgcaccccggagcagttgtgtttggcaggccgcggctcgccctgatgtaccggatgcaggtagcaaacatagacaaattcgaagaaaaactgcgggcggccgaggatgaactcaacattgaagcgaaagatcgtattcccgtgagctacaagcgaacaggcttcttcgggaatgccctctattctgtcgggatgactgccgtggggctcgctatcctgtggtatgtgttccgcctagcaggtatgaccgggagagaaggcggcttctctgccttcaatcagctgaaaatggcgcgatttacaattgtcgacggaaaaatgggtaagggcgtctcctttaaggatgtcgctggaatgcatgaagcaaaactcgaggtgagagaattcgtggactacctcaagtcccccgagcgcttcctccagctgggtgccaaagtccctaagggagcgctgttgcttgggcctcccggctgtggaaaaactctgctggcaaaggcagtggcaaccgaggcccaggtcccctttctcgctatggctggacctgagttcgtggaagtgatcggaggcctcggggccgcccgagttcgcagcctatttaaggaagcaagggctagagccccttgcatcgtttacatcgacgaaatcgatgccgtggggaagaaacggagcaccactatgtccggttttagcaacacagaagaggaacagacactcaaccagctgctggtcgaaatggacggcgcatccttggatcagcttccctcacagggcacgatgagaaagctccgtgggaagactccagcctgttcatgtctaaccgagcctactggatcccgcagggccatggaagggcacagcctgtgctggggatgtcttctccactag

SEQ ID NO: 135868 - DNA, 1851 bp, synthetic construct
  misc_feature 1..1851: note = Description of Artificial Sequence: Synthetic coding sequence
  source 1..1851: mol_type = other DNA
atgaactcaccagggggccggggaaagaaaaagggttctgggggcgcatccaaccctgtgcctcccaggcccccccccccatgtctcgctccagcacctcctgcggccggacctgctcctcctccagagtccccgcacaagaggaacttgtactatttctcgtacccgttgtttgtggggtttgcactcctgcgtctcgtggcattccacctgggcctcttgtttgtgtggctctgccagaggttctccagggcactcatggccgctaaacgatcctctggggctgcccctgctcctgcatccgcaagtgccccagccccggtgcccggtggcgaggcggagagagttagggtgtttcacaagcaggcgttcgaatacattagcatcgcgctgagaatcgacgaggacgagaaagccggccaaaaagaacaggccgttgagtggtacaagaaaggaattgaggagctcgaaaaagggatcgcagtgattgtgacaggacagggggaacagtgcgagcgagcacgccgcctgcaggccaaaatgatgactaacctcgtgatggccaaagatagactgcagttgctcgagaaaatgcaacccgtgctgcccttctcaaagagccagactgatgtgtataatgactcaacgaatctggcatgtcgtaacgggcacctccagagtgagagtggagccgtgcctaaacgcaaagatcccctgacacacacatctaactctcttcccagatccaagacagtgatgaagacaggtagtgcaggcctgtctggccaccaccgcgcgcccagctactcaggcctgagtatggtttcgggggtgaaacagggtagcggcccagcaccaaccactcataaaggtacaccaaagactaacagaaccaataaaccttcaacgccgaccacagccacacgaaaaaaaaaagacctgaaaaattttcgtaatgtggacagcaatctcgcgaacttaatcatgaacgaaatcgtggacaacgggacagctgttaagtttgacgacatcgccggacaggacttagctaagcaggctctgcaggagatagtcatactgccctctctacgtccagaactgttcactgggttgcgtgcaccagcccgcgggctgctgctgttcggtcccccaggaaatggcaagaccatgttggccaaggctgtggctgccgaaagtaacgccacttttttcaacatttccgccgcctccctcacttccaagtatgtgggggagggtgagaagcttgtcagagcgctcttcgctgttgcccgggagttacagccgtcaatcatattcatcgatgaagtggactcattactttgcgagcgccgcgagggcgagcatgacgcttctcggcgcctgaaaaccgagttcctgatcgagttcgacggggttcaaagtgccggagatgatagagtgctggtgatgggagccactaatcgccctcaagaactggatgaagctgttctaagacgatttatcaagcgcgtatacgtgtctctacctaatgaggagacgcgtctcttgttgctcaaaaacctcctctgtaagcaaggcagccctctaacacagaaagaactggcccagctggcaaggatgacagacggctattctgggtcggatcttacggctctggctaaggatgccgcactgggcccgattagagagctcaaaccagagcaggtcaagaacatgagcgcatcagagatgcgcaacattcggctcagcgacttcacggagtccctgaaaaaaatcaagcgaagcgtcagtcctcagacactggaggcctacatccgatggaacaaggacttcggtgacaccacagtttag

SEQ ID NO: 135869 - DNA, 1755 bp, synthetic construct
  misc_feature 1..1755: note = Description of Artificial Sequence: Synthetic coding sequence
  source 1..1755: mol_type = other DNA
atgaactccccgggaggccgcggaaagaaaaagggcagcggaggagcctcaaatccagttcctccccggccccctcctccctgcctggcgccagcacctccggccgccgggcctgctccccctcctgagtctcctcataaaagaaatctttattatttcagttatcccctcttcgttgggttcgccctcttgcggctggtggcatttcacctggggctcctcttcgtatggctctgtcaacggttctctagagcactcatggccgccaaacggtcctccggggctgctcctgcacccgcgtcggctagcgctcccgcgcctgtccctggaggcgaagccgaacgcgtgagagtgtttcataaacaggctttcgaatacatcagcatcgcactgcgcatcgatgaggacgaaaaagctggccagaaagaacaagccgtcgagtggtataagaaggggatcgaggaattggaaaaaggtatagccgtgattgtgactggtcagggtgagcagtgcgaacgcgccagaaggctccaggctaaaatgatgaccaacctcgtgatggctaaggacagactgcagctgcttgagtctggtgccgtaccgaagcgtaaggacccactcacacacactagcaatagcctcccacggtcgaagactgtgatgaagaccggcagcgctgggctcagcggacatcaccgggcaccctcatattctgggctatcgatggtaagcggagtcaagcaggggtctggtccagccccaaccacacataagggcaccccgaaaacaaacagaaccaacaaaccaagtacccccaccactgcgacccggaagaagaaagatctgaagaacttcagaaacgtcgattctaatctggccaatctcataatgaatgagattgtcgacaacgggacagctgtgaaatttgacgatattgccggacaggacttggccaagcaggctctacaggagatcgtcatcctcccgagtctaagacccgaactgtttaccggactgagagctcctgctcgaggtttgctactgttcggccctccaggaaatggcaagacaatgttggccaaagctgtggcagctgaaagtaatgccacattttttaacatttctgctgcatccctgaccagtaagtacgtgggcgagggcgaaaagctggtgcgggctctttttgcggtggctagagagttacaaccctcaatcatcttcatcgatgaggttgattcactgctgtgtgaacgaagggagggggaacacgatgctagcaggcgactgaagacggaatttctgatcgaatttgacggagtacagtctgctggagatgaccgagtgctggttatgggagctaccaataggcctcaagaacttgacgaagccgttctcagaagatttataaagagagtatacgtcagcttgcctaatgaagaaacacgactgctcttactgaaaaatctgctgtgtaagcaaggtagccctctgacccagaaggaactcgcccagctggcccgcatgactgatgggtattccggcagcgacctgacagcactggccaaggacgcagcactgggcccaattagggagttgaagccagaacaagttaaaaacatgagcgcgtcggaaatgcggaacatccggctgagcgactttacagagtccttgaagaaaatcaaacgtagtgtgtccccgcagaccctggaggcctatatccgatggaataaggattttggagataccacagtgtag

SEQ ID NO: 135870 - DNA, 26394 bp, synthetic construct
  misc_feature 1..26394: note = Description of Artificial Sequence: Synthetic coding sequence
  source 1..26394: mol_type = other DNA
atggccacatccagaggggccagcaggtgtcctcgagatatagccaacgtaatgcagcgcctgcaggatgagcaagagatagtacagaaacgtacttttactaagtggattaattcgcacttggccaaaagaaagccccctatggtcgtggatgacctgttcgaagacatgaaggatggcgtgaagttactggcgctccttgaggttctttccgggcagaaattgccatgcgaacaaggaaggcgaatgaaacgcatccatgcggtcgctaacatcggcactgcgctaaagttcctggagggcagaaagatcaagcttgttaacattaactccacggatatcgctgacgggcgcccatcgatagttttaggtctcatgtggaccatcattctctattttcagatagaggaactcactagcaacctacctcaactgcagagcctcagtagctccgcctcctctgttgactccattgtttcgtcggaaaccccctcccctccatctaaaagaaaggtcactactaaaattcagggaaacgccaagaaagctctgctgaaatgggtacagtataccgcaggaaaacagaccgggattgaggttaaagacttcggcaagtcctggcgaagcggggttgcctttcacagcgtaatccacgccattcgacctgaattggtggatctggagacagtcaaagggcgatctaaccgagaaaatctggaagatgcattcacgatcgccgaaactgagctggggatccctcggctcctcgaccctgaagatgtcgatgtggataagccggacgaaaaatctatcatgacatacgtcgctcagttcttaaagcattatccagacatccacaatgctagcacagacggccaggaagatgacgagattctgccgggcttcccctcatttgccaactccgtgcagaacttcaaacgcgaagaccgcgtgattttcaaggagatgaaagtgtggattgagcaattcgagagagacctgacaagggcccagatggttgagagcaatttgcaggataagtatcagtcctttaagcacttcagagtccagtatgagatgaagagaaagcaaattgagcacctgattcagccgttgcaccgcgacgggaaactctctctagaccaggctctcgttaaacagagttgggatagggtgacttctcgcctgttcgactggcacattcaactggataagagccttccagctccacttggcacaattggtgcttggctctatcgggctgaggtcgcgcttcgtgaagagattacagttcagcaggttcatgaggagacagccaataccatccagagaaagttggaacagcacaaagacctcttacagaatacagatgcccataaacgggctttccacgagatctatcgcacaagaagcgttaatggcattccagtgccacctgatcagctggaggatatggccgaaagattccatttcgtgtcgtctacctccgagctgcacctcatgaagatggagttcctggaattgaaataccgtctcctcagccttttggtgctggctgagtccaaacttaaatcatggattatcaagtacggcagacgagagtccgtggagcagcttctgcagaattatgtatctttcatcgaaaactctaaatttttcgagcaatacgaggtgacttaccagatattgaaacagaccgcagaaatgtacgttaaagctgatggttcagtagaggaagccgagaatgttatgaagtttatgaacgaaaccacagcccagtggaggaatctgagtgtcgaagtgcgctctgtgcgttcaatgctcgaggaggttatttccaactgggacaggtacggaaacacagtcgcctccctccaggcttggttagaggacgccgaaaaaatgctgaatcagagcgaaaatgctaagaaggattttttccggaacctgccgcactggatacagcaacataccgccatgaatgatgcaggcaactttctcattgaaacatgtgacgagatggtttctcgagatcttaaacaacagctacttctcctgaatggcaggtggcgagaactgtttatggaagtgaagcagtacgcccaggccgatgagatggatcgaatgaaaaaagagtacactgactgtgtcgttaccctgagcgctttcgctacagaggcacacaagaagctcagcgagccattagaggtttccttcatgaacgttaaactgctgatccaggacctggaggacattgagcaaagggtgccagtaatggacgcccaatataaaatcatcaccaagacagcccatctgatcaccaaggagagcccacaggaagagggcaaagagatgtttgctacaatgtccaagttgaaggaacagctcacaaaagtgaaggaatgctacagcccactgctgtatgagagtcagcaattattgataccgctggaagagcttgagaagcagatgacctctttctatgattcactcggcaaaatcaatgagatcattaccgtgctggagcgggaggctcagagctctgccctgttcaaacagaagcaccaggaattgctggcttgccaagaaaattgtaaaaagacacttacactgattgagaagggttctcaatcagtacagaaatttgtgacgctgagcaacgtgttgaaacactttgatcaaaccaggctccaaaggcagattgccgatattcatgtagcattccagagcatggtgaaaaaaacgggcgattggaagaaacacgtggaaactaattcccgactcatgaaaaagtttgaagaatcccgagcagagcttgaaaaggtgctccgaatcgctcaggagggcctcgaggagaaaggagaccctgaggaactccttcgtcgacacacagagttcttttcacagcttgatcaaagagtccttaacgctttcctaaaagcctgtgacgaactaacagatatcctcccagaacaggagcagcaaggcctgcaggaggctgtaagaaagctccacaaacagtggaaagatctgcaaggcgaggcgccttaccacctccttcacctaaaaattgacgtcgagaagaatagatttctagcatcagtggaggagtgccgaactgaattggaccgcgaaaccaagctcatgccacaggagggctcagaaaaaattattaaagagcatagagtcttcttctccgacaagggaccccaccacttgtgtgaaaaaagattacaattaatcgaggaactttgtgtgaaactgcctgtccgcgatcccgtacgagatactcctggaacttgccacgtgaccctgaaggagctaagggctgccattgacagcacctatcgcaagcttatggaagatccggataaatggaaggactacaccagccggttttctgaatttagctcttggattagcacgaacgagacacagctcaagggcatcaagggcgaggccattgacacagcaaatcatggcgaggttaaacgcgctgtcgaggaaatacggaacggggtcacaaaaaggggcgaaacactcagctggcttaagagtagactgaaggtgctgacggaagtcagttcggagaatgaggcccaaaagcagggcgacgagctggccaagctgtctagttcattcaaggcactggtgaccttactgtccgaagtggaaaaaatgctcagcaactttggagattgcgttcagtacaaagaaatcgtgaagaattctctggaggaactgatttcaggatccaaagaagtccaggaacaggccgagaaaattctggatacagagaacttattcgaagctcagcaattgctgctgcaccatcagcagaaaactaaaagaatctccgccaaaaaacgcgatgtccagcaacagatcgcgcaggcacagcaaggggagggcggtctgccagacagaggccatgaggagttaagaaagttggagtctacattggatggccttgagcgttctagagaacggcaagagagaaggatccaggttacactccgaaaatgggagcgtttcgaaacaaataaagagactgtcgtccggtatttgtttcaaaccggcagcagccacgaacggtttctgagttttagctcactagaaagcctgagcagcgagttggagcagactaaagaattcagcaagaggaccgaatccattgcggttcaagccgagaatctggtcaaagaagccagcgagattccgctggggccccaaaacaaacagctcctgcagcagcaggccaagagcataaaggaacaggttaagaagctggaagatacactagaagaagatatcaagactatggagatggtgaagacaaaatgggatcactttgggagcaactttgagaccctatccgtatggatcaccgagaaagagaaggagctgaatgccctggagacgtctagttctgcaatggatatgcaaatttcccaaattaaggtaaccatccaggagattgagagtaaactgagctcaatcgtggggctggaggaggaagcacagagcttcgcccagttcgtcactacaggcgagtctgcacgtatcaaagcaaagctaacccagatacgcaggtatggcgaggaactgagagagcatgctcagtgcttagaggggaccatcttgggccacctgtcacagcagcaaaagttcgaggaaaatctccgaaaaatccaacaaagcgtctccgagttcgaagataaattggcagtcccgatcaagatttgtagttctgcaactgagacttacaaagtgttacaggaacatatggacctctgtcaggccttggaaagcctgtcatcagcaattacggctttctccgcttcagctaggaaggtggttaaccgtgatagctgcgttcaggaagccgccgcactacaacagcagtacgaggacatcctgcgacgcgccaaggagaggcagaccgcattagagaatctgttggctcactggcaaaggcttgagaaggagttgagttctttcctcacctggctggagagaggggaagcaaaggctagttcgcccgagatggacataagtgcagaccgagtaaaggtcgagggtgagttgcagttgatccaggcccttcagaacgaagtggtgtcacaggcctccttctactccaaactccttcagttgaaggagagtctgttctcggtcgcctctaaggacgatgtgaaaatgatgaagcttcatttagagcaactagacgaaaggtggagggacttgccacagatcattaacaaacgaatcaattttctgcagagcgtagtggccgaacatcaacagtttgacgagctcctattatctttctcagtgtggatcaaattattcctctccgagttgcagaccacaagcgagatctctataatggaccaccaggttgcactgacacgccacaaagaccatgccgccgaggtagagtccaagaaaggggaactacagtcgttacagggccacctggccaaacttggctcattgggccgggctgaagatctacatctgctccagggcaaggccgaggactgcttccagctcttcgaagaggcatcacaagttgttgagcggcggcagctcgcccttagccatctggccgagttcctccagtctcatgctagcttgtccggcatccttaggcagctacggcagacagtggaggccactaacagcatgaataaaaatgaaagcgacttgattgaaaaggatcttaatgatgcgctgcagaacgcgaaagcactggaaagtgccgctgtgtccttagacgggatcttatcgaaagcacagtatcatttaaagatcgggagttcagaacagagaacctcctgtagagctacagctgaccagctctgcggggaggtcgagagaatccagaatcttctaggcactaagcagagcgaagccgacgccctggccgttttgaaaaaggccttccaggatcaaaaagaggagctcttgaagagtatcgaggatatagaggagcggaccgacaaggaacgcctgaaggaacccacgagacaagctcttcaacagcgcctgagggtcttcaaccagctcgaggatgagctgaacagtcacgaacacgagctctgttggttaaaggataaggctaagcaaatcgcccagaaggatgtggcatttgcccctgaggttgatagagagattaaccggcttgaagttacctgggacgacacaaaacgcctgatccatgagaatcagggccagtgttgcgggctgattgacctgatgagagagtatcagaacctgaagagcgcagtaagcaaagtgttggaaaatgccagcagtgtgatagtaacaaggacaactatcaaggaccaggaggacctcaagtgggcgttcagcaagcatgagactgctaaaaacaagatgaattacaaacagaaggatcttgacaattttacttcaaaaggaaagcacctgctttctgagctgaaaaagatccactcctctgattttagtctggtaaagacggacatggaatcgaccgtggacaaatggctggacgtctcggagaagttggaggaaaatatggataggctgcgggtgtctctttcaatctgggacgatgtactgtcaacgagagatgagattgagggctggtctaataactgcgttccacagatggccgaaaacatttctaatttggataatcatctacgagctgaggagctattaaaagagtttgagtcggaagtcaaaaacaaagccctaaggttggaagaactgcattctaaggtcaatgatctgaaagagctcacgaaaaacctggaaacccctcccgacttgcagttcattgaagctgatctcatgcagaagcttgaacatgcgaaggagatcactgaagttgccaaaggcaccctgaaagattttacagcacagagcactcaggttgagaaatttattaatgacatcactacttggtttaccaaagtggaagagtctcttatgaattgtgcccaaaacgagacctgtgaggcgctaaaaaaggtgaaggatattcagaaggaactgcagagccagcagtcaaacatttcgagcacgcaggaaaaccttaattcgttatgcagaaagtatcactctgcagaattggagtccctgggacgggctatgacaggtctaattaagaagcacgaggctgtctctcaactgtgcagcaagacccaagcctcactgcaggagtccttggagaagcactttagcgagtctatgcaggagttccaggagtggttcctgggggccaaggctgctgcaaaagagagcagcgatcgtacaggcgactcaaaggttcttgaggccaagctacatgatctccagaatatcctggattcagtgagcgatggtcaaagtaaactggatgctgtgacccaggaggggcagaccctctacgcgcatctctccaaacagattgtctccagcatccaggagcaaatcacgaaggcaaacgaagagttccaggccttccttaaacagtgtcttaaggataagcaggcgttacaggactgcgcatccgaactgggctccttcgaggatcaacaccgaaagttgaacctctggatccatgagatggaggagcgattcaacaccgagaacctgggtgagagcaagcaacacatccctgagaagaagaatgaggttcataaagttgaaatgttcctcggagagttattagctgctcgcgagtctttagataagctctcgcagagaggccagctgctgtcagaagagggccacggcgctggccaagaaggaagactctgcagccagctgctcaccagccaccagaacttgctcagaatgaccaaagaaaaattacgatcctgtcaggttgccctccaagagcacgaggccttagaggaggccttgcagagcatgtggttttgggtcaaagctattcaagatcgcctcgcatgtgcagagtctaccctcggatctaaggatacattggagaaacgactgtcacagattcaagacatcctacttatgaagggcgagggcgaagttaaactgaatatggctattggcaagggggaacaggccttgaggtctagcaacaaagagggccagagggttattcagacacagctcgaaacactaaaggaggtgtgggctgatatcatgtccagctcagtgcacgctcaatccacattagaaagtgttatatcccagtggaacgactatgtggagcgcaagaaccagctcgagcagtggatggagtctgtggaccaaaagatagagcacccactgcagcctcagccaggtctgaaagagaagtttgtgctgctcgatcacctgcagagtattctttctgaagccgaagaccacaccagggccctgcacagactgatcgctaagagcagggaactgtacgaaaagaccgaagatgagtccttcaaggacacagctcaggaggagctaaaaacacagtttaatgatatcatgaccgtggctaaggagaagatgagaaaggtagaggagatcgtgaaggatcacctgatgtatctcgacgcggtgcacgagtttacagactggcttcattccgccaaagaagagttacatcgatggagcgatatgagcggcgatagcagcgcaacccagaagaagctatccaagatcaaggagctgatcgactcccgtgaaatcggcgcctctcggctgagccgagtggagagcttggcacccgaggtgaagcaaaacaccaccgcaagcgggtgtgaactgatgcacaccgaaatgcaagctctccgcgctgattggaaacagtgggaagactccgtcttccagacccaatcctgcctggaaaatcttgtctcccagatggcactgagcgagcaggagttctccggccaagttgcgcaactggaacaagcgctggagcagttctcagcactgttgaagacatgggcccagcagctcacactcctcgaaggaaagaacactgatgaagaaatcgtcgaatgctggcacaagggacaggagatcctcgacgcactccagaaagccgaacctcggacagaggacctgaaatcccagctgaacgaattgtgtcgcttttctcgtgatctgtccacgtacagcggaaaggtaagcgggttgattaaggagtataattgtctgtgtctccaggcatccaagggctgtcagaataaggaacagatcctgcaacagagatttaggaaggcattccgcgactttcagcaatggcttgtcaacgcaaaaatcactaccgctaaatgttttgatattccccagaatataagtgaagtttctacgagtctccaaaaaatccaggagttcctttctgaaagtgaaaatggtcaacacaaactcaatatgatgttgtctaaaggcgagttgctgtccacattgctgactaaggaaaaagccaaggggatccaggccaaagttacggcggctaaggaagactggaaaaactttcattcgaacctccaccagaaagagagcgccctagagaaccttaagatacagatgaaggactttgaggtcagcgccgagccaatccaggattggttgtcaaagacagagaaaatggtgcatgagtccagtaaccggctgtacgatcttcctgctaaaagaagggagcagcaaaaactgcagtccgttctggaggaaattcattgctacgagccccaacttaaccgtctgaaagaaaaggctcagcagttgtgggaagggcaggctgccagtaaatccttccgacaccgcgtgtctcaattatcttctcaatatttggcactcagcaatctcacaaaagaaaaggtctcaaggctggaccgcattgttgcggagcacaaccagttctctttgggcatcaaagagctgcaagattggatgacagatgcaatccacatgctggatagctactgtcacccaacctccgacaagtctgtgcttgatagcaggaccttgaagctggaagcccttctctcggtaaagcaggaaaaagagatccagatgaagatgattgtgacccgaggcgagtcggtgctacaaaacacgtcgccagaaggaatcccaactattcagcagcaacttcagagtgtcaaggacatgtgggcgtccttgctgtctgccggaattcgatgcaagtctcagttagagggggcactgtctaagtggacctcatatcaggatggcgtgcggcagttcagtggatggatggatagcatggaggcaaatctaaacgagtcagaacgccagcacgctgaactgcgggataagactacaatgttaggaaaggctaaattactcaatgaagaagtcctgtcttactctagtctgctggagacaatcgaggtaaagggagccggtatgaccgaacattacgtgacccagttggaacttcaggatttgcaggagcggtaccgcgctatccaagaaagggcaaaggaggctgttacgaagtcggagaaactggttcgactacaccaagagtaccaacgggaccttaaggccttcgaggtttggcttggtcaggaacaggaaaaactggaccaatattcagtcctggaaggcgacgcccacacacacgaaaccacattaagagatttgcaggaactacaggtacactgtgccgaggggcaggccttgctgaatagcgtgttacatacaagagaggacgtgattccgagcggtatccctcaggccgaagaccgggcgctggaaagcctgcggcaggattggcaggcgtaccagcatcgcttgagcgagaccaggacacaattcaataacgtagtcaacaaactgaggcttatggagcagaaattccagcaggtggatgagtggctgaaaacggctgaagaaaaggtcagtcctcgcacccgcagacagtccaatcgagcgactaaagaaattcagttgcatcagatgaagaaatggcatgaagaagtcacggcctatcgggacgaggttgaagaagtgggcgcaagggcccaggagatccttgacgagagtcacgtcaattcccgtatgggatgccaggctactcagttgacctcccgataccaggcattgctccttcaggtactggagcaaattaaatttctcgaggaggaaatacagtccctggaggagtccgaatcttccttaagttcctactccgactggtatgggtctacacataaaaactttaaaaacgtggcgaccaagattgacaaagtagataccgtgatgatgggtaagaagctgaagaccctcgaagtgcttctgaaggatatggagaagggtcattctctcctcaaaagcgcacgtgaaaagggggagcgggcggttaagtacctggaagagggtgaagccgagcggctccgtaaagagattcatgaccacatggagcaattgaaagagctgacgtccaccgtgcgtaaagagcacatgacactcgagaaaggacttcacctggcgaaggagttctccgataaatgtaaggcccttactcagtggattgctgaatatcaggagattctgcacgtccctgaggaacctaaaatggaactttatgagaaaaaagcacagctgtcgaagtacaaatcactgcagcagacagtcttatcacatgaaccctccgtcaaaagtgtacgggaaaagggtgaggctttgctggaacttgtgcaggatgtgaccctgaaggacaagatagaccagcttcagtcggattaccaagatctgtgtagcataggtaaagagcacgttttctccttagaagcgaaagttaaggatcacgaagactacaattccgaactccaagaggtggaaaaatggctgctgcagatgtctggcagactcgtggctccagatttactggaaacatcctctctagaaaccattacacagcagctagcccaccataaggcgatgatggaagaaattgccggatttgaagacagactcaataatttgcagatgaagggggacacccttatcgggcaatgcgcggaccacctgcaagcgaaacttaaacaaaatgtgcatgctcaccttcaaggaactaaggactcctattctgcaatctgtagtaccgcccagcgaatgtatcagagccttgagcacgaactgcaaaagcacgtgtcccgccaggacacactccaacagtgtcaagcttggctcagcgcagtacagcccgacctggagcccagcccccaaccgcctcttagtagagctgaagcgattaagcaagtgaaacactttcgcgccctacaggaacaggcccggacatacctggaccttctgtgcagcatgtgcgatctctccaacgcttcggtgaaaactactgccaaagacattcaacagaccgagcagactattgaacaaaaactggtgcaggcccagaaccttacgcagggctgggaggagattaagcatcttaagtctgaactctggatctacctgcaggatgcagaccagcagctgcaaaacatgaagcgtcgccattctgagctggagttgaacattgcacagaacatggtgagccaggtgaaggacttcgtgaaaaaactccaaagtaaacaggcaagcgtgaacaccatcatagagaaagtcaataaattgactaaaaaagaggaatcccctgaacataaagagattaaccacctgaatgaccagtggctggatctctgtcggcaatcaaacaacctgtgcctccagagggaagaagatctgcaacggacacgcgattaccatgactgcatgaatgtggtggaggtgttcctggagaaatttacaactgagtgggacaatctcgccaggagcgatgctgaaagcaccgccgtgcacttggaggctttgaagaaactggccctggcactccaagaacgaaaatatgccatcgaggaccttaaagaccaaaaacagaaaatgatcgaacatttgaatctggacgacaaagagcttgttaaagagcagactagccatcttgagcagcgatggtttcagctggaagacctcatcaagagaaagattcaggtgagtgtgacaaatcttgaggaactgaatgtagtacagagtaggttccaggagctgatggaatgggccgaggagcagcagcctaatatcgctgaagccctcaaacagtcccctccaccagatatggcccagaacttactgatggaccatctggccatctgtagcgagcttgaggccaaacagatgctgctcaaatcattgataaaagacgcggaccgggttatggctgacctgggactcaacgagcggcaagtcattcagaaagccctttctgatgcacagtcccatgtaaactgcctcagcgacttggttggccaaagacgcaagtatttaaacaaagccctgtctgaaaagacccagtttctgatggccgtgttccaggctacttcccagatccagcaacatgagagaaaaatcatgttccgtgagcatatctgtctgctaccagacgatgtgtctaaacaagttaaaacttgcaaatccgcacaggcgtctctcaagacataccaaaatgaggtgactggcttgtgggctcagggccgggagctaatgaaagaagtcactgaacaggagaaatcagaggtattgggtaaattgcaagaattgcagtccgtctacgatagcgtcctgcagaaatgttcacatcgtctccaggaactggagaaaaaccttgtctccaggaaacattttaaagaggacttcgacaaagcatgtcattggctgaagcaggcggatattgtgacttttccagagatcaatctcatgaacgaaagcagtgagttgcatactcagcttgcgaaataccagaacatactcgagcagtccccagagtacgaaaatctgctgcttacactgcaaaggactggtcaaacaatacttcccagtctcaacgaagtggaccacagctacctgagcgagaaacttaacgccctacctcgacaattcaacgtaattgtcgccttagctaaagacaagttctacaaagtccaggaagccatcttagcacgcaaggagtacgcaagtctgatcgagctaacaactcagtcgctgagcgagctggaggcccaattcctacgaatgtcgaaagtgcctacagacctagccgtggaggaggcgttgtcactacaagatggatgcagagctattctggatgaagtcgccggcttgggagaagcggtagatgagctgaaccagaaaaaggaggggttcaggtccaccggacagccttggcagcccgataaaatgctgcacctcgtcacactctatcaccgcctgaaacggcagactgaacagagggtctcactgctcgaagacaccacttcagcctatcaggagcacgagaagatgtgtcaacagttggaacgccagcttaaatctgtcaaagaggagcagtcaaaagtcaacgaagagaccctcccagcggaggagaagttgaagatgtaccactcattggcaggctcactgcaggacagtgggatcgtactgaaacgagtcacgatccaccttgaggacctggccccccacctggatcctctcgcctatgaaaaggcccgccaccagattcagtcctggcaaggggagctgaaacttctgaccagtgccattggagaaaccgtgaccgagtgtgagtctcggatggtccagtctatcgatttccagaccgaaatgagtcggtccctggattggcttcggcgagtgaaagctgagcttagcggacctgtctatctcgatctcaatctccaagacatacaagaagagattaggaagatccagatacaccaggaggaagttcagagctctctgcggattatgaacgcgttgtcccacaaggagaaagagaagttcaccaaggccaaggagctaatttctgccgatctggagcatagtctggccgaactgagcgagctggatggagatattcaggaggcgctccgcacccgacaggctacactgacagagatatattcgcagtgtcagcgatattaccaggtgttccaggcagctaatgattggttagaggacgcccaagagctgctgcaactggccggcaatggcctcgatgttgagagcgcagaagaaaatcttaagagccatatggagttcttctccactgaagaccagtttcacagcaatctggaagagctgcacagtttagtagccacactggaccctctcataaaacccaccggcaaggaagacctcgagcagaaagtggcttcattggagctgagaagccagcgcatgtcacgagattctggggcccaggtagacctgctgcagcgctgcaccgcacagtggcatgactatcaaaaggccagagaggaggtgatcgaattgatgaatgataccgaaaaaaagctttcagagttttccctgctcaaaacatccagttctcatgaggctgaggagaaattatccgaacataaagccctggtctctgtcgttaattcgtttcacgaaaaaatagtcgctctcgaggagaaggcttcgcagcttgagaaaaccggaaacgatgcatcaaaggcgaccctaagccggtccatgaccaccgtttggcagagatggacccgactccgggccgtggcacaggaccaggaaaagatcctggaagatgccgtggacgagtggaccggctttaataacaaagttaaaaaggcaacagagatgattgatcagctccaggacaaactgcctgggtcttcagccgaaaaggcatccaaggcggagttactgactctactcgagtaccacgacacgtttgtactggaattggagcaacagcaatctgccttaggaatgctccgacagcagactctatctatgctgcaagacggggccgcccccacaccaggagaagagccgccactcatgcaggagatcactgcaatgcaagacaggtgtctgaacatgcaggaaaaggttaagacaaacgggaagctggtgaagcaggagctgaaggaccgggaaatggtggaaactcagattaactcagtgaaatgctgggtgcaggagactaaagagtaccttggcaaccctactattgagatagacgcacagttagaagagctccaaattctgctgacggaggcaactaatcatagacagaacattgaaaaaatggcagaagagcagaaggaaaagtatctggggctgtacaccatcctgccctctgaactaagcctccaactcgccgaggtcgctctcgatctcaagattagagaccagattcaggataagattaaagaagtggagcaaagcaaggctacttctcaggagctaagcaggcagatccagaagctggctaaggatttgacaacaatcttgacaaagctgaaggctaagactgataacgtggtccaggccaagactgaccagaaggttcttggagaggaactcgatggatgcaacagtaaactaatggaactcgacgctgcagttcaaaaattccttgagcagaatggccaattaggcaaacccttagccaaaaagattgggaaattgaccgagcttcatcaacagaccattcgccaggcagagaaccgcctcagtaagctcaaccaggccgcttcccatctggaagaatataacgagatgcttgagctcatactcaaatggatcgaaaaagctaaagttctcgcccacggtacaatcgcttggaattccgcaagccagctccgcgaacagtatattctccatcagacactgctcgaggagtcgaaagaaattgactctgagctcgaggcaatgactgaaaagctgcagtacctaacaagtgtgtattgcacagagaagatgtcccaacaagtggccgagctgggcagagagacggaggaactgcggcagatgattaaaatccggcttcagaacctgcaggacgctgccaaagacatgaaaaagttcgaagcagagctcaaaaaactccaagcggcactcgagcaggcacaggctacactgacaagtcccgaagtggggcgtctgtccttgaaggaacagctgtcgcacaggcagcacctgctgtctgagatggagtctctcaaacccaaggtgcaagccgtccagctgtgtcagtcagctctacgcataccggaggacgtggtggccagtttacccctgtgtcatgctgctttaagactccaagaggaagcatctagactgcagcataccgctatccagcaatgcaacataatgcaggctgccgtggttcaatacgaacaatacgaacaagagatgaagcacctgcagcagctaatcgagggtgcacaccgagagatcgaggataagccggtcgccacatccaatatccaggagctgcaggcacagatctcgagacacgaggagttggctcaaaagataaagggataccaggaacaaattgcttctctgaattctaagtgcaagatgttaactatgaaggccaagcacgctacaatgctgctgaccgtcactgaggtggaaggcctcgctgaagggaccgaggacttggatggcgagctgctcccaacccctagtgctcacccaagtgttgttatgatgacagccggacggtgtcacacattgctgagccctgtgacagaggaatcaggcgaggagggaactaactcagaaattagctcccctcccgcatgtaggtccccgtctccagtagccaatactgacgccagtgtcaatcaagatattgcctactaccaagccctatcagcagagagactccagacagatgccgcaaaaatacacccctctacaagtgcctcccaggaattctacgaaccagggcttgagccttccgccacggccaaactgggcgatctacagcgctcttgggagaccctgaaaaatgtgatttcagagaagcagcgcactctctacgaggcccttgagcgacaacagaagtatcaggattccttgcagtccatcagtacaaagatggaagccatcgaactcaagctgagcgagagcccggaacccggccgctctccagaatcccagatggctgaacatcaggccctaatggatgagattctgatgttacaggacgaaataaacgaactgcagtcgtccctggctgaagaactagtttccgaatcctgcgaagctgaccccgccgagcagctggcactgcaatctacgctgactgtccttgcggagcggatgtccaccattcgtatgaaggcctcaggtaagcgccagctgctcgaagagaagctgaatgatcagttggaggaacagagacaagaacaggccctgcagcgctatagatgcgaggccgatgaattggactcttggcttctgtctactaaggccacactagacaccgcgttatcccctccaaaagaacctatggacatggaagcacaactcatggactgccagaacatgctggtagagattgaacagaaagtagtggctctgtccgagctgtcggtacataatgaaaacctgcttttagagggaaaggcccacaccaaggacgaggccgaacagctggccggtaagctgcgtcgcctgaaaggatccctgttggagcttcaaagggccctccatgacaagcaactaaatatgcaggggaccgctcaagaaaaagaggaaagcgatgtggatcttaccgcgacccaatcaccaggtgtgcaggagtggctggcccaggcaagaacaacgtggacccagcagaggcagagcagtttacaacagcagaaagagttagagcaggaactcgctgaacagaagagccttctcaggtctgtcgcatcaaggggtgaggagattttaatccagcactcagctgcggaaactagtggagatgcgggggaaaagcctgacgtgttgtctcaggagctgggaatggagggagagaagtctagtgccgaagaccagatgcgcatgaaatgggaaagcctccaccaagaattttctaccaaacaaaagctacttcagaatgtgttagagcaagaacaggaacaggtgctgtactcacgccccaaccgcctcctgtccggggtccccctttacaagggagatgttcccacacaagataagtcagcagttacttctctcctcgatggccttaaccaggcatttgaggaagtctccagccagtcaggcggtgccaagaggcaatccattcatctcgaacagaagctctacgatggggtaagcgccacctcgacttggctcgacgatgtcgaggagcgcttattcgtggccactgccctcttacccgaggagaccgagacctgtctctttaatcaggagattcttgctaaagacattaaggaaatgagcgaagaaatggataagaacaagaacttgtttagtcaggcctttcccgaaaacggcgataaccgggacgttatcgaggacacactgggatgcctgttgggaagactttcattgctggacagcgtcgtaaatcagcgctgtcaccaaatgaaggagcgcttgcagcaaattttaaattttcaaaatgatctgaaggttctgtttacttcattagccgacaataaatacataatcctgcaaaaactggcgaatgtgtttgagcagcctgtggctgaacaaattgaagccatacaacaggcggaagacggattgaaggagttcgatgcaggtattatagaacttaaacgtcgtggcgataaacttcaggtcgagcaaccatcaatgcaggagttatctaaactgcaggatatgtacgatgaactgatgatgattattggctcacgcagatctggcctgaaccagaacctgaccctcaaatcacagtatgaacgcgcactgcaggacctggcggacctcctggagaccggccaggaaaagatggccggcgaccagaagattattgtttccagtaaggaggagatccaacaactattggataaacacaaagaatattttcagggtctggaaagccatatgatcctgaccgaaactttatttcgaaagataatctcctttgcggtccagaaggaaacccagttccatacagagcttatggctcaagcatcagccgttctgaaaagggctcataaaagaggcgtggaactggaatacatcctggagacttggagtcacctagatgaggaccagcaggagttatctcggcagctggaggtggtcgaaagcagcattcccagcgtcggcctggtggaggagaacgaggatcgcctgatagatcgtattactctctatcaacacctgaagtccagtcttaacgaatatcagcctaaactttatcaagtgctggacgacgggaaaaggcttctcatttccatttcctgcagcgatctggaatctcagttgaaccagctcggtgaatgctggctgagcaatacaaacaagatgtcaaaggaactgcatcgactggagacaattttgaagcattggactagatatcagagtgaaagcgccgacctcattcattggttacagtccgccaaggatcggctggagttctggacacagcaatccgttacagtgccgcaggagctggagatggtgcgagatcacctgaatgcattcctcgagttcagcaaggaggtggacgcacagtctagccttaaaagttccgtcctctctactgggaatcaactgctgcgcctgaaaaaggtagacacagcaaccctgcgttccgaactctcccgcatagacagtcagtggactgatctgcttaccaatatccccgccgtacaggagaaattacatcagctgcagatggataagctgcccagtagacatgctattagcgaagtgatgagttggatttcccttatggagaacgtgatccagaaggatgaagacaacattaagaatagcattggctataaggctatccacgagtacctgcagaaatacaagggcttcaagatagacatcaactgcaaacagctgaccgtcgacttcgtgaatcagagcgtgttgcagattagtagccaggatgtagagtccaaacgaagcgacaaaaccgactttgctgagcagctgggggccatgaataagtcttggcagattctccagggtttagtgacagagaaaatccagctactggaggggcttttagaaagttggtcagaatacgagaacaacgttcaatgtctcaagacctggttcgagacccaagagaaaaggctgaaacagcagcaccggatcggtgatcaggcttctgttcagaatgctctgaaggattgccaggatctggaagaccttattaaagctaaagaaaaagaggtcgagaaaattgaacaaaatggccttgctctgatccagaataagaaggaggatgtctcatccatcgtgatgagcacccttagggaattagggcagacttgggccaacctcgatcatatggtgggacagctgaagattctgctgaaatccgtgcttgatcagtggagtagtcataaggtggccttcgacaagatcaattcttacctcatggaagctcggtactccttgtcccgcttcaggcttctgacaggatctctcgaagcagtccaggttcaggtagacaacttacagaatctacaggatgacttggaaaagcaggagagatcactgcagaagttcggaagtatcaccaaccagctgttaaaggaatgtcatcctcctgtaacggagaccctgaccaatacactaaaggaggtgaatatgcggtggaataatctgctcgaggagatcgcagagcaattacaatcctcgaaggctctcctacagctttggcagaggtacaaggactattccaaacagtgcgcgtcgacagtgcaacagcaggaggaccgcacaaatgaattgctgaaggcggcgacaaacaaggatattgccgacgatgaggtcgctacatggatccaggattgcaatgatctgctgaaggggctggggacagtaaaagattcactattcttcttacacgagctcggggagcagctgaaacagcaggtggacgcgagcgccgcttcagccatccagtccgaccagctgagcctgtcccagcacctgtgcgctctggagcaggcactgtgtaagcaacagacatctctgcaagctggcgtactggattatgaaacctttgctaaatccctggaagctttggaggcctggattgtcgaggctgaggaaattctccagggtcaggatccttctcactcgtccgacctaagcacgatacaggagcgaatggaagaactgaaggggcagatgctgaagttctccagcatggcccctgatctggatcgtctgaatgagcttggttatagactgcctctgaatgataaggagataaaaagaatgcaaaatttgaatagacactggtctctcattagttcccagacaaccgaacggtttagcaaacttcaatcgttcctcctgcagcatcagaccttcctcgagaagtgtgaaacatggatggaattccttgtacaaaccgagcaaaaactggccgtggaaatcagtggcaactatcagcacctcctggaacagcaacgcgctcatgagcttttccaagccgagatgtttagtcgtcagcagatattacacagcataattatcgacgggcagcgcctactcgagcagggccaggtagacgatagggacgagttcaatctgaagctaacattgctgtccaaccagtggcagggtgtgatccggagagcccagcagaggcggggaatcatcgactcccagattaggcaatggcaacgctatcgggaaatggcggagaaattgcgcaaatggcttgtggaggtgagttacctgcccatgagtggactggggagcgttcccatcccgctgcagcaggcccgcacgctgttcgatgaggttcaatttaaggagaaagtgttcctgcgccaacaaggttcatacatcctaactgtggaagcgggcaaacagttgcttcttagcgccgacagcggagctgaggctgctttacaggccgagttagccgaaattcaggaaaaatggaagagtgcaagtatgaggctggaagaacagaaaaagaagctggcttttttactgaaagactgggaaaagtgcgagaagggcatcgctgactctctggaaaagctaaggactttcaagaaaaaactaagccagtctctgccagaccatcatgaggaactgcatgctgagcaaatgcggtgcaaggaactggagaacgccgtcggttcgtggaccgacgacctaacccagttgtcactgctaaaggacacattgagcgcatatatctcagccgatgatatcagtattctgaacgaacgcgtggaactgttgcagcggcagtgggaggagctttgccatcagctgagtctcaggcggcagcagatcggcgaacgccttaatgagtgggcagtgttttctgagaaaaacaaggagttgtgcgagtggctcactcaaatggaatcaaaggtatctcagaacggggacatcctcattgaggaaatgattgagaagctcaaaaaggactaccaggaagaaattgcaattgcccaggagaacaagattcagctccagcagatgggcgagcgccttgctaaagcatcacacgaatccaaagcttccgaaattgaatacaagcttggtaaagtcaacgataggtggcagcatctgctggatttaattgctgcgcgcgtgaagaaactcaaagaaactctcgtggcagtgcagcagcttgacaagaatatgagcagtctccgtacttggctggctcatatcgagagcgaattggccaaaccgatcgtctacgattcatgtaattctgaggaaatacagcggaaacttaacgaacagcaagaactgcagcgagacatcgagaagcactctactggggtggcctcagtcttgaacttgtgtgaagtgctgctgcacgactgtgatgcctgtgctactgacgctgagtgtgatagcatccaacaggccacaagaaacctggaccgacggtggcgaaacatctgcgcaatgtctatggagcgcagactaaaaatagaggagacttggagactgtggcagaaattcttggatgattattcccgcttcgaagactggctcaagtctagtgagcggactgccgcctttccaagcagcagcggcgtcatctatacagtggccaaagaagaactgaagaagttcgaggcgtttcagagacaggtccacgagtgtctgactcagctggaattgattaataagcaatataggagactcgccagagagaaccgcaccgattccgcctgctcactgaagcagatggttcatgaaggaaatcagagatgggataacctgcaaaaacgtgtgacgtcgatcttgagaagactgaaacattttatcgggcagcgcgaggagtttgaaaccgctagagactctattttggtctggctcacagaaatggacttacagcttaccaacatcgaacacttcagcgaatgcgacgtgcaggcgaagatcaagcagctgaaagccttccagcaggaaatcagccttaaccacaacaagatagaacaaatcatagcccaaggcgagcagcttatcgagaagagcgaaccgcttgacgccgccatcattgaagaagagcttgacgagcttcgaagatattgccaggaggtatttggccgcgttgaacggtaccacaaaaaactcatccgcctccccctccccgatgacgaacacgatctttccgacagggagctggagctggaagacagcgccgctctcagcgacctccactggcatgaccgcagcgcagattctttgcttagcccgcaaccttcctcaaacctgtcactgagtttggcgcagcctctgcgttccgagcgtagcggtcgggacacacccgcgtccgtcgactccatcccccttgagtgggaccacgactatgacctatcccgcgacctcgagagcgccatgtctagggccctgccttcggaagacgaggaagggcaggacgacaaggatttttatcttcggggggctgtaggactgtccggagatcacagcgctctggagtcacagatccggcaattaggaaaggccctggatgacagcaggttccagatccaacagactgagaacataatacgcagcaagacccccactggccccgaattggatacctcttacaaggggtatatgaagctcttgggcgaatgtagttctagcatcgacagcgtgaagcgcttagagcacaagctgaaggaggaagaggaaagcttgcctggttttgtgaaccttcatagcaccgaaacccaaactgccggcgtgatcgatcgctgggagttgctgcaggcgcaagcattgtcgaaggagctgagaatgaagcagaacctgcagaaatggcagcagtttaacagtgacctcaattccatctgggcatggcttggagacacggaggaggaactcgaacagttgcagcgtctggaactttctacggatatccaaacaattgaacttcagattaagaaactcaaggaattgcaaaaagcggtcgaccatcgtaaggctatcatcttaagtattaacctttgctctcctgagtttactcaggctgacagtaaggagagccgtgacctgcaggatcgtctgtcccagatgaatggcagatgggacagggtctgtagcctgctcgaggaatggcggggtcttctgcaggacgccctcatgcaatgccagggctttcatgagatgtcgcatggactactccttatgttggagaacattgaccgacgcaaaaacgagatcgtgccaatagactcaaatctggacgctgagatattacaggatcatcacaagcagttgatgcagattaagcatgagttgttagagtcacaactgcgtgtggccagcttgcaggacatgagctgtcagttacttgtaaatgcagaaggcacggattgccttgaggcaaaagaaaaggtccacgtgatcggcaataggttaaaacttctgttaaaagaggtgtccaggcacattaaggaactggagaagctgcttgacgtatcctctagccagcaggatctgtctagttggtcctcagctgatgagctcgacacatctgggtccgtcagcccgacttctggcaggagcacccctaatcgacagaaaacccccagagggaagtgcagcctctctcagccaggtccttctgtgagctcacctcatagcagatctacaaaaggagggagcgattcaagtctgtcagagcctgggcccggtaggagcggtaggggctttctgtttcgggtccttcgggccgctctgccattgcagctactactgctactgctcatcggccttgcgtgcctcgtgcccatgtcagaagaggactactcctgcgccttaagcaataatttcgcacggtctttccatcccatgctgcgctacacgaatggccccccacctttatag

SEQ ID NO: 135871 - DNA, 25230 bp, synthetic construct
  misc_feature 1..25230: note = Description of Artificial Sequence: Synthetic coding sequence
  source 1..25230: mol_type = other DNA
atggccacttcaaggggtgctagtcggtgcccacgcgacatcgctaatgtgatgcagcggctgcaagatgagcaagagattgttcagaaaaggacatttaccaaatggatcaattcacatttggctaaacgcaaacctcccatggtcgtggacgatttgttcgaggatatgaaagatggtgtcaagctcctggcactcctggaggttctgagcggccaaaagctaccctgcgagcagggacggcggatgaagagaatccatgccgtggctaatatcggaacagccctgaaatttctggagggccgcaagatcaagctggttaatatcaactccaccgatatcgcagatgggaggccctctattgtgctgggccttatgtggaccattatcctttattttcaaatcgaggagcttaccagtaacctcccccagttgcagtctctatcaagctccgcctctagcgtggattccatagttagttctgagaccccgtcccctccctcgaagcggaaggtgaccaccaagatccagggaaacgcaaaaaaagccctgctgaagtgggttcagtataccgccggcaaacagacaggaattgaagtaaaggattttgggaaatcgtggagatcaggggtcgcgttccacagcgtgattcatgccattcgtccagagttagtagatctggagacggtcaagggccggtcgaaccgcgagaacctggaagatgccttcactatcgcggaaacggagttgggcatcccacgtctccttgaccctgaagacgttgacgtcgataagccagatgagaagtctatcatgacttatgtagcacagttcttgaagcactaccccgatatccacaacgcttccacggacggccaggaagatgatgagatactgccgggctttccttcattcgccaactccgtgcagaacttcaagagggaggacagagtcatttttaaggaaatgaaggtgtggattgagcagtttgaacgcgacctcaccagagctcagatggtggaatctaacctacaggacaagtaccagagctttaaacactttcgggttcagtacgagatgaagcgtaagcagattgagcatctgatacagccactccatagggatggcaagctcagcctggaccaggccctagtgaagcagagctgggaccgagtgaccagccggttgtttgattggcacatacagctggacaaaagtttacccgctcctctaggaacgatcggagcgtggctctatcgtgccgaagtggcccttagagaggagattaccgtgcagcaggtacatgaggagactgccaacaccatccaaaggaaactagaacagcacaaacgaaagcttaggaacgtgatcgacttgttgcagaataccgatgctcataagcgtgccttccacgaaatataccgcactcggagcgtgaatggaatccctgtaccaccagaccagctggaggacatggctgaacgtttccacttcgtctcgtctacgtccgagctgcacctgatgaaaatggagtttttggagctgaagtataggctgttgtctctgctcgtcctggctgagtctaagctgaagtcctggatcattaaatatggaagaagagaatctgtggagcagctcctgcagaattacgtctcattcattgagaacagtaaattttttgaacagtacgaagtaacttatcaaatcctgaaacagactgcagaaatgtacgtaaaggctgatggttccgtggaagaagcggagaatgtgatgaagtttatgaatgagactacagcccagtggagaaatctgtctgttgaagttcgttctgtgcgatctatgctggaggaagtgatttctaattgggataggtatggaaacacagtcgcttccttgcaagcatggctcgaggacgccgagaagatgttgaaccaaagcgagaatgcgaagaaggatttcttcaggaatttgcctcactggatccagcagcatacagccatgaatgatgccgggaactttttgatcgagacatgtgacgaaatggtgtcaagagacctgaaacaacagttactactgctcaatggacgctggcgggagctcttcatggaggtgaagcaatatgctcaggctgacgagatggataggatgaaaaaggaatacaccgattgtgtcgttactctgtccgccttcgcaaccgaagcccataaaaagctgagcgaaccactggaagttagtttcatgaatgtcaaactgctgatccaggacctcgaggacatcgaacagagagtccctgttatggatgcacagtacaaaattattaccaagaccgcacaccttatcacaaaggagtccccacaggaggaagggaaggaaatgttcgcaaccatgtccaagctcaaggagcaacttaccaaggtgaaggaatgttactcaccactgctgtatgagtcgcagcagctgctgattcccctagaagaactggaaaagcagatgacctccttttatgattcattaggcaagattaatgagatcattacagtcctggagcgagaagcccagtcatccgcgttgttcaaacagaaacaccaactgaggattctgaaatgcaaatggtgcaattcgagtcagaagatgacactctgtctggtgctgggcagtatgatcagcatgttgagcaccgccaaaatcactatcgccggatataagtcggaggtggaagtgagtgaacttcttgcctgtcaagagaactgcaaaaagaccctgacactaattgagaagggttctcaatccgttcagaagtttgtcactctcagcaacgtgctcaagcatttcgatcagaccaggctccagactgattgccggtacagctgttgtttcagtgtgatgaggaagcagcaccatataatgatagtgttccacataaaatctatggtgaagaaaacaggagattggaagaaacacgtagaaacgaattctagactaatgaagaagtttgaggagtccagggcagagctggagaaagttctgcgcatagcacaggaggggctagaagaaaagggcgaccctgaggagcttctcagacgacataccgagtttttttcacagctggatcagcgcgtgcttaacgcatttctcaaagcctgtgatgaattaaccgatatcctcccggaacaagagcagcagggcctgcaagaggccgtgcggaaactgcacaaacagtggaaggatcttcagggcgaggccccttaccacctactgcatctgaaaatcgacgtagaaaagaatagattcttggccagtgttgaggagtgcaggaccgaactggatcgtgagacaaagcttatgcctcaggaggggagcgagaagatcatcaaagagcatagagtgttcttctctgataagggtcctcaccacctgtgtgaaaagcgtcttcagcttatcgaagaactgtgtgtgaaattgccagtcagggatcctgttagagatacccccggaacttgccatgtgactctgaaagagttgcgtgccgcgattgattccacttatcgtaaactaatggaggacccggataagtggaaggactataccagtaggttcagtgagttctcatcatggattagcaccaatgaaactcagcttaagggcatcaaaggtgaggccattgataccgcaaaccacggcgaggtcaagagagctgttgaggaaatcaggaacggggtgaccaaaagaggagagactttgagctggctcaagtccagactgaaggtgctcacagaagtttcatcggagaacgaggcccagaaacagggggacgagctggccaaactgtctagcagctttaaggcattggtgaccctcctctcggaggttgaaaagatgttatctaatttcggcgattgcgtgcagtacaaggagatcgttaagaacagtcttgaggagttgatttccggaagtaaagaggtgcaggagcaggcggagaaaatcctggatactgagaatctgtttgaagcccagcagctgctgctccatcatcaacagaaaacaaaaaggatcagtgccaaaaaaagggatgttcaacagcagatcgctcaggctcagcagggcgaagggggcttgccagatcggggccacgaagaattgagaaagctagagtcaacactcgatggactcgagaggagccgtgagcgccaggagcggcgtatccaggttaccctgagaaaatgggaaaggtttgaaacaaataaagaaacagtggttagatacctttttcagacgggctcttcccacgaacggttcctctcgttcagttctctggagagcctctcctctgagcttgaacagaccaaagagtttagcaaacggaccgaatctatcgcagtgcaggccgaaaacctggtgaaggaagcttctgagattcccctaggcccacaaaacaagcagctgcttcagcaacaagctaagagcataaaggaacaggttaagaaattggaagataccctcgaggaggagtacgtgatagataataaaacgatggaaatggtcaagaccaagtgggatcatttcgggtcgaattttgaaaccttatccgtttggataaccgagaaagagaaagaattgaatgccctggagacttctagcagcgctatggatatgcagatttcgcaaataaaggtcactatacaagagatcgagagcaaactgagcagcattgtcggacttgaagaggaggcccaatcattcgcgcagtttgtcaccactggcgagagtgcaagaattaaagcaaaattgactcagatcaggcgctatggagaggagctcagggagcacgcccagtgtctggaaggcaccatccttgggcatttatcccagcagcagaagttcgaggagaacctgcggaagattcagcagtctgtgagcgaatttgaggacaagctggccgtgccaattaagatttgctcttctgccacagaaacgtacaaggtgctgcaagagcacatggatctttgccaggccctggagagtcttagctcggcaattacagctttctctgctagtgcgaggaaagtggtgaacagagattcctgtgtgcaggaagccgcggcgcttcaacaacagtacgaggacattttacggcgggcaaaggagagacaaaccgcgctggaaaatctgctagcccactggcagaggcttgaaaaggaactgtcctcctttcttacttggttagagcgaggcgaagccaaagcttcatcccctgaaatggatattagcgctgacagagtcaaagtagaagcttccaaagacgacgtgaagatgatgaagctgcacctggagcagctggatgagcggtggcgggatctgcctcagatcatcaacaagagaataaattttctccagagcgttgtggcagaacaccagcagtttgatgagctgttattgtcttttagtgtgtggattaagctttttctcagcgagctccagaccaccagtgaaatctctataatggaccatcaggtcgcactgactaggcacaaggaccatgcagccgaggtggagagtaagaagggggaactgcagtcgctccaggggcacctggccaaactcggctctctcgggagagcagaggatctccacttattgcagggcaaagcagaagattgtttccaattatttgaggaggcatcacaagtcgtggagcgacgccaactggctttgagtcaccttgccgaattcctgcagtcacatgctagtctttccggaattttgcgccagctacgtcaaaccgtagaggctactaacagcatgaacaaaaatgagtcagacctcatcgaaaaggatttaaacgacgctcttcagaatgcaaaggccctggaatctgctgccgtaagcctagacggaatcctctctaaggcccagtaccatttgaaaatcggatccagtgagcaacggacatcttgtcgggctactgcagaccagctttgtggagaggtcgagaggattcaaaacttgctggggactaagcaatccgaagccgacgcgctggccgtgttgaagaaagcttttcaagaccagaaagaggaattgttgaagtccatcgaggacattgaggagaggacagataaggagcgattaaaagagccgactaggcaggcgcttcaacagcgattgagggtctttaatcaattggaggatgaacttaactctcatgaacatgagctgtgctggctcaaggacaaagccaaacagatcgctcagaaagatgtggccttcgcccccgaagtagatagagaaatcaacaggctagaagtgacttgggatgatacaaaacgactgatccacgagaatcagggccagtgttgtgggctcatcgacttgatgcgggagtatcagaatcttaagagcgccgtgagtaaggtcctggaaaacgcatcgagcgtgatcgtaactcggactacaatcaaggatcaggaagatctgaagtgggctttttcaaagcacgaaacggcgaaaaacaaaatgaactataagcagaaagatcttgataacttcacttctaaaggcaaacacttattgtcagaattaaagaagattcatagctcagacttctctctggtgaagacagatatggagtcaaccgtggacaagtggctggatgtgagcgaaaaactggaggaaaacatggaccgcctgagagtctctctcagtatatgggacgacgtactcagcacaagagatgagatcgaaggttggagcaataattgcgttccccagatggccgagaacatttcaaacctggataaccatctgcgagcagaagagctcttaaaagagttcgagagtgaggtgaagaataaagcactgcgcctcgaagagcttcatagcaaagtcaatgatttaaaggagctgaccaagaatctggagacccctccagacttacagtttattgaggcagatctgatgcagaagctggaacacgctaaagaaatcaccgaggtggccaaagggaccctcaaggacttcaccgctcagtcaacacaggtcgagaagtttattaacgatattaccacatggtttactaaggttgaagagagcctgatgaattgcgcgcagaatgagacctgtgaggccctcaaaaaggtcaaggacattcagaaggagctccagagccagcagagcaacatctcaagcacacaggagaatctcaattcactctgtcggaaatatcactctgccgaactggaatctttgggacgtgcaatgacggggcttattaagaaacatgaagccgtgtcgcagctgtgctctaagacacaggcaagccttcaggaaagtctggagaagcacttcagcgaagaaagcatgcaagaatttcaagaatggtttctgggcgccaaagctgccgctaaggaatccagtgatcgcacaggagactccaaagtgctggaagccaagctgcacgatctgcaacagaacattctggattcggtgagtgacggacagagcaagctggacgctgtgacacaagagggccagactctatatgctcacctgtcgaagcagattgtgagcagcatccaagagcagatcactaaagccaacgaagagtttcaggcctttctcaagcagtgcctcaaagataaacaagccttacaggattgtgcatctgagctgggctccttcgaggaccagcaccgaaagctgaacctgtggatccacgagatggaagaacggtttaacaccgagaacctcggagaatccaagcagcatatccctgagaaaaagaacgaagtgcataaggtggagatgtttctgggtgaattgctcgctgcaagggaaagcttggacaagctgagtcaacgggggcagcttctgtccgaggagggccatggtgcggggcaagaagggagactatgctcgcagctgctgaccagtcatcagaatctgctccggatgacaaaggagaagctccggagttgtcaggtggccctacaggaacacgaggctctggaagaggccctgcaaagtatgtggttctgggtcaaggccatccaggacagattggcttgtgcagagtcaaccttgggatctaaggacaccctggaaaaacgcctatcccagatccaagatattcttctgatgaaaggggaaggggaagttaagcttaacatggctattggcaagggcgagcaagccctgcgttccagcaataaggaagggcagcgggtcattcagacgcagctggaaactctgaaggaggtttgggccgacattatgagctcctccgtgcatgcccagtccactttggagagcgtgatcagccaatggaatgactacgtcgagcggaaaaatcagcttgagcagtggatggagtccgttgatcaaaaaatcgagcaccctctgcaaccacagcctggtttaaaggaaaaatttgtcctgctcgatcacctccagtcaattctcagtgaggctgaggatcataccagagcccttcacagattgattgcaaagagtagagaactatatgagaaaactgaagatgagagcttcaaggacacggcgcaggaagagctgaagacacaatttaacgacatcatgaccgttgctaaagaaaaaatgaggaaagtggaagaaatcgtgaaggaccaccttatgtatttagatgctgtccacgagttcaccgactggttgcatagcgccaaggaggaattacaccgctggagtgacatgtccggcgactccagcgccactcagaaaaagttgagcaaaatcaaggagctgattgactctagggaaattggggctagccgactgagccgcgtagagagccttgctcccgaggtaaagcagaacaccactgccagcggatgcgaactgatgcataccgaaatgcaggctctcagggccgactggaaacagtgggaggactcggtattccagactcagagctgcctcgaaaatctggtgagccaaatggccctcagtgaacaggaattctccggacaagtagcccaactcgagcaggctctggagcagttcagcgctctgctaaagacttgggcccagcagctgacactcctcgagggcaaaaataccgacgaagagattgtggagtgctggcataaagggcaggaaattctggacgctcttcagaaagccgaacctaggaccgaagacttgaagagtcagctgaacgagctttgtagattctccagagatttgagcacatattccgggaaagtcagtgggctgatcaaagaatataactgtctgtgcctgcaggcaagtaagggctgccagaacaaggagcagattctccagcagaggttccgtaaggctttcagagatttccaacagtggcttgtgaatgcaaaaatcactaccgccaagtgcttcgacattcctcagaacatcagcgaagtttccacttccctgcagaaaattcaggaatttctcagtgagtcagagaatggccagcacaagttaaacatgatgcttagcaagggcgaactcctctccaccttactcacaaaggaaaaagctaagggaatccaggccaaagttacggccgccaaagaggactggaagaattttcactccaacctgcatcagaaggaatcggccctcgagaatttaaagattcagatgaaagattttgaggtctctgcagaaccaattcaggattggctatcgaagacggagaaaatggtgcatgagtcaagcaacagattgtacgacctccccgccaagcgccgggagcagcaaaagcttcagagtgtcctggaggagattcactgttacgaacctcaacttaatcgtctcaaggagaaagctcaacaactctgggaaggccaggcagcctcgaagagcttcaggcatcgggtcagccagctgtctagtcaatatttggccctgagcaatcttaccaaggaaaaggtgtcaaggttggatcggatcgtggccgagcataaccagtttagccttggcatcaaggaactccaagattggatgacagatgcaatccacatgctggactcatactgccatcccacgagtgataagtcagtgctggactcccgtaccctcaagctggaagccttgctgagtgtgaaacaggaaaaggagattcagatgaaaatgattgtcacccgcggagaatcagtgctgcagaatacaagccccgagggtatcccaaccattcaacagcagctgcaatcagtaaaggacatgtgggcgtctctcctgagcgcgggcatcaggtgcaagagagtgagacttccctgcgcttacattgccctgaaactgcgcgttcaccagcacgctgagctccgggacaaaactacaatgctaggaaaggcaaaggaagccgtgacaaaatcagaaaagctcgtgcggctgcaccaggagtatcagcgcgacttgaaggccttcgaggtgtggctgggtcaagagcaagagaaacttgatcaatactctgtcctagagggcgacgcccacacgcatgagaccacattgcgagacctacaggagttacaggttcactgcgccgagggacaagcccttctcaactcggtgctacacactagggaagacgtgatacccagcggcattccgcaggccgaggatcgtgcgctggaatctttgcgccaggactggcaagcctaccagcaccggctgtccgagactcgcacgcagtttaataatgttgtgaacaagctcagacttatggaacagaagtttcagcaggttgatgagtggctcaagacagcagaggagaaggtgagccctcggacaaggcggcaaagtaatagggccacaaaagagatccagctgcatcaaatgaaaaagtggcatgaagaggtcacagcatacagggacgaagtggaggaagtgggggctcgggctcaggaaatcctcgacgagtcccacgttaattcaagaatggggtgtcaggcaacccagctgacttctaggtaccaggcgctcctcctccaagttctcgaacagatcaagtttttagaagaagagatccagtcattggaggagagcgaatctagcctgtctagctacagcgactggtatggttccacccataagaacttcaaaaatgtcgccacgaagattgataaagttgacacagtgatgatggggaaaaagctgaaaaccctcgaggtcttactgaaagacatggagaaaggtcactcactgctgaaatctgcccgcgagaagggggaacgcgccgtgaagtacctggaggagggcgaggccgagaggcttcggaaagaaattcatgatcacatggagcaattaaaagagctgacctccactgttcgaaaagagcacatgactctggagaagtctctccaacagactgtgttgagccatgaaccttccgtaaaaagcgttagagagaaaggtgaagcactcttagagctggttcaggatgtgacgctcaaagacaaaattgatcagctgcagagcgactatcaggatctttgctcgattggtaaagagcatgtgtttagcttagaagccaaagttaaggaccacgaagactacaacagcgaactgcaggaagtggagaagtggcttctgcagatgtccggcaggctcgtggcccctgatttgctggagacgagcagcctagagaccatcactcagcagctggcgcatcataagatgtaccagagcctggagcatgagctgcagaagcacgtaagccggcaagatacactgcagcagtgtcaggcttggctctcggctgtgcagcccgacctcgagcccagtccgcagccacccctatcaagggccgaggccatcaaacaagtcaagcatttcagggctctgcaggagcaggccagaacttatctggacctactgtgctctatgtgtgatctgtccaatgcatcagtaaaaacaaccgctaaggacatacagcagacagaacagactattgagcaaaaattagtgcaagcccaaaacctgacgcagggatgggaagagatcaagcatcttaagtccgaactgtggatttatctccaggacgcagatcagcaactccagaatatgaagcgccggcactccgaactggagctaaatattgcccaaaatatggtctctcaggtgaaggacttcgtaaagaagttacagtctaaacaggcctcagtcaacactattatcgaaaaagtgaacaagctaacaaaaaaggaggagagcccagagcataaggaaatcaatcatctgaatgatcagtggttggacctatgcagacagtcgaataatctctgcctgcagcgtgaggaagacctgcaacgtaccagagactaccatgactgtatgaatgtggtcgaagtgtttttggagaaatttacaacagagtgggataacctggccaggagcgatgcggagtcaactgccgtgcatctggaagccctcaaaaagcttgccctggccctgcaagagcgtaaatacgcgattgaagacctaaaagatcagaagcagaagatgatcgagcacctgaacttagatgacaaagagttagtgaaggaacagaccagccatttggagcagaggtggttccagctggaggatcttatcaaacggaaaatccaggttagtgtcaccaacctggaggagctcaacgtcgtccagtctaggttccaggagctgatggagtgggcagaagagcagcagcccaatatcgccgaggcattaaagcagtcccctccccctgacatggcccagaatctgctgatggaccatctcgccatttgcagcgagttggaagctaagcagatgcttcttaaatccctaatcaaggacgccgaccgggtgatggcagatcttggtttaaatgagcgacaggtgatacagaaagccctgagtgacgctcagtcccatgtaaactgcttaagtgaccttgtcgggcagcgtcgtaagaagcatttcaaggaggacttcgataaggcttgtcattggctgaagcaggctgatatcgtaacatttccagaaattaacctgatgaatgagtctagcgagctgcacacccagctggccaaataccagaatatactcgagcagtcacccgagtacgagaacctcctcctgactctccagcgcactggtcagacaatactccccagcctgaacgaagtcgaccattcctacctgtctgagaaactgaatgccctcccccgccagttcaacgttatcgttgctctcgctaaggataaattctacaaggtccaggaggctattctggcaaggaaagagtacgcgtccctgattgaactcactactcagagcctgtctgagcttgaggcgcaatttctcagaatgtcaaaagtgcctacagacctcgctgtcgaagaagcgctgagcttgcaggacggctgccgagccattctcgatgaggtcgccggattgggcgaggccgtggatgaactgaatcagaaaaaggaaggtttccgatctactggacagccatggcagccggataagatgttgcaccttgtcaccctttatcataggctcaagagacagactgaacagcgagtgagcctcctggaggacaccactagcgcgtaccaggaacatgaaaaaatgtgccaacaacttgagaggcagttgaagtccgttaaagaggagcagtcgaaagttaatgaagaaacccttccggccgaggaaaagctcaaaatgtaccattctcttgctggctcactccaggactcaggaatcgtgcttaagagggtgacaattcatctcgaggacttagctccacacctagatcccctcgcctacgaaaaggcccgacaccagatccaatcctggcagggggagttgaagctgctcacttcagccattggcgaaaccgtgacggaatgtgaaagcagaatggtacagtccatcgatttccagaccgagatgtccagaagtttggactggctgcggcgagttaaagcggaactcagtggaccagtgtacctggatctcaacttacaggatatccaagaagaaatccgcaagatccagattcaccaggaagaggttcagtcaagcctgcgaataatgaatgcactgtcgcacaaggaaaaggagaagttcacaaaggcaaaggagcttatatccgcagatctggagcactcccttgcggagctctctgagctggacggcgatatacaagaggctctgaggaccaggcaagccaccctcacagagatatatagtcagtgccaaagatattatcaggtttttcaagctgccaacgattggctggaagacgctcaggaactcttacagctggccggcaatggcctggatgtagaatcggcagaggaaaacctgaaaagccacatggaattcttctccacagaggaccagtttcacagcaacctggaggaactccacagcttggtggctactttggatcccctgataaagcccacagggaaggaggaccttgagcagaaagtagcttctctggaactgaggagccagcggatgagcagagatagcggtgcccaagccctcgtctctgtcgtgaactccttccatgagaagattgtggccctggaggaaaaggcttcccaactcgagaaaacaggaaacgacgccagtaaagccacactgtcacggtctatgacgactgtgtggcaaaggtggacaaggctgcgagccgtagcacaagatcaggagaagattctcgaggacgcagtggatgaatggacaggtttcaataataaagtgaagaaagctacggaaatgatcgatcagcttcaagataagctcccagggtcctcagctgagaaagcttccaaggctgaactgctgacattgctggagtaccacgacacattcgtcctcgagctcgaacagcagcagtcagccctcggcatgctccggcagcaaaccctgtcaatgctgcaggatggtgctgcccctactcccggtgaggaacctcctctcatgcaagagatcacggctatgcaggaccggtgtttgaaaatggtagaaacccagatcaacagtgtcaagtgctgggtgcaggaaactaaggaatatttgggaaatccgaccattgagatcgatgctcaactagaagagcttcagatactgctgacagaagctacaaatcacaggcagaacatagagaaaatggccgaggagcagaaagaaaagtacctgggcctctacactatcctgccgtcagagttgtctttgcaactggcggaagtggcactggacctgaagatcagggatcagatacaggacaaaatcaaggaggtcgaacagtctaaggccacctcacaggagttgtctcggcagatccagaagctggctaaagacttgaccacgatattaacaaaactaaaagcaaaaacagataatgtcgtgcaggctaagaccgaccagaaagcggcctcacacctggaagaatacaacgagatgctggaacttatcctgaaatggatcgagaaggctaaggtgctcgcacacggaacaattgcttggaattccgcaagtcagctgagggaacagtacatactccaccagactctacttgaggagagtaaagaaatagattctgaactagaggcaatgactgagaaattgcagtacctcacctctgtgtactgcaccgagaagatgtctcagcaagtcgccgaactgggaagagaaacagaagagctgcgccagatgattaaaattcggctccagaatcttcaggacgcggctaaggacatgaaaaagtttgaggcagaattaaagaagttgcaggctgctctagagcaggcccaggcaaccctcacgagccccgaggtcgggagactcagtctgaaagaacagctaagtcatcggcagcaccttctgtcggaaatggagtctctgaaaccgaaggtgcaggcggtgcaactatgccagagcgccttgcgtattcccgaagatgtagtcgcctctctgcccctttgccacgcggccctgcgcctgcaagaagaggcctcccgattgcagcacacagccatccagcagtgtaacattatgcaggaagcggtggtccagtatgaacaatacgaacaggagatgaagcaccttcagcagcttattgaaggtgcccatcgagagattgaagataaaccagttgcaacatctaatattcaggagctccaggcccagatatctcgccacgaggagcttgcccaaaagatcaaagggtaccaggagcaaatcgccagccttaatagcaaatgtaagatgctgactatgaaagcgaagcatgctacaatgcttctcaccgtcactgaggtagagggcttggccgagggcaccgaagatctggatggcgagcttctacccactccatccgcgcatcccagtgtcgtcatgatgacagcaggcagatgccatacccttctctcacccgtgaccgaggagagtggcgaggaggggacaaattcggagataagctcaccccccgcctgtcgatcaccctcccctgtcgctaatacggatgcatcggttaatcaggatatcgcatactaccaagctctgagtgcagagagactccagaccgatgccgccaagatacacccctcaacttccgcaagtcaggaattttatgagcctggtttggaaccctctgccaccgccaaattaggagaccttcaaaggagctgggaaactcttaagaatgtcattagtgagaaacagaggacgctgtacgaggccctggaaagacagcagaaatatcaggactccctccaaagtatctcaacaaagatggaagccatagagttaaagcttagtgagtctccagaacctggacgatctccagagagccaaatggccgaacatcaagccctgatggacgagatcctgatgctgcaggatgagatcaacgaactgcaatccagcctggcggaggaactcgtctccgaaagctgtgaggcagaccccgccgaacaactagccttgcagtctacccttacagtgcttgctgagcgcatgagtactatccgaatgaaggcctctgggaaacgtcaactacttgaggagaaactgaatgatcagctggaagaacaacggcaagaacaggcccttcagagatatcgctgtgaggcggatgagctggatagctggctgctgtctaccaaggctacactggacacagcactttcaccccccaaggagccgatggacatggaagctcaacttatggattgccagaatatgctcgtcgagatcgagcagaaggtggtggctctatcagaattgtcagtgcataatgaaaacttattgttggaggggaaggcccacacaaaagatgaagctgagcaacttgctgggaaattgaggaggttaaagggctctttactagaactccagcgggcccttcacgacaagcagctgaacatgcaaggcactgctcaagagaaggaagagagcgacgtcgacctgacagcgactcagtcaccaggagtccaggagtggcttgcccaggcgcgaaccacctggacacagcagaggcagtccagcctccagcagcagaaagagctggagcaggaactcgccgaacaaaaatctcttcttcgttcagtcgccagcaggggtgaggagattttaattcagcactcagccgctgaaacctccggcgacgctggggagaaacccgatgtgctttcccaggagctaggcatggaaggtgagaaatcaagcgctgaggatcagatgagaatgaagtgggagtctctccaccaggagttcagcaccaagcaaaagttactgcagaatgtgcttgagcaggagcaggagcaagtgctttatagcaggccaaaccgtcttctttccggggtcccactgtacaaaggcgacgttcctacgcaggacaaaagtgccgtgacaagcctcttggatgggctcaaccaagccttcgaggaggtgtcttcccagtccggtggagcgaaacgacagtccattcacctggagcagaaactgtacgatggtgtaagcgcaacctctacctggctcgacgatgtcgaggagcggctcttcgtggccaccgcactcctgcccgaggaaaccgaaacatgcctgttcaaccaagagatcttggctaaagacataaaagaaatgtccgaagaaatggataagaataagaatctattcagtcaggccttccctgaaaatggcgataaccgagacgtaattgaggatacgctgggatgcctgctgggacggctgagcctgctcgactctgtggtcaaccagagatgccaccagatgaaagagcgcctccaacagattttgaacttccagaacgacctgaaggttcttttcacaagtcttgccgacaacaaatacattatattacagaagctcgcaaatgtgttcgaacaacccgtagctgagcagatcgaggcaattcaacaggcagaagatggcctgaaagagtttgatgctggaatcatagagcttaagagaagaggcgacaaacttcaagtagaacagccatctatgcaggaactgtctaagctgcaggacatgtacgatgaactcatgatgatcattggcagcagacggagtgggctgaatcagaatttaaccctgaagtcccagtatgagagggcactgcaagacctggcggacctcctggaaaccgggcaggaaaagatggctggagaccagaaaatcatcgtttcctccaaggaggagattcagcagttgctcgataagcataaggaatacttccagggattggaaagccacatgatcctgactgagaccctgttccgaaaaataatctcttttgctgtgcagaaagagacacagtttcatacggagcttatggcacaggctagcgccgtgttgaaacgagcacataagagaggagtggagcttgagtatattttggaaacctggtcacatcttgacgaggaccagcaggagctgagtaggcagctagaggtggttgaatcctcaatcccgtccgtggggctggtcgaagaaaatgaggataggctcatcgacaggatcaccctgtaccagcaccttaaatcctcccttaatgaatatcagcctaagctgtaccaagtgttagacgatggcaagcgtctactgatcagcatttcttgtagcgatctggagagtcagctcaaccagctgggagaatgctggttgtctaacaccaacaaaatgagcaaagaactccacagactcgagaccattctcaaacactggactcggtaccagtccgaatccgcagacctcatccattggctgcagtccgcaaaagataggttagagttttggacacagcagagtgtgacagtcccacaggaactggaaatggtgcgcgatcacttgaatgccttcctggagttttccaaggaggtcgatgcccagtcttctctcaaaagcagtgttctgtctaccggtaatcagcttctccggctgaagaaagtggatactgccactctgcgctctgaactatctcggattgatagccaatggactgacctactgaccaatatacccgccgtacaggagaagttgcaccagctgcaaatggacaaacttcctagccgacacgccatatccgaggtgatgtcatggattagcctgatggagaacgttattcagaaggacgaagataatatcaagaactctattggctacaaggccatacatgagtacctgcagaagtacaaaggtttcaagatcgatataaattgtaaacagttgacggtggacttcgtaaatcaatccgtcctccagattagctcacaggatgtggagtccaagcgcagtgacaagacagactttgcggaacagctaggcgccatgaacaaaagttggcaaatactgcaaggtctggtgaccgaaaaaattcagctgctggaaggtttgttagaatcgtggtctgagtacgaaaataacgttcagtgccttaaaacatggtttgagacacaggagaagcgactaaagcagcagcatcgcattggagaccaagccagtgtgcagaacgccctcaaggactgtcaggatctcgaggacttgataaaagcaaaggaaaaggaagttgagaagatcgaacagaacggtttagccttgatccagaacaaaaaagaagacgtctcatccatcgtaatgtcgacactgcgcgaactgggccagacctgggccaacctggatcacatggtggggcagctgaaaattctgcttaaatcagtcttggaccagtggtctagtcacaaggtggcattcgataagataaactcctacctcatggaggcacgatacagcttgtcacgctttcgactacttaccgggagtctcgaagccgtacaggtacaggtggacaatttgcaaaatctccaggatgatttagaaaagcaggagaggtctcttcagaagtttggatccataactaatcaattgctgaaggaatgccatcctcccgtgaccgaaactttaactaacacgctcaaggaagtgaacatgaggtggaacaacctgttggaggaaattgctgagcagctacagagcagcaaagcgctcttacaattgtggcagagatacaaggactacagtaaacagtgcgcctctactgtgcaacaacaggaggatcggaccaacgagcttctgaaggcagccactaataaggacatcgccgatgacgaggtggccacatggatccaggattgtaatgatctactgaaaggcctcggcaccgtaaaagactctttattttttctgcacgagctaggcgagcagctcaagcagcaggtcgatgcctccgctgcctccgcgatccagtccgatcagctgtccctctcccaacacctgtgtgcgctagaacaagcgctgtgcaaacagcagacttccctgcaagcaggggtactggattacgaaaccttcgcaaagagcttggaagcgcttgaggcctggattgtggaggctgaagagatcctgcaaggtcaagatccatcgcacagctcagatctctccaccatacaggagcggatggaagagctcaaaggacagatgttgaagttcagtagcatggcccccgacctggaccgtcttaacgaactcggctatcgacttcctctgaatgataaggagattaaacgtatgcagaacctcaacagacactggagtctcatatccagccagaccaccgagcgcttttccaaactccagtcttttctccttcagcaccagactttcctggagaaatgcgagacttggatggaattcctcgtacagacagaacagaagctggctgtggaaatcagtggaaactaccagcacttactggagcaacagcgggcccatgaactatttcaggccgagatgttctctaggcagcagatcttgcacagtataattatcgatggtcagcggcttctcgagcaggggcaggttgatgaccgagacgagttcaacctgaagctgacccttttatctaatcaatggcagggagtcattaggcgcgcacagcagagaagggggataatcgattcacagatccggcagtggcagcggtaccgcgaaatggctgagaagctgaggaagtggctggtggaggtctcataccttcctatgtcaggactgggctcagtgcccattcctctgcaacaggccagaaccctgtttgatgaggtgcagttcaaagagaaagtgttcctgcgacaacaggggagttatatcctgacagtggaagctgggaaacagctgttactgagcgctgatagcggagctgaggcagcacttcaggccgaattagcagagattcaggagaagtggaagtccgcatccatgcgtttggaggagcagaaaaagaagctagcattcctgcttaaagactgggaaaagtgcgagaagggaattgctgactccctggagaaattgcgcacttttaagaaaaagttgagccagtccctgcctgatcatcatgaggagttgcacgccgagcaaatgcggtgcaaggaactggagaacgccgtggggagctggacagacgatctgacccagctgtcactgctgaaagacacactgtctgcctacatcagcgcggacgacatcagtatcctgaacgagagggtggagctcctgcaaagacagtgggaagaactctgtcatcaactgagccttaggcgccagcagataggggaacggctgaacgagtgggctgtattttcagagaaaaataaagaactgtgcgagtggcttacacagatggaaagcaaagtgtctcagaacggtgacattctgatcgaagagatgatcgaaaaactcaaaaaagactaccaggaggagatcgcgattgcacaggagaataaaattcaactgcagcagatgggcgagagactggcaaaggcttctcacgagagcaaggcgtctgagatcgagtataagttgggaaaagttaacgaccgttggcaacacctactagaccttatcgccgccagggtcaagaaactcaaggagacactggtggctgtgcagcagctggacaaaaacatgtcgtcgctgcggacttggctcgctcatatcgaaagtgagctggcaaaaccgatcgtttacgatagctgtaacagtgaggaaatccagcgcaaactaaatgaacagcaggagcttcagcgggacatcgagaagcatagcactggggtggctagcgtgctgaatctgtgcgaggtgctgctccatgattgcgatgcttgtgcgactgatgctgagtgtgactccattcaacaagctactcggaatctcgacagacggtggcgcaacatttgtgccatgtctatggaacgtcgcttaaagatagaagagacgtggcggttatggcagaagttcctcgacgattactcacggttcgaagactggctgaagagctctgaacgaacagctgcctttccatcgtcatctggcgttatttataccgtggcaaaagaagagttgaaaaaattcgaagcgtttcagcggcaggtgcatgagtgtcttacccagttagagctaattaataagcaatataggcggctggctcgggagaacagaaccgactccgcctgctcactgaaacagatggtccacgaggggaatcaacggtgggataatctgcagaagagagtgactagtattctccggagacttaagcatttcataggccagcgcgaggagttcgagactgccagggactccatattagtttggctgaccgaaatggacctgcagctgacaaatatcgaacatttctcagaatgtgatgtgcaggctaaaataaaacagctcaaagccttccagcaggagataagtctaaatcacaacaaaatcgagcagatcatcgcacaaggggaacagttaatcgaaaaaagtgagcctcttgacgcagcaatcattgaggaggagctagatgagctacgtagatactgtcaggaagtgtttggaagggtcgagagataccataaaaaattgattcggcttcccctgcccgacgatgaacacgacctgtctgaccgcgagctcgagcttgaggactctgccgccctgtccgacctccattggcacgatcgttctgctgactcacttctgagtccccaaccatccagcaacctgtccttgagccttgcccagccactgcgatcagagcgctcaggccgagatacccctgcatcagtggattctataccccttgaatgggaccatgattatgacttgagcagagatttggaatcggctatgtcacgagccctcccctccgaggacgaggaaggtcaggatgataaggacttctacctgaggggtgccgtgggtctgagcggggaccattctgccctcgagtctcagatcagacagctcggtaaagctctcgacgacagtaggtttcagatacagcagaccgagaatataattagatcgaaaacgccgaccggacctgagctcgatacctcctacaagggatacatgaagcttctaggagaatgctcttcctccattgactccgtcaaaaggttggagcacaagttgaaggaagaagaagaaagcctccctggatttgtgaacctgcattccacggagacccagacagctggcgtgatcgacaggtgggaattactccaagcacaggccctgtctaaagagctgaggatgaagcagaatcttcagaagtggcagcagttcaactcagatctaaactcaatttgggcctggcttggagacaccgaggaagagcttgagcagctgcagcggctcgagttgtcgacagatatacagacgatcgagctgcaaattaagaagctcaaagaattacagaaagcagttgaccaccgcaaagccatcatcctgagtattaacctttgttcccctgagttcacccaagctgactctaaagaaagcagggatctgcaagacagactgtcacagatgaacgggcgatgggatagggtttgctctctgctagaggaatggagaggtctcctgcaggatgccctgatgcagtgccagggatttcacgaaatgtcacacggcctgttgttgatgcttgagaatatcgatcgcagaaagaatgagatcgtcccaattgactccaatctggacgctgagattctgcaggatcaccataaacagctgatgcagatcaagcacgaattactcgagagccagctgagggtggcgagcctccaagacatgagttgccaactactggtcaacgccgagggtacagattgtctggaagccaaggagaaggtccacgtgataggaaataggctaaagcttctgctgaaagaggtgtctagacacatcaaagagctggaaaagctgcttgatgtgtcctcctcacaacaggatctgtcgtcgtggtcctccgccgacgaactggacacatccggctctgtctctcctacgagcgggcgttccaccccgaacaggcaaaagacacctaggggaaagtgctcattgagtcagcccggtccttctgtaagtagccctcatagccgttcaaccaaaggcggatccgattcatcactaagcgagcccgggcccggccgtagcggtcggggttttctctttcgagtactgcgcgcagcgctgccgcttcagttactcttactcctgctaattggtctggcatgtctcgttccgatgtctgaggaggactatagctgtgctctgtcaaacaacttcgcccgaagcttccatccaatgcttcggtataccaacggcccaccacccctctag

SEQ ID NO: 135872 - DNA, 9966 bp, synthetic construct
  misc_feature 1..9966: note = Description of Artificial Sequence: Synthetic coding sequence
  source 1..9966: mol_type = other DNA
atggaattggatgccgccgtccaaaaatttctggagcagaacggtcagttaggcaaacccctggccaaaaagatcggcaagctgacagagctgcaccagcagactatccgacaggccgaaaacaggctcagcaagttaaatcaggcagctagtcatctggaggagtataatgagatgttagagctgatccttaagtggatcgaaaaggcaaaggtgctggctcacggcaccatcgcatggaactcggcatcacagctacgggagcagtacattcttcatcagactctcctggaagagtctaaagagattgactccgaattggaggctatgactgagaagctgcagtatttgacttcagtgtattgcaccgagaaaatgtcgcagcaggtggcagaattgggaagggagaccgaggaactccggcagatgatcaaaatcagactacagaacctccaggatgcagcaaaggatatgaagaagttcgaagccgagctgaaaaagttgcaagcggcgctggagcaggcccaggctactctcacctcccccgaggtcgggcggttatcacttaaggagcaactctctcatcgacagcacctgttgtctgagatggagagccttaaacccaaagttcaggccgtgcagctatgccagtcagccctgaggattcccgaggatgtggtcgccagcctcccactttgccacgctgccttaagactgcaggaagaggccagccggttacaacatacagctatccagcagtgcaacattatgcaggccgcggtcgtgcagtacgagcagtacgagcaggaaatgaaacatctgcaacagctgattgaaggtgcccatcgggaaatcgaggacaaaccagttgcaaccagcaacattcaggaactgcaagcccagatttcacgtcatgaggagcttgctcaaaagataaaggggtatcaagaacagatcgccagcctaaactccaagtgtaaaatgcttacaatgaaagccaaacacgcgaccatgctcttgaccgtcactgaggtggaaggactcgctgaagggaccgaggatctggacggcgagctgctgcctactccgtcagcccatcccagcgtggtgatgatgaccgctggccggtgtcacaccctgctctctcctgtgacagaggaaagtggcgaagagggcaccaacagtgaaattagctctccccctgcctgcaggtcgccatcccctgtggcaaataccgatgcgtctgtgaatcaagacatcgcatactaccaggcactgtcggctgagcggctccagactgatgccgctaaaattcacccctcaacgtctgcttcccaagaattctacgaacctggcctggaaccatctgctaccgccaagctcggggaccttcagcggagctgggaaaccctgaaaaatgtgatcagtgaaaagcagcggacactgtacgaagctcttgagcgtcaacagaagtaccaggattcgctccagagcatatcaacgaagatggaagccattgagcttaagttgagcgaaagccccgagccaggaaggtcccctgaatcacaaatggccgagcatcaggcactcatggacgagatcctgatgctacaggatgaaatcaatgaactgcagtcttctctggcagaggagctggtttccgaatcgtgcgaggccgaccccgctgaacaattggccctccagagcacgttaacggtgctcgctgagaggatgtcgacaattcgaatgaaggcttcgggtaagaggcaactcctggaagagaaattgaacgatcagcttgaagaacagcgccaagagcaggctctacagcggtaccgctgcgaggccgatgagttagattcatggctcctttcaactaaagctaccctcgataccgctttgtcccctccaaaagagcctatggatatggaagcccagctgatggactgtcagaacatgctagtggagatcgaacagaaagtggtcgctctctccgaactgagtgtccacaatgaaaacctcttactggagggcaaggcgcacacaaaagacgaggccgagcagctggccggaaagttaaggcgcctgaaaggcagcctattagagctgcagagagccctacacgacaagcagcttaatatgcagggtacagcccaggagaaagaagagagcgatgtagacctaactgcaactcaatctcccggggttcaagagtggctagctcaggctcgcacgacctggacccagcagcggcagagttcattgcagcagcaaaaggagctggaacaggagctcgccgagcagaagagcctcctgaggagtgtggcatctcggggtgaggaaatactcattcagcacagtgcggcagagacgtccggcgatgccggggagaaacctgatgtactctcccaggaactgggcatggagggggagaagagctccgctgaggaccagatgaggatgaaatgggagagtttgcaccaagaattttctacaaagcagaagctgctccagaatgtcctcgaacaagagcaagagcaagtgctgtattcaaggcccaaccgcctgttgtcaggggttccactatacaagggagatgttcccacccaggataagagtgccgttacatctctgctggacggacttaatcaagcattcgaggaagtctcgagccagtcaggcggagccaagcggcagagcattcatcttgagcaaaaattatacgacggcgtgagcgcaacctcaacttggctcgacgacgtggaagagaggcttttcgtcgcaactgccctcctcccagaggagaccgagacgtgcctcttcaaccaagaaatcctggccaaagacattaaagagatgagcgaggagatggacaagaacaaaaacctcttcagtcaggcatttcctgaaaatggcgacaatagggacgtgatcgaggataccctgggctgcctgctcggacggctgtccttgctggacagcgtggtgaaccagagatgtcaccagatgaaagagcggctgcagcagattctaaattttcagaatgatcttaaggtactgttcacgtccctcgccgacaataaatatataatcctccagaaactggccaacgtattcgagcagcctgtcgcggaacagatcgaagctattcagcaagccgaggatggcctgaaagaatttgatgccgggattattgaacttaaacgaagaggcgataaacttcaggtggagcagccttccatgcaggagttatctaaacttcaggacatgtatgacgaactcatgatgatcatcgggtcccgccgctcaggactcaaccagaacctgaccctcaaatcccagtatgagagggccttacaggatctggctgacttgctcgaaactggccaggagaagatggccggagaccaaaaaatcatagtctcatcaaaagaggagattcagcagctgttagacaagcacaaggaatatttccagggacttgaaagtcatatgatcttaacagagacactgtttcgcaagattatcagtttcgctgtgcagaaagaaacccagtttcatactgagctcatggcgcaggctagcgccgttctaaaacgggcccacaagcggggcgtcgagctggagtacatcctagagacatggtcacacctggacgaggaccagcaagagttaagcaggcagctggaagtggtggagagcagtatcccgtctgtggggctagtggaggaaaacgaggacagactcatagacaggattaccctgtaccagcatttgaagagctcattgaacgagtaccaacctaagttgtatcaggtgctggatgacggaaagcgcctgctcataagcatctcttgcagtgatctcgagagtcagcttaatcagttgggggaatgctggttaagtaatactaacaagatgagtaaagagttgcatagactggagaccattttaaagcattggaccagataccaaagcgagtcagccgatctgattcactggctccagagtgcaaaagaccggttggaattttggactcagcagagcgttacagtgccccaggaactggagatggtgcgtgaccacttaaatgcattcctcgaattttctaaagaggtagacgctcagtcctctcttaagagttctgtcttatccactggcaatcaactcttgaggctcaaaaaagtggacactgcgaccctccgatccgaattgtcccgaatcgactcccaatggaccgatctgcttactaatatccctgctgttcaggagaagcttcatcagttacagatggacaaactcccaagcaggcatgcgatcagtgaagtgatgtcatggatttcactgatggaaaacgtaattcagaaggacgaggacaacattaaaaatagtatcgggtacaaagcaattcacgagtacttgcagaagtacaagggattcaagattgacattaattgcaaacagctgacggtggacttcgtgaatcagtctgtcctgcagatatccagccaggacgtcgagagcaaaagaagtgacaagaccgatttcgccgagcaactgggcgcgatgaacaaaagctggcagatcctccaaggtctcgtcacggagaagatccagcttttggaaggtctgctcgagtcatggtcagaatacgagaataatgttcagtgcctgaaaacctggttcgagacccaggaaaaacgcctcaagcagcagcatagaatcggggatcaagcctcagttcagaacgctttgaaagattgccaagacctggaagacttaatcaaggcaaaagaaaaggaagtagaaaaaatcgaacagaatggcctcgcccttattcagaacaagaaggaagatgtctccagtatcgtgatgagcacactccgagaacttgggcaaacctgggcgaacttggatcacatggtcggccaattgaagattctcctgaaaagcgtgttagatcagtggtcaagtcataaggtggcctttgataaaattaacagttaccttatggaagctcggtactctctgagccggttccgacttctgacaggtagtctggaggctgtgcaggtccaggtagacaacttgcagaacctccaggacgatctggagaagcaggaacgctctctccagaagtttggctcaataacaaaccagctgctgaaagagtgtcatccccctgtcaccgaaacactcacaaacacactgaaagaggttaatatgagatggaataatttgctcgaggaaattgccgagcagttacagagttcgaaagctctgttgcagctctggcagcggtataaagattattcaaagcagtgcgcctcaacagttcagcagcaggaagacaggactaacgaactgctgaaagctgccaccaataaagatatcgccgacgacgaggtggccacctggatacaggactgcaacgatctgctaaagggtctcggaaccgtcaaggattcactctttttcctgcatgagctcggagagcagctgaagcagcaggtggatgcttccgctgcgtcagcaatccagtctgaccagctctctttgtcacaacacctgtgtgcactggaacaggcactgtgtaagcagcaaaccagtctgcaagccggagtccttgactacgagaccttcgctaagagcttagaggcgctagaggcttggatagttgaagctgaagagatcctgcagggacaagatccctctcattccagtgacctctccactatacaagagcggatggaggaactcaaaggtcaaatgctcaagtttagctccatggctcccgacttggatagattaaatgaattaggctataggctacccctcaacgacaaagagatcaaaagaatgcagaatctgaacagacattggtctctgataagctcccagactaccgaaaggttctccaagttacaatcattcctactgcagcaccagacctttctcgagaaatgtgaaacctggatggaatttctcgtccagacagaacagaagttggcggttgaaatatcgggcaactaccagcatttgcttgaacaacagagagcccatgagctctttcaggccgagatgtttagccgtcagcagatcctgcatagtataattatcgatggacagcggctgttggagcagggacaggtggatgatagagatgaattcaaccttaagctgaccctgctatcaaaccagtggcaaggcgttatcaggcgagcacaacagaggcggggaatcatagattcccagatcagacagtggcaacgctatagagaaatggccgagaagttgcggaagtggctggttgaagtgtcctacttacccatgagcggccttggctctgtgcccatcccgttgcagcaagcaaggacattgtttgatgaagtgcagtttaaagagaaagtctttctgcgacagcagggatcctatatcttgaccgtggaggcaggtaaacagctgctgctcagtgctgactcaggtgctgaggctgctttacaggccgagttggcagaaattcaagaaaaatggaagtccgcttccatgcgactggaggaacaaaagaaaaagctcgctttcctcctgaaagactgggagaagtgtgagaaggggatcgccgacagcctcgagaaactaaggacctttaaaaagaaacttagccagagcttgcctgatcaccacgaggagctgcacgcggagcagatgcgctgtaaggagttagagaacgcagtcggatcatggaccgatgatttgacgcagctttctctcctcaaagatactttatctgcctacatcagtgctgatgatatatcgattttaaacgaacgcgtggagctgctgcagaggcagtgggaggaactatgccaccagctgtccctcagaaggcagcagatcggagaacggctcaacgagtgggctgttttctccgaaaagaataaggagttgtgtgaatggttgacccagatggagtctaaggtgagccagaacggcgacatcttgattgaagagatgattgaaaagttgaaaaaggattatcaagaggagatcgcaatagcccaggagaataaaatccagctccagcaaatgggcgaaagattagccaaggcgagccatgaatctaaggcctcagaaattgaatacaaattgggcaaggttaacgacaggtggcagcacctgctggacctgattgctgcccgcgtgaaaaagctgaaagagacgctagtggctgtgcagcaactggacaagaacatgagctccctaagaacatggcttgcacacatagaaagtgagcttgccaaaccaatcgtttatgacagctgcaatagcgaggagatccagcgcaaattaaatgaacagcaggagctgcaacgcgatattgaaaagcattccactggagttgctagcgtgctcaatttgtgcgaggttctactccacgactgtgatgcctgcgcaaccgatgcagaatgtgactcgatccagcaggcgaccagaaacttggacaggcggtggcgtaacatctgcgctatgagcatggaaagacgcttgaagatagaggagacgtggcggttgtggcagaagttcctggatgattactcaaggtttgaagactggctgaaatcatctgaaagaactgctgcattcccctccagcagtggcgtgatttacacggttgctaaggaggagctcaaaaagtttgaggccttccaaagacaggtgcatgagtgtctgacccagctggagttgattaataagcagtatagaagactggcgcgagagaatcgaacggacagtgcctgttccttgaaacagatggtgcacgaagggaatcagcgctgggataacctgcagaaacgagtgactagcatcctgcggcgtctgaagcatttcattggacaaagagaagagtttgagacagcacgggactccatcctggtatggctcactgaaatggacctccagttaactaacatcgaacatttttcagaatgtgatgtgcaggctaagataaaacagctcaaggctttccagcaggagatcagtctgaaccacaataaaatagaacagattatcgcacagggggagcaattgattgaaaaaagcgagcccctcgatgccgctattatcgaagaggaattggatgagctcagacgctattgtcaagaagtgtttgggcgcgtggaaagataccataaaaaacttattcggttaccactgccagacgacgaacacgacctctcggaccgtgagctggagcttgaagacagtgccgccctgtccgacctgcattggcacgataggagcgccgattctttgctgtcccctcagccctccagtaatctgagcctgtccttagcgcagccactgaggtctgagcgatctggtagggatacccccgcatctgtggactccattccattggagtgggaccacgattacgacctgtcacgggacctggagtctgctatgagccgcgccttaccatcggaagatgaggagggtcaagacgacaaggacttctacctgcggggggccgttggactgtcgggagatcattccgccctcgaaagtcaaatacgccagctcggcaaggcgctggatgactcccgcttccagatacagcagacggagaatatcattcgatcaaaaactccaacgggcccagaactggatacgtcatacaagggatacatgaaactgttaggtgaatgctcatcctctattgattctgtaaaacggctcgaacataaactgaaagaagaagaggaaagcttaccagggttcgtgaacttgcacagcaccgaaacgcaaacagccggagtgatagaccggtgggagttgctccaagcacaggctctcagcaaggagctgcgcatgaaacaaaatctgcagaagtggcaacagttcaatagcgacctgaactctatctgggcttggctcggtgataccgaggaggagctggaacagctgcagcgattggagctgagcacggatatacagaccatcgagctccagataaagaaactaaaagagttacagaaggcggtcgaccatcgcaaagccatcatcttgtccataaatttgtgttcaccagagtttacgcaggccgactcgaaagagtcccgggacttgcaggataggctgtctcagatgaacgggagatgggacagagtgtgctctttgctcgaagagtggaggggacttctgcaggacgcccttatgcaatgccaaggatttcacgaaatgtcacacggactcctgctgatgcttgagaacatagatcgtagaaagaatgagatcgtgccgatcgactctaacctggatgcagaaatcctgcaggaccatcataagcagctgatgcaaataaagcatgagctgcttgagtctcaactgagagtggctagcctacaggatatgtcttgtcagctcctcgtgaatgcagaggggactgattgtctggaagctaaggagaaggtacacgtcatcggaaacaggctgaagctactcctgaaggaggtctctagacacatcaaggagttagaaaagctgctcgatgtcagcagttcccagcaagaccttagcagctggagtagcgccgatgaattggacacttcgggaagtgtaagtcccaccagcggccgtagtacccctaatcgacagaagacaccccgtggcaagtgcagtctgagtcaacctgggccttctgtttcatccccgcacagcagatctactaagggagggtccgactcaagcctgtcggagcctggcccgggcagatcagggaggggctttctgttccgcgtgttgcgcgctgccctccccctacaactgctgctgttgctgctcatcggtttagcgtgtctcgtgcctatgtccgaagaggactattcttgcgctctgtcaaataacttcgccaggagcttccatcccatgcttaggtacactaatgggccgcctcctctgtag

SEQ ID NO: 135873 - DNA, 2934 bp, synthetic construct
  misc_feature 1..2934: note = Description of Artificial Sequence: Synthetic coding sequence
  source 1..2934: mol_type = other DNA
atggtcgtcgcggaagacctcagtgcactgcggatggcagaggacagctgtgtggatgccgaccttcccgactgtaattgcgatgtcacccggcagcgagtgaaaaaattgaaagaaaccttggtcgcagtgcaacaacttgataagaacatgtcgagtctaaggacttggttagcacacattgaatcagagcttgctaaacctattgtctatgacagttgcaactctgaggaaatccagagaaaactgaacgagcagcaggaactgcaaagggacatcgaaaagcacagcaccggcgtggcttcagttcttaacctctgcgaggtcctgctgcatgactgtgatgcctgcgccaccgacgcggagtgcgacagtatccagcaagccaccagaaatctggaccggaggtggcggaacatttgcgcaatgtccatggagagaaggctgaagatcgaagagacatggagactctggcagaagtttctcgatgactattcaaggtttgaggattggctgaaatcatccgagagaactgctgcgtttccatctagttcaggcgtgatctacacagtggctaaagaagaactgaagaagttcgaggccttccagcgacaggtgcatgaatgtctaactcagcttgaactcattaacaaacagtatcgacgactggcccgcgaaaatagaaccgatagtgcatgtagtctgaaacagatggtacacgaggggaatcagcggtgggataacctgcagaagcgggtaacctcaattctgagacgactgaagcatttcataggacagcgtgaagagttcgagaccgcccgagatagcattttagtctggctgacagagatggacttacaactcactaacatagagcatttttccgagtgcgacgtccaagccaagataaaacagcttaaggcctttcagcaggagattagccttaaccataacaagatcgaacagatcatcgcccaaggtgaacagctgattgagaagtccgagccactggacgcagcaatcattgaggaagaattggatgagctgcgccgttactgtcaggaggtcttcggaagagtcgagcgttatcacaagaagttgattagactgcccttacccgacgacgaacacgatctgagtgatagggagctggagctagaggactctgctgcgctgtctgaccttcactggcacgacaggtccgccgactccctactgagccctcagccttccagcaatctgagcctgagcctggcccagccgctgaggtccgaacgctcaggccgcgatacccctgccagtgtagatagcattccattagagtgggaccacgactacgacctgagtcgggaccttgagagcgctatgtctagagctctgccttccgaagatgaagaagggcaagacgataaggacttttacctccgtggtgctgttggcctgtccgacgtgatgattccggagtcacctgaggcttacgtgaaactcaccgagaatgctatcaaaaatactagcggagatcacagcgcccttgaaagccagattcggcagctgggcaaggccttagatgactctagattccagatccagcaaaccgaaaacatcattcggagtaagacaccgactgggccggaattggatacctcttacaagggctacatgaagctcctgggggagtgttctagtagcatagattcagttaaaaggctcgaacacaagctgaaagaggaagaagagtccctgccgggttttgtgaacttgcacagcaccgagacccagacagccggcgtgatcgatagatgggagttgctgcaggcacaggctctgtcaaaggaactccgcatgaaacagaatctacaaaagtggcaacagtttaattcggacctgaactctatttgggcctggctcggcgacacagaggaggaactggaacagctgcagcgcctggaattgagcaccgatatccagactattgaattgcagatcaaaaagctgaaagaactgcagaaggcagttgatcaccgcaaagccataatcctttctattaacctgtgctctcccgaatttacccaagcagactctaaggagtctcgcgatctgcaagatcgactctctcaaatgaatggacgatgggaccgcgtgtgttctctgctggaggaatggcgaggattgctgcaggatgcactcatgcagtgtcagggtttccacgagatgtctcacggcctgctgctcatgctagagaacatcgatcgtcggaaaaatgagatagtgcccattgacagtaatctggatgctgaaattctgcaagaccaccacaaacagctgatgcagataaaacacgaacttctcgaaagccagctgcgggttgcaagtctacaggatatgagttgccagctcttggtgaacgcggaaggtactgattgcctcgaagctaaggagaaggtccacgtgatagggaaccgtttaaaacttcttcttaaggaggtaagcagacatattaaagaacttgagaaactcctcgacgtttcctcttcacagcaagacctctcaagttggagcagcgccgatgaacttgatacctctggttctgtgtctccaacatcaggcagaagtacccctaatcggcagaagacaccccggggcaaatgtagcctttcccagcctggacccagcgtgagctcaccacactcacgcagcaccaagggcggtagcgattcctccctaagtgagccaggccctggtcgctcgggaagaggttttctcttcagggtattacgtgcagccctgcccctccagctcctgctgcttctgctcatcgggctggcttgcctcgttccaatgtctgaggaggactatagttgcgcactgtccaataactttgccaggtcatttcacccgatgctgaggtataccaacgggcctccacctttatag

SEQ ID NO: 135874 - DNA, 26394 bp, synthetic construct
  misc_feature 1..26394: note = Description of Artificial Sequence: Synthetic coding sequence
  source 1..26394: mol_type = other DNA
atggccacatcacggggtgcgtccagatgtccacgcgatattgctaacgtgatgcagaggcttcaggacgaacaggaaatcgtccagaaaaggacattcacaaagtggatcaactcacacctcgccaagagaaagccacctatggtggtggacgacctgttcgaagatatgaaggatggcgtgaagctgcttgcactcttagaggttttgagcggtcagaagcttccctgtgagcaaggtcggagaatgaaacgaattcacgccgtagcgaacatcggcaccgctttgaaatttctagagggacggaaaatcaaactggtgaacatcaactccacagacatcgccgatgggagaccatctattgttcttgggctgatgtggacaattatactgtactttcaaatagaggaactgaccagcaatctacctcagctgcagagcttgtcttccagcgcaagtagcgtcgattctatcgtgtccagcgagacaccctctcctcctagtaaaaggaaagttaccaccaagatacagggtaatgccaagaaggctctcctcaagtgggtccagtatacagccggcaaacagactgggatcgaggttaaggatttcggaaagagctggcgcagtggagtggccttccacagcgttatccacgcgatccgccctgagctggtcgacctcgagaccgtgaaaggacgttccaatagggaaaatttagaggacgccttcaccatcgcagagactgagctcgggatacccagattgttggatccagaagatgtggatgtcgacaagcctgacgaaaagtcaattatgacctacgtcgctcagttcctgaagcattacccagatatacacaatgccagtaccgacggacaggaagatgacgagattctgccagggttcccgtctttcgctaatagcgtccagaactttaaaagagaggatcgggttattttcaaagaaatgaaggtttggattgagcagttcgagagagatctgacacgtgcccagatggtggaatcgaacctccaagacaagtatcagtcattcaagcacttccgcgtacagtacgaaatgaaaagaaagcagatcgagcacctgatccaacctttgcatagggatggaaagttatctttagaccaagccctggttaagcagtcatgggatcgtgttacatctaggttatttgattggcatatccagctggataagtctttgcctgcaccgctcggaactatcggagcatggttgtacagagcggaggttgcactccgagaagagatcacggtacaacaggtacatgaagaaactgccaatacaatccagcggaagctcgaacaacataaagatctcctacagaatacagatgcacataaacgagcctttcatgaaatatacagaacaagaagcgtgaacggtatccccgtgccaccagaccaactggaagacatggccgagagatttcacttcgtgtcgtccacatccgaactccatctgatgaagatggagtttctggaactcaaatatagactgctctcgctgctggtgctcgctgaatcaaaattaaaatcatggatcatcaaatatggtaggcgggagtccgtcgaacaactgcttcaaaactatgtcagcttcatcgagaactccaagttttttgaacagtacgaggtgacataccagattctgaaacagaccgctgagatgtacgttaaggccgacggctcagtggaagaagcagagaacgtgatgaagtttatgaatgagacgaccgcacagtggcggaacctgtcagtagaagtccgatcagtgagaagtatgctagaagaggtcatttccaactgggacagatacggaaatacagtggctagtctgcaagcctggctggaggacgcagaaaagatgctcaatcagagcgagaatgccaagaaggattttttcagaaatttgcctcattggattcagcagcatactgccatgaatgatgcggggaattttttgatcgagacctgtgatgagatggtatcccgagatctcaagcagcagctactcctgctcaacggcagatggcgggaacttttcatggaagtgaagcagtatgctcaggccgacgagatggacaggatgaaaaaagagtacaccgactgcgtggtcactctgtccgccttcgccacagaagcacacaaaaagttgagtgaaccattagaagtatcatttatgaacgtgaaactactgattcaagacctcgaggacatagagcagagggtgccggtcatggatgctcagtataaaataattactaaaacagctcacctgattacaaaagagtccccacaggaagaggggaaagaaatgtttgcaactatgagtaagctcaaggagcagttaactaaagtgaaagagtgctactctccgttactctacgagagtcaacagctcctgatcccactcgaggaactggagaagcagatgacgagcttttatgatagcctgggtaagatcaacgagatcatcaccgtgctagagagagaagctcagtcgtcggccttgtttaagcagaaacaccaagaactgctcgcttgccaggaaaactgcaaaaaaaccctgacactgattgagaagggttcacaaagtgtgcagaagttcgttactctatcaaatgtactcaaacacttcgaccaaacccgtctccagaggcagatcgccgatatacacgtcgcatttcagagcatggtgaagaagaccggagactggaagaagcacgtggagactaattccagactcatgaagaagtttgaagagagtagggccgaattagagaaggttctccgaattgcccaagagggactggaggagaaaggggatcctgaggaactgctccgtcgtcacaccgagtttttcagccaactagatcagagggtgttaaacgcttttctgaaggcatgtgatgagttgactgacattttgccagagcaggagcagcagggtctgcaagaggctgttcggaagttgcataagcagtggaaagacctccagggagaggccccatatcacctccttcatcttaagattgatgtggaaaagaatcgtttcttagcctctgtagaggagtgtaggacagagctggatcgcgaaacaaagctgatgccgcaagaaggtagtgaaaagattatcaaagagcatcgtgtgttcttttctgataagggaccccaccatctctgtgagaagcgactgcagcttattgaggaactgtgcgtgaagctccctgtgcgcgaccctgtcagagacaccccgggcacctgtcatgtgaccctaaaagagctgcgagctgctatcgattccacctaccggaagttaatggaggacccggacaaatggaaggattacacttctagatttagcgaattctcttcctggataagtacgaatgaaacccaactaaaagggatcaagggggaggcaatagacaccgcgaatcacggagaggtgaaacgcgccgtggaggagatacggaacggtgtgaccaagcggggggaaacactgtcatggctgaaaagtcgacttaaggtgttgacggaggtgtctagtgaaaacgaggcccagaagcaaggagatgagctggctaagttaagctcctccttcaaagcgctggttaccctactgtccgaggtggaaaaaatgctgagtaatttcggcgactgtgtacagtacaaggagatcgtgaagaatagtctggaagaactgatatctgggagcaaggaggtgcaggagcaggcagagaaaattctggatacggaaaacctcttcgaagctcagcagctgcttctgcaccatcaacagaagaccaaacgaatttcagccaagaaacgggatgtgcaacagcagattgctcaggcgcagcagggcgagggcggccttccggataggggccacgaagagctccgaaagcttgaatccacactggacgggctggaaagaagcagggagaggcaggagaggcgtatccaagttacgctgcgaaaatgggaacgcttcgaaaccaacaaagaaaccgttgttagatatttgtttcagacagggtcaagccatgaacgattcctaagcttctcttcacttgaaagcttgagctcagagttggagcagacgaaggagttcagcaagcgcaccgaatcaattgcagtgcaggcagaaaacctggtgaaagaagcctccgagattcccctgggccctcagaacaagcagctgctccagcaacaggccaagtccattaaagagcaggttaagaaactggaagatactctcgaagaagacatcaagacgatggaaatggtgaagacaaaatgggatcattttgggtccaacttcgaaacccttagtgtctggatcaccgaaaaggaaaaggagttaaatgccctggaaacatcttcctccgccatggatatgcagatctcccagatcaaagtgacgattcaggagattgagtcgaaattaagttcgatagtgggactggaggaagaggcccagtccttcgcccaattcgttactactggagaatccgccagaatcaaagcaaagcttactcaaatccggagatacggcgaggaactgcgcgagcacgcccagtgtctcgaaggaacaatccttggccatctgagccaacagcagaagtttgaggagaacctccgcaagattcagcagagcgtgtcagagtttgaggataaactggctgtgcctatcaaaatctgttcaagtgccacagagacttacaaagtactgcaagaacacatggatttgtgccaggctcttgagtccctgtcctctgccattacggctttcagcgcatccgcccgcaaggtcgtgaatagggactcatgtgtgcaggaggcagccgccctacagcagcagtacgaggacatccttcgccgcgctaaggaacgccagactgccctagaaaatctgctggcccattggcagagactagagaaagaactgtccagctttctcacttggctggagcggggagaagccaaggcatcaagcccagagatggatatttcagcggacagagtcaaggtagagggcgagttgcaattaatccaagcgctgcagaacgaggtcgtatcccaagcttctttttactcaaagctgcttcagctgaaagaatctctgttttcagtagccagcaaggacgatgttaaaatgatgaagctgcacctcgagcagctggatgagcgatggcgagacctgcctcagatcataaacaagcggatcaatttcctgcagtcggtggtggctgagcaccagcagtttgacgagctgctgctgagctttagcgtgtggatcaagctgtttctcagtgaacttcagaccaccagcgagataagtatcatggatcaccaagtggccctgacccgacataaagatcacgcagcggaggtggaatctaagaagggcgaattacagtccctacagggccatcttgctaagttgggatcactcggccgggccgaagatttgcacctgttgcaaggcaaagcggaggactgctttcagttatttgaagaagcttcccaagttgtggaaaggcgccagctggcactcagccatctggccgagttccttcagtcccatgcgtcactgagcggaatccttaggcagttacggcagactgttgaggcaaccaattctatgaataaaaacgagagtgacctgatcgaaaaggacctcaatgacgcgctacagaacgcaaaagctctggagtccgctgcagttagtctggacgggatcctgtcaaaggcccagtatcaccttaagattgggagcagtgaacagagaaccagctgtcgcgctaccgccgaccagttatgcggagaagtcgagcgcatacagaatctgcttggcacgaaacagtccgaagccgacgctctggctgtgctgaagaaggcttttcaggaccaaaaagaggaacttctcaagagcatcgaagatatcgaagaacggaccgataaagagcgcctaaaggagccaacccgccaggccttgcagcagagactgagggttttcaaccagctagaggatgaattgaacagtcatgaacacgaactctgttggttgaaagataaggccaaacagattgcccagaaggacgtcgctttcgcaccggaggtagaccgggagattaaccggcttgaagtcacctgggacgacacgaagagattaattcacgagaaccagggccagtgctgtggcttgattgatcttatgagagaataccaaaacctcaaaagtgcagtgagcaaggtgcttgagaacgcgagctccgtcatagtgacacggactacaatcaaggatcaggaggacctgaaatgggcattttcgaagcatgagactgctaaaaacaaaatgaattacaagcagaaggacctagacaactttacaagcaaaggtaagcacctgttgtccgagcttaagaaaattcattccagcgatttcagtctggtgaagacagatatggaatccactgtcgataagtggcttgatgtgtccgagaaactggaggagaatatggatcggttgagggtcagcctttctatctgggatgacgttctgagcacacgtgacgagatagaggggtggagtaacaactgtgtgccccaaatggcagaaaacatatccaacctggataatcatctgagagccgaagagctgctgaaggaatttgaaagcgaggtcaagaataaagcgttgagactagaggagctgcattctaaggttaatgacctgaaggagctaactaagaatctcgaaaccccaccagacttacagtttattgaggccgaccttatgcagaaattggagcatgcaaaagagatcaccgaagtggccaaaggtacactgaaggactttaccgctcaatctacccaggtagagaagttcataaacgatatcaccacttggttcacgaaggttgaagaatccttgatgaactgcgcccaaaatgagacatgcgaggccctaaagaaggttaaagatattcagaaggaactgcagtcgcagcagtctaacatctcctcaacccaggagaatcttaattcattgtgtcggaagtatcactctgcagagctggagagcctgggacgtgccatgactgggttgatcaaaaaacacgaggcagtatcccagctttgctcaaaaacacaggcctcactccaggaatctctggaaaagcacttttcagaaagtatgcaagaattccaggagtggtttctgggcgcgaaggccgcggccaaggagtcatctgatagaacgggtgactcaaaggtgctagaggccaagctacacgacctgcaaaacattctggactctgtctctgacgggcagtcgaagctggatgcagtgacccaggaaggccaaaccttgtacgcacacctgtctaagcagattgtcagctcaattcaggaacagatcacgaaggctaatgaagagttccaagcgttcctgaagcagtgcctgaaggacaagcaggcgttgcaagattgtgcttctgagctaggatcctttgaggatcagcatagaaaactgaacctgtggatacacgaaatggaggagcggttcaacaccgagaatttgggggagtctaagcagcatatccctgagaaaaagaacgaagtccataaggtcgagatgtttctcggagaactcctcgccgcacgggaaagcttagacaaactgtcccaaaggggacagctactgtcagaagagggccacggcgccggacaggaggggcgtctgtgcagccaattgctcacctctcaccaaaatctgcttcgcatgactaaagagaaactgaggtcttgccaagtggctttgcaggagcatgaggcacttgaggaggccttacagtcgatgtggttctgggtgaaggccatccaggatagactggcgtgtgccgaatccacattgggcagcaaggatacactagagaagcggttatcgcagatccaggacattctgctgatgaaaggagaaggggaggtcaaactgaacatggccatcggaaaaggggaacaagccctgcgctcaagcaataaggagggtcaacgagtaatccagacacagctggaaactctcaaggaggtttgggctgacatcatgagttctagcgtacatgcccagagtaccctagagtccgtgatctcccagtggaatgactatgtggagcggaagaatcagcttgaacagtggatggaatccgtcgatcagaagattgagcaccctctccagccgcagcctggcttgaaggagaagtttgtcctccttgatcatctccagtcaatacttagcgaagctgaagaccatacacgagccctgcaccggctcatcgctaagagtagggaactgtacgaaaagaccgaagacgaatcatttaaggacacagcccaggaggagctcaagacccagttcaacgacattatgacagtggcgaaagagaagatgcgaaaagtcgaagagattgtgaaagatcacctgatgtacctcgacgcggttcacgaatttaccgactggctacatagcgctaaagaagagcttcatcgctggtccgatatgtccggcgattcttctgccacacagaaaaaattatcaaaaataaaggagttaattgattccagggaaataggagccagccgactatccagagtggagtctcttgcacctgaggtgaaacagaacacaactgcaagcggatgcgagctgatgcataccgaaatgcaggcactgcgggccgattggaaacaatgggaggactcagtattccagacacagagctgtctcgagaatttggtgagtcagatggccctcagcgagcaagaattttcaggtcaggtcgctcagctggaacaagctctcgaacaattctccgctctcttgaagacatgggcccagcagcttacgcttctcgagggaaaaaataccgacgaggagattgtggaatgctggcataaaggacaggaaatcctcgatgctttacaaaaggcagaaccaaggaccgaggatctgaagagccaactgaacgaactgtgtcggttctccagggatttgtcaacctacagcggcaaggtgtcagggctgatcaaggaatataattgcctctgcttgcaggcctccaaaggctgccagaataaggagcagatacttcagcagaggtttaggaaagcgttccgagacttccaacagtggctggtaaatgcaaaaattaccactgcgaaatgctttgacattcctcagaacatatccgaagtaagcacctcactgcaaaagatccaggagtttctctcagaaagcgagaacgggcagcacaagctgaatatgatgctgtccaaaggtgagttactgtctacactgttaaccaaggaaaaggctaaggggattcaagccaaagtgaccgccgccaaagaagattggaagaattttcattcaaatctgcaccagaaggaatctgctcttgagaatctgaaaattcagatgaaggatttcgaagtgtccgccgaacccatacaggactggctttccaagacggaaaaaatggtgcatgaaagcagcaatagactctacgacctgcccgcgaaaagacgggagcaacagaagttgcaaagcgtactcgaagaaatacactgctatgagcctcagcttaatcggctcaaggaaaaagctcaacagctgtgggaggggcaagccgccagcaagtccttcagacatcgtgtatcccaattaagttcccaatatctcgcgttgtctaacctcacaaaggaaaaagtctcgaggttggaccgcatcgtggcagagcacaatcagttttccctcggcataaaggagctgcaggactggatgacagatgcgatacatatgctcgactcatactgtcatccaacatctgataagtcagttcttgactcgaggaccctcaaactggaggcactcctgtctgtaaagcaggagaaagagattcagatgaagatgatcgttacccgaggggagtcagtgttgcagaatacttcccctgagggcattcccacgattcagcagcagctgcaatccgtaaaagatatgtgggcatcccttctaagtgctggcattcggtgtaagtcacagctcgagggagcattatccaagtggactagttatcaggatggggttcgacagttcagcggatggatggatagcatggaagccaacctcaatgagagcgagagacagcacgcagaacttagagataaaactaccatgctggggaaggctaagctgctgaacgaagaggtactgagctacagcagtctgcttgaaacgattgaggtgaagggcgcaggcatgacggaacactacgtcacccagcttgaactgcaggacctgcaggagcgctaccgagccatacaggagcgggcgaaagaagcagtcactaagagcgaaaaactggtgcgccttcatcaagaatatcagcgtgatctgaaagctttcgaggtctggttggggcaggaacaagagaagttggaccagtacagtgtactcgaaggggacgcccacacacacgaaacaacactgcgcgatctccaggagctgcaggtgcattgcgccgagggccaggcactgctaaactccgtcctgcacacacgggaagatgtgattccgagcggtattccacaggctgaagacagggccctcgagtcactcagacaggattggcaggcttaccagcacagattatcagaaaccaggacccagttcaataacgtggttaataagctccggttaatggaacagaaattccagcaggtcgacgagtggctgaagaccgctgaagagaaagtgagccctagaaccagacgccagtccaatagagccaccaaggagatacagctccaccagatgaaaaaatggcacgaagaggttacggcatatagggatgaagtggaggaggtcggggcaagggcccaggagatattagacgaatctcatgtcaactcccggatggggtgccaggccactcagctaacatcccggtatcaggctctcctcctgcaagtgttggaacagataaagtttctggaggaggaaatccagtcactggaggaatcagagtcttccctcagctcatactcagattggtacggttctactcacaaaaactttaagaatgttgcgacaaaaatcgacaaagtcgatacagtgatgatgggcaagaagctaaagacattggaggtgctgttgaaggatatggaaaagggacatagcctgctcaagagtgcacgcgagaagggagagcgggcggtgaaatatctggaagaaggcgaggccgaaagactgcgtaaggaaattcacgatcacatggagcagctgaaggagctcacttctaccgtcagaaaggagcacatgacactagagaaaggactgcacctcgctaaggagttctccgacaagtgtaaagcgctgacccagtggatcgctgagtaccaggagatcttgcatgtgcctgaagagccaaagatggagctgtatgaaaagaaagctcaattgtccaagtataagtcattgcaacagacagtactcagccacgaaccctcagtcaaatcagttcgcgaaaaaggcgaagcgctactcgagttggtgcaggatgtaacactgaaagacaaaattgaccagctccagtccgattaccaagatttatgcagcatcggcaaggagcatgtgtttagcctcgaagccaaagtcaaggaccacgaggattacaacagcgaattacaggaagtagaaaagtggttgctccaaatgtccggaaggcttgtggcacccgatttactcgaaactagctcgctcgaaacaattactcagcagctcgcacatcacaaggcaatgatggaggaaatcgctggctttgaggaccggctcaacaatctacagatgaaaggggatacattgatcggccagtgcgccgaccacttacaagccaagctcaaacagaacgtgcacgcccatctgcaggggacaaaagacagctattctgcaatctgctcaactgcacagagaatgtatcagagcctcgaacacgagctgcagaagcatgtaagcaggcaggacacccttcagcaatgccaggcatggctgtctgcagtgcagcctgatttagagccttcacctcaaccgcccttgagtagagctgaagctattaaacaggtaaagcatttccgcgcattacaggagcaagccaggacgtacttagatctcttatgttcaatgtgcgatttatcaaatgcgtccgttaagaccaccgctaaggatattcaacagacagaacagactatcgagcagaagctggtccaggcgcagaatttgacgcagggctgggaagagattaagcatttaaagtccgagctttggatctatctgcaagacgcagaccagcagctgcaaaacatgaaaaggcgccatagcgagcttgaattgaatatcgcacagaatatggtgtcccaggttaaagattttgtgaagaagctgcaatccaagcaggccagcgtcaacaccatcatcgaaaaggttaataagttgacaaagaaagaagaatccccagagcataaggagatcaaccatctcaacgaccagtggctggatctgtgccgccaaagcaataacctgtgcctgcagcgagaagaagacttgcaacgcactcgggactaccatgattgtatgaacgtcgtcgaggtcttcctagagaagtttactaccgaatgggataacctcgcaagatcagacgcagaaagtaccgccgtccacctggaagccctcaagaagctggcacttgccctgcaggagagaaagtacgcaatcgaggatcttaaagaccagaaacagaaaatgatcgagcatctgaaccttgatgacaaggagcttgtgaaagagcagaccagtcacctggagcaacggtggtttcagcttgaggatctgatcaaacgaaagattcaggtctctgtgacaaacttggaggaactgaatgttgtccagtcaaggtttcaagagctgatggaatgggccgaggaacagcaaccaaacatagctgaggcattgaagcagtcacctccaccagacatggcgcagaatctgcttatggatcaccttgccatctgctctgaactggaggcgaaacagatgctgctgaagagccttatcaaagatgcagacagagtgatggctgacctggggctgaacgagaggcaggtcatacaaaaggcgttgtctgacgcgcagtctcatgtcaattgcctgagtgatctggtcgggcagcggaggaagtatctcaacaaggccctgagcgaaaaaacacagttcctgatggctgtgtttcaggcgacttcgcagatacagcagcacgagcggaaaattatgtttagggaacacatttgcttgctcccggatgacgtgagcaagcaggtgaagacatgcaagtccgcccaggcttcgcttaaaacttatcagaatgaagtaactgggttatgggcccagggacgggagctgatgaaggaagttacagaacaagagaagtccgaggtgctgggaaagctgcaggagctgcagtcagtttacgacagtgttctacaaaagtgctcacaccgtttacaggagctcgagaagaacctggtatctaggaagcactttaaggaagacttcgataaggcttgccactggctgaagcaggccgatattgtgacgtttcccgaaattaaccttatgaacgagagctccgagctccacactcagctggctaagtaccagaacatactggaacagtcccccgagtacgagaacctcttactgacacttcaaaggaccggccagacgatcctgccgagtctgaacgaggttgatcactcctacctgtccgaaaagctgaacgccttgcctcgtcaatttaacgtgattgtggccttagctaaagacaagttttacaaggtgcaagaagcaatcctcgcccgaaaagagtatgcctccctcattgaactcacaacacagagcctctctgagttagaagcacaattcctccgcatgagcaaagtgccaacagacctggccgtggaggaagctctgtctttacaagacggctgccgggctatccttgacgaagtcgcaggcttaggggaggccgtggacgagctcaatcagaagaaagaaggattcagaagtactgggcagccttggcagccagacaaaatgctgcatttagtaacactctaccaccgactgaagcggcagaccgagcagagagtaagtctactcgaggacaccaccagtgcataccaggagcacgagaagatgtgccagcagcttgaaaggcagctgaagtctgtgaaggaggaacagtcaaaggtgaacgaggaaacccttccagccgaagagaagctgaagatgtatcactcactggcaggttctctccaggactccgggattgtcctcaaacgggtgactatacacttagaggacctagcccctcacctggacccactcgcttatgagaaggcccgccaccagatccaaagctggcaaggagagctgaaactgttgacttctgccatcggcgaaacggtcaccgaatgcgaatctaggatggttcagtccatcgatttccagactgagatgtccaggagcttagactggctgcgccgcgtgaaagctgaactttctgggccagtgtaccttgatttaaacctgcaggatattcaggaggagataagaaagatccaaattcatcaggaggaagtacagtcttctctgagaatcatgaatgctctttctcataaagaaaaggaaaaattcactaaggcaaaagagcttatcagcgcagacttggagcactccctcgctgagctgtccgaactggatggcgacattcaggaagctctgcgcaccagacaggcgacactaaccgagatatactcacaatgtcagaggtactatcaggtcttccaagctgcaaacgactggctcgaagacgcccaggaactcctacagctggctgggaacggcctagacgtagagagcgccgaggagaatctaaagtcacacatggagtttttctccaccgaagatcaatttcattctaacttggaagaactgcatagccttgtagccactttggaccccctcatcaagcctacagggaaggaagatctggaacaaaaagtagcaagccttgaattgaggtcacagcggatgagtcgcgattcaggcgcccaggtcgaccttctccaaaggtgtacagcccagtggcacgattaccaaaaggctcgggaagaggttatagagctcatgaacgacaccgagaagaagctcagcgaattctctctccttaagacctctagctctcatgaagctgaggagaagctaagcgagcacaaggcgctggtctccgtggtgaattccttccacgagaagatagtagcactggaagagaaggcttctcagttagagaagacagggaacgacgccagtaaagcaacactaagccgctcaatgactactgtgtggcagagatggaccaggctgcgagcagtcgctcaggatcaggaaaagatcctagaagatgcggtggacgaatggacagggtttaataataaagtcaagaaggccacagaaatgatcgaccaactccaggacaaactccctgggtcgagtgccgagaaagcctctaaggctgagctgctcacacttttggaatatcacgatacgtttgttttggagctagaacaacaacagagtgcccttgggatgctacgtcagcagacactctccatgctgcaggatggcgctgcgcctacccccggcgaggaaccccccctaatgcaggaaatcaccgccatgcaggaccgctgcctgaacatgcaggagaaagtcaaaaccaacggcaagctggtcaagcaggaactcaaggaccgcgagatggtagagacacaaatcaactctgtgaaatgctgggtgcaagagaccaaagagtacctgggtaaccccacaatcgagatagacgctcagctggaagaactccaaatcctcctaaccgaagctactaaccaccggcaaaatatcgaaaagatggctgaggagcagaaagaaaaatatctgggactatacacaattcttcccagcgagctgagtcttcaattggccgaggtcgccctcgatctaaagatccgggaccagattcaagacaaaatcaaagaggtggagcaatccaaggcaacctcacaggaactgtcacgccagatccagaaacttgctaaggacctaacaaccatcctgacaaaactcaaggctaagacagacaacgtagtacaggcgaagacagaccagaaggtgcttggcgaggagctggacggctgcaactccaagctgatggagctagacgccgccgttcagaagttcctggaacagaacggccagctcggtaaacccctcgctaagaagataggcaaattgaccgagctccaccagcaaactatcaggcaggccgagaatcggctatcgaaacttaatcaggctgctagtcacctcgaagagtacaacgaaatgttggaactgatcctgaagtggatagagaaggccaaagtactcgcccatgggacaattgcctggaatagtgcatcgcaattgcgagaacagtatatactgcaccaaactttgctcgaagaatcgaaggaaatagattctgaactggaggccatgaccgagaagctgcagtatctgacaagtgtgtactgtaccgagaaaatgtcacagcaggtggctgagcttgggcgggagacagaggagttgagacagatgataaagattcggctccagaatttacaggacgccgccaaagatatgaagaaattcgaagcagagttgaagaaattgcaggccgccctagagcaggcccaggccacattgacctcacccgaagtcggacgactgagcctgaaagaacagctgtcacataggcagcatttgctgtcagagatggaaagtctcaagcccaaggtgcaggcggtgcagctgtgtcagtcagccttgaggatacccgaagacgtggtggccagcctgccactatgtcacgcggcgctgcgcctgcaagaggaagcatcaaggctgcaacacacagcaatacaacaatgcaacatcatgcaggaggccgtcgtgcaatacgaacagtacgaacaggagatgaaacatctccagcagcttattgagggcgcccacagggagatcgaggacaaacccgtggcgacctctaacattcaagaactgcaggcccagatatccaggcacgaggaactcgctcagaagattaaaggttatcaggagcagattgccagccttaattccaagtgcaaaatgttgaccatgaaggcgaaacatgctacaatgctgctaactgttacagaggtggagggtctcgccgaagggaccgaagatttggatggggagctgttacccaccccgagtgctcaccctagcgtggtgatgatgacagccgggagatgccatacactgctgagcccggtgacagaggagtccggagaggaaggaactaacagcgaaattagctctcctcccgcatgtagatcaccttcacctgttgcaaacaccgatgcttctgtgaatcaggatatcgcttactaccaggccctgtccgccgaaaggttgcagacagacgcagcgaagatacaccccagcacctcagcatctcaagagttctacgagccaggcttggagccttcagcaacagctaaactgggtgacctgcagcggagctgggaaactctcaaaaacgtgatttcagaaaagcagagaactctctatgaagctctggagcgccaacaaaaataccaagactccctgcagtcaattagcactaagatggaggccattgaactgaagctgtccgaaagcccagagcccgggcggagtccagagagccagatggcggaacatcaggctctcatggacgaaattctcatgcttcaggacgaaataaacgagttacagagctccctggccgaggagctggtcagtgagtcttgtgaggcggatcccgccgagcagctggccttgcaatccactcttaccgtcctggcagaacgtatgtcgacaattcgaatgaaggcatccggtaaacgacagctcctggaagaaaagctgaacgaccagttggaagaacagcggcaggagcaggcactccaacggtatcgctgtgaggcagatgagttagactcttggctgctctcaactaaagctaccctggacactgccctgagtccccctaaagagcctatggacatggaagctcagcttatggactgtcagaatatgctggtggagattgagcaaaaggttgttgcattgagtgaacttagcgtgcataatgaaaacctcctcctggagggtaaggcacacacaaaggacgaggcagagcagctcgctgggaaattgcggaggctcaaagggtccctgctggagctacagagagcactgcacgacaagcagttaaatatgcagggcacagcccaggaaaaagaggagtccgatgtggatcttaccgccactcagagtccgggggttcaggagtggcttgcccaggctagaaccacctggacacagcaacgtcagtcctccttacaacagcagaaagagcttgagcaggagttggcagagcagaagagcctgcttcgcagcgtggctagtcggggggaagagattttgatccagcattcagccgcagaaacctccggcgacgccggtgagaaacctgacgtcctatcacaagaactgggcatggagggcgaaaaatcaagcgccgaggaccaaatgaggatgaagtgggaatctctgcatcaggagttcagcacgaagcagaaactgttgcagaacgttctcgaacaggagcaggagcaggtgctgtatagccgcccaaatcgcctgctgtctggagttccactttataaaggagatgtacccactcaggacaagtctgccgtaacctccctcctagatgggttgaaccaggctttcgaagaggtgtcctctcagtcaggaggggcaaagagacaaagtatccacttggagcagaaactatatgatggggtgtccgcgaccagcacttggctcgacgacgttgaggaaaggctgtttgtcgccaccgctctgctcccagaagagaccgaaacatgtctctttaaccaggaaattctggccaaagatataaaagaaatgagtgaggagatggataaaaacaaaaacttattctcccaagccttccctgagaacggcgataaccgggacgtgattgaagatactctcggatgcctcttggggaggctgtcgctgctggactcagtggtcaatcagcgatgccatcagatgaaagagaggctccaacagattttgaacttccagaacgatctgaaggtgttgtttactagtctggcggacaataaatatattatcctccagaagctggccaacgtcttcgagcagcctgttgcagagcagatcgaggccatccagcaagcagaagacggcctcaaggagtttgacgccggcatcatagagctgaagcgtcgcggcgataagctgcaggtggagcagccatctatgcaggaactgtccaagctccaggatatgtacgacgaacttatgatgatcattgggagccggaggagtggtctaaatcagaacctcaccctgaaaagccagtacgaaagggcactacaggatttggccgacctcttagagactggacaggagaaaatggccggggaccagaaaatcattgtgagctccaaggaagagattcaacagctcttggacaagcacaaggagtacttccagggattagaatcgcacatgattctgacggaaactctgtttcgtaagatcatcagcttcgccgtgcaaaaggaaacacagttccatacagagttgatggcgcaggccagtgcagtgttgaaacgagcccataagaggggcgtggagctagaatacatcctggaaacatggtcccacctggacgaggatcagcaagagctcagtagacagctggaggtagtcgaatcttccatcccctctgttggtctcgtggaggagaacgaagaccgcctgattgacagaataaccctctatcagcacctcaagtcatctctaaacgagtaccagccaaagttgtaccaggttctggatgatggaaagcgcctcttaataagcatttcctgtagtgatttagaatctcagctgaaccagctgggagaatgttggctgagtaacacaaacaaaatgtcaaaggagcttcaccgacttgagacgattctcaaacactggacaagataccagtctgagtcagcggatctcatccactggttgcagtccgccaaggatagactggagttttggactcaacagtctgtgacagtgcctcaggagctggagatggtccgggatcacctgaacgcatttctcgagttcagcaaagaggtggacgcccagtcttctctgaaatcatctgtgctgagtacaggcaaccaacttctacgtctcaaaaaggtagacactgctaccctgcgcagcgagcttagccgaattgactcccagtggaccgacctgttgaccaacattcccgcggtgcaggagaaactccatcaactgcagatggacaagctgccaagccgtcacgctatttccgaagtgatgtcatggataagcctgatggagaacgttattcagaaggacgaagacaatatcaaaaacagcatcggttacaaggccattcacgaatacctgcagaaatataagggcttcaaaatagacataaactgtaagcagcttactgtcgattttgtcaaccagtccgttctccaaatttcctcccaggacgtagaatccaagaggtccgacaagacggactttgcggaacagcttggcgctatgaacaagtcctggcagatcctgcagggactggtgaccgagaagatccagctcctggaaggactgctggagagctggagcgagtacgagaataatgtccagtgtctgaaaacatggttcgagacccaggagaaaagactcaagcagcagcatcgcattggagaccaggccagcgtgcagaacgcattgaaagactgccaggatctggaagatctgatcaaagccaaagaaaaggaggtggagaagatagagcaaaatggccttgcgctgatacagaataaaaaggaggacgtgagttctatcgtgatgagtactttgagagagctgggccagacctgggcaaatctggatcacatggtgggccagctcaagatcctcctgaaatccgtgctggaccaatggtccagtcacaaggtcgctttcgataagattaactcatacctgatggaagcccggtatagcctgtcaaggtttagactcctgactggatctctggaggctgttcaagttcaggttgacaacctccagaacctacaggacgatcttgagaaacaagaaagatcactgcagaagtttggctctattaccaaccagctcctgaaagaatgccatccaccagtcactgaaaccctgacaaacacactgaaggaagtgaacatgcgctggaacaatctacttgaggagatcgccgagcagctccagagctccaaggcccttctacaattgtggcagagatataaggactatagcaaacaatgcgcgtccaccgtgcagcagcaggaggaccgtaccaatgaacttttgaaagcagcgacgaataaggacatagcagatgatgaggtagccacgtggatccaggactgcaatgatctcctgaagggcctgggcaccgtgaaagactcactgttctttctacatgagctcggagagcaactgaagcagcaggtagatgcaagcgcggcaagcgcaatccagtcagaccagctgagtctgagccagcatctctgcgccctcgagcaggcactgtgcaaacaacagacgtcgctccaggctggagtgctagactatgagactttcgccaagtctctagaggccttggaggcatggatcgtggaggccgaagagatcctgcagggacaggatccttctcacagttctgatctgagtaccatccaagagaggatggaggagctaaagggtcagatgctcaaattttcctccatggcacctgatctggacagactgaacgagcttggatacagactacccttgaatgacaaggaaatcaaacgcatgcagaatcttaaccggcactggagcctgatttcctcccagacaaccgagaggttctcaaagttgcagagtttcctcctgcagcaccagacattcttagaaaaatgcgaaacttggatggagtttctggtccagacggagcagaagctcgccgtggagatctcgggcaattatcagcacttattagagcagcagcgagcacacgagcttttccaggccgaaatgttctccagacaacaaatcctgcacagcataattatagatgggcaacggctactggagcagggtcaagtggatgacagagatgagttcaatttgaagctcacgctactgtccaatcaatggcaaggtgtgattcgccgagcacaacagcggcggggtataatcgactctcagatacggcaatggcagaggtatcgagagatggctgaaaagctgagaaaatggctggttgaagtgtcttatctgccaatgtctgggcttgggtccgtaccaatccccctgcagcaggcccgtaccttgttcgatgaggttcaattcaaagagaaggtgtttttgagacaacagggttcatatatcctaacagttgaggccgggaagcagctgctgttaagtgccgacagcggcgccgaagccgctctgcaggccgaactggccgaaattcaagagaagtggaagtccgcctctatgagactcgaagagcagaagaaaaaactggcctttctgctgaaggactgggaaaaatgcgagaaaggaattgccgactcgctagagaagctgcggaccttcaaaaaaaaactgtctcagtccctgccagaccaccatgaggagctgcacgctgagcagatgagatgtaaggagctggaaaacgccgtgggctcctggactgacgacctgacccagctctccctgctgaaggacaccctgtctgcttacatatcagccgacgacatctccatcctcaatgagcgggtagagttacttcagaggcagtgggaagaactctgtcaccaattgtctttgaggaggcagcagatcggcgaacgcctgaacgaatgggccgtgtttagtgaaaagaacaaagagttgtgcgagtggttgacccagatggaaagcaaagtgagccaaaacggtgacattcttatcgaagaaatgatcgaaaagctgaagaaggattatcaggaagagattgcaatcgcacaagagaacaagattcaactgcagcaaatgggagaaagattggcaaaggcgtcccacgaatccaaggcttccgagatagaatataagttgggcaaggtaaacgatcgatggcagcatttgcttgatctcatagctgctcgggtcaaaaagttgaaggagacattggtggctgtacagcagcttgacaagaatatgtcctcactgcggacttggctcgcccatattgaatctgaactcgcgaagccaatagtctatgattcatgcaacagcgaggagatccagaggaaactgaacgaacagcaggaacttcagcgagacattgaaaagcattcgaccggcgtggcttcagtactgaacctttgcgaggtacttctgcatgattgcgatgcatgcgcaacagacgctgaatgtgattctatacagcaagccacccgcaacctggacaggcggtggcgaaacatctgtgccatgtctatggagcggaggcttaagattgaagagacctggcgcctatggcaaaagttcctggacgactactctcggtttgaggactggctcaagtcgtccgagaggaccgctgcttttccttcatcttccggtgtaatttatacagtggcgaaggaggagctaaaaaaatttgaagcatttcagagacaggtccatgaatgtctgacgcagctggaactgattaataagcagtaccggcggctggcccgcgaaaataggaccgatagtgcctgcagtctgaagcagatggtgcacgaaggcaaccagcggtgggacaatctgcagaagagagtgacttccatactgcgcagactcaagcattttatcggacaaagggaggaattcgagaccgccagagattccatactggtttggctgactgaaatggatttgcagctgactaatattgagcatttttcagaatgtgatgttcaggcaaagatcaagcaactcaaagcattccaacaggaaatcagcctgaaccacaacaagatagagcaaattattgcacagggtgagcagctgattgagaaaagtgagccacttgatgctgccatcattgaggaggaattggatgaattgcgcaggtactgccaggaggtgttcggccgcgttgagagataccacaagaaactcatcagactcccacttcctgatgatgagcacgatctgagtgaccgtgagttggaactggaagacagtgcggcattgagtgatctgcattggcacgacaggtcagcagacagtctactttctccacagccttctagtaatctgagcctgtctttggcgcagccactcagaagcgagcggtcggggcgcgacacccctgcttcagtggatagtattcccctggagtgggatcacgattacgatctgagtcgtgacctagagtccgccatgtctagagccctgccctcggaggatgaagagggtcaagatgataaagatttttatttgcgcggtgccgtcggactgtccggggaccacagcgccttggaatcccagatcagacaacttggaaaagccctagatgattccaggttccagatccaacaaactgagaacatcatccggtctaagacccccactggcccagagttagacacatcttacaagggctacatgaagctgttgggtgagtgtagttcctccatagatagtgtgaagcgcctcgagcacaaactcaaggaagaggaagaaagtcttcccggatttgttaatctccactctaccgagactcagactgcgggtgtgattgaccgctgggagctcctgcaagcccaagcactctctaaagagctgcgaatgaaacagaatctgcagaagtggcagcaattcaacagtgacctgaactctatctgggcttggttaggcgataccgaggaggagctcgagcaactccagaggttagagctgtcaaccgacatccaaaccatcgaactgcaaattaaaaaactaaaggagttacagaaggccgtagatcaccgaaaggcgataatactgagcatcaacctgtgcagcccagaattcacacaggcagactctaaggaaagcagggacctgcaggatcggctgagtcagatgaacgggagatgggatagagtttgtagtctcctagaggagtggcgcggcttgctgcaggacgctttaatgcaatgccagggtttccatgaaatgtcacacggtttgctgctaatgctggaaaatatcgaccggaggaagaatgagatcgtgcctatcgactcaaatctggacgctgagatacttcaggatcaccacaaacagttaatgcagattaagcatgagcttttggagtctcagttgcgcgttgctagtctgcaagacatgagctgccagcttctcgtgaatgcggaggggacagattgccttgaggccaaagagaaggtgcacgtgatcgggaaccgcctgaaactgttgttgaaggaggtaagcaggcacatcaaagaacttgagaaacttctcgacgtctcttcgagtcagcaggacctttcgagctggagctcagctgatgaacttgacacatctggatcggtctcccctactagcggcagatccactcctaacagacagaagacccccagggggaaatgctctctctcccagcccggcccctccgtgagttccccccattctcgcagcactaaggggggatctgattcttcattatctgaacccgggccaggcaggtctggcaggggcttcctgtttcgggtgctgagagcagcactgccactgcagctattgttgctgcttctgattgggctcgcgtgtctggtgccaatgtcggaagaggactatagttgcgcactgtcaaacaattttgcacgcagtttccaccccatgctgcgatacacaaacgggcctccaccgctctag

SEQ ID NO: 135875 - DNA, 26250 bp, synthetic construct
  misc_feature 1..26250: note = Description of Artificial Sequence: Synthetic coding sequence
  source 1..26250: mol_type = other DNA
atggcgacgtcccgcggcgcctcgagatgtcctcgggatatcgcgaacgtgatgcagcggctgcaggatgagcaagaaatcgtgcagaagcgaacgtttacgaagtggatcaatagccatctagctaaacggaaacccccgatggtggtggacgacctttttgaagacatgaaagatggtgtgaagcttctcgcactgctggaagttctctccggtcagaaattgccgtgcgagcaggggcgcagaatgaagcgcatccatgcagtggccaacatcggcactgctcttaaatttctagaaggacgcaaatctatgcacagaggcagccctattaagctggtcaatatcaattcaacggacattgcagacggccgcccaagcatcgtccttggtctgatgtggacgataatcctttatttccagattgaagagctgacttcaaatctcccgcaactgcagtccctaagttcttccgcctcctctgtggacagtatcgtgagcagtgaaaccccaagcccccccagtaagagaaaagtgaccactaagattcagggtaacgccaagaaggcccttctgaaatgggtccagtacaccgccggcaaacagacaggaattgaagtgaaggacttcggaaagtcatggcggagtggggtggcttttcacagtgtgatccatgcgatccggcccgaattggtcgacttagagacagtgaagggtcgcagtaatagagaaaatttagaagacgcttttaccatcgccgagacagaattgggaattcccaggttgctggatcctgaggatgtggacgtggataaaccagacgagaagagcataatgacatatgttgcccaattcttgaagcattaccctgatattcacaacgcaagcactgatggccaagaagatgatgagattctgcccggctttccatcatttgccaacagcgtgcagaacttcaaacgtgaagatagagtgatctttaaggagatgaaagtgtggatagagcagtttgaaagagatctgacccgagctcaaatggtggagtccaacttgcaggacaaatatcaaagcttcaagcactttagagtgcagtacgagatgaagagaaaacagatcgaacatcttatacagcccctgcatcgcgatggaaaactgagtttggaccaggctttggttaaacagtcatgggatcgcgtgaccagtaggttattcgattggcatatacagctggacaagtcccttccagcacctctcggaactattggggcctggttgtatcgcgcagaggttgctctgcgtgaggagatcaccgttcagcaggtccacgaagaaactgccaacactatacagagaaagttagagcagcacaaggatttactgcagaataccgacgcacataagagggcttttcacgagatctaccggactaggagtgtcaatgggatacccgtcccacccgaccagcttgaagatatggccgagaggtttcactttgtcagtagcacatccgagttgcacctgatgaaaatggagttcctagaactaaagtaccggctactgagtctcttggtcttggccgaatcaaaactaaaatcatggatcataaaatacggcaggagagagtccgttgagcagctactccagaactacgtaagcttcattgaaaatagtaagttttttgaacagtacgaggtgacctatcaaattctgaagcagacagccgaaatgtatgtgaaagctgatggctcggtggaagaagccgaaaacgtgatgaagtttatgaacgaaacgaccgcccagtggcgtaacttatccgttgaggtgcgaagcgtcagaagtatgctggaggaagttatatccaactgggatcggtatggaaatactgtcgcttctctgcaggcttggcttgaggatgctgagaaaatgttaaatcagtcggagaacgcaaagaaggatttttttcgcaacctcccacactggattcagcaacacaccgccatgaacgacgctggaaattttcttattgaaacctgcgatgaaatggtgagccgcgacctgaaacagcagttacttttacttaatggccgctggcgtgaactgttcatggaagtcaagcagtacgcccaagccgacgagatggatcggatgaagaaggagtacacggattgtgttgttacactctctgctttcgctacggaagcgcacaagaagctgtctgaaccactggaggtgagcttcatgaatgtcaaactgctcatccaggatctggaggacattgagcaacgcgttccagtcatggatgcacaatacaaaattataacgaaaacagcgcatctgattactaaggaatcccctcaggaggagggaaaagaaatgtttgccaccatgagcaagctgaaagagcagttgaccaaggtcaaagagtgctattcccccctgttatacgagtcccaacagctgctgatcccactggaagaactggagaagcagatgacctccttttatgactccttgggcaaaataaacgaaattataacggtgctcgaacgcgaagcccagtcatctgccctgtttaaacagaagcaccaggagttactcgcttgtcaggagaactgcaagaaaactctcaccctgatcgagaaaggatcccagagcgtccaaaagttcgttaccttgtccaacgtgctcaaacacttcgaccagacaagattgcagaggcagatcgcggatatacacgttgccttccaaagcatggtgaagaagacaggtgactggaagaagcatgtggagaccaatagtcgcctgatgaagaaatttgaagaatccagggcagaactcgaaaaagtactcaggatcgcacaggagggtctagaggagaagggagatccagaggaactgctgcggcgccatacagaattcttctcccagttggaccagcgagtattgaacgctttcttgaaagcatgtgacgaacttaccgacatcctgcctgaacaggaacagcaaggattacaggaggctgtcaggaagctgcacaagcagtggaaagacttgcaaggagaagccccctatcacttgctacacctcaaaatcgatgtggaaaagaatcggttcttagccagcgtcgaggaatgtagaaccgagttggacagggagaccaaactgatgccacaggaaggcagcgaaaagatcattaaagaacaccgggtcttctttagtgataagggaccccatcatctttgtgaaaagcgtttgcagcttatcgaagagctatgtgtcaagctgccagtgcgggaccccgtaagggatacccccggcacttgccatgtcacactgaaagaactcagagcggctatagacagtacttatagaaaactgatggaggaccctgataagtggaaagactatacttcccgcttctccgagttttcatcatggatatctacaaacgaaacccaactcaagggcataaaaggagaggctatcgacaccgctaatcatggagaagtgaaaagggcggtggaggagattaggaacggcgtgacaaaacgaggtgagacactcagctggctgaaaagcaggttgaaggtactcaccgaggttagctccgaaaacgaagcacaaaaacagggcgacgaactcgcaaagctctccagctcctttaaggctttagtcacccttttgtcagaggtcgagaagatgttgagcaatttcggcgactgcgtgcagtataaggagatcgtgaagaactccctggaagagctgatctctggttctaaagaggtccaagaacaggcggagaagatcttggatactgaaaacctgtttgaggcccagcagttgttactgcaccaccagcaaaagactaaaaggatatcagctaagaaacgcgacgttcagcagcagatcgcccaggcccaacagggtgaaggcggtctgcctgatagaggccacgaggagctgcggaagttagaatcaaccctggacggcctggagcgctcacgggaaagacaagagcgccggatccaggtgacgctgaggaagtgggaaagattcgagaccaataaagaaaccgtggttcgctatctctttcagacagggtcgtctcacgaacgctttctgtctttctccagcctggagtccctcagtagtgagctcgagcagactaaagaattttcaaagagaacagaaagtatagctgtccaggcggaaaacctggtcaaagaggcctccgaaatccctctggggccccagaataagcagctgttgcaacagcaggccaagtccatcaaggaacaggtgaagaaactggaagatacactagaagaggatattaaaaccatggagatggtgaaaaccaaatgggaccatttcggctctaatttcgagaccctctccgtgtggataactgagaaagaaaaggagctaaacgccctcgagaccagcagcagtgctatggatatgcagataagtcagattaaagttactatacaggagattgagagcaaactaagcagtattgttgggttagaggaagaggcccagtcctttgcgcagttcgttacaaccggagaatccgcgcgtatcaaggccaagctcactcagataaggcgctacggtgaagaactcagagagcacgcgcaatgcctggagggaacaatcctggggcacctcagccagcagcagaaattcgaggagaatttgagaaagattcaacagtctgttagcgagtttgaagacaaactggcagtgccaattaagatctgctcatccgctaccgagacctacaaggtgctgcaggaacatatggatctttgccaggccctcgaaagcctgagttcggctatcacagcattctccgcttctgcccggaaggtggtaaatcgcgacagctgtgtccaggaagccgccgccttacagcagcagtacgaggacatcctgagaagagctaaagaacgtcagacggctctggagaacctgttggcacattggcaacgcctggagaaagaactgtcttcctttttgacctggctagagaggggtgaggctaaggcaagctctcctgagatggatatctcagccgatagggttaaggtggagggggaactgcagctgatccaggcactgcagaacgaggttgtgtcacaggcctccttctacagtaaactgctgcaactgaaagaaagcttgttctccgtggcttcaaaagatgatgtgaagatgatgaaattacatctggagcagcttgatgagagatggcgggaccttccccagattattaacaagagaattaactttctgcagtcagttgtcgccgaacaccaacagttcgacgagctccttctgtctttctcagtttggattaaattgttcctgtcagagctgcagaccactagcgagatttcgatcatggatcaccaagtggcactcacccgccacaaagatcatgcggccgaagtagaaagtaaaaagggcgaactccagtctctgcagggacatttggccaaattaggttccctggggagggctgaggacctccatctgcttcaaggaaaagccgaggattgttttcagctgtttgaagaggcctcacaggtcgtggaacgcaggcagcttgccctgagccatttggcagagttcctacagtctcacgcctctctgagtggcatcttaaggcagttgcggcagacagtagaggctacgaattcaatgaacaagaacgagtctgacctcatcgaaaaggatctgaatgatgctttgcaaaacgccaaagcccttgaaagcgccgctgtctcgcttgacggcatcttaagcaaagctcagtaccacctcaagattgggtccagtgagcagcgtacttcttgtcgtgcaaccgccgaccagctctgtggagaggttgaacggatccagaacctcctaggtacgaaacagtcagaagcagacgcgcttgccgtactgaagaaagccttccaggaccagaaagaagagctgctgaagtctattgaagatattgaagaaaggactgacaaggagaggctgaaggaacctacaaggcaagctctccagcagaggctgagggtgtttaatcagctggaagacgagctgaactcacacgagcacgagctgtgttggttgaaggacaaagccaagcagatcgcccagaaagacgtcgcgtttgcgccggaggttgatcgggaaattaacaggctggaagttacttgggatgataccaagaggctaatccacgaaaatcaagggcagtgctgcgggttgatcgatcttatgagggagtatcagaacctaaagtctgctgtgtctaaagttctggaaaatgcatctagtgtgatcgtcactcgaaccaccattaaggaccaggaggaccttaagtgggctttctctaaacacgagacagccaagaacaagatgaattacaagcagaaggatctggataattttacgtccaaggggaagcacctgctttctgagctgaagaaaatccatagcagcgactttagcctcgtcaaaacagacatggagagcacggtcgacaaatggctggatgtgagtgagaagcttgaagagaacatggataggctgcgtgtgagcctgagcatttgggacgatgtgctttcaacaagagacgagatcgagggttggagtaacaactgtgtgccacagatggcggaaaatatttccaatctggacaaccatctgagggccgaggagttgctcaaggaatttgaatccgaggtaaaaaacaaggcacttagactggaagagctgcatagcaaggtgaatgatttaaaagaactcaccaagaatctcgaaacaccaccagacttgcagttcatcgaagctgaccttatgcagaagttggagcacgcaaaagagataaccgaggtggcaaagggaacacttaaggactttaccgctcagtcaacgcaggtcgaaaagtttatcaatgacataactacgtggttcaccaaggtagaggaatctctgatgaactgcgcccagaatgaaacctgtgaagccctgaagaaggtcaaggacatacagaaggagctgcagtcccaacaatctaacattagtagcacccaagaaaacctgaatagcctctgtcggaaatatcattctgccgagctggaatcattagggagagccatgactgggttaataaagaagcacgaagccgtctctcagctgtgctccaaaacgcaggcaagcttgcaggaaagtctcgagaagcacttctccgagagcatgcaagagttccaggagtggtttctaggggccaaggcagccgccaaggagtcgtcagaccgcactggagatagcaaggtgctggaggccaaactgcacgaccttcagaatatactcgacagcgtttcagacgggcaaagcaagctggatgctgtgacccaggaaggccagactctgtacgcccacctgtccaagcagattgtgtcctctatccaggaacaaattactaaggcaaacgaagaatttcaggcattccttaagcagtgcttgaaagacaaacaggccctgcaggattgcgctagcgagcttggatcattcgaagatcagcatcgaaagctgaacctctggatacacgaaatggaagagcgcttcaatacggaaaatctgggagagagcaagcaacacatcccggaaaaaaagaacgaagtccataaagttgaaatgttcctcggcgagctgctggctgcccgagaatctttggataaactcagtcagaggggccagctccttagtgaggagggccatggggccggacaggagggaaggctgtgttcacagctcctgacttcacaccagaatctgcttcggatgaccaaggagaaattacggtcctgtcaggtggcactgcaagagcacgaagcactggaagaagcactgcagtccatgtggttctgggtgaaagccattcaggatcgcctggcgtgtgctgaaagtactctgggcagtaaggacaccctcgaaaagaggttatctcagatacaggacatccttctcatgaaaggcgagggggaagtgaaactcaatatggccatcgggaagggggagcaggcactccggtcttccaacaaagaaggacagcgggtaatccaaactcaactggagactctgaaggaagtttgggcagacatcatgtcaagtagcgtgcacgcccagagcaccctagaaagtgtaatatcccaatggaacgactatgtggaacggaagaaccaactggagcagtggatggaatcagtcgatcaaaagattgagcacccactgcagccccagcccggcctcaaggaaaagtttgtcttgctcgaccacctgcagagtattctaagcgaggccgaagatcacacacgcgcattacatcgactcatcgctaaatcacgcgaactgtacgagaaaacggaggacgagagcttcaaagataccgctcaggaggagctgaagacacagttcaacgatatcatgactgttgctaaggagaaaatgaggaaagtagaggagatcgttaaggaccatctaatgtacctggatgctgttcacgaattcacagactggctccactccgcaaaagaagaattgcatcgctggagcgatatgtccggagattccagcgctactcaaaagaagttgtcgaagattaaggaactgatagattcacgcgagatcggcgcctctagactgagtcgagttgagagcttggccccagaggtaaagcagaataccactgcctctggctgcgagctcatgcacacagaaatgcaggctttgagagcagactggaagcagtgggaggatagcgtcttccagacccagtcatgcctggaaaatcttgtctctcaaatggctctcagtgagcaggaattcagcggacaggtggcccagctcgaacaagctcttgaacagttctcagctctcctcaagacttgggctcagcagctgacactgctggaggggaagaatactgacgaagagatagtggagtgttggcacaaaggtcaggaaatccttgacgccctacagaaggccgagccccgtaccgaggacctgaaatcacagttgaacgaactctgtcgcttctcccgggatttgagcacctactcggggaaagtatccggcttaatcaaagagtacaattgcctgtgtcttcaggcctcaaagggatgccagaataaggaacagattctgcaacagcgttttcggaaagcctttcgtgacttccaacaatggctagttaacgcaaagataacaacagcgaaatgtttcgacattcctcagaatatatcagaagtgagcacctcactgcaaaagatacaagagttcctaagcgaatccgaaaatggacaacataaactgaatatgatgctgagtaagggggagctgctgtctacactactgacaaaggagaaggccaaggggatccaggcaaaggtgaccgcggctaaggaagattggaagaatttccatagcaatctccaccaaaaggaaagtgctctggaaaacctgaaaattcagatgaaagactttgaggtgtcagccgaacctatccaggactggctatcgaagacagaaaaaatggttcacgagtcatcgaacagactgtatgacctacctgctaagcgccgggagcagcagaagctgcaatctgttctagaggaaattcactgttatgagcctcaattgaaccgcctcaaggagaaagcacagcagctgtgggagggtcaggccgcgagtaaatcatttaggcacagggtttcacaattgagttctcagtacctggcacttagcaatctcacgaaggagaaggtcagccgccttgatcgtatagttgcagagcacaatcagtttagtctagggataaaagagttgcaggattggatgaccgatgctattcacatgctcgacagctattgccaccctacctctgacaaatcagtcctagattctcgaaccctgaagctggaggctcttcttagcgttaagcaggagaaagagattcaaatgaaaatgattgtgaccaggggggagagtgtgctacaaaatacgtcacctgagggtattcccaccatccagcagcagctacagagtgtcaaggatatgtgggcttctttgcttagtgccggaatcagatgcaaaagccagctcgaaggagccttaagtaaatggacctcataccaagatggtgtgcggcagtttagcgggtggatggattccatggaagcgaatctcaatgaaagtgagaggcaacacgccgaactccgggacaaaactacaatgctaggaaaggcaaaacttttgaatgaagaggtcctctcctactcttctctcttggagacaatagaagtgaagggggccggaatgaccgagcactacgtgacgcagttagaacttcaggatcttcaggagagataccgcgccattcaggaacgagctaaggaagccgtgaccaaatcagaaaaactagtgcgtctccaccaggaatatcagcgagacctcaaagctttcgaagtatggctgggccaggagcaggaaaagttggaccagtacagtgtacttgagggggatgcacacactcacgagaccacacttagggacctgcaagaactccaggtccattgcgctgagggacaagctctgctcaactccgtgctgcacacaagggaggacgttattccatctggcatcccacaagccgaagatagggcattggaaagtttacggcaagactggcaggcatatcagcataggctgtcagaaactagaacacagtttaataatgtcgtcaacaagctcaggctcatggaacagaagtttcagcaggtcgatgaatggctgaaaaccgccgaggagaagaagtggcacgaagaagtgacagcgtacagagacgaggtggaagaggtcggggcccgagcccaggagatactcgatgagtcccatgtgaacagtcgcatgggctgccaggcaacccagcttacaagtcgttaccaggcgcttttgctccaggtgctggaacagatcaagttcttagaggaggagattcagtccttggaggaatcggaatcgtcattgagttcttattcagactggtatggtagcacccacaagaattttaagaacgtggctaccaaaatagataaagtggacaccgtgatgatgggcaaaaagctgaaaactttggaggtgctgctaaaggatatggaaaaagggcactctctacttaaaagtgcccgcgaaaaaggcgaacgcgccgtcaagtacctggaggaaggcgaggccgagaggttgcgcaaggagatccacgaccacatggaacagctcaaggagttaaccagtaccgttcgcaaggagcacatgaccttggaaaagggactgcacctcgccaaggagttctcagacaagtgcaaggctctgactcaatggatagctgaatatcaggaaattctgcacgtcccagaagaacccaagatggagctgtacgagaaaaaagctcagttgagcaaatacaaaagtctgcaacagacagtactatcccacgaacctagcgttaagtcagtgcgcgagaaaggggaggcgctgctcgagctggtgcaggacgtcaccctcaaggacaagatcgaccagctgcagtctgactatcaggacttgtgttctatcgggaaagctatgatggaagagattgcaggctttgaggatagattgaataatctccagatgaaaggggacactctcatcgggcagtgcgcagaccacctgcaggccaaattaaaacagaatgttcacgcccacttgcaaggaacgaaggactcatacagcgctatttgcagcacagcccagagaatgtaccaatccctcgagcacgaattgcagaagcacgtcagtagacaggacacgttacagcagtgtcaggcgtggctgagcgctgtgcagcctgatctcgaaccgtcaccgcaacctcccctttctcgcgccgaagcaataaaacaggtcaaacactttagggcattacaagagcaagcgcgcacatacctggacctgctgtgttccatgtgcgacctgagtaatgcatctgtgaagaccaccgccaaagacatccagcagactgaacaaactatcgagcagaaactggtccaggcccagaatctcactcagggctgggaggagattaagcacctgaagagtgagctgtggatatacctccaggacgccgatcagcaactccagaatatgaaacgccgccatagtgaactcgaactgaacattgcccaaaatatggtgagccaggtgaaggactttgttaagaagctccagtccaagcaggcctctgtgaataccattatcgagaaggtcaataagctgaccaaaaaagaggagtctccagagcacaaggaaattaaccatctgaatgatcagtggctcgatctgtgcagacagagtaataatctttgtcttcagagagaggaagatctccagcgtacacgcgactaccacgactgcatgaacgtcgttgaggtctttctggaaaaatttacgaccgaatgggacaatctggcacggagcgatgcagagtccacagcagttcacctggaagccctgaagaaattggccttagcactccaggagagaaaatatgcaatcgaagatttgaaagaccagaaacagaagatgattgagcacctcaacctcgatgataaagaactggttaaggaacagacaagtcacctcgagcagcgttggttccagctggaggatctcataaaaagaaagatccaggtttctgtcacaaatcttgaagaactgaatgtggttcaaagccggttccaagaactgatggagtgggcggaggagcagcagcctaacatcgcggaggccctcaaacagtccccgccgcccgacatggcgcagaatttactcatggaccacctcgctatatgctccgagttggaggcaaagcagatgctgctgaaaagtctcattaaggacgcggatagagtgatggcagatcttggattaaacgagaggcaggtaatacagaaggctctgtcagatgcccagagccacgtgaactgtctgtccgatttggttggccagaggcgtaagtacctgaacaaagcgctcagtgaaaagacccaatttcttatggccgtgttccaggcaacaagtcagattcagcagcatgagcgaaaaatcatgttccgtgagcacatctgcttgctgcccgacgatgtgtccaaacaggttaaaacatgtaagtcggcacaggcctccctgaaaacttatcagaatgaggtcaccggactttgggcccaggggagagagttgatgaaggaggtcacagagcaggaaaagagtgaggttctaggaaagcttcaggagctgcaaagcgtgtacgatagcgtactacaaaaatgcagccaccggttacaagaactggaaaaaaatctggttagcagaaagcactttaaagaggatttcgataaagcatgccactggctcaaacaggccgatatcgtcaccttccctgagatcaatctgatgaacgagtctagcgaactgcatacacagctcgcgaagtaccagaatatcttggaacaatcacctgagtacgagaatctcctgctgacactgcaacgtactggccagacgatcttacccagcttaaacgaggttgatcatagctacctctctgaaaagttgaacgcgctcccgaggcagttcaacgtcatagtggctctggctaaggacaaattctataaggtccaggaagccattctggctagaaaagagtacgcttctcttatcgagttgaccacacagagcctgtctgaactggaggcacagttcctgcggatgagcaaggtgccaacagaccttgctgtcgaagaagccctcagtctgcaggacggctgtcgtgctatactggacgaggtagccgggttgggtgaagccgtagacgaactaaaccagaagaaggaaggtttcaggagtactggccaaccatggcagccagacaaaatgctgcacttggtgactctttaccataggttgaaacggcagacagaacaacgagtgagtctgcttgaggacacaacctctgcctaccaagaacacgaaaaaatgtgccaacagcttgagaggcagctcaaatcagtgaaagaagaacagagcaaggtaaacgaggagacactgccggccgaagagaagctgaagatgtaccatagcctcgcagggagcctacaggattctgggatcgtgctgaaaagggtcacaatccacttagaggatctcgcaccccacctcgatccgttagcctacgagaaggccaggcaccagattcagagctggcagggcgaattgaaactgctgacctctgctataggagagacagttaccgagtgcgaatccaggatggtgcagtcaattgacttccagacagaaatgtctaggtctttagactggctgcggcgtgtgaaagcagagctgagtgggcccgtgtatctcgacctaaacctacaagatatacaagaggagatccgcaaaatccagattcatcaggaggaggtgcagtcaagcttgagaataatgaatgcactgagccataaggaaaaggaaaagttcacgaaagccaaggagctaatctccgccgatttggagcactcgctggcagagctgtctgagctcgatggggacattcaggaggccctgcgcaccagacaagctactctgaccgaaatttactcacagtgtcagcggtattaccaggtatttcaggccgccaatgactggctagaagatgcccaagagctcctacaattggccgggaacggactggatgtcgagtccgccgaggaaaacctaaagagccacatggaatttttctcaaccgaagatcagttccactctaatcttgaggaacttcatagcttggtggcaactcttgatcctctgataaaacccactggaaaggaggatctggagcagaaggttgccagccttgagctacggtctcagcggatgagcagagacagcggtgcacaagttgatctgctccaacggtgtaccgctcagtggcatgattaccagaaggctagggaggaggttatcgagcttatgaacgacaccgagaagaaactctcagaattctctctactgaagacatccagcagtcatgaggccgaagaaaagctgagtgagcataaggccctggtgtcagtggtgaactcctttcatgagaagattgtggctttagaggagaaggcttcacagctagagaaaaccggcaatgacgctagcaaggccacgctgagtcggtccatgacaacagtgtggcaacggtggacaagactccgcgctgtggcacaggatcaggagaaaatcctggaagatgccgtcgatgagtggactggattcaacaataaagttaaaaaggccaccgaaatgatcgaccagcttcaggataagctcccggggtcaagcgctgagaaggcatccaaggcagagttactgacgcttctagagtaccacgataccttcgtcttggaactggaacaacaacaaagtgctctgggaatgctgaggcagcagactctcagcatgctgcaggacggagctgcacccacacctggcgaggagcctccacttatgcaggagatcactgccatgcaggaccggtgccttaatatgcaagaaaaggtgaaaacaaacggcaagcttgttaagcaggagctcaaggatcgcgagatggttgagacacagatcaatagtgtgaagtgttgggtgcaagagaccaaggaatacctggggaatcccaccattgaaatcgatgcccaacttgaggagcttcagatcctcctaaccgaggctaccaaccatagacaaaacatagagaagatggcggaagagcagaaagaaaagtacctcggcttatatactatactcccaagcgaactctcactccaactcgccgaggtggctctagatctcaagatccgcgaccaaatccaggacaaaattaaagaggttgagcagtcaaaggcaacgtctcaggagctttctcgacagatacagaagctagccaaagatctaactaccattcttactaagctgaaagcgaagacagataatgtcgtgcaagctaagactgatcagaaggtgcttggtgaggagctcgatggatgcaattcaaaactaatggaactcgacgccgccgtccagaagttcttagagcagaatggacaactcgggaaacccctcgccaagaagatcgggaagttgacggagctgcatcagcagacaatccggcaagcagaaaaccggcttagcaaattgaaccaagcggccagtcacctggaggaatataatgagatgctggaacttattctcaagtggatcgagaaggctaaggtgttggcacatggcactatcgcctggaactccgcaagtcagctgcgagagcagtacatactgcatcaaaccttactcgaagagtctaaagagatcgactccgaattggaagccatgaccgaaaagctccagtacctgactagcgtttactgcaccgagaagatgagccagcaggttgctgagcttggacgggaaactgaagaattgagacagatgattaagattagactgcagaatctgcaagacgcggccaaggatatgaagaagtttgaggctgaactgaagaaattgcaagcagcgctggaacaggcacaggccactctgacaagcccggaggtaggccggctttccctcaaggagcaactcagtcacagacagcacttgctgtctgaaatggagagcttaaagccgaaggttcaggcagtgcaattatgccagtctgccctacgaataccagaggatgtagtggcgtctctgccattgtgtcatgcagccctacgactccaagaggaagcgagccggcttcagcatactgctattcagcagtgtaacataatgcaggctgcagtggtgcagtacgaacagtatgaacaggagatgaaacatcttcagcagttaatagaaggggcccatcgagaaatcgaggacaaacctgtcgcgacaagcaatattcaggagcttcaagcccagatctccaggcatgaggagctcgcacaaaagatcaagggttaccaggagcagatcgcgtcactcaactcgaagtgtaagatgctgacaatgaaagccaagcatgctaccatgctgctgaccgtgactgaggtggagggtctggctgagggaacggaagatttggacggggaattgcttcccacccctagtgcacacccgtctgtggtaatgatgacggccggcagatgccacaccttactgtccccagttacagaggaaagtggcgaggagggaactaattctgagatcagcagtcccccggcttgcagaagcccctcccccgtggcaaataccgatgcgtctgttaaccaggacatcgcgtattaccaggcactttccgccgagcgtctacagaccgatgctgccaaaatacacccttctacctccgcaagtcaggaattttacgagcccggattggagccctccgcaacagccaagctcggtgacttgcagagatcctgggagaccttgaagaacgttatctccgaaaaacagcgaaccctgtacgaagcgctggagaggcagcaaaaataccaggatagcctgcagtccatatcaaccaagatggaggcaatagaattaaaactctcagagagtcccgagcccgggcgctcccctgagtcccagatggctgagcaccaggccctgatggacgaaatattaatgcttcaagacgagattaacgaattacaaagctcacttgccgaagaactcgttagcgagtcatgtgaagcggatcctgctgaacagctcgccctccaatcgactctgaccgtgcttgcagagcggatgtcaaccatccgcatgaaggcgtccggtaagcggcaattgctcgaagagaaactgaacgaccagctcgaggaacaacgccaggaacaggctctccagaggtataggtgcgaggcggatgagttggactcttggctgttgtcgacaaaagcgaccctagacaccgcccttagccctccaaaggaacccatggacatggaagcccaactgatggactgtcagaatatgttggtagaaattgaacagaaggtagttgccctgagcgaattaagtgtccacaatgaaaacttactccttgaaggcaaagctcatactaaggacgaggccgaacagctggccggcaagctcaggcgcctgaagggctcgcttctggaactgcaacgcgccttacacgataaacagctgaacatgcaagggacagctcaggagaaggaagaatcggatgtagatctgacggccacacaaagccccggcgtgcaggaatggctggctcaggcccgcacgacctggacgcagcagagacagagttcactacaacaacaaaaggaactggagcaggaactggcagaacaaaaatctctcttgaggtctgtagcgagccgcggagaggaaattctgattcagcacagtgctgcagagacatctggcgatgcaggcgagaagcctgatgttctgagccaggaactcggcatggaaggggagaagtcgagcgccgaagaccagatgcgtatgaaatgggagagcttgcatcaagaattttccaccaagcaaaaactcctgcagaatgtcctggaacaagaacaggagcaggtcttatatagcaggcctaaccggctcttgagcggtgttcctttgtacaagggagatgtgcccacccaggataagtcggcagtgactagcctgctggacgggttaaaccaggccttcgaagaggtgtcttcccagtctgggggggctaagcgccagtcaatccacctggaacaaaagctctacgacggcgtgtctgctacctcaacatggttagacgacgtggaggagcgtctgtttgtagccaccgctctccttccagaagagaccgaaacgtgtctgttcaaccaggaaattctggccaaagatataaaggaaatgagcgaggagatggacaagaacaaaaacctcttcagtcaagcatttcctgagaatggcgataaccgcgacgtcattgaggatacattgggctgcctcctcggtagattgagccttctggactcagtggttaaccagaggtgccatcaaatgaaagagagattacaacagatcctaaactttcagaacgaccttaaggttctgttcacatctttagccgataataagtacattatactgcaaaaactcgccaacgtttttgagcaaccagtcgccgaacagattgaagccatccaacaggcagaggacggattgaaggaattcgacgccggcataattgaattgaagcgccgaggcgataagttacaggtcgaacagccttccatgcaggagttgtcgaagctccaggatatgtatgacgaattgatgatgatcattggaagtaggagatcaggccttaatcagaatctgacactcaagagtcagtacgaacgggctctccaggatctggctgacctactagaaacaggtcaggagaagatggctggcgaccagaaaataattgtaagtagcaaagaagagatacagcagctactggataaacataaggagtactttcaaggtctggaatcccacatgattctgaccgagacactgttccgaaaaatcatttcttttgccgtgcagaaagaaacacagtttcataccgagctaatggctcaagctagtgctgtcctgaaacgggctcataagaggggggtcgaactggagtacatcctggaaacctggtcccacctggacgaggatcagcaagagctgagccgtcagctggaagtggttgaatcctctatcccctccgttggtctggtcgaggaaaacgaagacagattgattgacagaatcacactgtaccagcatttgaaaagcagtctcaacgaatatcagccaaaactgtaccaggtgctcgatgacgggaagcgcctgctgatttcaataagctgttctgatttggaaagccagttgaaccaactcggagaatgctggttatcgaacactaacaagatgtctaaagaactccatagactggagacaattctcaagcactggacaaggtaccagagtgagtcggctgacctaattcactggctgcagagcgcaaaggacagactagagttttggacacagcagtcagtgactgttccacaagaactagagatggtacgcgaccatctgaatgcttttttagaattctctaaagaggtggatgcccagtcaagcctgaaaagcagcgtcctgagtaccggcaatcaattactgcgactcaaaaaagtggacaccgctacactgaggagcgagctctcacgcatcgatagtcagtggactgacctgctgacaaacattcctgccgtccaggagaagctacaccaactgcagatggacaagttgccaagtaggcacgctatctctgaagtaatgtcatggatcagtctcatggaaaacgtgattcagaaggacgaggataacatcaagaattccatcggttacaaggccatccatgagtacctgcagaagtataagggctttaagatcgacattaattgtaaacaactgacagtcgattttgtgaaccaatcagtgcttcagattagcagccaagatgtggaatcaaagaggtctgacaaaacggactttgccgaacaacttggtgcaatgaacaaaagttggcagattctgcagggcctcgtgacagagaagatccaattgctggaggggcttctggaatcttggtccgaatacgagaataacgtgcagtgcctgaagacgtggttcgaaacacaggagaaaaggctgaagcagcagcatcggattggcgatcaagcctcagtccagaacgcactcaaagactgccaagacctagaggatcttattaaggccaaagagaaagaggttgagaaaatcgaacagaatgggctggcactgatccagaacaaaaaagaggacgtatcctccatcgtgatgtccacgctcagagaattggggcagacctgggcgaacctggaccatatggtgggccagcttaagatcctcctgaaaagtgttctggatcagtggtcatcccacaaagtggccttcgataaaataaactcctatctgatggaggccaggtactcactatcgcggtttaggttgttaactgggagcctggaagctgtccaggtgcaggttgacaatctgcagaatctgcaggatgatctggagaaacaggagagaagcctccagaagtttggatcaattacaaaccagctcctgaaggaatgtcacccgccagtcactgagacgttaacgaacactttgaaggaggtgaatatgaggtggaataacctgctcgaggaaatcgccgagcaattgcaaagcagcaaagccctactgcagctttggcaaaggtataaggattacagcaagcagtgtgcatccactgtgcagcagcaggaggacaggactaacgaactgctcaaagcggcgaccaacaaggacattgccgatgatgaagtggctacttggattcaggattgtaacgatctgctgaaaggacttgggaccgttaaggactcgctgttctttctacacgaactgggagaacagctcaagcagcaggtcgacgcgtctgcagcctctgcaatccagagtgatcaattatcactatcccaacatttatgcgccctggagcaggcgttgtgcaagcaacagacatcacttcaggccggcgttctggattacgaaacctttgccaagagccttgaggccctggaggcttggatagtcgaagcagaggagatactgcagggtcaggatccctcccactcatcagatctgagtactattcaagaaagaatggaggaacttaaaggccagatgctgaagttctccagtatggcgcctgacctggatcgcctcaatgaactggggtacaggctgcccctcaacgacaaggagataaaacgtatgcagaatctcaatcgccactggtcactcatctcttcacagaccaccgagagattcagcaaactgcagagtttcctgctgcagcatcagacctttttggagaagtgcgaaacgtggatggaattcctagtgcagaccgagcagaagctggccgtggagatatccgggaactatcaacacttgctggaacagcaacgcgctcatgagctgtttcaagcggagatgttcagcaggcagcagattctgcacagtattattatcgatggacaacgcctgctcgaacagggccaggtggatgatcgtgatgagtttaacctgaaactgacgctcttgtctaatcagtggcagggagtcatcagacgtgctcagcaacggcgtggcatcattgattctcagattcgccaatggcagaggtatcgtgagatggccgagaagctcagaaagtggttggtggaagtctcttacctgcctatgtccggacttggttcagtgccaatccctctgcaacaggcgagaacactgttcgacgaagttcagtttaaggagaaggtattcttacgccagcagggcagttacatcctcacggtggaagccggcaaacagttattgctatctgccgatagcggggcagaggccgctctgcaagcagagctggccgaaatccaggagaagtggaagtcagcctccatgaggcttgaagagcagaagaagaagctcgccttcctcctcaaagattgggagaagtgtgaaaaggggatcgccgatagcttggaaaaactccgcacgtttaaaaagaagctgtcacaatctctccccgatcaccacgaagagcttcatgccgaacaaatgcggtgtaaggaattggaaaacgctgtggggtcttggacggatgatttgacacagttgtccctgttgaaggatactctctcggcatacatctctgccgatgacatttccatcttgaacgagcgcgtcgagttgctgcagagacagtgggaagagttgtgtcaccaactgtcattgaggaggcagcagattggcgagagactgaatgaatgggccgtgttttccgagaagaacaaggagctctgcgagtggctcacacaaatggaatctaaggtgagccagaacggcgacatcttgattgaagagatgattgagaagctcaaaaaagattaccaggaggaaattgctattgctcaggaaaacaagattcagctgcagcagatgggagaaaggctggccaaggcttcacatgagtccaaagcgagtgaaatcgaatataaactggggaaggtcaacgaccggtggcagcatctgctggatctgatcgccgcaagggttaagaagctaaaggagacgctggtcgccgtgcagcagcttgacaagaatatgtcttcccttcgaacgtggttagcacacatcgagtccgagctcgctaagcccatcgtgtacgactcctgcaacagcgaagagatccaacgcaagttaaacgagcagcaggaattgcagcgggatatcgaaaagcattccactggggtggcgtcagtgttgaacctgtgtgaagttctcctccacgactgcgacgcatgtgccactgatgctgaatgtgactctatccagcaagccacgaggaatctggatcggcgctggaggaatatctgcgcgatgagcatggaacgacggctgaagattgaagagacttggcggctctggcaaaaattcctggacgactattcaaggtttgaagattggctgaagagctcagagcgcaccgccgcttttccttccagttctggggtcatttatacagtcgctaaggaagagttgaaaaaattcgaagcttttcagcggcaggtgcacgaatgcctcactcagcttgagttaattaacaagcagtaccggagacttgcccgagaaaatagaacagactctgcctgcagtctaaaacagatggtgcacgagggcaatcagagatgggataatctccaaaagcgagtgacatctatcttgagacgcctcaagcacttcatcggccagcgagaggagtttgagacagcccgtgacagcatcctggtctggctgacagagatggatctgcagcttactaacatcgaacacttcagcgaatgtgacgtccaggccaagattaaacagttaaaggctttccaacaggaaatctcactgaatcacaataagatcgagcagataatagcacaaggagaacaactgatcgaaaagtccgagccgctggacgccgccatcatcgaagaagaactcgacgagctgaggcggtactgtcaagaggtttttggacgagtcgagagataccacaagaagctcatccgactcccgctgcctgatgatgagcatgacctgagtgaccgcgaattagagcttgaggattccgccgccctgtcagacttacattggcacgaccgaagtgctgactcccttttaagcccccaaccaagcagcaatctgagcttaagcctagcacagccattgaggtctgagagatccggccgggacactcctgcgtctgtcgattccattccgctggagtgggaccacgattatgacctgtctcgcgacttggaaagcgcgatgtcacgcgcactgccaagtgaggacgaggaaggccaggacgacaaggatttctatctgcggggagcggttggtctgtccgatgtaatgatcccagaaagcccggaagcgtacgtgaaactgaccgagaacgccatcaagaacacatccggagatcacagcgccctcgaatcccagatccgccaacttggaaaggcattagatgatagtcgattccagatccagcaaaccgaaaacatcatccggtccaaaacaccaaccggccctgagttggacacttcctataaaggatacatgaaactcctgggagagtgcagctcaagcatcgattccgttaagaggttagaacacaaactcaaggaggaggaggagtcacttccagggttcgtgaatctgcactccacggaaacgcagactgccggcgttatcgataggtgggaactgctgcaggcccaagcactatcaaaagaattgcggatgaagcagaatctccagaagtggcagcagtttaattctgatctcaattccatctgggcctggctgggggataccgaagaggaactcgagcagctccagcgcctggagctgtccaccgacattcagactattgaactgcagataaagaaactaaaggaactgcaaaaagcagtggaccataggaaagctattattctcagtatcaacctttgcagtcccgagttcacccaggcagattctaaagagagcagagacttgcaggacagactgagtcagatgaatggaagatgggatagggtgtgctcacttctggaggagtggcgcggcctgttgcaagatgccttgatgcagtgccaggggttccacgagatgtcccatgggctgttgctgatgctcgagaacattgataggagaaagaacgagattgtgcctatcgacagcaatcttgacgctgagatcttacaagaccatcacaaacaactcatgcagattaaacacgaactcctcgagagccagctgagagttgctagcctgcaagatatgagctgccagttgctcgtgaatgctgagggcaccgattgcctcgaggcaaaagaaaaggtgcacgttatcggaaatcggttgaagctgctgctgaaggaagtctctcgacacatcaaagagctcgagaagttgctcgatgtctctagcagccagcaggatctgagttcgtggagcagtgcagacgagctcgacacatctgggtctgtcagtccaacctcaggtcgctcaaccccaaatcggcagaagactccacgaggaaaatgcagcctgtcacaacccgggccctctgttagtagcccacactcccgctcgaccaaagggggctctgatagtagcctctccgagccaggacccggtagatccggacgagggttcttattcagggtgctccgcgccgctctgcccctgcagctcttgttgctgctcctgatcgggttggcctgcctcgtgcctatgagcgaggaggactattcttgcgccctaagcaataactttgctagaagctttcacccgatgttgcggtacaccaacggccccccgcccctgtag

SEQ ID NO: 135876 - DNA, 26250 bp, synthetic construct
  misc_feature 1..26250: note = Description of Artificial Sequence: Synthetic coding sequence
  source 1..26250: mol_type = other DNA
atggcgacctcccgaggcgcttctagatgccctcgtgacatcgctaacgtgatgcagcgcttacaggatgaacaggagatagtacagaagaggaccttcaccaagtggattaattcacatttggccaagcggaagccccccatggtggttgacgatctgtttgaggacatgaaggatggagtgaaactgctggctctgctcgaggtgctcagtggtcagaagttgccctgtgagcaaggccggagaatgaagcggatccacgcggtggcaaacatcggtaccgcccttaagtttctggaaggccggaaaagcatgcaccggggtagtccaattaagctggtgaacattaattccacggatattgcagatggaaggccctcgattgtgctgggtctgatgtggactattatcctttacttccagatcgaagagctgacatcgaatctccctcaactccagagcttgtcctcaagcgcaagtagcgttgatagtatcgtgtccagtgagacaccctcaccgccctctaagcgtaaagtgactacaaaaatccagggaaatgctaaaaaggcactgctgaaatgggtccagtacacagccggcaagcagacaggcatcgaagtgaaagactttggtaagagttggagaagcggggtggcctttcattcagtgattcacgcgatccggcccgaactcgtggatttggaaacagtgaaaggcaggtcaaaccgggaaaaccttgaagacgctttcacaattgccgagactgagctggggattcccaggcttctcgatcccgaggacgttgatgtggacaaaccagacgaaaagagcattatgacgtacgttgctcaattcctgaagcactatccagacatccataatgcctccactgacgggcaagaggatgatgagattttgcccggattcccttcttttgcgaatagcgtccagaatttcaagagagaagaccgagtgatcttcaaagaaatgaaggtatggatagagcagttcgaacgtgatcttactcgggcccagatggtggaatccaatctacaggacaagtaccagagtttcaaacactttcgggttcaatacgagatgaagcgaaagcaaattgagcatctgatccagcctctgcatcgggatggaaagctttccctagatcaagccttggtaaagcagagttgggatcgcgttacttcaagactgtttgattggcacatccagttggacaaaagcttaccagcacccctgggcacgatcggggcatggttatatcgagccgaagtggcgttgcgggaggaaatcacggtccagcaggttcacgaggagaccgcgaacacgatccagcgaaaactcgaacagcataaagatcttctgcagaacacagatgcccacaagcgtgctttccatgagatttatcggacacggtctgtcaatgggatccccgtaccccctgatcagctcgaggatatggccgaaaggttccatttcgtgagctcaacttctgaacttcatctgatgaagatggaattcttggaactcaaatatcgcctgctgagtttactagtcctggctgaatcaaagttgaagtcttggattatcaagtatggtagacgtgagtctgtagagcagcttctgcaaaattacgtgagctttattgaaaacagcaaatttttcgagcaatatgaggtgacgtaccagattctaaagcaaacagcagaaatgtacgtcaaagccgacggttcagtggaagaggctgaaaacgtgatgaagtttatgaatgagaccaccgcgcaatggcggaacctgtcggttgaggtgcggtccgtccggtcaatgctggaggaggtcatcagcaactgggatcggtacggtaacacggtcgcctcattacaggcatggttggaggacgcggaaaaaatgctaaaccaatccgagaatgctaagaaggatttttttcggaatctgccacactggatccagcaacacaccgcgatgaatgacgccggcaattttctgattgaaacctgcgacgagatggtatctagggatctgaaacagcagctacttttattgaacgggcgctggagggagctatttatggaggtgaagcaatatgcccaggctgacgaaatggatcgtatgaaaaaggagtacacggactgcgtggtgaccctgagtgcattcgccaccgaagcacacaaaaagcttagcgagcctctggaggtgtctttcatgaacgtaaagcttctgattcaagatctggaagacatcgaacagagggtgcccgtgatggatgcccaatacaagatcatcaccaagaccgctcatctcatcactaaagagtctccacaggaagaaggtaaggaaatgtttgccactatgtcgaagcttaaggaacagctaacaaaggtaaaagagtgctacagtcctctgctttacgaaagccagcagttgttgatccctctggaagaattagagaagcagatgacttccttctatgactcattgggtaagataaacgagatcatcacggtgttagagcgggaagcccaatcgtccgccctgttcaagcagaaacaccaggaactgttagcttgccaggagaattgtaaaaaaacactgactttaattgagaagggctcccaatcggtccaaaagttcgtaaccttgtccaacgtgctgaagcattttgaccaaaccaggctgcagaggcagatcgctgatattcatgtggcctttcagtctatggtgaaaaaaaccggggattggaagaaacacgtggaaaccaactctagactcatgaagaaattcgaagaatcgagagccgagctggaaaaagtcctacggatagcacaggagggtttggaagaaaagggcgaccccgaagagctactgaggcggcacactgagtttttctcccagctggaccagagggtgcttaatgccttcctcaaagcatgtgacgagttaactgatatactccctgagcaggagcaacaaggactgcaggaggccgtcagaaaactgcataaacagtggaaggacctccagggggaagcaccataccatttgctccaccttaaaatagacgtggagaagaaccgcttcctcgcttccgttgaagagtgtagaactgagctggacagagaaacgaagcttatgcctcaggagggcagtgaaaaaattatcaaagaacatcgggtgttcttttcggataaaggccctcaccatctgtgcgagaaaaggcttcagctaatcgaagagctgtgcgtgaaactcccagtacgcgacccagtgagagacaccccagggacgtgtcacgttaccctaaaggagctgcgggcagctatagatagcacctatcgcaagttaatggaggaccctgataaatggaaagactacacatcccggttttccgaattttctagctggataagtacaaatgaaacacaactgaaggggattaaaggcgaagcaatcgacaccgctaaccacggagaagtgaaaagagccgtggaagagattcggaatggagtgacaaaacggggggaaaccttaagctggcttaagtctaggctgaaggtgctgaccgaagtgagttccgaaaacgaagcccagaagcagggtgacgaactggctaagctttctagcagtttcaaggctctcgttactctgctttctgaagtcgaaaaaatgctctctaacttcggagattgcgtacagtataaggaaatcgtgaagaattccctcgaggagctcatcagcggctctaaggaggtgcaggagcaggcggagaaaatccttgacactgagaacctgttcgaggcgcagcagctgctattacatcaccagcagaagaccaagcgaatcagtgccaaaaagcgagacgttcagcagcaaatcgcccaggcgcaacaaggcgaggggggcctccccgaccggggacatgaggaactaagaaaactggagtccaccctcgacggtctcgagcgttctagggaaaggcaggagaggcgcatccaggtgaccttgcgaaaatgggaacggttcgaaaccaataaagaaacagttgtccgatatctgttccagaccgggtcatctcatgagcgcttcctctctttttcctccctagaaagtctctccagtgaattggagcaaacaaaagaattcagtaaaagaacagagtctatcgccgtacaagcagaaaacctcgtgaaagaagccagcgaaattcccttaggcccacagaacaagcaattactgcaacaacaggctaagagcattaaagagcaggtaaaaaaattggaggataccttggaagaggacattaagaccatggagatggtgaaaaccaaatgggatcatttcggcagtaactttgaaaccttatccgtgtggataacagagaaggaaaaggagcttaacgccctcgagactagttcaagtgctatggacatgcagatcagccagatcaaagttaccatccaggaaattgagagcaagcttagttccatcgtcggtctggaagaggaagcgcagagtttcgcacagtttgtgactacgggggagagtgcccgaattaaggcgaaattaacacaaattcgtaggtacggcgaggagctacgggagcatgcacaatgtctagagggtaccattctcggtcacttgagccaacagcagaaatttgaagaaaacctcagaaagatccagcagagcgtctctgaattcgaagacaaattggccgtccctatcaagatctgttccagcgcgacggagacatacaaggttcttcaggagcacatggatctttgtcaagccttagagtcgcttagttccgccattacagctttttccgccagtgctaggaaagtcgtgaatagggactcatgcgtccaggaggccgcggcgctccaacagcagtacgaggacatcctgcgcagagcgaaggagcgccagaccgccctagagaacctcttagctcactggcagaggctggagaaggagttgtcttcattcctcacctggcttgagcggggcgaggccaaggccagctccccggagatggacatctcagctgatagagtcaaagtggagggcgaactgcagttaattcaggcgagctccagaaagttcgtgagccaggcctcattttactcgaagctgcttcagctaaaggagtcgttgttctctgtcgcctcgaaggacgatgtaaaaatgatgaagcttcacttggagcagctggacgagaggtggagagacctgccccagattataaataaacgcatcaacttccttcaaagcgtcgtggcagagcaccaacagttcgacgagctactgctgagcttctccgtgtggatcaagctgttcctcagtgagctgcagaccacgtctgaaatctccattatggaccatcaggtggctctcacgcgccacaaagaccacgctgctgaggttgagtcaaagaagggggaactgcagagtctccagggccacctcgccaaactagggagcttagggcgcgccgaggatctccaccttctacaaggcaaggccgaagactgcttccaactgttcgaagaggcgagtcaagtcgtggagagacgccaattggcccttagtcatctggccgagttcttgcagtctcatgctagcctgtctggcatactgagacagctgagacagactgtggaggcgaccaatagcatgaacaaaaacgaatcagatctgattgagaaagacctaaacgatgccctgcagaatgccaaggcgctcgagagcgcagcagtgtcactggacggcattttgagcaaggcacagtatcatctgaagataggcagcagcgaacaacggacaagttgcagagcaaccgcagatcagctgtgtggggaagtggaaagaatacagaatcttcttggtaccaaacagagcgaggcggatgcactggctgttttgaagaaagcattccaggaccaaaaggaggagttgcttaaatcaattgaagacattgaagagcgaacggataaagagcgcctgaaggaacctaccaggcaagccttacagcagcggctgagggtgtttaaccagctcgaggacgaactgaattcccacgagcatgaactttgctggttgaaggataaagccaaacagattgcccagaaggatgtcgcctttgcccccgaagtggatcgagaaattaataggcttgaagttacctgggacgatactaaacgtcttattcatgagaaccaaggccagtgttgcggattgatcgacctcatgcgggaataccagaatctgaagtccgcagtgtcaaaagtcctggagaatgcgtcttcagtcatcgtgactaggactaccattaaagatcaggaggatctgaagtgggccttcagcaagcacgaaaccgccaaaaataaaatgaactacaaacagaaggaccttgacaattttacttcaaagggaaaacacttactctcagaacttaaaaagattcatagttccgacttttccttagtgaagaccgacatggagtccactgtggataagtggttggacgtctctgaaaaacttgaggagaacatggaccggctaagggttagcctgagtatatgggatgatgtgttgagtactagggacgagattgagggctggagcaacaattgcgtgccgcagatggctgagaacatctctaatctcgacaaccatctcagggccgaagaactgcttaaggagtttgaaagcgaagttaaaaacaaggcactgcgattggaggagctccactccaaagtgaacgatctgaaagaactgactaaaaatctggaaacccctcccgaccttcaatttattgaagcagatctgatgcagaaactagaacacgctaaggaaataactgaagtggcaaaaggaacgctgaaggactttaccgcccagtcaacgcaagtggaaaagttcataaatgacataactacttggttcactaaagttgaggagagccttatgaactgtgcccagaatgaaacatgcgaggccctgaaaaaagtgaaggacatccagaaagagctgcaaagtcagcagtctaatatttcatcaactcaagagaaccttaattctctgtgccgcaaatatcatagcgccgagctcgaatctctcggccgggcgatgacaggacttataaaaaagcatgaggccgtctcccagctgtgcagcaaaactcaggccagtttacaggaatctctagagaagcacttttcagagtcaatgcaggagttccaggagtggttcttaggcgcaaaggccgccgccaaggaatcatccgatcgcacaggcgactcaaaagtcctcgaagcaaagttgcacgacctgcagaacattcttgattccgtgagtgacggccagtccaaactggatgcagtgacacaggaaggccagactctgtacgcccacctatccaaacaaatagtcagtagtattcaagagcaaatcacgaaggctaacgaggaattccaggcgtttctaaagcagtgtctcaaagataagcaggccctccaagactgtgcatcagagttggggtctttcgaagatcagcataggaagctcaatctttggattcacgaaatggaggagaggtttaacacagagaatcttggtgagtcaaagcagcatattccagaaaagaaaaacgaggttcataaggtggagatgttcctgggcgagctgctcgcagcccgcgaaagtctagacaaactgtcacaaagaggacagctgctgtccgaggaaggacacggtgcaggccaggaggggagactttgctcacagcttctgacttcgcaccagaaccttttgcggatgaccaaagagaagctcaggtcctgccaggtcgcgttgcaggagcatgaggccctagaagaagcgctccagagcatgtggttttgggttaaggccatccaggaccgccttgcttgcgccgagtctaccctgggatctaaggataccttggagaagcgtctcagccagatccaagacattctgctcatgaagggagagggcgaggtgaagctcaacatggccattggaaagggcgagcaggcacttcggagttctaataaggagggacaacgggtcatccaaacacagctcgaaactctgaaagaggtgtgggccgatattatgagctctagcgttcacgctcaatcaactctggagtcagtgatctctcagtggaatgattacgtcgaaaggaaaaaccagctggagcagtggatggaaagtgtggaccagaagatagagcacccactgcagccccagccagggctgaaggagaaattcgtgttgctagaccacctgcagtctattctatccgaggcagaagaccatactagagcattacacagactcatcgcgaagagcagagagctctacgaaaagaccgaggacgagtcctttaaagacaccgcacaggaggagcttaagacacagttcaacgatattatgaccgttgccaaggagaagatgcggaaagtggaggaaatcgtgaaggaccatttgatgtacctcgacgctgtacacgaatttaccgactggctgcactcagcaaaagaggagctgcaccgttggagtgacatgagtggtgattctagtgcaacacagaaaaaactgagtaagatcaaggagttaatcgacagccgggaaatcggtgcttcccgcctctccagggtcgagtccctggcccccgaggttaaacagaatacaactgcttcgggttgcgaactgatgcacacggaaatgcaggccctgagggccgactggaagcagtgggaggattctgtgtttcagacccagtcctgcctggaaaatttagtctctcaaatggcgctctccgaacaagagttttccggacaggttgcgcagcttgagcaggccttagagcagtttagcgcgctcctgaagacctgggcccagcaactcactctgctggagggaaagaatactgacgaggagatcgtggaatgttggcacaaggggcaggaaatcctagacgccctgcaaaaggccgaacccaggacagaagatctgaagagccaactcaacgagctgtgcagattcagcagagatttatctacttacagtggcaaagtctctggacttatcaaggagtacaactgcttatgcttgcaggcttccaaaggttgtcagaacaaagagcaaatcctgcagcagcgcttcagaaaggctttccgggactttcagcaatggcttgtgaatgctaagattaccacggctaagtgcttcgatatcccacagaacatttctgaggtctctaccagtctccagaagatccaggagtttctctctgaaagcgagaatggtcagcacaaactcaatatgatgctttccaaaggggaactgctgtcaacgcttctgacgaaggagaaagcaaaggggatccaggccaaagtaaccgccgccaaggaggattggaagaatttccacagtaacctgcatcagaaagaaagtgcactcgaaaatctcaagatacaaatgaaagacttcgaagtctctgctgaaccaatccaggattggctttcaaaaaccgaaaagatggtccacgagagctccaatcggctctacgatttaccagctaaacggcgagaacagcagaagctccagtcagtcctggaggaaattcattgctatgaacctcagcttaatcgcttgaaagagaaggcccagcagctttgggagggacaggccgctagtaagtcattccgacatcgcgtgtcccagctgtcgagccagtatctggctttgtccaatctgacaaaagaaaaggtctccagacttgaccgtatcgtggccgaacacaaccagttctcactgggtattaaggagctccaagactggatgactgacgcgatacatatgcttgactcatattgtcacccaacaagcgataaatcagtgctggactcccgcacccttaagctagaagcactcctgtccgtcaagcaggagaaggaaatccagatgaagatgatcgtgacgagaggggagagcgtgctgcagaatacttctcccgagggaatacctacaatacagcaacagcttcagtcagtaaaagatatgtgggcttcgctcctatcggctggcatcagatgcaagtcccaactcgaaggcgcgttgagtaagtggacttcttaccaggatggcgttaggcagttttcaggctggatggatagcatggaagccaacctgaatgaaagtgaaaggcagcacgctgaactcagagacaaaacgactatgttgggaaaagccaaattgctgaacgaggaggttctgtcatactcttctctgttggagaccatcgaggtgaaaggtgcagggatgacagagcactatgtcactcagctggagcttcaagatttgcaagagcgctacagggcaatacaggaacgagcgaaagaggctgtgaccaagtctgaaaagctggtgcgcttacaccaagagtaccagcgagatctgaaagcttttgaggtgtggctgggacaggaacaggagaagctcgaccaatattctgtgttggaaggggatgcccacacccatgagaccacgttgagagatttacaggaactgcaggttcattgcgcagaaggacaggctctgcttaacagtgtgctccacaccagggaggatgtgattccgtccgggatccctcaagccgaagatagagcattagaatcactaaggcaagattggcaggcctatcagcacaggctgtcagaaacgagaacgcagtttaacaacgtcgtcaataaacttagacttatggagcagaagttccagcaggtcgatgaatggctcaagacggccgaagaaaaaaagtggcacgaggaagtgaccgcataccgtgatgaagtcgaggaagttggcgctagggcccaagaaattctcgacgaatcacatgtgaattcacggatggggtgccaggcaactcaactgacttcgaggtatcaggctttacttctccaagtcctcgagcagattaagtttctagaggaggaaattcagtctctggaagagagtgagtcttctctttcaagctactctgattggtatggaagtacccataaaaattttaagaacgtggctactaaaatcgataaggtggatacagtcatgatggggaagaagttaaaaacactggaggtcctgctcaaagacatggaaaaagggcatagcctgcttaagtctgcgcgagaaaagggcgaacgagccgttaagtacctggaagaaggggaagcggagcggctccgaaaagagatccacgatcatatggagcagctgaaagagctcacaagtaccgttaggaaggaacacatgacactggaaaaaggcttgcaccttgccaaggaattttccgataagtgcaaggcgttgacacagtggattgccgaataccaagagatcctgcatgtgcccgaggaacccaagatggagctctatgagaaaaaagcacagttgagcaaatacaagagtctgcaacagacagtactgagtcatgagcctagcgttaagagtgtgcgcgaaaaaggtgaggccctcctcgaactcgtgcaggacgttacgctgaaggacaagatcgaccaactgcagagcgattatcaggacctgtgtagtatcggcaaggccatgatggaggagatcgcaggtttcgaggacaggttaaataatctgcagatgaagggcgacaccctaattggacagtgcgctgatcacctgcaggctaaattgaagcagaacgtacatgcccacctccagggtaccaaggactcttactccgcaatatgttcaaccgctcagcgcatgtatcagtccctcgaacatgaactccagaagcacgtgtctcggcaagacacactccagcaatgccaggcttggttatcagctgtccagcccgaccttgagcctagccctcaacctccactgtctcgggccgaggctattaaacaggtgaaacacttccgggcgcttcaggagcaggccagaacatatctggatctactgtgttccatgtgcgatctcagtaatgcgagcgtgaagaccaccgcaaaagatattcaacagacagaacagacgattgagcagaagttggtgcaggcccagaaccttacacagggatgggaagagattaaacatctgaagtcagaactctggatatacctgcaggacgccgaccagcagctccagaacatgaaaagacggcattcggagctggaacttaacattgcacagaacatggtttctcaagtgaaggattttgttaagaagctgcagtccaaacaggcctccgtgaacacaataattgaaaaggtcaataaacttacgaagaaagaggagagccccgagcataaggaaattaaccatttgaacgaccagtggttggatctgtgtagacaaagtaataatctgtgcttacagagggaagaagacctgcagaggacaagggattaccacgattgtatgaatgtcgtcgaagtcttcctcgagaaattcacaacggagtgggataatctagcccggagtgacgcagagagcaccgcagtccacctcgaagcattgaagaagcttgccctggcgctgcaggagcgcaagtacgctatcgaagatctgaaggatcagaaacagaagatgatcgaacatttgaacctcgatgacaaggagctggttaaggagcagacgtcccacctagagcagcgctggtttcagttggaggacttgattaaacggaagattcaggtgtccgtgaccaacctggaagaactgaacgtcgttcagtctcgcttccaagaactcatggagtgggctgaagaacaacagcccaacatcgccgaggccctgaagcagtctcccccgccagatatggcccagaatctgctgatggatcatctagccatatgctccgagcttgaggcgaagcagatgctacttaagtccctgataaaggacgccgaccgtgtgatggcagatctggggctgaacgaacgccaagtgatacaaaaagccctgtctgatgcccagtcccatgtcaactgcttatctgatcttgtggggcaaagaagaaaatacctgaataaggccctgagcgagaagacacagtttctgatggccgtttttcaagctacttctcagattcagcagcacgaaagaaaaatcatgtttcgggaacacatttgcctgctaccagatgatgtgtctaagcaagtcaaaacttgcaagagcgcgcaggcttcattaaagacataccaaaatgaagtgactggcctgtgggctcaggggcgggaattgatgaaagaagtgacagagcaggaaaaaagcgaggtgttgggcaagctacaggagctccagtccgtctatgatagtgtgttgcagaagtgctctcacagactccaggagttagaaaaaaatctggtgagcaggaaacatttcaaagaagatttcgataaagcatgtcactggctgaagcaggccgacatcgttacgtttcccgagattaacttaatgaacgagagctcagagctccatacgcagcttgcaaagtaccagaacatcctggaacagagtcccgagtatgagaatctgctgctaactctccagaggactggccaaactatactgccatcattgaatgaagtggatcatagttacctgtctgagaaactaaacgcccttccacgccagtttaacgttatcgtggcactagccaaggacaaattttacaaggtgcaggaggctatacttgcccgcaaggagtatgcctctcttattgagttgacgacacaatccctgagcgagcttgaggcccagttccttcggatgagtaaagtgcccacagaccttgcggttgaggaggccctgtctctacaggacggctgtagagccatcctggatgaggtcgccggcctgggtgaagctgtggacgagctcaatcagaagaaggaaggcttccggtcaaccgggcaaccttggcagcccgataagatgttacatctggtcactctttaccacagactcaaaaggcaaaccgaacagagagtgtccctcttagaagacacaactagcgcataccaagaacacgagaagatgtgtcagcagctggagagacagctgaaatctgtcaaagaggagcagtccaaagtgaacgaggaaacacttcctgccgaagagaagttaaaaatgtatcatagcctggccggatcactccaggactctggcattgtccttaagcgcgttactatccatctcgaagacctggcacctcatctggaccctctggcttatgagaaagctcggcatcaaatccagagttggcagggagaacttaagctgttaacttccgccattggagaaactgtcacagaatgtgaatctcggatggttcaaagtatagattttcaaactgagatgagcagaagcctggattggctgaggcgggtgaaggccgaactgagcggccctgtatacttagatttgaacctccaggacatccaggaagagatccgaaagatccagatccaccaggaagaagtacagtcgtcactaagaataatgaacgccctgtcccacaaggagaaggagaagtttactaaagctaaggagctgatttcagctgatctagaacatagcctggcagagctgagcgagctggatggcgatattcaggaggcactgcgaacgcgacaggccacgctgaccgaaatatacagtcagtgtcagaggtattaccaggttttccaagccgcaaacgactggctcgaggacgcccaggagttgctccaactcgcgggtaacggacttgacgttgagtcggctgaggagaacttgaaatcacatatggagttcttcagtacagaagaccaattccacagcaacttagaagagttacacagcctagttgcaacgctggaccccttaataaaacccacggggaaggaggacctggagcagaaggttgcttcgctcgagctgaggagtcaacggatgtcacgggactctggtgcacaggtggatctattgcaacggtgtacggctcaatggcacgattatcaaaaggcacgcgaggaggtcatagagttgatgaatgataccgaaaagaaactgtctgaattcagcctgttaaaaacctccagcagccacgaagccgaagaaaaactctcggagcataaagccctggtctccgtggttaattcgttccatgagaaaattgtggcacttgaggaaaaggcctctcagttagagaagactggcaacgatgctagcaaggccaccttgtcacggtcaatgactaccgtgtggcaaaggtggacacgactgcgggcggtcgcccaagaccaggaaaaaatattggaggacgcggtcgatgaatggacaggattcaataacaaagtgaaaaaggccaccgagatgatcgaccagctacaagataagctgcccggctcttccgccgaaaaagcctcaaaggccgaactgctgacgctgcttgagtaccacgatacctttgtgctggagctggaacagcaacaaagtgcattggggatgctacgccagcagactctgtccatgctccaggacggcgccgcgcctaccccaggagaggagccccccctgatgcaggaaatcacagccatgcaggacaggtgtctcaacatgcaggaaaaggtgaaaactaatggcaagctggtaaagcaagagctgaaagatagagaaatggtggagacacaaatcaacagcgtgaaatgttgggtacaggagacgaaggaatacctcgggaatccaaccatagagatagacgctcaactcgaggagctgcagatcctgctgaccgaggccacaaaccacaggcagaatatcgagaaaatggctgaggagcagaaagaaaaatacctcggactctatacaatacttccgagtgaactgtccctgcagttggcagaggtggccctagatctgaagataagagaccagattcaagacaagattaaagaagttgagcaaagcaaggctacgtcccaggaactcagtcgccagatccagaaactcgctaaggacctaacaacaattctgactaaactcaaggcgaagacggacaacgtggtgcaggccaaaacagaccagaaagtgctgggtgaagagcttgacgggtgtaactctaaactcatggagctggacgccgccgtgcagaagtttcttgaacagaatggtcagttaggtaagccattggcaaagaagattggcaagctgaccgaacttcatcaacagactataaggcaggctgaaaatcgactgtcaaaactgaatcaggctgcgtcccatctggaggagtacaacgaaatgcttgaactaatactcaaatggatagagaaggcgaaagtactggcacacgggaccatcgcctggaattccgcgtcccagcttcgagagcagtatattctccaccagacactcctggaagagtccaaagagatcgactctgagttggaggctatgactgaaaagcttcagtacctgacaagtgtgtactgtacagaaaaaatgtctcagcaagtggctgaacttggcagggagaccgaggaactccgccagatgataaagatccgcctgcagaatttacaggatgctgcaaaggatatgaagaagtttgaagcagagcttaagaaactgcaggcagctctggaacaagcccaggcaactctaactagtccggaagttggtcgactctccctgaaagaacagttgtcccatagacagcatctcctatcggagatggaaagcttgaagccaaaggtccaggctgtgcagctgtgccaaagcgcactccgtatccctgaggatgtggtggcttccctgccactgtgtcacgctgctctgcgtctgcaggaagaagcttctagactccagcacaccgctattcagcaatgcaacattatgcaggcagccgtcgtccagtacgagcagtacgaacaggaaatgaagcacctgcagcagctcatagaaggggctcatcgagaaattgaagacaagcctgtagctacctcaaacatacaggagctccaggctcagataagtcgccatgaagaattggcccagaaaattaaaggctaccaggaacagatcgcctctctcaacagcaagtgtaagatgctcactatgaaggctaagcacgcaaccatgctgcttaccgttacagaagtagaggggctggccgagggcaccgaggacctcgacggcgagctgctccctaccccaagcgcccatccttcggtggtcatgatgaccgctgggagatgccacactttactgagccctgttacagaagaatcaggggaggaggggaccaactccgagattagctctccccctgcctgtcgatctccaagtccggtcgcgaacaccgatgcctcagttaatcaggacatcgcctactaccaggccttaagcgccgaaagactgcagacagatgccgctaaaatacatccatctacgagtgcctcacaagagttttacgagccaggtcttgagcccagcgccacagccaaattaggggacctccagcgctcctgggagacactgaaaaatgtgatcagtgagaagcagaggacgctgtatgaagcactggaacgacaacagaagtatcaggattctctgcagagtatcagcacgaagatggaagccattgagctcaagctgtccgagtccccagaacccggcagaagcccagagagtcagatggctgaacaccaggctttgatggatgagattctgatgctccaggatgaaattaacgagctccagtcatctctggcagaggagttagtgagcgaaagttgtgaggccgatccagcagagcagttggccctgcaatctacgctgacagtgcttgccgagagaatgagtactatccgtatgaaagcttcaggcaagcggcaactcctggaggagaagcttaacgaccagctggaggagcagcgccaagaacaggctttgcagcgataccgatgtgaggcagacgagcttgacagttggctgctcagcactaaggccactctggacacggcactgagtccaccaaaggagcccatggacatggaggctcagctgatggactgtcaaaacatgctggttgagatcgagcagaaagtggtcgccctcagtgagctaagcgtgcacaatgaaaatctgttactggaaggaaaagcacacaccaaggatgaggccgagcagctggcaggcaagctgagaagactcaagggtagcctgttggagctccagagagctctgcatgacaaacagctcaacatgcagggaacggcacaggagaaggaggagtcagacgtcgatctaaccgcaacccagtctcctggcgtgcaggaatggttggcccaggcccgcacgacatggacccaacaacgccagtcttccctgcagcagcagaaggagctggaacaggagttagccgaacaaaagtcattgctgcgctcagtagcctcccgaggagaagagatcttgatacagcacagcgcagcagaaacttccggggatgccggcgagaagcccgacgttctgtcccaggaactcggtatggaaggagagaaatcaagtgctgaggaccagatgcgtatgaaatgggaaagtctgcaccaggagttctccacaaaacagaagttgttgcagaacgttctagaacaggaacaggaacaggttttgtactcacgtcctaacaggcttctctcaggggtgcctctttataagggagacgtacctacccaggataaatctgccgtgacctcacttctcgatggacttaatcaggctttcgaggaggtcagctctcagagcggaggggcaaagagacagtcaattcacttggagcagaaactgtatgatggcgttagcgccacatccacctggttggacgatgtcgaggagcgactgtttgtggcgacagccctcctcccagaggagactgaaacatgtctctttaatcaagaaattctcgcaaaggatatcaaagagatgtctgaagaaatggataagaacaagaacctattcagtcaggctttccctgaaaatggagacaatagagacgttatcgaagatacattgggttgtctcctcggcagactcagtctcctagattcggtggtcaaccaaaggtgtcatcagatgaaggaaaggctccagcagattctcaacttccaaaacgacctcaaagtgctgttcacctccttggcagacaacaagtacatcattcttcagaaactcgccaatgtctttgagcagcccgtggccgaacagatcgaggcgattcagcaggcagaggacggattgaaagagttcgacgcagggatcatcgagctgaagcggcgcggagataagcttcaggtggagcagcccagcatgcaggagctgagtaaactgcaggacatgtatgacgagctgatgatgattattgggtctcgtagaagtggactgaaccagaatctcaccctaaagtctcagtatgaaagggccctgcaggaccttgccgaccttctggagactggccaggagaagatggccggagaccagaaaatcatagtgtcctccaaggaggagatccagcaactgctcgacaaacacaaggaatacttccaaggactggagtcccatatgattctgaccgagactctgtttagaaagattatatccttcgccgttcagaaggaaacacagttccacactgagctaatggcccaggcctcagccgtgctgaaacgggcccataaacgtggcgtggaactcgaatacattttagaaacgtggtctcatctcgacgaggaccaacaagagttgtctagacaactcgaggttgtggagtctagcattccttctgttggactggtggaggagaacgaggaccgcctcatagaccgaatcacattgtaccaacatttgaagtcttcccttaacgagtatcagccaaagctttaccaggtattagatgacggcaagcgactgctgatctcaatctcgtgctccgatctcgaatcacagctgaaccaacttggggaatgttggctgagcaacacaaacaaaatgtctaaagagcttcatagattggagaccattctgaagcattggactcggtatcaatccgagtcagctgacttaatccactggcttcagtccgcgaaagatcgcctggagttttggacacaacagagcgttactgtgcctcaggagctggaaatggtcagggaccacttgaacgcctttcttgaatttagtaaggaagtggatgcccagtctagtttaaagtcttcggtcctgagtactggtaatcagctcttacgcttgaaaaaagttgataccgccactttgcgatcagagctatctaggattgactcgcagtggaccgatctgcttactaatattcccgctgtgcaggagaaactccatcagcttcaaatggacaagcttccttcaagacacgctatctctgaagtgatgagttggatcagcctcatggaaaacgtgattcagaaagacgaagacaatatcaaaaacagtattgggtacaaggctatccacgagtatctccagaagtacaaagggtttaaaattgacattaattgcaaacaactcactgtggactttgtgaatcaaagtgtgctgcagatcagcagtcaagacgtggaatctaagcgatcagacaagacagacttcgccgagcagttaggagccatgaataagagctggcaaatactgcagggcctggttaccgagaaaattcagcttctagaaggtctgctggagagttggtctgaatacgagaataacgttcaatgcctgaagacgtggttcgagacccaggaaaaacggctgaaacaacagcacaggattggcgaccaagcctccgttcagaacgctctaaaggattgtcaggacctggaggatctcataaaagcgaaggagaaagaagtcgagaaaatcgagcagaatgggttagccctcatacaaaacaagaaggaggacgtgagcagtatcgtgatgtccacacttagggagctgggccagacttgggcaaatctggaccacatggtcggccagcttaaaattcttctcaagagtgtgctcgaccaatggtccagccacaaagtagccttcgataagataaatagctacctgatggaggcacgatatagcctgagtcgattcagactcctgacaggatcgcttgaggccgtgcaggtgcaggtagacaatctccagaatctgcaggacgatctcgagaagcaggagcgatcgcttcagaagttcgggtctataacaaaccagcttttgaaggagtgtcaccctccagtgactgagactcttacaaacacactgaaagaagtgaacatgagatggaataacttactggaggagattgctgagcagctgcagagtagcaaggcactgctccagctgtggcagaggtacaaggattactccaaacagtgtgcctcaaccgtgcaacagcaggaagacaggacaaatgagttgttgaaggctgcaacaaataaagatattgcagatgacgaggttgcaacatggatccaggactgtaatgatctcttgaaaggactgggcacagtcaaggatagtctattctttctgcacgagctgggcgaacagctgaaacagcaggtagatgctagtgccgcctcagctatccagtccgaccagctcagtctatcacagcatctgtgtgctttggagcaggccctctgtaaacaacagacaagcctacaggctggcgtgctggactatgagaccttcgcgaaatccctggaagccctggaggcctggattgtggaggccgaggaaatcttgcaaggccaggacccctcacacagtagcgacctctccactattcaagagcgcatggaagagctaaaggggcagatgctcaaattcagttccatggccccggacctggaccgcctgaacgaactcggatataggctcccgcttaacgacaaggaaatcaagcggatgcaaaatttgaaccgccattggtctctcattagcagtcagacaaccgaacgctttagcaagctgcagagtttcctgcttcagcaccagacttttcttgagaagtgcgaaacctggatggagttcctggttcaaaccgaacagaagttggctgttgagatcagtgggaactatcaacacttgcttgagcagcagagagcccatgaattgtttcaagccgagatgttcagtcgccagcagatcctgcactcaattatcattgacggtcagaggttactggagcaggggcaggtcgacgacagagatgagtttaatttgaaactgacactgctatctaatcagtggcagggtgtcatcaggcgggctcagcagcgaagagggatcattgactcccagattagacagtggcagcggtacagagaaatggcggagaagcttcgcaaatggctggttgaggtttcttacctgcccatgagcggattgggtagcgtgcctattccactccagcaggctcggacactttttgatgaagtccaatttaaagagaaagtcttcttaagacagcaaggctcttatatcctgaccgtggaagctggcaagcagctgttgctgagtgcagactcgggagccgaggcagctcttcaggccgagttagccgagatccaagagaagtggaaatcagctagcatgcgcctggaagagcagaaaaagaaactcgcattcctgttaaaagactgggagaagtgtgaaaaaggaattgctgactccctagaaaagcttagaacttttaagaaaaaattgagccagtccctgcctgatcatcacgaggagctgcatgcggaacagatgcgctgcaaggagctggaaaacgcagttggcagttggacggacgacctcactcagctctccttgctgaaagacaccctgagtgcctatatctccgctgacgacatttccatcctgaacgagagggtggagcttctgcagagacagtgggaagagctctgccaccagctatcattgagaaggcagcagatcggagagaggctgaacgagtgggcagttttcagcgaaaagaacaaggaactctgtgagtggctcacacaaatggagagtaaggtgtctcaaaacggtgatatactcatagaggagatgattgagaaattgaagaaagactaccaggaagaaattgcgatagcccaagaaaataagatccagctgcagcagatgggtgagcggctcgccaaggcctcacatgagagtaaggctagtgaaatcgaatacaaactcggtaaagtcaacgatcgctggcagcacctactagaccttattgctgcacgcgtaaaaaaactgaaggaaactctagtggcagtacagcaacttgataagaacatgagtagcctgaggacctggctagctcacattgaaagtgagttagccaagccaattgtatatgatagctgtaattccgaagaaattcagcgcaaacttaacgaacagcaggaacttcagagagatattgaaaagcatagcaccggggtcgcttcagttttgaacctgtgtgaggtgttgctgcacgactgtgatgcttgcgctactgacgctgaatgtgactccatccagcaggcgaccaggaatctcgaccgaagatggcgtaacatttgcgccatgtctatggagcgacgactcaaaatcgaggagacctggcgactctggcaaaagtttctggatgactactcaagatttgaggattggctgaagtcatcagagagaactgcagcctttccctccagtagcggggtcatctatactgttgccaaggaggaacttaaaaagttcgaggcttttcagcgacaggttcatgagtgtcttacccagcttgagctgatcaataagcagtatcgcagactggcaagggagaatcggacagattccgcttgttcactgaagcagatggtgcacgaaggaaatcaaagatgggataacctgcaaaagcgcgtgacctctatcttgcggcggcttaagcatttcatcgggcagcgcgaggagtttgagactgcccgcgacagcatactggtgtggctcactgagatggacctgcaactgaccaatattgagcacttcagtgagtgcgatgtgcaggctaaaatcaagcagctgaaggcgttccaacaagagatctccttaaaccataataaaatcgaacagattatcgcacagggcgagcagcttattgaaaaaagcgaaccacttgatgctgccattatcgaggaggagctggatgagctgagacggtattgtcaagaggtattcgggcgcgtggagaggtaccataagaaactcatacgcctgccccttcctgatgatgagcatgacttgtccgatcgggaactcgagctagaggatagtgctgctctgagtgatcttcactggcatgacaggtctgctgactctttactatctccccagccaagcagcaatctaagtttgtccctagcacagcccctgagaagcgagcgaagcggaagggatacccctgccagtgtggactccatccccctcgaatgggaccacgattacgatctgtctcgcgacctggaatccgctatgtccagggcgctgccctcggaggacgaggaggggcaggacgacaaagacttctacctgcgtggggcagtgggactatctgatgtgatgatccccgagtctcccgaggcttacgttaaactaacggagaacgccattaaaaacacgtctggcgatcactcagccctggagagtcagatccgccagctgggtaaggcgttagatgactctagatttcagattcagcagaccgaaaatattatacgatccaaaaccccaacaggacctgagctggacactagctataaggggtatatgaaactcctgggcgaatgttcttcttcaattgattctgtgaagagactagaacacaagttgaaggaggaagaggaatcccttccagggttcgtaaatctgcattctactgagactcagacagccggcgtaattgatcgctgggaactcctgcaagcgcaggccctttccaaggagctccgaatgaagcagaatctacaaaaatggcaacagtttaattcggatctcaactccatctgggcctggctcggcgacacagaagaggagcttgagcagctgcagcggctggagctgtccacagacatccaaaccattgaacttcaaatcaagaagttaaaagagctccaaaaggccgtagaccatcggaaggctatcatactatcaattaacctgtgctcaccggagtttacacaggcggacagcaaagaatctcgagaccttcaggataggctctcacagatgaatggaagatgggaccgcgtgtgctcactgctcgaggaatggcgcggcctgttgcaggacgccctcatgcagtgccaaggttttcacgagatgtcgcatggacttctcctgatgctggagaatatcgaccgtaggaagaatgaaatagtgcccatcgactctaatctagacgctgagatcctgcaggatcatcacaagcagctcatgcagatcaagcacgagctgctggagtctcagctgagggtggcctccctgcaggacatgagctgtcagttgctggtgaatgcagaaggcactgactgcctggaagcgaaggaaaaagtgcacgtaattggaaaccgactgaaactcctgctcaaggaagtgagccgtcacattaaagaactcgagaagctgctggatgtcagctcaagtcagcaagatcttagtagctggagcagcgccgatgagctggatacatctgggtccgttagtcccacctctgggaggtccactccaaatcgccagaagaccccacgaggcaaatgctcactgtcacagcccggtccatctgtgagcagcccccactcacggagcacgaagggcggctctgacagctcactgagcgagcctggcccgggccggagcggtcggggcttcctgtttcgagtcctacgtgccgccctgcccctgcagctccttcttttattgctgatcggtctggcatgcctggttcccatgtccgaagaggactatagttgcgccttgtccaataatttcgcccgcagcttccatccgatgttgcgttatacaaacggaccaccgccactgtag

SEQ ID NO: 135877 - DNA, 2859 bp, synthetic construct
  misc_feature 1..2859: note = Description of Artificial Sequence: Synthetic coding sequence
  source 1..2859: mol_type = other DNA
atggtcgtggccgaagacctgtcagcactgcgcatggcagaggactcctgcgtggatgccgacctgccagactgcaactgcgatgtaacccgcgttaaaaaactgaaggagaccctggtcgcagtacagcagctcgacaagaacatgtcatctttgagaacgtggttagctcatattgaatccgagctggccaagccaatcgtctatgacagttgcaactctgaagagatccagagaaagttaaatgagcagcaggaactccagcgcgatatcgagaagcactctacaggagttgccagtgttcttaatctctgtgaggtattgctgcatgattgcgatgcttgtgccactgatgccgagtgtgactcaattcaacaggcgacgcgcaatctggatcggcggtggcgaaacatctgtgccatgtcaatggagcggcgtctgaaaatcgaggaaacctggcgcctctggcagaaattccttgatgattactctcgattcgaagattggctcaaaagttctgagcggacggctgcctttccctcttctagtggtgtcatttacactgtggcaaaggaggagctgaaaaagtttgaagcttttcagaggcaagtgcatgaatgtcttacacagttggagcttattaacaagcagtaccggcggttagccagagagaaccgtactgacagtgcttgttcactgaagcaaatggtccacgagggaaatcagaggtgggataacctgcaaaagagagttacgagtattttgcggcggctgaaacactttatcggacagagagaagaattcgaaacagcacgggactctatcctggtctggttgactgagatggacctacaactcaccaacattgagcatttttcggaatgtgatgtgcaggcaaaaattaagcagttaaaggctttccagcaagagatcagcttgaatcacaataaaattgagcagatcatcgctcagggggagcagcttatcgaaaagagcgagcccctagacgcagccattattgaagaggagcttgatgaactgcggcgttactgtcaggaggtgttcggtcgtgttgaaaggtaccataagaaactgatcaggcttccgctaccagacgacgagcatgacctttctgaccgggagctcgagcttgaagacagcgccgccttatccgatttgcactggcatgatcggagcgctgattcccttctaagcccccagccgtcttccaatcttagcctgtctctggcccagccgttgcggtccgagagaagcggaagggacacaccagcaagcgtcgatagtatccccctggagtgggaccacgattacgatttgtcccgcgatctggagagtgcaatgtctagagccctccccagtgaggatgaggaggggcaggatgataaagacttttacctccgcggtgccgttggactgtccggagatcactctgcccttgagtctcagatccgccaactgggaaaagccctcgatgactcaaggtttcagatccaacagactgagaatattatccgttctaagactccgacgggacccgaactggacacctcttataagggctatatgaaattactcggggaatgctccagcagtatagacagtgttaaacgactagaacataagttgaaagaggaggaggaatccctcccggggtttgtcaacctgcattcgaccgaaacccagacagcaggagtgattgatcggtgggaattattgcaggcccaagcactgtcaaaggagctaaggatgaaacaaaacctgcagaaatggcagcaatttaattcagatttaaattcaatctgggcctggctgggcgatactgaggaagagctcgaacagctccagcgcctcgaattgtcaaccgatattcagactatagagctccaaatcaaaaaactgaaggaactgcagaaagccgtcgatcataggaaggccataatcctgtcaatcaacctttgctcaccagaattcacgcaggcagattcaaaagagagccgggatttacaggaccgcctcagtcagatgaacggccgttgggaccgcgtgtgctctctccttgaagagtggaggggtttattacaggacgcattgatgcagtgtcagggtttccacgaaatgagtcacggtctactgctgatgctggagaatatcgatagaagaaaaaatgaaatcgtgcctatcgatagcaaccttgatgctgagatcctgcaggaccaccacaagcagctgatgcagattaagcatgagctactggagtcacagctgcgtgtagccagcctgcaggatatgtcatgccagctgctggtcaatgcagagggaactgactgtcttgaggccaaagaaaaggtgcatgtaataggcaaccgactgaagctgcttctgaaagaggtgtctaggcatattaaggagctcgagaagctgttggacgtgagcagttcccagcaggatctgtcttcttggtcgagtgccgacgagttagacacatcaggaagtgtgtcccctacaagtggccgaagcacccctaaccgccagaaaactcccaggggtaagtgttccctcagccagcctggtcctagtgtttcatccccacactcacggagcacgaagggcggcagtgacagctccttgtcagagccaggacctggaaggtccggccggggctttctgtttcgagtcttgagggccgcactgcctctgcagttgctcctccttcttctaataggcctggcctgcctcgttcctatgtctgaggaggactatagctgcgccctgtccaataacttcgctcgcagctttcacccgatgctgaggtacacaaacggtccgccgccactgtag

SEQ ID NO: 135878 - DNA, 20475 bp, synthetic construct
  misc_feature 1..20475: note = Description of Artificial Sequence: Synthetic coding sequence
  source 1..20475: mol_type = other DNA
atggccagcagccccgagctgcccactgaggacgaacagggctcttgggggatagacgacctgcacatttcactgcaggccgaacaggaagatacccagaaaaaagccttcacctgctggatcaattcccagcttgcaagacacacgtccccgtctgtgattagtgacttattcaccgacattaagaagggacacgtcctgctagatcttctggaggtcctctctgggcagcagctcccaagagataaggggtccaatactttccaatgcaggattaatattgaacacgcactgacttttttacgtaaccgttctattaagcttataaatatccacgtgacagacattattgacggaaaccctagcatcatcttgggccttatatggaccattattttgcacttccatattgaaaaactggcgcaaactctgtcatgcaattacaatcagcccagcctggacgacgtgtccgtggtggattcttccccggcttctagcccccctgccaagaagtgtagcaaggtccaggccaggtggcagatgtctgcccggaaggccctgctcctgtgggcccaggaacagtgcgccacatacgaatctgtgaatgttactgactttaagtcctcctggcgcaatggcatggcgtttttagcaatcatacatgccctccggcctgacctgatcgatatgaaaagcgttaaacatcgttcaaacaaggacaacctacgggaggcattccggattgctgaacaagaactaaaaatcccacgcctgctggaacctgaggacgtggatgtggtggatccagatgaaaaaagtatcatgacatatgtggcccagttccttcaatactcgaaagacgctcctggaaccggcgaagaggcgcaaggtaaggtgaaggacgccatgggatggctcaccctgcagaaggaaaaattgcagaagctcctgaaagactctgaaaatgatacgtactttaaaaaatataatagcctgctttcattcatggagtcattcaacgaggaaaagaaaagctttctggatgtgttgtccattaagcgcgacctagacgagctggacaaggaccacctgcagctacgcgaggcctgggatggactggatcatcagattaatgcctggaagatcaaactaaactatgcacttccacctccattgcaccagaccgaggcatggttgcaggaggtggaagaactgatggatgaggatcttagtgccagccaggaccactcgcaagcagttaccctgattcaggaaaagatgactcttttcaagtcacttatggaccggttcgagcaccactccaatattctgcttacttttgaaaacaaggacgagaaccacttgcccctggtgcctccaaacaaactggaagagatgaagagacgaattaataacatactggaaaagaagttcatccttctgcttgaattccattactataagtgtctggtgcttgggctcgtggacgaggtgaagtctaaactggacatttggaatatcaaatatgggtctcgggaaagcgtcgagcttttattggaagactggcacaagttcatagaagagaaggagtttctcgcccgcttggacacaagcttccagaagtgtggggagatttacaaaaacctggccggtgagtgccaaaatataaataaacagtatatgatggtgaagagcgatgtctgtatgtatcggaaaaacatctacaacgttaaatccacattacagaaagttctggcatgctgggccacttacgtggaaaatctacggcttctgcgggcttgtttcgaggagactaagaaggaggaaattaaagaagttccatttgagaccctcgcacagtggaaccttgaacacgctaccctcaacgaagccggtaatttcctcgtcgaggtgagcaatgacgtagttggatcgagcatcagtaaggaactgcgtaggctgaacaagcgctggcggaaactggtcagtaaaacccagctcgagatgaatctccctctgatgatcaagaaacaagatcaacccaccttcgataattcgggaaatattctttctaaagaagaaaaggctactgtggagtttagtactgatatgtcagtcgaacttcccgagaattacaatcaaaacatcaaggctggggaaaagcacgagaaagaaaacgaggagttcacaggccagctgaaggtggctaaagacgtggagaaacttatcggccaggtcgaaatttgggaagctgaggccaagtccgttctggatcaggacgatgtggacactagcatggaggagtcgctgaaacatttaattgctaagggttctatgttcgacgaactaatggctagaagtgaggatatgcttcagatggacatccagaatatctcctcacaggaatctttccaacacgtgcttactactggactgcaggctaaaattcaggaggccaaggaaaaggtacagattaatgtagtgaagctcatcgctgccctgaagaacctgactgatgtttcccccgatttagacataagattgaaaatggaagagtcccagaaggaactggaaagctatatgatgagagcccaacagcttttggggcagcgcgaaagcccgggcgaacttatttctaagcacaaagaagctcttatcattagtaacacaaaatccttggccaagtaccttaaggctgttgaggagttgaaaaacaatgtaactgaggacatcaaaatgtccttagaagaaaagagccgagatgtgtgcgctaaatgggagtctctgcaccacgaactgtcattatacgtccaacaactgaaaattgacatcgagaagggcaaactttccgacaatatattgaagctcgaaaagcagatcaacaaggagaagaaattgattaggagagggcgaaccaaaggacttatcaaggagcacgaggcctgtttctccgaagaagggtgtctgtaccagctgaaccatcatatggaggtactgcgggagctctgcgaagaattgccaagccagaaatcgcaacaggaggtgaagcgattactgaaggattacgagcagaagatagaacgcttgctgaaatgcgccagcgagatccacatgacattacagcctaccgccgggggcacgagcaaaaacgagggcaccatcacgacgagcgagaaccgtggcggtgacccccattccgaagctcctttcgctaagagcgataatcagccaagcaccgagaaggcaatggaacctaccatgaagttcagcctggcctcagtgctcaggcctctgcaggaggaatctatcatggaaaaagactactccgccagcatcaacagcctgctggagcgttatgacacctacagggatatcctggaacaccacctccagaacaacaagtttaggattacctcagatttttcctccgaagaggaccgcagttcttcatgcctgcaggccaaacttacagatcttcaggttattaaaaatgagacagacgcaaggtggaaagaatttgaaattatctcacttaaactggaaaatcatgtgaatgacatcaaaaagccattcgtgatcaaggagagggatactcttaaagaaagagaaagagaactccagatgaccctcaatacaaggatggagtctctggaaactgctctgcggctagtactgccggtcgaaaaggcctctctgctgttatgtggatcagacctgccgcttcataagatggcaattcagggtttccatctgatcgacgcagataggatatatcagcacctcagaaacatccaggatagtattgctaaacaaatcgaaatctgcaatcggctggaggaaccaggcaatttcgtcctaaaggaactgcatccgttcgacctgcacgccatgcagaacatcattctgaaatataagactcaattcgaagggatgaatcatagagtccagaggagtgaggataccctgaaggcgttggaagattttctggcatccttgagaacagcaaagttgtccgcagaacccgttaccgatctctccgcgtcagacacacaggtcgctcaggagaacacactgaccgttaaaaacaaagaaggagagatccacttgatgaaagataaagcaaaacacctggataagtgcctgaagatgctggacatgagctttaaggatgctgagaggggcgatgataccagttgcgaaaacttgctcgacgcgttctccattaagctctctgagacccacggatacggtgtgcaagaagagtttactgaggagaacaagttactggaggcctgcatttttaaaaacaacgaactgctaaagaacatccaggatgtgcagagccaaatctcaaagatcggtctgaaagaccccacggttccagccgtaaaacacaggaaaaaatcactcattcgcctggataaagtactcgacgagtatgaggaggaaaagcgtcacctgcaggagatggccaacagtttaccccatttcaaagacgggcgcgagaagacagttaaccagcagtgtcagaataccgtggttctgtgggagaataccaaggcacttgttactgaatgtctcgagcagtgtggaagagtcctggaactgctgaaacagtaccagaactttaaatcgatccttaccactctcatccaaaaagaggagtctgtgattagtttgcaggcaagctatatggggaaggaaaacttaaagaagcggatcgccgagatagagattgtaaaggaggagttcaatgagcacctggaggttgtcgataagattaaccaggtgtgtaagaatctccaattctacctcaataaaatgaagaccttcgaagagccgccctttgagaaggaagccaatataatcgtcgacagatggctcgatatcaacgaaaaaaccgaagactactatgaaaatctgggaagggccttggccttatgggacaaactatttaatctgaagaacgtcatcgacgaatggacagaaaaggccctgcagaaaatggagttgcaccagctcaccgaggaagacagagagagacttaaggaggaactgcaagtccacgaacagaaaactagcgagtttagccggcgggtggctgagatccagttcctactgcagagctcagagattccgcttgagctgcaggtaatggagagcagtatcctaaacaaaatggagcacgtccagaagtgcctcaccggcgagtctaactgccacgcgctcagcggttcgaccgccgagcttagggaagatctggaccaggctaaaacacagattggcatgaccgaatccctgctcaaagcattatccccctctgattctcttgaaattttcacaaagctcgaagagatccagcagcagattctgcaacaaaagcattctatgatcttactggagaaccaaataggatgcctgactcccgagctgagtgaactgaaaaaacagtacgagtccgtgtctgatctcttcaacacaaagaaatcagtccttcaggatcacttctccaaactgctgaatgatcaatgtaagaatttcaatgactggttcagtaatataaaagtgaacttgaaggagtgcttcgagtcaagcgaaacgaagaagtctgttgagcagaagctgcagaagctatcagacttcttgaccctcgagggtcgtaactcaaaaataaaacaggtcgatagcgtcctgaagcacgtaaaaaaacatctgccaaaggcccatgtgaaggagctaatatcttggctggtagggcaagagttcgagctagagaagatggaatccatttgtcaggcccgtgctaaagagctggaagatagcctccagcagcttctgagattgcaggatgatcacagaaacctgcgcaaatggttaacaaaccaggaggagaaatggaaaggcatggaagaaccaggagaaaaaactgagctgttctgccaggccctcgcaagaaaacgggagcagttcgagtccgtggcccagctcaataactctctgaaagagtacggctttaccgaggaagaggaaataattatggaagcaacctgtcttatggaccgttaccaaacactgctgagacagttgtccgaaattgaagaggaggacaagttgctgccaacagaagatcaaagttttaatgatctggcccacgatgtgattcactggatcaaagaaattaaggagagcctcatggtgctcaatagctctgagggtaagatgccattagaagagagaatccagaagatcaaagagatcatcctcctgaagccagagggcgacgccaggattgagacaatcatgaaacaggcagagtcatctgaagccccactagtgcagaaaaccctcacagatatcagcaatcagtgggacaacactctgcatctggcctctacttaccttagtcaccaggagaagctgctcctcgaaggcgaaaagtacttgcaatccaaggaggacctgcggctgatgctaatcgagctgaaaaaaaagcaggaagccggatttgctctacaacacggcctacaggaaaagaaggctcagctcaaaatctacaagaagttcctgaagaaagcacaggacctgacttcactgctgaaagagctgaaatctcagggaaactatctgctggagtgcacgaaaaacccatccttttcagaggagccatggctcgagatcaagcatcttcatgaaagcctgctccagcagttgcaggacagcgtgcaaaatctggatgggcatgtacgcgagcatgacagttaccaagtctgcgtgaccgacctcaacaccaccctggataattttagtaaagagttcgtttccttctctgacaagccagtggaccagatcgcggttgaagagaaacttcaaaagcttcaggaactggaaaacaggctatccttgcaggatggcacactgaaaaaaatcctagctcttgcaaaatctgtcaagcaaaatacatcaagcgtgggtcagaagattattaaggatgacattaaatcactccagtgcaagcaaaaggatctggagaatcgacttgcttcagcgaagcaggagatggaatgctgcctgaacagtattctcaaatcgaaaaggagcaccgagaaaaaaggcaagttcacattgccagggagggaaaagcaagcaacatccgatgtacaggaaagcacccaagaatcagccgcagttgagaagttggaggaggattgggaaatcaacaagaactttgttgagaatgtcatggccgttagcaagaactgtcatcacagcatgtacatcttcgaaagcatcgttaagaactttatatctgacgagatgcaagatagcgctgtagagatggctatgtcgaaacagctctcacttaacgcacaggaatccatgaagaatacagaggacgagagaaaggttaatgaactgcaaaaccagcccctggagctcgacaccatgctaagaaatgagcagcttgaggaaatcgagaaattgtacacccagctggaagcaaagaaagccgctattaagcccctggagcagaccgaatgtctgaacaagactgagacaggtgcactggttctgcataacatcggctactctgctcagcatctggacaacttactgcaggcgcttattaccctcaaaaagaataaggaatcccagtattgtgtgctgagggactttcaggagtatctcgctgccgttgaatcctcaatgaaggcccttctcacagataaagaaagtctcaaagttggccccctggattccgtcacctacctggataaaatcaagaagtttatcgctagcatagagaaagagaaggacagtctcggtaatcttaaaatcaagtgggaaaacttgagcaatcacgtgacagacatggacaagaaattgctcgagagccagataaaacagttggagcatgggtgggaacaagtcgaacaacagatccagaaaaagtactcgcagcaggtcgttgaatacgatgagttcactactctgatgaataaggtgcaggacaccgaaatcagcctccagcaacagcagcagcatctccagctccggctcaaatctcccgaagagagggcagggaaccaatccatgattgctctgaccactgatctgcaggccactaaacatggcttctccgttctgaagggtcaggccgaacttcaaatgaaacgcatctggggcgaaaaggagaagaagaacttggaggacggcatcaacaatctgaagaagcaatgggagactctggaacccctgcatctggaggctgagaaccagatcaagaaatgtgacattagaaataaaatgaaggaaaccatcctttgggcgaaaaacctactaggcgagctgaatccttccattccactgctgcccgatgacatcctatcacagattaggaagtgcaaggtcacacatgacggtatcctcgcacggcaacaaagtgtcgaatcactggcggaagaggtgaaggataaagttccaagcctcacaacctatgaggggtccgacctaaataatacactggaggatctccggaaccagtatcagatgctcgtacttaagtcgacgcaacggtcacagcagctggagttcaagctggaggagcgctcaaacttttttgcaattataaggaagtttcagttgatggtacaggaaagcgagacgctaatcatcccaagggtggaaaccgccgctactgaggctgagctgaagcaccatcatgttactctggaagcaagccagaaggagctgcaggagatcgactctggaatttccacacacctccaggagctcaccaatatatatgaagaattaaacgtgtttgagcgcctgttcttggaggaccagctcaaaaacctaaaaatcaggaccaacaggattcagcgcttcatccagaacacctgtaatgaggttgagcataaaattaagttttgccggcagtttcatgagaaaacgtccgcattacaagaggaagcagatagcatccaacggaatgagctgctcttgaaccaggaagtgaataaaggtgtgaaagaagagatctacaacctgaaggaccggcttacagcgataaaatgctgcatcctgcaggtgctgaaactgaaaaaagtcttcgactatattggtctgaattgggatttctcgcagctggatcagttgcagacacaggtgttcgaaaaggaaaaggagcttgaagaaaaaattaagcagttagacacattcgaggaggagcacggtaaatatcaggcgttgctgtctaaaatgagggcaattgatctgcagatcaagaaaatgacggaggtcgtattgaaggcaccggactcatcacctgaatctcgtagactgaatgcacagatattgtcccaacgcattgaaaaggccaaatgtctgtgcgacgagattattaaaaagctcaatgagaataagacgttcgatgatagctttaaagaaaaggagattctgcagatcaagttaaacgccgaggagaacgacaaactttacaaggtgttacaaaacatggtgttggagcttagccccaaagaactggatgaaaagaattgccaagataaattggaaacttcattacacgtgctgaaccagatcaaatcgcagctgcagcagcctctgctgatcaatcttgaaatcaaacacatacagaacgaaaaggacaactgtgaggcttttcaggagcaggtgtgggccgaaatgtgtagtatcaaggctgtaactgctattgagaagcaaagagaggagaactccagcgaggcctctgacgtggagacaaagttacgtgagttcgaggatctacagatgcaactgaatacatcaatcgacctgagaacaaatgtgcttaatgatgcctacgaaaatcttaccaggtacaaggaagctgtcacacgcgcagtggagagcatcacatcgcttgaggcaattatcattccctaccgcgtagacgtcggaaaccccgaggaaagtttggaaatgcccctacggaagcaggaggagctcgaaagtaccgttgcccatatccaagatttgacggagaagctggggatgatctcgtccccagaagccaagttacagttacagtatactttgcaggagctcgttagcaaaaactctgcgatgaaagaagcctttaaggcgcaagaaactgaggccgagaggtacctcgagaattacaaatgctataggaaaatggaagaggatatatacaccaacctcagcaaaatggagacagtcctggggcagtccatgtctagccttcccttaagttacagggaggccctcgagcggttagaacaatccaaagccctggtctccaacttgatctccaccaaggaggagttgatgaagttgagacagattctgcggctgctgagattacggtgcaccgagaatgacggaatctgcctacttaagattgtctcggctctctgggaaaagtggctgagcctgttagaagctgcaaaggagtgggaaatgtggtgcgaggagctcaagcaggaatggaagttcgtctccgaagaaatcgagcgtgaggccatcatcctcgacaatttgcaggaggaattgccggagatcagcaagacgaaagaggctgcaacaactgaggaactcagtgagttgttggactgcctgtgccagtatggggagaacgtcgaaaagcagcagctgttacttaccctgctgctacaaagaattagatccattcagaacgtgcctgaatctagtggggccgtcgagacggtgccagcatttcaggagataactagcatgaaggaaagatgcaacaagctgctccaaaaggtccagaagaacaaagaacttgtgcagactgaaattcaagagcgccacagtttcacaaaagaaatcattgccctcaagaatttctttcaacagaccactacctcgttccaaaacatggcctttcaggatcaccccgagaaatctgagcagtttgaagaactgcagtcaatacttaaaaagggaaaattgacctttgaaaatattatggagaagctacgaattaagtacagtgagatgtacacgattgtgccggctgagatcgagtctcaagtggaagagtgccgcaaagcactcgaagacattgatgaaaagatcagtaacgaagtgctgaagtcgagcccttcttacgccatgagacggaaaatcgaggagatcaataatggactccataacgtggaaaagatgctgcagcagaagtccaaaaacatcgaaaaagcgcaggaaatccaaaagaagatgtgggacgagctggatctctggcatagcaaactgaatgaattggactcggaggtgcaggacatagtcgaacaggaccccggccaggcccaggaatggatggataacctgatgattccgtttcagcagtatcagcaggtgtcccaaagagcagaatgccgcaccagtcagttgaacaaggcgaccgtgaaaatggaagagtattcagatctcctgaaatccacagaggcctggatcgagaacacctcccaccttctcgcgaaccccgccgattatgattctctccgcacactgtctcatcacgcctcaactgtccaaatggcacttgaggatagtgaacaaaaacacaacctactgcactctattttcatggatctcgaggatctttctattatctttgaaactgacgaactgacccagtctatccaggaactgtccaaccaagtaacagccttgcagcagaagattatggagtcgcttccccagattcagcggatggcggacgacgtcgtggctatcgagtcagaggtgaaatctatggagaagcgtgtgtccaaaattaaaaccatactactgtctaaagaaatctttgacttcagtcccgaggaacacctaaagcacggagaggttatactggaaaatatcagaccaatgaaaaagaccatcgccgagattgtaagctatcaggtggagttgaggctgccccagactggaatgaaacctctgccagtttttcagaggacaaatcagttgctccaagacatcaagttactcgagaatgttacacaagagcaaaatgagctcttgaaggttgttattaagcagacaaacgagtgggacgaagagatcgaaaacctgaagcagatattgaataactactccgcccaattctccctcgagcatatgtcacccgatcaggctgataagctgccccagctgcaaggagaaatcgagaggatggaaaagcagatcctctcgctgaatcagagaaaggaggatctcctggttgacctgaaggcaactgtcctaaacctgcaccagcacctcaaacaagagcaggagggtgtcgaacgcgatcgattaccagccgtcacaagcgaggagggaggggtggcagagagggatgcctcagagcgcaagctaaatcgtcggggcagcatgtcttacctcgctgctgttgaggaagaggtggaggaatcttctgtcaaatcagatcacgataaggatatggaggaagacagagcgtctagtagtagcggtactatcgtccaggaggcctatggaaagatatccactagcgacaactccatggcgcagattttgacaccggacagcttaaacaccgaacaaggtcccgagtgtagtcttcggccaaaccaaaccgaagaaggaactaccccgccaatcgaagctgacacactggactcctccgatgctcaagggggcctggaaccccgggtggagaagacccgcccagagccgactgaggtcctgcatgcgtgcaaaacccaggttgcggaattggagctgtggctgcagcaggctaacgtggcagtcgagcccgagaccctgaatgctgacatgcaacaggttctcgaacagcagttagtgggttgccaggccatgttaaccgagattgagcataaagtggcgttcctgctcgagacctgcaaggaccagggactgggagacaacggtgccacccagcatgaagccgaagcactctctcttaagctgaaaacggtaaagtgtaacttagagaaggttcaaatgatgctccaggagaaacacagcgaggaccagcaccctacaattctgaaaaaaagctcagagccagaacaccaagaagcgctgcagccagtgaaccttagtgagttggagagcatcgtcacagagcgaccccagttttcacgacagaaggacttccagcagcagcaggtgctggagctgaaacccatggaacaaaaggatttcattaagttcatagaatttaacgccaagaagatgtggccccagtactgtcaacacgataacgataccacccaggaaagttcagcccgataccccacaactgaggagctaaagacatatacaactcagctggaagatttgcggcaggaagcgagcaacctccagacccaagagaacatgactgaagaagcttacattaatctggacaaaaaactgtttgagttatttttgactctgtcccaatgtctaagctctgtcgaggaaatgctagagatgccaaggctctaccgtgaggatggcagtgggcagcaagtacactacgaaaccctcgctctggaactcaaaaagctttacttggcactgtctgataagaaaggcgacctgctgaaagcaatgacatggcccggcgagaatacaaatcttctattggagtgctttgacaatctgcaagtgtgtctggagcatacacaggccgccgccgtctgcaggtccaagagtctcaaagctgggctcgattacaatagatcttatcagaaggcggacgcatatactgtggagttggaaaacgccgagtctcgagttgcaaaattgagagatgagggagagcgcttacacctgccctatgcccttctgcaggaagtttacaaactcgaggacgtcttagacagtatgtggggaatgctccgagcgcggtataccgaactgtcttctcctttcgtcaccgaatcacagcaagacgcactgttacagggcatggtggaactggtcaaaatcggaaaggagaagctagctcatggccacttaaagcagaccaagtccaaagtggccctgcaggctcagatcgagaaccacaaggtgtttttccagaaactcgtcgccgacatgttactgatccaggcgtatagtgcaaagatactcccatctctgctccagaaccgcgagaccttctgggctgagcaggtgactgaggtgaaaatcctggaagaaaaatctcgccagtgtggtatgaagctccagtctcttctccagaaatgggaggagttcgacgagaattacgcctcactagaaaaagacctggaaattttgatcagtaccctcccaagtgtcagcctagtggaagagactgaggagcgactggtggagcgcatatctttctatcagcagattaagaggaatatcggtggcaaacatgcccgcctttaccagactctgaatgagggcaaacaattagttgcttcagtgtcttgcccagagttggagggacagattgccaagcttgaggagcaatggttgtcactaaataagaaaatagaccatgagctgcacagacttcaggctctccttaaacacttactgcgatcagccttcctgggggtgtacaatcgcgatagcgatcagcttaccaagtggctggagtcaagccaacacacactgaactattggaaggaacaatcactgaacgtttctcaggacctggataccatccgatcgaatattaataacttctttgaattcagtaaggaggtggatgagaaatcttccctgaagactgccgtgatatcgattggaaaccaactccttcatttaaaagagaccgatacagcgacactgcgggccagcctggctcagtttgaacagaaatggaccatgctgattacccaactgcccgacattcaggagaaactgcatcagcttcagatggaaaagctcccgagccgcaaggcaattacagaaatgatctcctggatgaacaatgtggagcaccaaacgagcgacgaggattctgttcactccccgtcttctgccagtcaagttaaacatcttctccagaagcacaaagaattcaggatggagatggactataagcagtggatagtggattttgtgaaccagagcctcctccagttgagcacctgtgatgtcgaatccaagcgatacgagcggactgaattcgctgagcatctcggagaaatgaatagacagtggcatcgggtgcacggcatgctgaataggaagatccagcacttggagcaactgttggagtccatcactgagagcgaaaataaaatccagattttaaacaattggttggaggcccaggaggaaagactgaaaacgttgcaaaagcccgagtcggtgatatctgtgcaaaagctgctcctggactgtcaagacattgagaaccagttagctataaagagtaaagccttggatgagctgaaacagtcctatttgactctcgaatccggagcagtccctttactggaggacactgccagtagaatcgacgaattatttcagaagaggagttcagtgctcacgcaggttaaccagctcaaaacatcaatgcaatcagtgctgcaggagtggaaaatctatgaccagctgtatgacgaggtgaatatgatgacaataagattctggtattgcatggagcactcaaaacctgtggttctgtctctcgaaactctgcgttgtcaagtggaaaacctgcagtctttgcaggacgaagccgagtccagcgagggctcgtgggaaaagttgcaggaggttatcgggaaactgaagggactgtgtccatccgttgccgaaattatagaggaaaaatgccagaacactcataagaggtggactcaggtcaatcaagccatcgccgaccaactccaaaaggcccagagcctccttcaactatggaaggcatactctaacgcacatggtgaagcagccgccagactaaagcaacaggaggccaagtttcaacagttagccaacatctcaatgagcggcaataacctcgcggagattcttcccccagccttacaggatataaaagagctgcaacacgatgtgcagaagaccaaagaagctttccttcaaaactcatcagttttggatagattgcctcagcccgcagagtctagtacacatatgctattaccgggaccactgcactcactccagcgcgctgcctatttggagaaaatgctgctagtgaaggcaaacgaatttgagaatcacgttctggcccttaccgctcagtctcccgacattgagcaccttaatgaggtctccctcaaactgcccctgtctgacgtagccgtgaagacgctgcagaacatgaacagacaatggatccgggccactgccacggctctggagagatgttccgagttacaggggatcggccttaacgagaaattcctttactgttgtgagaaatggatccagctgctagagaagattgaggaagctcttaaagtggacgtagcaaattctctcccagaattactagagcaacagaaaacttacaagatgctcgaggccgaggtcagcataaatcaaacaatagccgacagctacgttacgcagagcctccaactgctagacaccacagagattgagaatcgacctgaattcattaccgagttcagcaaattgactgatcgctggcagaacgcggtgcagggagtcagacagagaaaaggtgatgtggatggactgaatgctcacgtggctaggtgtgggggggccagtctgaagaagcaggatctgcggtactccctgcataccgcatgtggagcggccctgttatgcagatcaagtcatggagcgaataaagaaatacactttcagaggcggagaaccacttgtgctctgaccctcgaagccggagaaaagctattactgacaacagatctgaaaaccaaagagagtgtgggcaggagaattagccagctgcaagacagctggaaggatatggaaccacagctggctgagatgattaaacagttccagagcaccgtggaaacctgggatcagtgcgaaaaaaagataaaagagctgaagagccggctgcaggtgctgaaagcccagtccgaagatcccttacccgagcttcacgaggacctgcacaacgaaaaggagttgattaaagttgctatccgaaaacaagaaatcgaggacagattgaatacatgggtggttttcaatgagaagaataaggagttgtgtgcctggttggtccagatggaaaataaggttctgcagaccgctgatattagcatagaggaaatgatcgagaagctccagaagagaacagttggccgcgaagaggtgcccgaaaggtgggaatgcgagacaatcgtgtcggggcatggcaccgaggaatcttgcttcctgtcaattcggaaattccaccagggccgcggcctgcacatactcacctgccagcttatcccacaggattgtatggaggaaattaacttgtttagcgagaacaagttgcaattaaaacagatgggtgaccagctgatcaaggcttccaataagagccgcgctgccgagatcgacgacaaattgaacaagatcaacgatagatggcagcatcttttcgacgtcatcggcagcagtatggccgatcaaacaaacagtaggtggatgttttttcagtggccaagaggaatccaacgaaccgtaacctggccctgggaccacctgtgttcatgtgcgtccaccggacacactgggcctttccattctagtgtcttgcgctgctttgagcagcacatcgagtttggtatttataggaggacctacaaggtgaacaaggagctaggtggggacaagaatggccagagatgtccaattatctatccgcatgggctggtgcagtgtatccggttgggggagcccttgatactgaaaagggtaaagaagctgaaggagacattcgccttcatccagcagttggataagaatatgagcaacctgcgcacctggctggcgagaatcgaatctgaactgagcaaacctgtagtttatgatgtatgtgatgatcaagagattcagaagcgcctggccgaacagcaggaccttcagcgtgatatcgagcagcatagtgccggtgtcgaatcagtgtttaatatttgcgatgtgctcttgcatgatagtgatgcatgcgcaaatgagactgagtgcgattctatccagcagactacccggtccctggaccgcagatggcgcaatatctgcgctatgtcaatggagaggaggatgaagattgaggaaacttggaggctctggcagaagtttttagatgattatagcagattcgaggattggctcaagtccgctgagcggactgccgcctgcccaaattcctccgaggtcttatatacgtcagcaaaggaagaattgaagagattcgagcggcaaatccatgagcggctgacacagctagagcttataaataagcagtataggaggctggcaagggagaatcgaacagatacggccagcagactgaagcagatggttcacgaaggcaatcagcgctgggataatctgcagagaagagtgacagccgtgcttcgaaggctgcgtcacttcaccaatcagcgagaagagtttgaggggacgcgcgaatcgatactcgtgtggctaaccgaaatggacctgcagctaacaaatgttgagcatttctccgaaagcgacgccgacgataagatgcggcagcttaatggcttccagcaagagattacgctcaatacaaataaaattgaccagctgattgtgtttggagagcagttgattcagaaaagtgagcccctggacgcagtactcatcgaggacgagcttgaagagttgcatcgttattgtcaggaaggcttggaagacgagaaggaagctagtgaaaacgaaacggatatggaagacccgcgagaaatccagaccgatagttggcgcaagcgtggagagagcgaagagccttcgtcccctcagagcttgtgtcacctggttgcccctggacatgagcgatccggctgcgagacgcccgtgagcgtggattctattccactcgaatgggaccatacaggtgatgtggggggaagctctagccatgaggaagacgaggagggtccttattatagcgctctatcaggaaagagtatcagcgatggccattcgtggcatgtgcctgactccccctcctgcccggagcatcattacaaacagatggaaggcgatcggaatgtgccacctgtgcctcctgcatccagtactccctataaacctccatatgtttcccttaacttcactggctctactgcgtatgtgtgcgcctttgatcgatgggagatgatacaggctcaggagttacataacaaacttaagatcaaacagaacctgcagcagctaaactccgacatctccgccatcacaacgtggttaaaaaaaacagaggcggagctggagatgctcaaaatggctaaaccgcctagtgatattcaggagatcgaactcagggtcaagagactccaggaaattttgaaggccttcgatacttataaggccttagtggtttctgtaaacgtgtcctcaaaggaatttctgcagaccgagtcccccgaatctactgagctgcagtctcggctgaggcagttgtccctgctgtgggaggcagcacagggtgccgtggactcctggaggggagggctcagacaaagcctcatgcagtgtcaggatttccaccagctgagccagaatctcttgttgtggcttgcgagtgctaagaataggcggcaaaaggcccatgtcactgatcccaaggccgatccacgggcccttctggagtgtcggagggagctgatgcagcttgagaaagagctggtagagcggcaaccgcaggttgacatgctacaggaaatcagcaactcactgctgataaaagggcatggtgaggactgtatcgaggctgaggagaaggtacatgtgatcgagaaaaaactcaaacagcttcgcgaacaggtcagccaggatcttatggctctccaaggtacccagaatcctgctagcccactcccatcctttgacgaagtcgattccggagaccagccaccggccacctctgttcctgccccaagagcaaagttcttatatccagcagtccagagcagcgagaattatcggcgccgaggtggcgatcgagagcagggaccaagacagcatacggctaccgcactgttgcctctaaaggggggtcccggaagcccaaccccagccgctgctcctcctgccgcagctgcacctggtctccctgccgcgttgctgcgaagaaggttgcagctgcactctggccagcagctttgtcccgttttgctgccccatgcggaggtgcaccagtgggccactccacacatcgagggtatcgcaggtcattcggctactcccccagcctag

SEQ ID NO: 135879 - DNA, 20658 bp, synthetic construct
  misc_feature 1..20658: note = Description of Artificial Sequence: Synthetic coding sequence
  source 1..20658: mol_type = other DNA
atggcgtcttcccctgagctccctaccgaggacgagcaaggatcttggggtattgatgacctgcatattagcttacaagccgagcaggaggacacccagaagaaagcctttacatgctggattaacagtcagctcgctaggcatacttcccccagtgtgatctccgacctgtttacggatatcaaaaagggacacgttctcctcgatctgctcgaggtgttgagcggccagcaattgcctcgcgacaagggctctaataccttccagtgtcggattaatattgagcatgctctcacgtttcttcggaataggagtattaagctgattaacatacacgtgaccgatatcattgacggtaatcctagcatcatcttgggcctaatttggactatcatactacatttccacatagaaaaactcgcccaaacgcttagctgcaattataaccagcccagccttgacgatgtatcagtggtcgacagtagccccgcttcaagcccaccagctaagaagtgttccaaggtgcaggccagatggcaaatgtccgccaggaaggccctcctcctttgggcccaagaacagtgcgctacatacgaatcggtgaacgttacagatttcaagagctcatggcgaaacggtatggctttcctcgcaatcatacatgctctgcgccccgacttgattgatatgaagtcggtgaaacacagatccaacaaggataacctgagagaggcttttcggattgccgagcaggagctcaaaatccccagactcctcgaacctgaggacgttgatgttgtggaccccgatgagaagagtattatgacatacgtcgcacagtttctgcaatattcaaaggacgctcctggaacgggagaggaagctcagggcaaagtgaaggatgcaatggggtggcttaccctccagaaagaaaagctccaaaagttgctgaaagactccgaaaatgacacatacttcaagaagtacaactccctcttaagcttcatggagtcctttaatgaggaaaagaaaagttttctggatgttctgtccatcaagcgggacctcgatgagctggacaaggatcaccttcagctacgggaggcctgggatggactggatcaccagattaacgcctggaagattaagctcaattatgctttgcctccaccactgcaccagacagaggcctggcttcaggaggtggaggagcttatggacgaggacctgagcgcttcccaagaccactcacaggccgttactcttattcaggagaagatgactctgttcaagagcctcatggaccgatttgaacatcactccaatatcctgctgacctttgagaacaaggatgagaaccatctgcctttggtccctcccaacaagcttgaggaaatgaagcgcagaataaacaacatacttgagaaaaagtttattctgcttctcgaatttcactattataagtgtctcgtgcttgggctggtggacgaggtcaagtcgaagctcgatatatggaacataaagtacgggagccgtgagagcgtggagttgctcctggaagactggcacaagtttatcgaagagaaggagttcctagcacggctggacacaagttttcagaagtgtggggaaatatataagaatttagccggcgaatgccagaacataaacaaacaatatatgatggtcaagagtgatgtttgcatgtacagaaaaaacatctataatgttaaatctacccttcagaaggtactcgcttgctgggcaacttacgtcgagaacttacgattgctccgggcttgtttcgaggagacaaagaaagaggaaattaaggaagtgcccttcgaaacgctagcgcaatggaatctcgagcacgcaactttaaatgaggctgggaatttcctggtggaagtatccaacgatgtcgtaggctcatctatttccaaagagttgagacggctgaataaacggtggagaaaactggtatcaaagactcagctggagatgaatctccccctcatgatcaagaagcaagatcagcccaccttcgacaacagtggtaatatcctatccaaagaagaaaaagcaactgttgagttctctacagacatgagcgtggaactgcctgagaactataatcaaaatattaaagctggggagaagcacgagaaagaaaatgaggaattcacaggacagctcaaggtggcaaaagacgtcgagaagctcattggtcaggtggaaatatgggaagcagaggccaagtccgtgctagaccaagacgatgtggatacctcaatggaggagtctttaaagcatcttatcgccaaaggatctatgttcgacgagctcatggccaggtctgaggacatgctccagatggacattcagaacatcagcagtcaggagagctttcaacatgtgcttaccaccggccttcaggccaagattcaagaagcaaaagagaaggttcagattaacgtggtaaagctgatagcagctcttaaaaacctcacagatgtatctcctgatctggacatccgcctgaagatggaagagagccagaaggagcttgaatcttacatgatgcgtgcccagcagctcctcggccaaagggagagccccggagagctcatttccaagcacaaggaggctttgatcatctccaacacaaaaagtctggccaagtaccttaaagccgtggaagagctgaagaataacgtgaccgaggatattaagatgtcactggaggaaaagagtcgcgatgtttgtgctaaatgggagagcctccatcatgagttgtccctgtatgttcagcaactgaagattgatattgagaagggtaagctttctgataacattctgaagctcgagaagcagatcaataaagagaaaaagctcattaggcggggacggacgaaagggctgattaaggagcacgaggcctgtttcagtgaggaggggtgcctgtatcagttgaaccaccacatggaggtgctgagggaactgtgcgaagagttaccatcccagaagagccagcaagaagttaaacgcctcctgaaggattacgaacagaaaatagagcgccttctcaagtgcgccagcgagatccacatgacgttgcagcccactgcaggcggcacaagcaaaaacgagggaaccatcaccacatccgaaaaccgcgggggcgatccacactctgaggccccatttgctaagtcagacaaccagcctagtacggaaaaagcaatggaaccaactatgaagttcagcttggcctcagtcctgagacctttgcaggaagaatccataatggagaaggactactctgccagcattaacagtcttttggagcgttacgacacctatagagatatactggaacaccacctgcaaaacaataaatttcggatcacttctgacttctccagcgaagaggaccgatcatcaagctgtttgcaagccaagcttacagacctgcaggtaatcaagaacgaaacagacgcccgttggaaggagtttgagattatcagcctgaagctcgaaaaccacgtaaacgatataaagaagccgttcgtgattaaggaacgggatactctgaaggagcgagagcgtgaactgcagatgactcttaacacccggatggaaagcctggaaacggctttacggctggtgctgcccgtggaaaaagcatctctcctgctatgcggcagcgacctgcctctgcacaagatggctatccagggctttcaccttattgacgccgacaggatttatcagcatcttcgcaatatccaagactccattgccaagcagatagagatctgcaatagactggaggagccaggaaatttcgtgttgaaggaactgcatcccttcgacttgcacgcaatgcagaatatcatactgaagtacaaaacacagttcgagggcatgaaccatagagtgcagaggagcgaggacacacttaaggctctggaggatttccttgcctctttacggactgccaagcttagcgcagagcccgtgaccgacctgtctgcgagcgacactcaggtggcgcaggagaatacccttactgtgaaaaacaaagagggcgagattcacctgatgaaagacaaagccaaacacctagacaaatgcttaaaaatgcttgacatgtccttcaaggacgcagagagaggcgatgacacatcgtgtgagaacttacttgatgcttttagtataaagctcagtgagactcatgggtatggggtccaggaagaatttacagaggagaataaactgcttgaggcttgcatttttaaaaataatgaactgctgaagaacatccaggacgtccagtctcagatatccaagatcggtctgaaagacccaacagtcccagccgtgaaacatcggaaaaaaagtttgatacgccttgataaagtcctcgacgaatatgaggaagagaaacgacatctgcaggaaatggcaaactccctgcctcactttaaagacggccgcgagaagactgttaaccagcagtgccaaaataccgtggttctgtgggagaatacaaaggcattagtaacagagtgcctggagcagtgtggtcgagtgctcgagttgctgaagcagtatcaaaacttcaaatccatcctgaccaccctgatacagaaagaggaaagtgtgatttccttgcaggcctcatacatgggaaaggaaaacttaaagaaacggattgctgagatcgagatcgtcaaagaggaatttaacgagcacctcgaagtggtggataagatcaatcaggtgtgcaaaaacctccaattttatttaaacaaaatgaagacctttgaggagccccccttcgaaaaggaggcgaacatcatagtggaccgatggttggacatcaatgagaagacagaggattactacgaaaatctgggtagagctctggccctgtgggataagctgtttaaccttaaaaatgttatcgacgagtggactgaaaaagctcttcaaaagatggaactgcaccaactaaccgaggaagacagagaacgcctcaaagaagaattgcaggtgcacgagcaaaaaacttcagagttcagccgaagggttgcggaaatccagttcctgctccagagtagtgagatccccttggagctccaagttatggaatcatctattttaaacaaaatggagcacgttcagaagtgcctgactggagagtcgaactgtcacgcccttagcggcagtaccgcggagctgagagaggatctggaccaggccaagacacagatcgggatgactgagagcttgttgaaggcactgagtccatctgacagtctggaaatctttacaaagctggaagaaatacagcagcaaattctgcagcaaaagcactctatgatattgttggagaaccaaattggctgcctgacaccagaattgtcggagctgaagaagcagtacgagtcagtgagtgacctgttcaataccaaaaaatcagtgctgcaagatcacttctcaaagctcttgaatgaccaatgcaagaactttaacgactggttctccaatattaaggtgaacctaaaggaatgctttgaaagcagcgagactaagaagtcagtggagcagaagctgcagaaactcagcgacttcctgacactcgagggtcgcaactccaaaatcaagcaagtagattctgtgttgaagcatgtgaaaaaacacctgcctaaagcccatgtgaaagagcttatcagctggctcgttgggcaggagttcgagctggagaaaatggagtctatatgccaggcgcgagctaaggagctagaagactccttacagcagctgctaaggctccaggatgatcaccgaaatctgagaaagtggctgacgaatcaggaagaaaaatggaaggggatggaagaaccaggagagaagaccgagctgttctgccaggcattggctagaaagcgggagcagtttgaatccgtggctcaactgaataatagcctgaaggagtacggctttactgaggaagaggaaattatcatggaggcaacctgcttaatggatagataccagacactcctcaggcagctctccgaaattgaggaagaggataagctcttacctacggaggaccaatcctttaacgacttagcccatgatgtcatccattggataaaggagatcaaagaatcgctcatggtcctgaactcctcagaaggcaaaatgcccctcgaggagaggatacagaaaattaaggagattatcctgttgaaacctgagggggacgcccgtatcgagaccatcatgaagcaggctgaaagctccgaggcacccctggtccagaaaaccctgactgatatcagtaaccaatgggacaacacattacatttggcctcaacttatctgagtcaccaggaaaagttgctcttagagggagagaaatatcttcagtctaaagaagatctgcgcctgatgctgatcgaactgaaaaagaaacaagaagccggattcgctctgcaacatgggctccaagaaaaaaaagctcagctgaagatctacaagaagtttctgaagaaggcacaggacttgaccagcctattaaaggaacttaaaagccaaggtaattacctgctggagtgtactaagaatccctcttttagtgaagaaccatggcttgaaatcaaacacctgcatgagagcctgctgcaacagctgcaggattcggtgcagaacctggacggtcacgttagagaacacgactcttaccaggtttgcgttaccgacttgaatacgacactggacaacttttctaaagaattcgtcagcttctctgacaaaccggtagaccaaatagccgtggaagaaaaactccagaagttacaggagctggaaaataggctgtccctccaggacggcacactcaagaagattttagccctggccaaatcagtgaaacaaaacacatcgtcagtgggacaaaaaattataaaagatgacatcaagtcgttacagtgcaagcaaaaagatctggaaaacaggctggccagcgcaaagcaggaaatggagtgttgcctgaattccattcttaagagcaaaaggtcgactgaaaagaagggaaagtttactctgccaggaagagagaagcaggctacaagcgacgtacaggaatccacacaggagtctgcagccgtcgaaaaactcgaggaggactgggaaatcaacaaagattctgcagttgaaatggcaatgtctaagcaactgtctctgaacgctcaggaatccatgaaaaatacagaggatgaaaggaaggtcaacgaactgcaaaatcaacctctggagctggacacgatgctaagaaacgaacagctcgaggagatagagaaactttatacccagctagaggccaaaaaagctgcaataaaacctttagaacagactgagtgccttaataagactgagaccggcgcactcgttttacacaacatagggtacagcgcacagcacctggataatctgcttcaggcccttataaccttgaagaagaataaagagtctcagtactgtgttttacgtgacttccaagagtacttggcagccgtggaatcctccatgaaggcgcttctcactgataaagaatctctcaaggtcggccctctggattctgtgacatatttggataagatcaaaaaattcatagctagcatcgagaaggagaaggattcgctcgggaatctaaaaataaagtgggagaacctgagcaaccacgtgactgatatggacaaaaagctgctggaatcccagattaaacagctcgagcatgggtgggaacaggtggaacaacagattcagaaaaagtatagtcagcaggtggtcgaatatgacgagttcaccactctaatgaacaaggtgcaggacaccgagatttcactacagcagcagcagcaacacctacaacttaggttaaaatcccctgaggaacgtgctggaaatcagagtatgatagctttgacgactgacctacaggcgaccaagcatgggttctctgtgctaaagggacaggccgagctgcagatgaagaggatatggggcgagaaggagaagaagaacttagaagacgggatcaacaacttgaaaaagcaatgggagacactagagccgctgcacctggaggctgagaatcagatcaagaagtgcgacatccggaacaaaatgaaggagaccattctctgggctaaaaaccttctgggtgagctcaaccctagcattcccctgctgcccgatgacatactgagccagattagaaagtgcaaagttactcacgacggaatactggcaaggcagcagtcagtggaatctcttgcagaggaggtgaaagacaaagtgccttccctgacaacttatgaaggttccgaccttaacaataccctagaggacttacgcaatcagtaccaaatgttggtactgaaatctacccagcggtctcagcaattggaatttaagctcgaagaaaggtccaacttcttcgccataatcaggaagttccagctgatggtgcaggagtccgaaaccttgatcattcccagggtcgaaaccgccgcaactgaggccgagctgaagcaccatcacgttaccttggaagcaagtcagaaagaactgcaggaaattgatagcggcatcagtactcatcttcaggagcttaccaacatctatgaagaactgaatgtgttcgagcgactcttcctcgaggaccagctgaaaaatctgaagattcggacaaataggatccagagatttatccagaatacctgcaatgaggtggaacacaagataaagttttgtaggcagttccacgagaaaactagtgctttgcaggaggaagctgacagcattcaacgcaatgagctgcttcttaaccaggaggtcaacaaaggagtgaaggaggagatctataaccttaaagacaggctgaccgccatcaaatgttgcattcttcaagtcctgaagctaaagaaggttttcgattatataggattgaactgggatttctcacagctcgaccagctgcagacccaagtgtttgaaaaggaaaaagaattagaagaaaagataaagcagctcgatacatttgaggaggaacatggcaagtaccaggccctgctgagcaagatgcgggcaatcgacttgcaaattaagaagatgacagaagtcgtcctcaaagcgcctgactccagcccggagtcaaggcggcttaatgctcagatcctgagccaacggattgagaaggctaaatgcctgtgcgacgaaattatcaagaaactaaacgagaataagacctttgacgatagctttaaagaaaaagagatcctgcagatcaagttaaacgctgaggaaaacgacaagctttacaaagttctacagaacatggtactcgagctgagtcctaaggagctcgacgagaagaactgtcaggacaagctggagacgtctcttcacgttctaaatcaaatcaagtctcagctccagcagccccttctgataaacctggagatcaaacatattcagaatgaaaaagacaactgcgaggcgtttcaagaacaggtgtgggccgagatgtgcagcatcaaggccgtgacggcaattgagaagcagagagaggagaactcctctgaggcctccgacgttgagaccaagctaagggaattcgaagacctgcagatgcaacttaacacatccatcgacctcagaacgaacgtcctgaatgacgcctacgaaaatctgacaagatacaaagaggccgtcacaagggcagtggagtctatcacttctctagaggctattatcatcccctatcgcgtggatgtcggcaaccccgaagagagcctcgagatgccacttaggaagcaggaagagctggaatctacggtagcccacatccaggatctgaccgaaaaactgggtatgatatcttcacccgaagccaaactgcagctccaatacactctgcaggagctggtctccaagaactctgcaatgaaagaggccttcaaagcccaggaaaccgaggctgaaaggtatcttgagaattataaatgctatcgtaaaatggaagaggacatatatactaacttaagtaagatggagacagtgctcggccagagtatgtctagtttaccactgtcttaccgcgaagcgctcgaacgcctagagcaaagcaaagccctggtgtcgaaccttattagcactaaagaagaattgatgaagttacgtcagatcctaaggctgctgcgcctcagatgtaccgagaacgatggcatttgcctactgaagattgttagtgctctctgggagaaatggctcagcttgctggaggccgctaaagaatgggaaatgtggtgcgaagagctgaaacaggagtggaagtttgtaagcgaggagattgagcgcgaagcaatcatccttgacaatcttcaggaagaactgcctgagatctctaaaactaaagaggctgcaacaaccgaagaactgtccgagcttctcgattgcctgtgccagtacggcgaaaacgttgaaaagcaacagttgctgctcacattgttgctgcagcggattagaagcatacagaatgttcctgagtccagtggcgcggtagagactgtgcccgcctttcaggagattacgagtatgaaagagcgctgtaataaactactgcagaaggtgcagaagaacaaagagctggtccaaacagagattcaagaacggcattcattcaccaaggagataatagctctcaagaacttttttcagcagacaacaactagttttcagaatatggcttttcaggaccatccagagaagtctgaacagttcgaggagctgcagagcatccttaaaaagggcaagctcacttttgagaacatcatggaaaagcttcggatcaaatacagcgagatgtatacaatcgtgccagctgaaatcgagagtcaagtggaagaatgtaggaaagcacttgaagatattgacgaaaagatcagcaacgaggtgctgaagagtagcccttcgtacgccatgaggaggaagattgaggaaataaataatggcctgcataatgtggagaaaatgcttcagcagaagtccaagaatatcgaaaaggcacaggagatacaaaagaaaatgtgggacgagttggacttatggcactctaagctcaacgaactggattcggaggttcaggatattgtggaacaggaccctggacaagcccaggagtggatggataacctgatgatccccttccagcagtatcagcaggtgtcacagagagctgagtgtcggacaagtcaactcaacaaggccacagtcaaaatggaagagtacagcgatttactgaagtccacagaggcttggattgaaaatacaagccaccttctggctaatccagcagattatgacagcttaagaacgctctcccatcacgctagtaccgtccaaatggctcttgaggattccgaacagaagcacaacttgctgcattccatattcatggacctcgaagatctgagcattattttcgagacggacgagctcactcaatctatccaagaacttagtaaccaggtcaccgcactgcagcagaagatcatggaatcattacctcagatacaacggatggcggacgacgtcgtggcgatcgagtccgaagtaaagtctatggaaaaaagggtgtccaaaatcaaaacgatcctcctgtctaaagagatcttcgatttttcacccgaggaacacttgaagcatggcgaagtcatcctggaaaacatcaggcctatgaaaaaaactattgccgagatcgtgtcctaccaggttgagctccggctacctcagactggaatgaaacccctgcccgtcttccagagaaccaatcagctgctgcaggatattaagctgcttgagaacgttacgcaggagcagaatgagttactgaaggtggtgattaagcaaactaatgagtgggacgaggaaatcgagaacctgaagcaaatcctgaataactactccgcacagttctctctagaacacatgtcgcccgatcaggccgacaagttgccacagttgcagggcgaaatcgagagaatggaaaagcagatactttcccttaatcagagaaaggaggacctgctggtagaccttaaagccacagtgctcaacctccatcagcacctgaaacaagagcaggagggggtagaacgagacagactgcctgccgttacaagtgaggaggggggcgtcgccgagcgcgacgctagcgagaggaaactgaaccgcaggggttccatgagctatctggctgctgttgaggaggaagtggaggagtcctctgttaagagcgacaatggcgatgagaaggccgagccttctcctcagtcatggagcagtttgtggaagcacgataaagacatggaggaggaccgtgcgtcaagcagtagcgggactattgtccaggaggcttacggcaaaatcagcacaagcgataactctatggcgcagattctaacacccgattccctgaacaccgaacaggggccagagtgttcccttcgccccaatcagacggaggaaggcactacccctcccatagaggctgacaccctcgactcgagcgacgctcagggaggactggagccgagagtcgagaagacacggccagagcccacagaggtgctgcatgcatgtaagactcaggtcgcggagcttgaactgtggctgcagcaagctaacgtcgccgtagagcccgagacgctgaatgccgatatgcaacaagtgctggaacaacagttggtagggtgtcaggctatgttgacagaaatagagcacaaagttgcgttcctgcttgagacttgtaaagaccagggcctgggcgacaacggcgcgacccagcacgaagccgaggccctctctcttaaactgaagaccgtcaagtgtaacctggaaaaagttcaaatgatgctgcaggagaagcactccgaagatcagcatcctactatattaaaaaaatcctctgaacctgagcatcaggaagcactgcaaccagttaacctgtcagagcttgagagtattgtgacagagcgcccacagtttagccggcaaaaggatttccagcagcaacaggtattggagctgaaaccgatggaacagaaagactttatcaagttcatcgagtttaacgccaaaaagatgtggccacagtactgtcagcatgataacgatacaactcaggagtccagcgctagcaatcaggcttcgtcgcctgagaacgacgtgcccgactcaattttatcccctcagggacagaatggcgacaaatggcagtacttgcatcacgagttatcttcaaagatcaaactgccattgccacagttggtagagccacaggtgtccacaaacatgggtatccttcccagtgtaactatgtataactttcgataccccacgacagaggagttgaagacgtataccacccagctggaggacttgcggcaggaagctagcaacttgcaaactcaagaaaacatgaccgaagaggcctacatcaatctagacaagaagctgttcgaactatttctcacactgtctcaatgcctgtcatctgtggaggaaatgttagagatgcctagactctacagagaggatggctccggtcagcaggttcactacgagacactggctctggaactgaagaaactttatctggccctgtcagataagaaaggcgacctgctgaaagctatgacatggccgggcgagaatactaacctgctgctggaatgttttgacaacctgcaggtatgtttagaacatacgcaagcggcagccgtgtgccggtcaaagtcactgaaggcaggccttgactataaccggtcctatcagaacgaaatcaaaagactgtaccaccaactaattaagagcaagacctccctccagcagagcctcaatgaaatttccgggcagtccgtggctgagcaacttcaaaaggctgatgcttatacagtagaattggaaaacgctgaatctcgtgttgcgaaattgcgagacgagggggagaggctgcacctgccgtacgccctgctacaggaggtgtacaagctcgaggacgttctggacagcatgtggggtatgctccgggctcgatataccgagttatcttcgcccttcgtgacagagtctcagcaggacgcactgctgcagggcatggtggagctcgtgaaaattggcaaggaaaagcttgcgcatggtcatttgaaacaaacaaagagcaaggtggccctgcaggctcagatagagaaccacaaggtgttcttccagaaattagtcgcagacatgttgcttatacaggcttactcagccaaaatactgcccagtctgctgcagaatagggaaaccttctgggccgaacaagtgactgaggtcaagatcttagaagaaaagtcaagacagtgcggaatgaagctgcagagtcttctccaaaaatgggaggaatttgatgaaaactacgctagtctcgagaaggacctggaaatattaatatcaactctcccttccgtgtccctggtggaggagaccgaagaaagattggtcgaaagaatcagcttttaccagcagatcaaacggaatatcgggggcaagcacgctcgcctctaccagaccctgaatgaaggcaaacaacttgtggcttcagtttcatgcccagagctggaagggcagatcgctaaacttgaagagcagtggctcagtctcaataaaaagattgatcatgaactgcacaggttacaggcactgctgaaacatctgctttcatacaatcgtgactcagaccagctaaccaagtggttggaatccagccaacacacactcaactattggaaggaacagtcgctgaacgtgagccaagacctggatactataagatccaatattaacaatttcttcgagttctccaaggaggttgatgagaagtcaagcctgaagaccgccgtgatctcaatcgggaaccagctcttgcatctcaaggagaccgataccgccacgttgagggccagtttagcccagtttgagcagaagtggacgatgctgattactcagctgcccgatatccaggagaaattgcatcaactgcaaatggaaaaactgccttctaggaaggcgataacagagatgatcagctggatgaacaacgtggagcatcagacttcagacgaggactctgttcactcccccagttccgcaagtcaggtgaagcaccttctgcagaagcataaagaatttcgcatggagatggattacaagcagtggatcgttgactttgtgaatcaatctttgttgcagctcagcacttgtgacgtagaaagtaagagatacgagaggacagaattcgcagagcacctgggtgagatgaatcggcagtggcaccgggtgcacggaatgctgaacaggaaaattcagcatctggagcagctcttggagagcattacagagagcgagaacaaaatccagattctgaataattggctggaagctcaggaggaacgcctgaagactctgcagaaacccgaaagtgtgatcagcgttcaaaaactgcttttggattgtcaggatatagagaaccagctggctattaaatccaaagcacttgatgagcttaaacaatcctaccttacgctagaatcaggagctgtgccacttctcgaagacactgcctctcgaatcgacgagctgtttcaaaagcggtcaagcgtcctaacgcaagttaaccagctgaagacctcaatgcagtcggtgctgcaggagtggaagatttacgaccagctgtacgatgaggttaatatgatgacaatcagattctggtactgtatggaacattctaaaccagtagttctgtcgttggaaacccttcgctgccaggtggagaacctgcagtctctgcaggacgaggctgagtcatcagaggggtcctgggagaaactgcaggaagtgatcggtaagttgaagggactctgtccatctgtggccgaaattatagaggaaaagtgccagaacacacacaagcggtggactcaggtcaaccaagcaattgcagatcaactccagaaagcccagtctctgcttcaactgtggaaagcatattctaacgctcatggcgaagccgcagctagactgaagcaacaggaagccaagttccaacagcttgccaacattagtatgagcggtaacaacctagccgagatcctccctccggcattgcaggacataaaagagctgcagcacgatgtccagaaaactaaggaggccttccttcagaactcctctgtccttgaccgtttgccccagcctgccgagagcagtacgcacatgcttctccccggacctctacactcattgcagcgcgctgcttatctggaaaaaatgctccttgtgaaggccaacgagttcgaattcgttctgagtcagttcaaggacttcggcgttcggctggagagtctgaagggcttgatcatgcacgaggaagagaacttggaccggctccatcagcaggaaaaggaaaacccagactcttttctgaatcacgtgctggcgttgacagcccagtcgccggatattgagcacctgaatgaggtttccctcaagttgccccttagcgacgttgcagtgaagacattgcaaaatatgaaccggcaatggatcagagctaccgcaactgcactggaacgctgttcagaacttcagggtatcggcctgaatgaaaagtttctgtattgctgtgaaaagtggatacagctcctagagaagattgaggaggccctgaaggttgatgtagcaaattccttacccgagctcctcgagcagcagaagacgtacaagatgctggaagctgaagtgtctatcaatcagactattgctgatagctacgtcacacagagcttgcaactgcttgacaccactgagattgagaataggcccgagttcattacagagttctccaagctgactgatagatggcaaaatgcggtccagggagtgcggcaacgaaaaggagacgtcgacggcctggtgagacagtggcaggacttcacaaccagcgttgaaaatctgttccgctttttgaccgatacaagtcatctgcttagcgctgtcaagggccaggaacgcttctctctgtatcagactcggtctttgatacatgagctcaagaacaaggagattcacttccagcggagacgaaccacctgtgccttgacacttgaagctggcgagaagttgctcctgaccactgacttgaaaacaaaagaatcggtagggaggcggattagccagttgcaagactcgtggaaagacatggaaccccagttggccgagatgattaagcagttccagagtaccgtggaaacatgggatcaatgtgagaagaagatcaaagaactcaagtctaggctgcaggtgctcaaggcacaatctgaagatcctctgcccgagctgcatgaggacctgcacaacgagaaggaactcatcaaggagctcgagcagtccttggccagttggacccagaatttgaaagagctccagaccatgaaagcagatttgacccgccatgtcctagtggaagatgttatggtactcaaagaacagatcgaacatttacaccgacagtgggaggacctttgcctcagagtggcaatccggaagcaagagattgaggatcggctgaacacatgggtcgtgttcaacgagaaaaacaaggagctctgtgcctggctggttcaaatggaaaataaggttttacagaccgctgatatttccattgaggagatgatcgagaaattacaaaaagattgcatggaagagattaacctattttcagaaaacaaactgcaattgaaacaaatgggcgatcagctcatcaaggcaagtaataagtcacgcgctgcagagattgatgacaagctgaataagattaatgatagatggcagcatctgttcgacgtgatcggaagccgggttaagaaactcaaggaaacatttgctttcatacaacagcttgacaaaaatatgtcaaatctcagaacatggctggccagaatagagtcggagctcagtaagccagtggtgtacgacgtctgtgacgaccaggagattcaaaagagactcgccgaacagcaagatttgcaaagagacatcgaacagcattctgctggagtggagtcagtgttcaatatttgtgacgtcctgcttcacgatagcgacgcctgtgcaaatgaaacagagtgtgactctatccagcaaaccacccgctctctcgaccggaggtggcgtaatatctgtgccatgagcatggaacggcggatgaagatcgaggaaacatggaggctctggcaaaaatttcttgacgactattcccgctttgaggactggcttaaaagtgctgagcgaaccgccgcctgtcctaactcctccgaggtcctatacacttccgcgaaagaggagcttaagcgcttcgaagccttccagcgacaaatccacgagagactcacacagctcgaacttatcaacaaacagtaccgccgcttagccagggaaaacagaactgacaccgctagtagacttaaacagatggtgcatgagggtaaccagcgctgggataatctgcaacgtcgggtcacggctgtccttcggcggctaagacactttaccaaccaaagagaggagttcgaggggactcgggaaagcattctagtctggctgacggaaatggacctgcaacttaccaacgtggagcacttctctgaatccgatgcagatgataaaatgcgacagcttaatggatttcagcaggaaattacgctgaataccaacaaaatagatcaactcattgttttcggcgaacagctgatccagaagtcagaaccacttgatgccgtgcttatcgaagatgagttggaagagttgcataggtactgccaggaggttttcggcagagtgtccagatttcaccgaaggctcacctcatgtacacccggcctggaagacgaaaaagaagccagcgaaaacgagacagatatggaggaccctcgcgagatccaaactgactcatggagaaagaggggcgagtcggaagaaccttcctcaccccagtctctttgccacctggtagctcctggccacgagagaagtggttgtgagacacctgtgtcggtggactctatccctctggagtgggaccacacaggggacgtgggcggatcttcctcccacgaagaggacgaagagggtccatactatagtgctttgtcagggaaatccatcagcgatggacacagttggcacgtgccggatagtcccagctgtccagaacaccattacaaacaaatggaaggcgataggaacgtcccaccggttccaccggcttcatctaccccatataaaccgccctacgggaaattgctgctccctccaggaaccgatggcggcaaggagggacctcgcgtcctgaacgggaacccacagcaggaagacgggggtctggctggtattaccgaacagcagagcggggctttcgatcgatgggagatgatccaggcccaagaactccacaacaagctgaaaattaaacaaaatctgcagcagctgaattcagacatcagtgcaattactacgtggctgaagaagaccgaggccgaactggaaatgctgaaaatggcgaagcctccatcagatatccaggagattgaactcagagtcaaaagattacaggagattcttaaggccttcgacacttataaagcattagtagtgtccgtgaatgtaagttccaaagaatttttgcagacagagagcccggagagcaccgaactccagtcccgtctgaggcaattgagcctactgtgggaggccgcccagggagctgttgacagctggcgtggggggctcagacagagcctgatgcagtgccaggacttccaccaactctctcagaacctcctgctctggcttgcaagtgccaagaatcgccggcagaaagctcacgtgaccgatcccaaagctgatcctcgcgctctgcttgagtgcagaagagagctgatgcaattggagaaggagctggtcgagaggcagcctcaggtggacatgctgcaagagatatctaatagcctgttgattaagggacacggcgaggactgtattgaggctgaagagaaggttcatgtgatagaaaagaaactgaagcaactccgagaacaggtgtcacaggatctgatggccctccaggggacgcagaatcccgcctctccactcccatcctttgatgaggtggactcaggcgatcaaccgcccgccacctccgtgcccgctcccagggcgaaacagtttagagctgtgaggacaactgaaggggaagaagagaccgagagccgtgtcccaggtagtactagacctcagcgcagctttctttctagggtggtgagggctgcactgccacttcagctgctgctcctgctcctattactgctcgcttgcctcctgccctcttctgaagaagattattcatgtacccaagcgaataacttcgcgagatcattttatcccatgcttcgatatacaaacggccctccccccacctag

SEQ ID NO: 135880 - DNA, 804 bp, synthetic construct
  misc_feature 1..804: note = Description of Artificial Sequence: Synthetic coding sequence
  source 1..804: mol_type = other DNA
atggcttcttctccagaacttcctacggaagacgaacagggctcgtggggtatcgacgatcttcacataagcctccaggcagagcaggaggacacccagaagaaggcatttacgtgctggatcaactcccagctggcacggcatacatccccttctgtaatctccgatctatttactgacatcaagaaaggtcacgttttgctggacttgctggaggtgctgagcggccagcagctgccacgcgataagggctcgaataccttccagtgtcggataaacatcgaacacgcactaaccttcctgcgaaatcgctcgatcaaacttatcaatatccacgtgacagacatcatcgatgggaacccaagcatcatcctcggcctcatatggacgataatactccacttccatatcgagaagctggctcaaacactatcttgcaactacaaccagcccagcctggacgacgtgtctgtcgtggacagcagcccggcgtcgagtccaccagcaaaaaagtgttccaaagttcaggccagatggcagatgtccgcgaggaaggccctgctcctatgggcccaggaacaatgtgctacttatgaatctgtgaacgtcacggattttaagtcctcatggcggaacggaatggcgttcctggccatcatccacgcgctccgcccagatctcattgacatgaaaagcgttaaacatcgttccaacaaggataacctcagagaggcgtttaggatcgccgagcaggagctaaaaatcccaagactgttggaacccgaggcatacaagaacttttag

SEQ ID NO: 135881 - DNA, 9813 bp, synthetic construct
  misc_feature 1..9813: note = Description of Artificial Sequence: Synthetic coding sequence
  source 1..9813: mol_type = other DNA
atggagaaactgaggatcaagtatagcgaaatgtatacgattgttccagccgagattgagtctcaagtagaggaatgtagaaaggctctggaggacatcgacgagaagatcagcaacgaagtcctgaagagcagccccagttacgctatgcggagaaagatcgaggagattaacaatggtttacataatgtggaaaagatgctccagcagaaatctaaaaatatagaaaaggcccaagagattcagaaaaaaatgtgggacgagttggacttatggcatagcaagctgaatgagctggactccgaagtccaagacatagttgagcaggacccaggacaggctcaggagtggatggacaatctgatgatcccctttcagcagtaccagcaagtatcgcagcgcgctgaatgtaggacatctcagctgaataaagcaaccgtgaagatggaggaatatagcgacctcctcaagtcaaccgaagcatggatcgaaaacactagccacctcctggccaacccagccgattatgactcccttagaactctatcacaccatgcatccactgttcaggattcaaaatgtttccgttcggggccgaggcctaacatatacgtgagctactatgtaactgtgatacagatggccctggaagacagcgaacaaaagcacaacctgctgcattcaatttttatggatctcgaagacctgtctattattttcgaaaccgatgaactgacacaaagtattcaggaattgtcaaatcaggtcacagcgctgcagcagaagataatggaatcactaccacagattcagagaatggctgacgacgtggtcgccatagagtccgaggtaaaatccatggaaaagcgcgttagcaaaataaagaccatactcctctctaaggaaatctttgacttttcgcccgaggaacaccttaaacatggggaggtgattttagagaacatccggcctatgaagaagaccatagccgagatcgtgtcctaccaggtggaactacgattaccacaaacggggatgaagcccttgcctgtcttccagcgaaccaatcaactgctgcaggatataaagctcctggagaatgtcacccaagagcagaacgaactgttgaaggtcgtgattaaacagacaaatgaatgggacgaggaaattgagaacctgaagcagatcctgaacaattattccgcacagttttctctcgaacacatgagccctgatcaagccgataagctgccgcagctgcagggcgagattgagcgcatggaaaagcaaattctgtctctgaatcagagaaaggaagacctgctggtagatttaaaagccactgtgttgaatttacatcaacatctgaaacaggaacaagagggcgtggaaagagatagattgcccgccgtgaccagcgaggaggggggcgttgcagagcgcgacgcaagtgaaaggaaactcaaccgacgcgggtcaatgtcatatcttgctgcagtggaggaggaggttgaagagagctccgtcaagtcagataatggcgacgagaaagcggaaccctctccacaaagttggtccagcctatggaagcatgacaaagacatggaggaggacagagcgtcaagctcctctggcacgatcgtgcaggaagcttatggtaaaatcagcacaagtgataactcaatggctcagattctcacccccgattctcttaacactgaacaagggccggagtgttccctgagacctaatcagacagaggagggtaccaccccccccatagaggctgataccctagactcctccgacgcccagggtggactggaacccagggtcgaaaagacgcggccagaacctaccgaagtactgcacgcgtgtaagacacaagtcgccgaattagaactgtggctgcagcaagcaaacgtcgctgtggagccagagacattaaatgctgacatgcagcaggtgttagagcaacagctggtgggatgccaagccatgttgaccgaaattgagcacaaagtggcattccttctggagacttgcaaagatcaggggctcggcgacaacggtgccactcagcacgaggctgaggcgctgtccctcaaactcaaaacggtgaagtgtaaccttgagaaggtacagatgatgctccaagaaaaacactctgaagatcagcatccaaccattctgaaaaaatcttccgagccagagcaccaagaagcactgcaacccgtgaacctgtccgaattggaatctatcgtcactgaaagaccacagttcagccggcagaaagattttcaacagcagcaggttctggaactcaagcccatggagcagaaagatttcattaagttcatcgaattcaacgcaaaaaagatgtggcctcagtactgtcagcacgataatgacactacacaggagtcaagtgcttccaaccaagcttcctcacccgaaaacgatgtaccggatagtatcctgtcaccccagggccagaacggagataaatggcagtacctccatcacgagttgtcaagcaaaattaagctgccgttgcctcagttagttgagccccaggtatctaccaatatgggcatcttgccatcagtgactatgtacaactttaggtaccctacaacagaagagctgaagacctataccactcaactggaagacctccgtcaagaagcatctaacttacagacccaggagaatatgacagaggaagcttatatcaaccttgataaaaaactctttgagctctttttgacgctcagccagtgtctgtcctcagtcgaggagatgctagaaatgccacggctgtacagggaggatggctctggccagcaagtccactacgagacactagccttggaactgaaaaaactgtatctcgccctgagcgacaaaaaaggggatctgctgaaagccatgacctggccaggcgaaaataccaacttgttgttagagtgttttgacaaccttcaggtgtgtctggaacacacccaggctgcggcggtatgcaggagcaaatcactcaaagcaggattggattataaccggtcataccagaacgaaataaagaggctgtatcatcaactaatcaaatctaagactagcctacagcagtcacttaatgagatttcagggcagagcgtcgcagagcagttacaaaaagccgatgcctatactgttgaactggagaacgcggagagcagagttgccaaactcagggatgagggagagcgacttcacctgccttatgcgttactgcaagaggtctacaagctggaagacgtgctggactctatgtgggggatgctgcgcgcacggtatacagaactttcaagcccttttgtcactgagtctcagcaggacgctcttctccagggaatggtggaactggtaaagattgggaaagaaaagttggctcacggccatttaaagcagacaaagtctaaggtggctctgcaggcacagatcgagaaccacaaagtgtttttccagaagctggtggcagacatgttgctaatccaagcgtattccgccaagatcctaccaagtctgctgcaaaatagggaaacattctgggccgagcaggttacagaggtcaaaattttggaagagaagagccgccaatgtgggatgaagttacaaagtctgctgcagaagtgggaggagtttgatgagaattatgcctccctggagaaggatctggagattctcatcagtactctccccagcgtctctctagtcgaggaaaccgaagagaggttagtggaaagaatctctttttaccagcagatcaaaaggaacataggaggcaaacacgcccggctgtatcagacactaaatgaagggaaacaattggtagccagcgtctcttgtccagagctggaaggtcagatcgccaagctggaggagcagtggttgagtctgaacaaaaagattgaccacgaacttcacaggctccaggccttgttaaagcacttgctgtcctacaacagggacagcgatcagctaactaagtggctggaatcctctcagcacaccctgaactattggaaggagcagtctctgaacgtcagtcaggacctggatacgattcgctctaacattaataactttttcgagttctccaaagaggtggatgagaagagctccctcaagaccgcagtgatctctatcggcaatcagttgctgcatctgaaggaaacggacacagccacgctgcgcgctagtcttgcccaatttgaacagaaatggactatgctaattactcagttgccggacatccaggaaaaactccatcaacttcagatggagaaattaccatccaggaaggccattaccgaaatgatatcctggatgaataatgtcgagcaccagacgtccgacgaagattcagtccactctccatcaagtgctagccaggtcaaacacctactgcaaaaacacaaggaatttagaatggaaatggactacaagcagtggatcgtcgacttcgtcaaccaatcactactccaactcagcacctgcgacgtggaatctaaacgctatgagagaaccgagtttgctgagcatctgggtgagatgaatagacagtggcatcgggtacacgggatgttgaatcggaagatccaacatctggaacagctgctagaatccattacagaaagtgagaacaagatacaaatcctgaataattggctggaggctcaggaagagagattgaagacacttcaaaaacctgagagcgtaatctccgtgcaaaaattgctgctggactgccaagatatcgaaaatcagttagcaatcaaatctaaagccctcgacgagctaaagcagtcttacctgacactcgagtctggcgcagtgcctctcctggaagataccgccagcagaattgacgagctgtttcagaaacgaagttctgtgctcactcaggtcaatcagctgaaaacctccatgcagtcagttcttcaggagtggaagatctatgatcagctttacgatgaggtcaacatgatgacaataaggttctggtactgcatggagcacagtaagccagtggttctatctttggaaacgctgcgctgtcaggtggaaaatcttcagtctctacaggacgaagcggagtcttcagagggctcttgggagaaactccaggaggtgatcggaaaactgaaaggtctgtgtcctagcgtagccgagatcattgaggaaaagtgccagaacactcataaacggtggactcaggtgaatcaagccatcgcggaccagctccagaaggcgcaatccctgttgcagctctggaaggcatacagcaacgctcacggcgaggccgccgcacgcctgaagcaacaggaagcaaagttccaacaactggcgaacatcagcatgagcggaaacaatctggcggaaatccttcctccagctctccaagatattaaagagttgcaacacgatgtacagaaaactaaggaggcatttctgcaaaactctagcgtgctagatagattgccccagcccgccgagagctcaacccacatgctcctgcctggcccactccatagtctccagcgcgccgcctaccttgagaaaatgttgcttgtgaaagctaacgagtttgagttcgttctgagccagtttaaggattttggagttcggctcgaatcccttaagggactgatcatgcatgaagaggaaaatctggacagattacaccaacaggagaaggaaaaccctgactcatttctcaatcatgttttggctcttaccgctcagtcaccggatattgagcatctgaacgaagtttctctgaagctcccattaagcgacgtggcagtcaagaccctccagaatatgaatcgccagtggatacgcgctactgcaactgccctcgagagatgctcagagctgcaggggattggactcaacgagaaattcctttattgctgcgagaagtggatccagctgctcgagaagattgaggaggccctgaaagtggatgtggccaattcattaccggaattactagagcaacagaaaacatacaagatgctcgaagctgaagtttccatcaatcagacaatcgctgattcatacgttacacagtctctccagttgttagataccacagagatcgaaaatcgtccagagtttatcaccgaatttagcaaactgacggaccgctggcaaaacgcagtccagggcgtgcgccagagaaagggagacgttgacgggctggtaaggcagtggcaagactttactacctccgtggaaaacctgtttcggttcctgaccgacacatcgcatctgctgagcgcagttaagggacaggagcgtttttcactgtatcagacccgatcattgattcatgaactaaaaaataaagaaatccacttccagcgacgtaggaccacctgtgccttgacactggaggccggggaaaaacttctcctaaccaccgacttgaaaactaaagaaagcgtggggcgacggatttcccagctacaggattcctggaaagatatggaacctcagctggccgagatgatcaaacagtttcagagtacagtggagacttgggaccaatgcgagaagaagatcaaggagctgaagtccagactgcaggtgcttaaagcccagagcgaagatcccctgccagagttgcacgaagacctccacaacgagaaggaactcattaaagaacttgagcagagcctcgcctcgtggactcagaatctcaaagagttgcaaacaatgaaggctgatctgacacggcacgtccttgtggaagatgtaatggtgctgaaggagcagattgagcatctccaccgacagtgggaggacctgtgcctcagggtggctataagaaagcaggagatcgaagacaggctgaacacctgggttgtgttcaatgagaagaataaggagctgtgtgcctggcttgttcaaatggagaacaaggttcttcagacggctgacatcagcatagaggaaatgatcgagaaactccagaaagattgtatggaggagatcaatctgtttagcgagaataaattgcagctgaaacaaatgggagaccaactgataaaggcatcaaataagtcacgtgctgccgagatcgatgacaagttgaataagattaacgacaggtggcagcacctgtttgacgtgatagggagcagggtgaagaagcttaaggagacatttgcgttcatccaacagttggataaaaacatgagcaacctgaggacttggctggcccggatcgagtccgagttgtctaaacctgtcgtgtatgatgtgtgtgatgatcaggaaattcagaagcggttagccgagcagcaagatctacagcgggacattgagcagcatagcgccggagttgaatccgtgttcaacatttgcgacgtgttactgcacgacagtgatgcttgcgcaaatgagacagaatgcgacagcattcaacagaccactagatccctcgacagaagatggaggaacatttgtgcgatgagtatggagaggcgaatgaagatcgaggagacatggcggctctggcagaagttcctggatgactatagtcgtttcgaggactggctgaagtcggcagagaggaccgccgcctgcccaaattcctcagaagtgctttatacctcagccaaggaagagctcaaacgctttgaagcctttcagcggcagatccatgagagactgacccaactggagcttatcaataagcagtacagacgccttgccagggaaaatcgaactgacacagcttcccgccttaagcagatggtacacgagggaaatcaacggtgggataatttgcaacgaagggtaaccgctgttctgagaagactccgtcacttcactaaccagcgcgaagagttcgagggcacccgcgagagtatactggtatggttaaccgaaatggatttgcagctgactaacgtggagcattttagcgagtccgacgccgacgacaagatgcggcagctcaacggtttccagcaggaaatcaccctgaataccaacaaaatcgatcagctgatcgtgtttggggagcagctcatccaaaaatcggagccccttgacgccgtgcttattgaagatgagctggaagagctgcacaggtattgccaggaggtattcggccgggtgtcaagattccaccgcagattgaccagttgtacccctggccttgaagatgagaaagaggccagtgaaaacgagacagacatggaggacccccgagagatccagactgattcctggcgaaaacggggtgagtcagaagagccctcatcacctcagtccctgtgccacctggtggcccctgggcacgaaaggtccggatgcgaaaccccggtttctgttgactccattcccttggagtgggaccacacaggggacgtggggggcagttcaagccacgaggaagacgaagagggaccttattatagcgcactgtctggtaaaagtatctcggatggacactcatggcacgttccagactcaccctcttgcccagagcatcactacaaacagatggaaggcgatcgtaacgttccccccgttccccccgcttcttccaccccctataaaccgccttacggtaagctcctcctcccgccaggcaccgacggaggaaaagaaggtccgcgcgtactaaacgggaatccgcagcaggaagatgggggcctagctgggataaccgagcaacagtccggggcctttgatcggtgggagatgatacaggcccaagaactgcataacaagctgaagatcaagcaaaacctgcagcagctgaattctgacatcagcgccattacaacttggcttaagaagacagaggcagagcttgaaatgctgaagatggctaaacctccatctgatattcaggagattgaactgcgggtgaagcgactccaagagattctgaaggcctttgatacttacaaagctttagtagtgtctgtcaatgtctcgtccaaagagttccttcagaccgagtcacccgagagcaccgagttacaaagtagactgcggcagctgagtctcctttgggaagcagcccagggcgccgtcgatagctggaggggcgggctgcggcaaagtctcatgcagtgccaggattttcatcagctgagccagaatttactgctttggctggcttcagctaaaaacaggaggcagaaagctcacgtgactgatccaaaggccgacccacgagccctcctcgagtgccgtagggagttgatgcagcttgaaaaggagctcgtagagcggcagccccaggtggatatgcttcaggagattagtaattccttgctgatcaaaggccacggagaggactgtattgaagcagaagagaaagtgcacgttattgagaaaaaactgaaacagctgcgagagcaggtgtctcaggatctaatggcgctgcagggaacacagaatcctgcatctcccctgccatccttcgatgaagtggacagcggagaccagccaccggccacatctgtgccagcaccgcgtgccaaacaattcagggccgtccgaaccactgagggcgaggaggagacagaaagtagagttccaggatccactcgcccacagcgttcctttctctccagggtcgtccgggccgcactcccactgcaactgctgttactcctgctgctgcttttagcatgtcttctgccatcatcagaagaagattactcttgtactcaagccaacaacttcgcccgtagcttctaccctatgctgaggtacactaatgggcctccgcctacctag

SEQ ID NO: 135882 - DNA, 20724 bp, synthetic construct
  misc_feature 1..20724: note = Description of Artificial Sequence: Synthetic coding sequence
  source 1..20724: mol_type = other DNA
atggcctcctcccccgaactgccaactgaggatgagcaaggctcttgggggattgacgacctgcacataagtctgcaggccgaacaagaagatacgcagaaaaaagcctttacatgctggatcaattcccaactggcccgacacacttcaccatcagttatatctgacctgttcaccgacatcaagaaaggccacgtgctgctcgatttgctggaagtgctttccgggcagcagctgcctagagataaagggagcaatacttttcagtgtcgtatcaacattgagcacgcactcacgtttctgcgcaaccgctcgattaaactgataaatatccatgtgaccgatattatcgacgggaaccccagtataattttggggttgatctggaccattattttgcatttccatatcgagaagctggcgcagactttgtcctgcaactataatcagccctccctggatgacgtttccgtagtggactctagccctgcgtcctcaccacccgcaaagaaatgttccaaagtccaggccaggtggcaaatgtctgcaaggaaggcattgttactgtgggcgcaggagcagtgtgccacgtacgagtcagtcaacgttaccgactttaagagttcctggcgcaatggaatggcttttctggccatcatccacgccttgcgtcctgatctgatagacatgaagtctgtcaagcacagaagcaataaagacaacttacgtgaggcatttcgcattgccgagcaggaactcaagatccccagactgctcgaacctgaagacgtcgacgttgtcgatccagacgaaaagagcatcatgacctatgtggcccagtttctgcagtacagcaaggacgctccaggaacaggtgaagaggcacagggcaaagtgaaagatgcgatgggatggttgacacttcagaaagagaagctgcagaagctgttgaaggattctgagaacgatacttattttaagaagtataactcgttgctcagcttcatggagagcttcaacgaggaaaagaaatccttcctcgacgtgctgtcaataaaaagagacctggatgagctcgacaaagaccacctccagctgagagaagcatgggacgggctggatcaccagatcaatgcctggaagattaaactgaattacgcccttcccccaccactgcaccagaccgaagcctggctccaagaggtagaggagttaatggacgaagacctttctgcaagccaggatcacagtcaggccgtcacactgatccaggagaagatgacactattcaagtcgttaatggaccgtttcgagcaccattcaaatatactgctgacctttgagaataaagatgagaatcacctgcctctagtccccccaaataagcttgaagagatgaagcggcgcattaataatattttggagaaaaaatttatcctactactggaatttcactattacaagtgtctggtcctgggcctggtcgatgaggtcaagtctaaattagacatatggaacatcaaatatggatcaagagaatcagtcgagctattgttggaagactggcacaagtttattgaagagaaagagttcctggcacgacttgacacctcttttcagaaatgcggcgagatctacaaaaatctggccggtgaatgccagaatataaacaagcagtacatgatggttaagtcagacgtatgcatgtatcggaagaatatctataacgtcaagtctactctacaaaaggttctggcctgctgggccacgtacgtggagaatctgcgtctgctgagggcctgcttcgaggagactaagaaggaggagattaaagaagttcctttcgaaaccctggcacagtggaacttagaacacgcaaccctaaatgaagcagggaattttctcgtcgaggtcagtaacgacgtggtaggttcttcgatctctaaggaattgcgcaggcttaacaagcgctggagaaaacttgtgtccaagacacagctcgagatgaatctgcctctaatgatcaaaaagcaggatcagcctacctttgataacagtggcaatattctgagcaaagaagaaaaggccacagtagagttcagcacagacatgagtgtcgagctccccgagaattataatcaaaatatcaaggcaggggaaaagcacgagaaagagaacgaggaattcacaggacagctgaaagtcgccaaggacgtggaaaaactgataggccaagtggagatttgggaggctgaagcaaaaagtgtgttggaccaggacgatgtagatacctcaatggaggagtcactcaaacacctgattgccaagggctctatgtttgatgaactgatggccaggtcggaggacatgctgcagatggatatccagaacatttcatcccaagagtcattccaacatgttctgacaaccggcctgcaggctaagatccaggaggccaaagaaaaggttcagataaatgtcgtaaagctgatcgctgccttgaaaaacctgactgacgtgagtcctgacctcgacatcaggctcaaaatggaggagagccagaaagagctggaatcatatatgatgcgggcacagcagctgctggggcagagggaatccccaggtgaactgattagcaagcacaaggaggcacttataattagtaacacaaaatccctggcaaagtacctgaaagcagtcgaggagttgaagaataacgtgaccgaggatattaagatgtcgttagaagagaagtcgagagatgtgtgtgcgaaatgggaatcactgcaccatgaactctctctttacgtgcagcagctgaagatagatatagagaagggaaaattgtctgataatatactgaagttggagaaacagattaacaaagagaagaaactgattcgcagagggcgcactaaaggactgatcaaggagcatgaggcatgctttagcgaagaggggtgtctttatcagttaaaccatcatatggaggtgctgcgggaactgtgcgaggagctgccttcccaaaagtctcaacaagaagtcaagcgcctgctcaaggactacgaacagaaaatagaacgactcctgaaatgcgcctccgaaatccacatgactttgcagcctacagctggcggtaccagtaaaaatgagggtacgataactactagcgagaacagaggcggagaccctcatagtgaagctccatttgccaaaagcgacaaccagccctcgaccgagaaagcaatggaaccaaccatgaaattcagcttggcgtccgtactccgtcctctgcaggaagaatctataatggaaaaagactattctgcctcgattaattctctgctcgagcggtatgatacgtatagggacatcctagaacaccatttgcagaataataagtttagaattacttcggattttagctctgaggaggacaggtcctcttcttgcctccaggctaagttaacagacctccaagtgataaagaatgaaaccgacgctcggtggaaagagttcgaaattatttctttgaagctggaaaatcatgttaacgatatcaaaaagccgttcgttatcaaggaacgggacactttaaaggaaagagagagagagctgcagatgaccctaaacacccggatggaaagcctggagactgcattgaggctggtgctgcctgttgaaaaggcctctctcttgctgtgtggctcagatctgcctctgcacaaaatggccatccaaggattccaccttatagatgccgatcggatctaccagcacttacgcaatattcaggattctattgcaaaacaaatcgagatctgtaatcgcctggaagaacccgggaacttcgtgcttaaagagctgcatccattcgatctccacgccatgcagaatatcatactcaagtacaaaacccaatttgaagggatgaatcatagagtacagcgctctgaagatacccttaaagcacttgaagacttcctggcctctctaagaactgctaagctgtccgctgagccagtcaccgacctttcggcttcagacacccaggtggcccaggagaacaccctgaccgtgaaaaataaggagggtgagattcaccttatgaaagacaaggctaagcacttggacaaatgcctcaagatgctagacatgtctttcaaggacgctgagcggggggacgacacctcttgtgagaatctgcttgacgctttcagcattaagctatccgagactcacggctatggagtgcaggaggaattcactgaggagaataagttgcttgaggcgtgcatctttaagaataatgaactgcttaagaacatccaagatgtgcagagccagatttccaaaatcggcctgaaggacccaaccgtgccagccgtgaagcaccgtaaaaaatcactaatacgcctcgacaaggtgctggatgagtatgaggaggagaagaggcacctgcaggagatggctaatagtctgccacatttcaaagacgggcgggagaaaactgtgaatcagcagtgtcagaacactgtggttttgtgggagaataccaaggcattggtcacagaatgcctggaacagtgtggacgcgtgctggaactgctgaaacagtatcagaactttaagtctatactgactacattgatccagaaggaagagtctgtgatcagtctacaggcctcatacatgggaaaagaaaacttgaaaaagcgaatcgccgagattgaaatcgtcaaggaggaatttaatgagcacctggaggtggtcgataagattaaccaggtttgtaaaaacctccaattctatttaaataagatgaagacgttcgaggagcccccatttgaaaaagaagcgaacatcattgtcgacaggtggctcgatatcaacgaaaagaccgaagactactacgagaacctggggagggcgttggcactttgggacaagctgttcaacttaaagaacgttatcgatgaatggaccgagaaggccctccagaaaatggagctccatcaactaactgaggaggatcgggaaaggcttaaagaagagctgcaggtccatgagcagaaaacctctgaattctcccggcgggtcgccgagattcaattcctgttgcagagtagtgaaattccgctggagctgcaggtgatggagtcctccatcttgaacaaaatggaacacgtgcagaaatgcctgactggagagtcgaactgtcatgccctcagcgggtcaaccgccgaactgcgagaagacttggaccaggccaagacccagatcggaatgaccgagagcctccttaaggctctatcccctagtgatagtctggaaattttcactaagctggaagaaatacagcagcagatcctacagcagaagcactctatgatcctcctcgagaaccagatcggctgcctcacacccgaattgtcagaactgaagaagcaatatgagagcgtatcagatctgtttaacacaaagaagtctgttctccaggatcatttttctaagctgctcaatgaccagtgtaagaacttcaacgattggttttcgaatataaaagtgaacctgaaggagtgcttcgagagttcagaaacaaagaaatctgtagaacagaagctgcagaagctgtctgactttctaacccttgaaggtagaaattcaaagatcaagcaagtcgactcggtactgaaacacgtcaagaaacacttaccaaaagcccatgtgaaggagctgatttcctggctggtcggacaggaattcgaactcgagaagatggaatctatttgccaagccagagcaaaggagctggaagactctttgcaacagctgctgagattacaggatgatcacagaaacctgcggaaatggctaacaaaccaggaggaaaagtggaaaggcatggaagagcccggcgaaaagacagagctcttttgtcaagctctggcccgaaagcgagagcagttcgagtccgttgctcagctgaataactcattaaaggaatatggattcaccgaggaggaagagatcatcatggaagccacgtgcctaatggaccggtatcagaccctgttgaggcagctctcagagatcgaagaagaagataagctgctccccactgaggatcagagcttcaacgacctagcacacgacgtgatccattggattaaggagataaaggagagcttgatggtgttgaacagtagtgaaggcaagatgccccttgaagaacgcatccagaaaattaaggagatcattctcctcaaacccgagggtgacgccagaatcgagaccatcatgaagcaggccgagagtagcgaagcaccactggtccaaaagacgcttaccgacatctcaaaccagtgggacaacactctgcatctagctagcacctatttaagtcaccaagagaagctactgctggaaggagagaagtacttacagtctaaggaggacctccgcctcatgttgattgaattgaaaaagaagcaggaggctgggtttgccctacagcacggattgcaggaaaagaaggcccagctgaagatctataagaagttcctgaaaaaagcgcaagatctgactagtttgcttaaagagctgaagtcacaggggaattatcttctggaatgtaccaagaatccgtcattcagtgaagagccctggttggaaatcaagcacctccatgagtccctactgcagcagctgcaggatagcgttcagaacctggacggtcatgtgcgtgagcacgattcttaccaggtgtgcgtgacggatcttaataccactttggacaatttttctaaagagttcgtatctttctctgacaagcctgtagatcagatcgctgtggaggaaaaactgcagaagttgcaggaattggaaaacaggctgtctcttcaggacggcacgctgaagaaaattcttgcgctggccaagtcagtcaagcagaatacaagcagcgtgggccagaagatcataaaagacgatataaagtcactgcaatgcaagcagaaagacctggagaatagactcgcaagcgccaagcaggaaatggaatgttgtttgaatagtatcctcaaaagtaagcggagtacggaaaagaagggaaagttcacgcttccaggcagagagaaacaagccacctctgacgtccaggagagcacccaagaatctgcagctgtcgaaaaactggaggaggactgggaaataaataaagatagtgcagtagaaatggcaatgtcgaagcagttatcactcaacgcgcaggaatcaatgaagaataccgaagatgagagaaaggtcaacgagttgcaaaaccagcccctcgagcttgacacgatgttgagaaacgaacagttggaagaaatcgaaaagctgtacactcagcttgaggccaagaaagcagccatcaaaccattggagcagacagagtgcctcaacaagactgagaccggggctctggtgctgcacaacattggttattccgcacagcacttagataacctattgcaggctctgattacactcaagaaaaataaagagtcacagtactgcgtgctgcgcgacttccaggagtatctggctgccgtcgaatcctctatgaaggccttgctcacggacaaggaaagcctaaaagtaggccctttggactctgtaacttatctggacaaaattaagaagtttatagcgtcaatagaaaaggagaaggactctttggggaatctgaagattaagtgggagaacctgtccaatcacgtgactgatatggacaagaaattacttgagtcccaaattaaacagctggaacacggatgggagcaggttgagcagcagattcagaagaagtattcacagcaagttgttgaatatgatgaatttactaccctcatgaacaaggtgcaagatacggagatttccttgcagcagcagcagcagcatcttcagctgcgactgaagagcccggaagagagagcaggcaatcagtccatgatagccctgacaaccgacctacaggctacaaaacacggattcagcgtcttgaagggacaggcggagctccagatgaagcgcatttggggggagaaggaaaagaagaacctagaagacggaatcaataatctcaaaaagcagtgggagaccctcgagccactccatttggaggccgagaatcagattaagaagtgtgatattagaaacaaaatgaaggaaaccatcctgtgggccaaaaatttgctcggagaattaaacccttccattccattgcttccggatgatatcctctctcaaatcaggaaatgtaaagttactcatgacggcattctggctaggcagcagagcgtggaaagcctggctgaggaggtgaaggacaaggtcccctccctcacaacatatgagggcagcgacctcaacaacaccctggaggatctcagaaaccaataccaaatgctcgtgctcaaatcaactcagcgcagtcagcagttagaattcaaactagaagagcgcagtaatttcttcgctatcattcggaagttccagctgatggtgcaagaatcagaaactctcattattcctcgcgttgagaccgcagctacagaagcggagctgaagcaccaccatgtcaccctggaagcctcccaaaaggagctgcaggagatcgactctggcattagcacgcacctgcaagagctcacaaacatatatgaagaacttaacgtgttcgagagactttttctcgaagaccagcttaaaaacttgaagattcggaccaacagaatccagagatttattcagaacacctgcaacgaggtggaacacaagattaagttctgcagacagtttcatgagaaaacatcagctctacaagaggaggctgatagcatccaaagaaacgaactgttactcaaccaagaggtgaataagggcgtgaaggaggaaatctacaacctgaaagatcgcctcaccgccattaaatgttgcattcttcaggttctgaagctgaagaaggtctttgactatatcgggcttaattgggacttttcacaactggaccagttacagacccaggtgttcgagaaggaaaaggaactcgaagaaaagataaagcagcttgatacttttgaggaggaacacggtaagtatcaggccttactgtcaaagatgcgtgccattgacttgcaaatcaagaagatgactgaggtggtcctgaaggcacctgactcaagccccgagagcagaagactgaacgcccaaattctgagccagcgcatagagaaagctaagtgcctgtgtgacgagatcattaaaaagcttaatgagaacaagactttcgacgactcgtttaaagagaaagaaatcctacagatcaaattgaacgcagaagaaaatgataagctgtacaaggtgctccagaatatggtgctcgagctttcgcccaaagagttagacgaaaagaattgccaagacaaactcgaaacgtctctgcacgtgctgaatcagataaagagccagctgcagcagcctctacttatcaacctggaaattaaacacattcagaatgagaaggacaactgtgaagcatttcaggagcaagtgtgggcagagatgtgctcaattaaagccgtgacagccatagagaagcagcgggaggaaaattcatctgaggccagtgatgtggaaaccaagctccgggagtttgaggatcttcaaatgcagcttaatactagcattgatctccggacaaacgtcctgaacgatgcttatgagaatcttacccgctacaaagaggccgttacccgggccgttgaaagtattacatccctggaggccattatcatcccatatagggtggacgtgggaaatccggaggagagcctggaaatgcctctgaggaaacaagaagaactggagagcactgtggcccacattcaagacctgacggaaaaactgggcatgatttcctctcccgaggctaagctgcagctacagtatacccttcaggaattggtgagtaagaattctgcgatgaaagaagcattcaaagcccaggaaaccgaggcggaacgctatttggagaattacaaatgctatagaaagatggaggaagatatatatactaacctgtccaaaatggaaacagtgctgggtcagagtatgtcgtcactccccttgagttaccgcgaagcgcttgaacgcctggaacaatcaaaagcccttgtgtcaaatctgatttccaccaaggaagaactgatgaagctcagacagattctgcgattactgcggctgaggtgcactgagaatgatggcatttgcctacttaagatcgtctctgccctgtgggagaaatggctgtccctgttagaagccgcgaaagaatgggagatgtggtgtgaggagttgaagcaggaatggaagttcgtgtcagaagaaatagagcgtgaagccattattctcgacaatttacaggaggaactgcccgagatcagcaaaactaaggaagccgcaacaacggaggagctatccgagctgttggattgcctgtgccagtacggggagaatgttgaaaagcagcagctcctgctcaccttgctgcttcagcgcattcgcagcatccaaaacgtgcctgagtcctctggcgccgtggaaacagtgccagccttccaggagattacttctatgaaagaacgttgtaacaagcttttacagaaagtgcagaagaataaggagctggtccagacagagatccaggaacgccattctttcaccaaggagatcattgccctcaaaaacttttttcagcaaacaactacatcatttcagaacatggcttttcaagaccaccctgaaaagtccgagcagttcgaggaactgcagtcaatcctcaagaaagggaagctgacctttgaaaacataatggagaagctcagaattaaatactccgagatgtacacaattgtacctgccgaaattgaaagccaagtcgaggaatgcaggaaggccctcgaggatatcgatgagaaaatcagcaacgaagtgcttaagtccagcccaagttacgctatgcggcggaagattgaggaaattaacaatggacttcacaatgtagagaaaatgctccaacagaagtcgaagaatattgagaaggctcaggaaattcagaaaaaaatgtgggacgaactcgatctgtggcattccaaactgaatgagctggattctgaagtccaagacatcgtggaacaggaccccggacaggcccaagaatggatggataatctcatgatacccttccaacaataccagcaggtgagccagcgtgccgaatgtcggaccagtcaacttaataaggctacagttaagatggaagagtattctgatttactgaagtccactgaggcttggatagagaatacctcccacctcttggcgaatccagcagattacgactctctgcgaacactttcccatcatgcgtcgaccgtccagatggcccttgaagactcggagcagaaacataatctgctgcattccatatttatggatctggaagaccttagtatcatctttgagacggatgagctgacgcaatctattcaggagcttagtaaccaagtcaccgctctccagcagaaaattatggaatccctgcctcagatccaacgcatggcagacgacgtggttgctattgaatcagaggtcaagtcaatggagaagagggtgtctaaaattaagaccatcctactatccaaggagattttcgatttctcacccgaagagcacttaaaacatggggaggtgatccttgaaaatatccggcctatgaagaaaactatagcggagattgtgagctatcaggttgaactgcggcttcctcagacaggcatgaagccattacccgtgttccagcggacaaaccagcttctgcaggacattaagctacttgagaacgtcacccaggaacagaatgagctcctaaaggtggtgatcaagcagacgaacgagtgggacgaagagatagaaaatttgaagcagatcctgaacaactactctgctcaattcagtctagagcacatgtctccagaccaagcggacaagttgcctcagctgcaaggggaaattgaacgcatggagaagcagattctgagccttaatcagcggaaggaggacctgcttgtggacttaaaagctacagtgttaaatttgcaccaacatctcaagcaggaacaggagggagtcgaaagggatcgactgcccgccgtgacctcagaggaaggtggtgtggccgagcgagacgcctccgaacgcaagctgaatcgaaggggcagtatgagttacttggccgctgttgaagaagaagtagaagaatcaagcgttaagtccgacaacggggatgagaaggccgagccttctccccaatcctggtcgagtctctggaagcatgataaggatatggaagaggatcgcgcttcaagctctagcggtaccattgttcaggaagcctatgggaagatctccaccagcgacaattctatggcccagatcctcacgcctgacagcctcaatacagagcaggggcctgaatgtagtctgcggcccaaccagactgaggaagggacgactcctccaatagaggcagacaccttggattcttcagatgctcaggggggccttgagccccgagtggaaaaaactcgcccagaacccaccgaggtactccatgcctgcaagactcaggtggccgagttggaattatggctccagcaggcaaatgtggcagtggaacctgagacgttgaacgcagatatgcagcaagtactagaacaacaactggtcgggtgtcaggctatgctgacggaaatcgaacacaaggttgccttcttgctcgagacctgcaaggaccaagggctgggggacaacggcgccacacagcacgaagcagaggccttaagcctgaaactcaaaaccgtcaagtgcaacttggagaaggtgcagatgatgctccaagaaaaacactccgaggatcagcatcccaccatcctcaaaaaatcttcagaaccggagcaccaggaggcccttcagcccgtcaatctgtccgagctcgagtctatagtgactgagcgcccgcagtttagccgtcaaaaggatttccagcagcagcaagtattagaactcaagccaatggagcaaaaggatttcatcaagtttattgagtttaacgcaaaaaagatgtggccacagtactgtcagcacgacaacgacacaacgcaggaaagctccgcttccaaccaggccagctccccagaaaatgatgtgcctgattcgatcctgagtcctcagggccagaacggggacaagtggcagtacctgcaccatgagctctccagtaaaattaagctgcctctgccgcagctggtggagccacaggtgagcactaatatgggcatacttcccagtgtgaccatgtataactttagatatccgactacagaggaactgaagacttacactacacaactcgaggatctgcgccaggaggcatctaatttacagacacaagagaacatgaccgaggaagcctacatcaatttggacaagaaactcttcgagctcttcctcacattgagtcaatgtctgtcgagcgttgaggagatgctggagatgccaaggttatatcgggaggatgggtccggacaacaagtccactatgagactctcgccttggaattgaaaaaactgtatctggccctcagtgacaagaaaggtgaccttttgaaggccatgacctggcccggcgagaacactaacctcctgctcgaatgttttgacaatctgcaagtctgcctggagcatacacaggcagctgccgtgtgccgttcgaagagcctgaaagctggattggactataataggagctaccagaacgaaatcaagaggctgtatcatcagctcatcaaatctaagaccagtttacagcagagcctgaatgaaataagtggccagagcgtggctgagcagttacagaaagccgatgcctatacagtagagctagagaatgctgagagcagggtcgcaaagctcagagacgaaggcgagagactgcatttgccctacgctctcctgcaggaggtgtacaaattagaagacgtcctggatagtatgtgggggatgcttcgcgccagatacaccgaactgtccagtccattcgtgacggaatcccagcaggatgcactgctgcagggcatggtggaactggtaaagatcgggaaggaaaagctggcccatggccatctcaaacagacaaaatctaaggtcgcactgcaggcgcagatcgaaaatcataaagtcttctttcagaagcttgtggctgatatgttgcttattcaggcgtactctgccaagattctgccttcccttcttcagaatcgggagaccttctgggctgaacaagtgaccgaagtgaaaatcctcgaggaaaaatctaggcagtgcggcatgaagttacagtcgctgttacagaaatgggaggaattcgacgaaaattatgcaagtttggaaaaagacctggagatcttaatatctactctcccctctgtatctttagtggaggagacagaggaaaggctcgtggaaagaatttctttttaccaacagattaagcggaacattggcggaaagcatgcaaggctgtatcagacactgaatgagggcaaacaactcgtggcctccgtttcttgtcctgagcttgagggccagatagcaaaactcgaggagcagtggctgtcccttaataaaaaaatcgatcatgagttgcacaggctccaggcattgctgaagcacctgttaagctataaccgagacagtgaccagctaaccaaatggctggaatctagccaacataccctgaactattggaaagaacaatctttaaacgtgagccaggacctcgacacaatacgctccaatattaataatttttttgagttttctaaggaagtagacgagaagtcttccctgaaaactgccgtgatctctattggcaaccagctgctccacttgaaagaaactgataccgctacactgagagcctcacttgcccagtttgagcagaagtggactatgctgatcactcaactccccgacattcaggagaagctccatcagctgcagatggagaaactgccctcacggaaggcaatcacagagatgatttcgtggatgaataacgtggaacatcagacttccgacgaggattcagtgcatagcccctcttcggcttcccaggtaaaacatttactgcagaagcacaaagagtttcgtatggaaatggactataaacagtggattgtggacttcgtaaaccagagcctgttacaactgtctacttgtgatgtcgaatccaagcggtacgagcgaaccgagtttgctgagcacctcggcgaaatgaacaggcagtggcaccgggtccacggtatgctgaatcggaaaatccaacacttggaacagcttctggagtcgatcaccgaaagcgaaaacaaaatacagatccttaataactggctcgaggcacaagaagaacggctaaaaacgctccagaagcccgagtctgttatctccgtccagaaactgcttcttgactgtcaggatattgaaaaccagctggccatcaagtcaaaagctctggacgaactgaaacagtcttacttgacactggaaagcggggcggtgcctctcctggaggacactgcaagtcggatagatgagcttttccagaagcgttcctccgtgttgacgcaagtgaatcagctcaagaccagtatgcaaagcgtcctgcaggagtggaaaatctatgatcagctgtacgatgaggtaaatatgatgactatccgcttctggtactgcatggagcacagcaagcctgtcgtactgagcctggaaacccttcgctgccaggtggagaacctccagagtttgcaagacgaggctgagtcctcagaaggaagctgggaaaaactccaggaagtgattgggaagctcaaaggtttgtgtccctccgttgccgagataatcgaggagaagtgccagaacactcataagagatggactcaggtgaaccaggcgatcgcagaccagttgcagaaggcccagagcctgttgcagctgtggaaagcatactccaatgcccatggcgaggctgcagcccgcttaaaacagcaagaggccaagtttcagcagttggccaacatctctatgagtgggaataatctggccgagattttgccccctgccttgcaggacattaaagaactacaacacgatgtgcagaagactaaggaagcatttctccagaacagttcggtgctcgataggctccctcagcctgctgaaagctctacgcatatgttactccctgggcccctacactcgctccagagagcagcgtaccttgaaaaaatgctcttggtgaaggcaaatgagttcgaattcgtgctatcccagttcaaggatttcggagttaggcttgaatcattgaagggcttaataatgcacgaagaagagaacctggaccgactccatcagcaggagaaggagaatccagattcttttttaaaccacgtgctggccctgacagcccagagccctgacattgagcacttgaacgaggtgagtctgaaactacctttgtccgatgtggccgtaaagacacttcaaaatatgaatcggcagtggatcagagccaccgccacagccctcgagcgatgctctgaactgcaggggataggcctgaatgagaaatttctatactgctgcgaaaaatggattcagttgttagagaagatcgaggaggcactcaaagtggacgttgctaatagtctccctgagctgttagaacagcagaagacatataaaatgctggaggccgaggtgtctatcaaccagacaattgctgacagctacgtgacccagagtctgcagttgctggacacgacagaaattgagaatcgaccggagtttattactgaattctcgaaattgactgatcgctggcaaaatgctgtgcaaggagtccggcaaagaaagggcgatgtcgacgggctggtcagacagtggcaagactttaccacatcggtggagaatctgttccgctttttaacagacacttcccacctgctgtcagccgtgaaaggtcaagaacggttttctctttatcagacgaggtctctcattcacgagttaaaaaacaaagaaatacactttcagcgccgaaggacaacttgtgccctcaccctcgaagccggggaaaaactgttactcactaccgaccttaaaacaaaggaatccgtgggaaggagaatttcgcaactgcaggattcctggaaggacatggagccccagttggccgagatgatcaagcaatttcaaagcaccgttgaaacatgggatcagtgcgagaaaaagattaaagagcttaagtctagactgcaagttctcaaagcccagagcgaagatccgctgccggagctccatgaagacctgcataatgaaaaggaactcatcaaagaactggaacagtcgttggcatcctggacccagaacctcaaggagctgcaaaccatgaaggcggaccttacgaggcacgttcttgtggaggatgtaatggtgctgaaggagcagatcgagcacctccatcggcagtgggaagatctgtgtttgcgggtggccatacgcaaacaggagattgaggataggctgaatacatgggtggtgtttaacgaaaagaacaaagagctatgcgcatggctggtgcagatggagaacaaagtgcttcagactgctgatatttctatagaggaaatgatcgagaaactgcaaaaagattgcatggaggagatcaacttgttctctgaaaataaactgcagctcaagcaaatgggggaccagctcattaaggcatctaacaaatccagggccgccgagatcgatgataaactcaataaaatcaacgacagatggcagcatctctttgacgtgataggaagtcgcgtcaagaagttgaaagagactttcgccttcattcaacaactggacaaaaatatgtccaacctgagaacctggctagcccggatagagtctgaattgtccaagcctgtggtttatgacgtctgcgatgaccaggagatccagaagagactggctgaacagcaggatctgcagcgtgatatcgaacagcactctgcgggcgtggagtcagtgtttaatatttgcgatgtccttctacacgattctgatgcgtgtgccaacgagacagaatgcgactctattcagcagacaacacgttctctcgatcgaaggtggagaaacatatgtgctatgtccatggaaagacgcatgaagatcgaggagacttggagattgtggcagaaatttttggatgactattccagatttgaggattggctaaagtcagctgaacgtaccgcagcttgtccaaactcctccgaagttttgtacacttcagccaaagaagagctgaagagattcgaggcctttcagaggcagattcacgagcggctgactcagctggaactgatcaacaagcaataccgcaggttagcccgcgagaatcggacagataccgcctcccgcctgaaacagatggtccatgaagggaaccaacgctgggacaatctgcagcgccgagtgacggctgtactaaggaggctgagacatttcaccaatcagagagaggaatttgagggaactagggaaagtatactggtttggctgaccgaaatggatctacagttaactaatgtcgaacacttttctgaatctgatgccgacgacaagatgaggcaattgaacggatttcagcaagagattaccttgaacacgaataaaatcgaccagctgatcgtcttcggcgaacaactgatacagaagtccgagcccctggacgccgtgctgatcgaagacgagctcgaagagctccaccggtattgccaagaggtgttcggccgcgttagtcggttccacagacgactcacctcatgtactccaggcctcgaggatgaaaaggaggcgtccgaaaatgagaccgacatggaagatccacgggagatacaaaccgactcatggagaaaacggggcgagtcggaagaaccatcgtcaccccagtccctatgccatctggttgctccaggccatgagagaagtggttgtgaaacgcccgtaagcgtggactccattcctctcgaatgggatcataccggcgacgtgggtgggagttcaagccatgaagaggacgaggagggaccctattacagcgcactgtcagacgttgaaataccagaaaacccagaggcctacctaaagatgactaccaaaacacttaaagcgtcttccggcaaaagcattagcgatgggcactcgtggcatgtcccggacagcccatcctgcccagaacaccattacaagcagatggagggagacaggaatgtccctccagtgccgcccgcatcttccacaccatacaagcctccatatggaaagctgctgcttccacccggaacagacggagggaaggaagggcctagggtgctcaacggaaacccgcagcaggaagacgggggcctggcagggatcactgaacagcagtccggcgcctttgacagatgggaaatgatccaggcccaggagctgcataacaaactaaagattaagcagaacctacagcagcttaattcagacatatctgctataaccacatggctcaagaagaccgaggcagaactggaaatgctaaagatggcaaagcctcccagtgatatccaggaaatcgaactcagagtcaagcggctgcaggagattttaaaggccttcgatacctacaaagctcttgtggtctccgttaacgtgagcagtaaagagtttctgcagacggagagtcccgaaagcactgaactgcagtccaggttgaggcagctctccctgttgtgggaggccgcccaaggcgcagtagattcgtggagaggcggactgaggcagagcctaatgcagtgccaagactttcatcagctctcacaaaatctgctcctctggctggcttcggccaagaacaggagacaaaaagcacacgtgacagatcctaaagccgatccaagagcccttcttgagtgtagaagagagctcatgcagctggagaaagagctggtagaacgacagcctcaggttgatatgctccaggagatcagtaattccctgctgatcaagggtcacggcgaggattgcatcgaagcagaggagaaggttcacgtgatcgagaagaagttgaaacagctgcgcgagcaggtgagccaggatttgatggcacttcagggcacacagaaccctgcctctcctctgccctccttcgatgaagttgactcaggagaccagccgccagccacatctgtccctgcaccacgggccaaattcagggcagttaggaccacggagggcgaggaagagacagagtctcgggttccaggatctacacgaccccagaggtcgttcctctccagagtggtgagagcggctctgcccttacagctcttgctcctgcttttactgctactggcttgcctgctgccatcttcagaagaggactatagttgcacccaggcaaacaattttgcacgaagcttctacccaatgctacgatacaccaatggccctccgccgacctag

SEQ ID NO: 135883 - DNA, 9813 bp, synthetic construct
  misc_feature 1..9813: note = Description of Artificial Sequence: Synthetic coding sequence
  source 1..9813: mol_type = other DNA
atggaaaagttaaggattaagtatagtgaaatgtataccattgttccagccgagattgaatcccaggtggaggagtgtcggaaggctttggaggatatcgatgaaaagatttccaatgaggttttaaagtcctccccatcttatgctatgcgcaggaaaattgaggagattaataacggtctacacaatgtggaaaagatgttacagcagaaaagtaagaacattgaaaaggcccaggagatccagaagaaaatgtgggacgagttggacctctggcattctaagctcaacgaattggacagcgaggtgcaagatatagtggagcaggatccaggacaggcacaggagtggatggataatctaatgatccctttccagcagtaccaacaagtatcccagcgcgcggaatgtcggacgtcacagctgaacaaagctacagtaaaaatggaagaatattccgacctcctgaagagcacagaggcttggatcgagaacacatcccacctcctcgctaaccccgcagactatgatagtcttcgcactctcagccatcatgcctcaacagtgcaggactctaagtgttttcgatccgggccaagaccgaatatttatgtgagttactatgtgaccgtgattcagatggcattggaggattccgagcagaaacataatttgctgcattcgatttttatggatctcgaggacctatctatcatcttcgaaactgacgaacttacccagtccattcaagagctgtctaaccaggtgacggctctccaacagaagatcatggagtccctgccacagatacagcgaatggccgacgacgtcgtggctatcgaatcggaggtaaaaagcatggagaagagagtgtcaaaaatcaaaacaatactcctgagcaaagagatcttcgactttagtccagaagagcacctcaagcacggggaggttatactcgagaacataagacccatgaaaaagacaattgctgaaatcgtgagttatcaagtcgaactgcgtctcccccagacaggtatgaaaccccttcccgttttccagcgcaccaatcaattgttgcaggatataaagctactggagaacgtcacacaggagcagaatgaactgttgaaagttgtgattaagcagaccaatgaatgggatgaggagattgagaacctgaaacagatacttaataattacagcgcacagttctcgttagagcacatgagtcccgaccaggcggacaagctgccacaactgcaaggagaaatcgagagaatggagaagcagatcctgagcctaaaccagcgaaaggaggaccttttggtggacttgaaggcgaccgtacttaacctacatcagcacctcaagcaggagcaggagggtgtagagagggaccgtctacccgctgtcacctctgaagaaggcggtgtggccgaaagagatgcgagcgagcggaaactgaaccgtaggggttctatgtcttatctggctgccgtcgaagaggaggtggaggaatcctccgtaaagagcgataatggcgatgaaaaagccgaaccctctcctcaaagttggtctagtctgtggaagcacgataaagatatggaggaggatcgggcctcctcgtcatctgggacaatcgtccaggaggcttacggcaaaatttctacttctgataacagcatggcccagatcctgactccagactcactgaacacagaacagggaccagagtgttctctgaggccaaatcagactgaagagggaaccacccccccaatcgaagctgatactcttgactccagtgacgcccagggtggcctggagcccagggtcgagaaaactcggcccgagcccactgaagtgctccatgcttgtaagacccaggttgcagagcttgagctgtggcttcagcaggccaacgtcgcagtggagccggagacgctaaacgccgatatgcagcaggtgctggaacagcagctagtgggatgtcaagccatgttgaccgaaatcgagcacaaggtggcctttctgttggagacatgcaaagatcaggggctcggagacaacggcgccacccaacacgaggccgaggctttatcgttgaaacttaaaacagtgaagtgcaatctcgagaaggtgcagatgatgcttcaagagaagcacagcgaagatcagcatcccaccattctgaaaaaatcgagcgaacctgaacatcaggaggcactgcagccagtaaatttgagcgagcttgaaagtatcgtgacagaaaggccacagttttccaggcagaaagactttcaacagcagcaggtgctggaattgaaaccaatggaacaaaaggacttcattaagttcatcgaattcaatgcaaaaaagatgtggccccagtattgtcaacacgacaacgacaccacgcaggagagcagcgcttccaaccaggcgtcatctcctgaaaacgacgttcccgacagcatcctgagccctcagggccagaatggagataagtggcagtacctacaccacgaactttctagtaaaattaaactgccactacctcagctggtcgagccgcaggtgtccaccaatatgggtatcttgcccagcgtgaccatgtataacttccggtaccccactacagaggagttgaagacttatacaacacaactcgaagatcttagacaggaggcatccaatctccagacacaggagaatatgaccgaagaagcctacatcaacttagacaaaaaactgtttgagctgttcctaacactgtctcagtgcctgtcctctgttgaggaaatgctggaaatgccccggttgtaccgagaggacgggtctggtcagcaagtccattatgagacgttagccctcgagctcaaaaagttgtacttagcgttgagcgataagaagggtgatcttcttaaagccatgacatggcccggggagaacacgaatctcctccttgagtgttttgataacctccaggtctgtttagagcatactcaggccgctgctgtctgcaggtccaagtctctaaaggctggcctggattacaaccgcagctaccagaacgagattaagcgcttgtatcatcagctgattaagagtaagacctctctgcagcagtcactaaacgaaatctctggacagtctgtagctgaacagcttcagaaggcagatgcatatacggtggagctggaaaatgccgagagtcgggtcgcaaagctgcgggatgagggtgaacgcctacaccttccttatgccttgcttcaggaagtgtacaaactcgaagacgttctggattcaatgtgggggatgctaagagccagatatacagaattgtcatcaccgtttgtcactgagagtcagcaggatgctttactgcagggaatggtggagttggtgaagatcggcaaggaaaagttagcccacggccacctcaagcagacgaagtccaaggtggccttgcaagcgcagatcgagaatcacaaggtcttcttccagaaattggtagccgacatgctgcttattcaggcctactccgctaagatcctgccatcattgctgcaaaatagagaaaccttctgggccgagcaggtcacagaggtaaaaatcctggaggagaagagcagacagtgcggcatgaagctgcagagcttgctgcagaaatgggaagaattcgatgagaactacgcaagcttagagaaagatctagagatcctcatctcgaccctgccaagcgtctctttagtcgaggaaaccgaggaacggcttgtagagagaatctctttttaccagcagattaagcgaaacattggtggcaagcacgcccgcctgtaccagaccctgaatgaggggaagcagctcgttgcatcggtgtcctgtccagaactggagggccaaatcgcgaagctcgaggagcagtggctcagtttaaataagaagatcgatcacgaactgcaccggctccaggccctgctgaagcatctgctgtcttacaatcgcgattctgaccagctaaccaaatggctagaatcttcccagcatacactgaattactggaaggagcagtcactgaacgtcagccaggatttggatacaatccggtcaaacattaacaatttctttgaattcagcaaggaagtcgacgagaagtcctccctgaagaccgccgttatcagcatcggcaatcagttattacatctcaaggagactgacacagcaaccctgagagccagcctggcccagtttgaacagaaatggactatgctcattacccagttaccagacatccaggaaaagctgcatcagctccagatggaaaaacttccctcacgcaaggcaattacggagatgatctcatggatgaataatgtggagcaccagacatcagacgaagattctgtgcattcgccttctagtgcatctcaggtgaagcacctgctccagaaacataaggaattccgtatggaaatggactacaaacagtggatcgtcgacttcgtcaaccagagccttctgcaactgtcaacctgtgacgtagagtctaagaggtatgagcggactgagtttgcagagcatctgggcgaaatgaacaggcaatggcacagagttcatggcatgctgaataggaagatccagcatttggagcagcttttagaatcgattacagaaagcgaaaacaagatccagatcctgaacaattggctggaggcacaagaggaaagactcaaaacgctgcagaaacccgagagcgtcattagcgtacaaaaactacttcttgattgccaggatatcgagaaccagctggccataaaatctaaagcactcgacgagttaaaacagtcctatttgaccttggagtccggcgcggttcctctgttagaggacactgccagtcgcatagacgaactgttccaaaaaaggtcttcagtgctgacccaagtgaatcaattaaagacttctatgcagtccgttttgcaggagtggaaaatatacgatcaactgtacgatgaggtcaatatgatgacaattagattttggtattgtatggagcatagcaagccagttgtgttgtccctcgagacactcagatgtcaggtggagaacctgcagtcactgcaggacgaggctgagagtagcgaaggttcttgggaaaagttgcaagaagtgatcggcaagttgaaaggactgtgtccatccgttgcagagataatcgaggagaaatgccagaacactcacaagagatggacccaggtaaaccaagctatagcggaccaactacaaaaggcccaatctctactgcagctgtggaaggcatattctaatgctcacggcgaggctgccgcaaggctgaagcagcaggaagccaaattccaacagcttgccaatatcagtatgagcggcaacaatctcgccgagatcctgccgcctgcactccaagacatcaaagagctgcaacacgacgtgcagaagaccaaagaggcttttttgcagaattcatcggtcttagacaggttacctcagcccgccgaatcctcaacacacatgctcctgccaggccctttacactccctccagagagccgcgtatcttgagaagatgctgctagtaaaggcgaacgaatttgaatttgtgctttcacagttcaaagacttcggggtgcgattagagagtctgaaggggctgataatgcacgaagaagaaaacctggatcgactgcatcagcaggaaaaagaaaatcccgatagctttctaaaccacgtgctggccttgacagcccaatctcctgacattgagcacctcaatgaggtcagccttaaactgcccctgtctgatgtggccgtgaaaacgctgcagaatatgaatcggcagtggatccgcgctacagccacagctctggaacggtgttcagaactgcagggcatcggcctgaatgagaagtttctctattgttgcgagaagtggatccagctcctggagaagatcgaagaggccctgaaggttgacgtggcaaatagtttgcctgagctgcttgaacagcaaaaaacctataagatgctggaggcggaggtgagtattaaccagaccatcgctgacagctacgtgacccagagtttgcaactgttggacacgaccgaaatcgaaaatagacctgagtttataacagagttcagtaaactgactgatcgctggcagaatgccgtccaaggagttcggcaaagaaagggcgatgtagacggccttgtgcggcagtggcaggacttcacaacgagcgtggaaaacctattcaggttcctgactgataccagccatctgcttagcgccgttaaaggacaggaaaggtttagcctgtaccagactagatcattgatccatgagctcaagaataaggagattcattttcagcgtcggcgcaccacttgcgccttgactctcgaggccggtgaaaaactgttgctgactactgacctgaagacaaaagaatctgttggtcggcggatttctcagctgcaagactcatggaaggacatggagccacagctggcagaaatgataaaacagttccagagtaccgtagagacctgggaccaatgcgagaagaaaattaaggagctgaaaagtagattgcaagtgctgaaagcacagagcgaggaccccctacccgaactgcacgaggaccttcacaacgaaaaggaactgatcaaagaactcgaacagtcattagcttcttggacgcagaatctgaaagaactgcagaccatgaaagccgacctgacccgacacgtgttggttgaggatgtgatggtactaaaggagcagattgaacatctgcatcggcagtgggaggacctctgtcttcgcgttgcaatccgaaagcaggagattgaggacagattgaatacctgggtcgtgttcaatgagaagaataaagagctgtgtgcatggctcgtgcagatggagaacaaagtcttgcagaccgctgatatctccatcgaagaaatgatcgaaaaactgcaaaaggattgcatggaggagattaacttattttcagaaaataaactgcagctgaagcagatgggcgaccaactaattaaagcatctaataagagccgtgccgccgagatcgacgataagttaaataagataaatgaccgctggcagcatctcttcgatgtgatcggtagcagagtcaagaaactgaaagaaacatttgcatttattcaacagttggacaaaaacatgtcaaacctccggacctggctggcgcgaatcgagtcagagctctccaagcctgtggtttacgatgtctgtgatgaccaggagattcaaaagaggctcgccgagcaacaggacctccagcgcgacatcgagcagcacagtgctggtgtggaatcggtctttaacatatgcgacgtgctgcttcacgatagcgatgcctgcgctaacgagactgaatgcgactcaatccagcagacaaccagaagtctggatcgcagatggcggaacatatgcgctatgtcgatggaacgcagaatgaaaatagaagagacatggcgactgtggcagaagtttttagatgactattccagatttgaggattggctaaaatcagcggagaggactgccgcttgtccaaactcttctgaagttctgtataccagcgcgaaggaggagctcaaaagattcgaggcatttcagcggcagatccatgaacggctgacccagctggagttgatcaataagcagtatcggagactcgcccgagagaacagaaccgacacagcctcgcgacttaagcagatggtccatgagggcaatcagcgatgggacaaccttcagcggagagtgaccgctgttctgaggaggttacggcactttacaaatcaacgtgaggagttcgagggcactcgggaatctattctcgtctggctcaccgagatggatttacagctgacaaacgtggagcacttttccgaaagtgacgccgacgacaaaatgagacagctgaacgggttccagcaggagattaccctgaacaccaacaaaatagatcagctgatagtctttggagagcaattgattcagaaaagcgaaccattggacgccgtgcttatcgaagacgaactggaggagttgcaccgatactgccaggaggtctttggccgtgtctctaggttccaccgaagactcacgtcttgcacacctggattggaggacgaaaaggaagcctctgaaaacgagaccgatatggaagatcctagggagatccagactgattcttggcgtaagaggggcgagtccgaggagcctagttctccacaatctctgtgccacctggtagctcctggacacgaaaggagtggatgtgaaactcctgtatccgtggactcaatcccgctggagtgggatcataccggcgatgtgggaggcagcagttctcacgaagaggacgaggagggcccttactacagcgcgctgagtgggaaatctatatctgacggccactcttggcacgtgccagactcacccagctgtcccgaacaccactataaacaaatggaaggcgaccgtaacgtaccaccagtccctcccgcttcctccacaccttacaaacctccatacggtaagctgctgctgccgcccggcacagacggaggtaaggagggacctagagtgcttaacggaaatcctcagcaggaggacggcgggttggccgggatcactgaacagcaatctggcgctttcgatcggtgggagatgattcaggctcaggagttgcacaataaacttaaaattaagcaaaaccttcagcaactgaactccgatatatccgccatcaccacatggctcaagaaaactgaggccgagctggagatgcttaagatggccaagcctccatcagacatccaggagattgaactgcgggtgaaacgcctgcaggagatcttgaaggctttcgacacctacaaagccctggttgtgtctgttaatgtctctagcaaagaatttctgcagaccgagtctcccgagtctaccgagttacagtctagattgagacagctctcgctactctgggaggctgctcagggagctgtcgacagctggagagggggtctacggcagtctttgatgcagtgccaggactttcatcagctcagccagaatctcttactgtggttggcttcagccaagaacagacgccagaaggcacatgtcactgacccaaaagctgatccccgggcactgcttgaatgccgccgagagctgatgcagctggagaaagagttagtggaacgccagccgcaggtcgacatgctccaggagatttctaactcactgttaatcaagggccatggggaagactgcatcgaggctgaagagaaggtgcacgtgattgaaaaaaaactgaaacaactgagggagcaggtttcacaggatctaatggcattgcagggaacacaaaacccagcaagccctctgccttctttcgacgaggttgactccggagaccaaccccccgccacatcagttcctgcaccacgggcaaagcaatttagagccgtgcggacgaccgaaggagaagaagaaacagaatccagagtcccgggttcaacaagaccacaacgcagtttcctgtcacgcgtggtgcgggcagcactacctttgcagctcctgctgctcctgttgctgctgctggcctgcctgctgccgagctctgaggaggattactcatgtacccaggcaaataacttcgcacggtccttttaccccatgttgaggtacacaaacggacccccgcccacatag

SEQ ID NO: 135884 - DNA, 1290 bp, synthetic construct
  misc_feature 1..1290: note = Description of Artificial Sequence: Synthetic coding sequence
  source 1..1290: mol_type = other DNA
atggaaggcgacaggaacgttcctccggtgccccccgcctctagcactccctataagcctccttatgggaagctgctgctaccaccgggaacagatggcggcaaggaaggccctcgagtgttgaatggtaatccacagcaggaggatggtgggcttgcaggaatcacagagcagcaaagcggagctttcgaccgctgggaaatgattcaggcccaggagttgcataataaactcaagatcaaacagaacctgcagcagcttaattccgatatctcagccatcactacatggctgaaaaaaaccgaggcagaattggagatgctaaagatggccaagcctccttccgatattcaagaaattgagctgagagtcaaacggttgcaggagatcctaaaagcctttgatacttacaaagccctggtggttagtgtgaatgtgtccagcaaggagttccttcagacagaaagcccagagtctacagagttacaatcccggctaagacaattgtcactgttatgggaagccgcccagggcgcggtggactcttggcgcggaggtctccgacagtccctcatgcaatgccagggctccaagactagacccaggtccgatgtcctcttttttaaagatttccaccagttgagtcagaatttgctgttatggctggcaagtgccaaaaacaggaggcagaaagctcacgttacagaccccaaagcggaccctcgcgctctgctcgagtgcaggcgggaactgatgcagctggagaaggaactggttgagcgacagccccaggtggacatgctgcaggaaatatctaactcactcttaatcaaggggcatggcgaggactgtatcgaagctgaggaaaaagtgcacgtcattgagaaaaaactgaaacagctgcgagaacaggtgtcacaagacctgatggcattacaaggaacacagaacccagccagccccctaccatcctttgacgaagtggatagtggcgatcaaccccccgctacaagcgtacctgcgccacgcgccaaattcagagctgtacgcacgactgagggagaggaagaaacagagagccgggtgccaggaagcaccagacctcagaggtccttcctctcccgtgttgtacgagcagccctgcccttgcagctcctcttgcttctgctacttctattggcctgcctgctgccatctagtgaggaggactattcctgtacgcaggctaataatttcgcccgctccttttaccccatgctccgctacaccaatggtccaccccctacctag

SEQ ID NO: 135885 - DNA, 1671 bp, synthetic construct
  misc_feature 1..1671: note = Description of Artificial Sequence: Synthetic coding sequence
  source 1..1671: mol_type = other DNA
atggaggatccccgggagattcagaccgattcctggaggaagcgaggcgaaagcgaagagccttctagtccccagagtctttgccacctagtggcccccggccacgagaggtctggatgtgagactcctgtgtccgtggacagcatcccattggaatgggaccacacaggcgacgtcggcggatcctcctcacacgaagaagatgaggaaggaccatactactctgccctctccgatgtcgagattcctgagaatcctgaagcctacctcaagatgaccactaaaacattaaaagctagtagtggtaaatctatcagcgacggacattcgtggcacgtgccagactcccccagctgccctgagcaccattacaagcaaatggagggagatagaaacgtgcctcctgtaccccccgcatctagcactccttacaaaccgccgtacggaaagctgcttctcccacccggtactgacggcggtaaagaaggccctagggtcctgaatggcaatccacagcaggaagacggcggtcttgcagggataactgagcagcagagcggagccttcgatagatgggagatgatccaggcccaagaactccacaacaagttaaaaataaaacaaaatctccagcagttaaattctgatatctctgcaatcaccacctggctcaagaaaaccgaggctgaactggaaatgctgaaaatggccaagccaccatccgacattcaagagatagaactcagagttaagcgcctacaggagatactgaaggccttcgatacctataaagcccttgtcgtctctgtgaatgtgagcagcaaggagttcctgcagacagagtcccctgagtccaccgaactgcagtcaagattaagacagctgtccctgctgtgggaggccgcgcaaggtgcagtggacagctggcgcggtgggcttaggcagtctttgatgcaatgccagggaagtaagactagaccccgttccgatgttctgtttttcaaggactttcaccagctttcacagaatctgctgctgtggttagcaagtgccaagaaccgcagacagaaggcccacgtgacggaccccaaagctgacccgcgcgccttgcttgagtgccgtcgcgagctcatgcagcttgagaaagaactagtggaaagacagcctcaggttgacatgctgcaagagatatcaaatagtcttctgatcaaaggacatggggaagattgtatagaagctgaagagaaggtgcacgtcatcgagaaaaaattgaagcagcttcgtgaacaggtgtcccaagacctcatggcactacagggcacccagaatcctgcttcgcccctgccatcttttgacgaggtcgattccggcgatcagccacccgccacttcagtcccggccccccgggccaaacagtttcgggctgtgcggaccaccgaaggagaggaagaaacggaaagtagagtgccaggatctacccggccacagcggtcttttctgagccgggtggtcagggctgccctccctctgcagctgctccttctgttattgcttctgctcgcctgtctcctgccgtccagcgaggaggactactcctgtacacaggctaataactttgcccgctctttctacccaatgctgcggtatactaatggccccccaccgacctag

SEQ ID NO: 135886 - DNA, 2007 bp, synthetic construct
  misc_feature 1..2007: note = Description of Artificial Sequence: Synthetic coding sequence
  source 1..2007: mol_type = other DNA
atggtccatgaaggcaatcagaggtgggataatctacagcgtagggttactgctgttttaagacggctccggcatttcaccaaccaaagggaagagttcgagggcacacgcgaatcaatcctggtgtggctcacagaaatggaccttcagcttacaaatgtagagcacttctccgaatccgacgccgacgacaagatgcgccagttaaatgggttccaacaagagattactctcaacactaacaaaattgatcagcttatcgtgtttggagagcaactgatccagaaatctgagccattagacgcagtcctcatagaggatgaactggaggagctccaccgctactgccaagaggtattcggaagagtgagtagattccatcgcaggctcaccagctgcaccccaggcctcgaggacgagaaggaggcttccgagaacgaaacggacatggaagacccacgcgagatccagactgattcatggaggaaacgaggggagtcagaggaaccttctagcccccagagcctttgtcatctggtggcacccggccatgaaaggtcaggatgtgagactcccgtgtcagtagacagtataccccttgagtgggatcatactggggacgtgggaggtagcagtagtcacgaagaagatgaggaaggcccatactactccgcacttagcggcaagagcatttccgacggacactcgtggcatgtgccggactctccatcatgcccagagcaccactacaaacaaatggagggcgaccgaaacgtccctccggtgccacctgctagctccaccccctacaagccaccgtacgggaaactgcttctgccaccgggcacagacggcggtaaagaagggccacgcgtgcttaacggcaacccccagcaggaggacgggggtctcgccggcattaccgagcaacagagcggcgccttcgacaggtgggaaatgattcaggcgcaggagctgcacaataagcttaagattaagcagaatcttcagcagctgaatagtgacatttcagccattacaacctggctgaagaagactgaggcagaattagaaatgttgaaaatggctaaaccgccgtcagacatccaggagatcgagcttagggttaagcgccttcaggagatcctgaaggcctttgacacatataaggccctagtagtgagcgtaaacgtgtcctccaaagagttcctccagaccgagtctcccgagtccaccgagttgcagagcaggcttaggcaactgagcctactgtgggaggcagctcagggagcagtggattcatggaggggagggctgcgtcagtcgctcatgcaatgccaggattttcatcagctgtcccaaaacctccttctgtggctcgcatccgccaagaaccgcagacagaaggctcatgtaacagaccctaaagccgatccccgcgccctattggagtgtcgacgggagctaatgcagctggaaaaggaattagtcgagcgccagccacaggttgatatgctgcaggaaatatcaaacagcctactgataaaaggccacggcgaggattgcattgaagctgaagagaaagttcacgttatcgagaagaagcttaagcagctccgcgagcaagtatctcaagatctgatggctctgcagggcacccagaatccagccagccccttaccttcattcgatgaagttgacagcggcgaccaaccgcccgcgacgtccgttccagcaccaagggcgaaacagtttcgagctgttagaacaacagaaggcgaggaggagacagagagccgcgtgcctggctctacacggccacagaggagctttctctcccgcgtagtgagagccgccttacccctccagctcctcctgctgctgttgctactcctggcttgtctgcttccatcttctgaggaggactatagctgtacgcaggcaaacaacttcgcaaggtctttctacccgatgctgcgttatactaacgggccccccccaacatag

SEQ ID NO: 135887 - DNA, 10626 bp, synthetic construct
  misc_feature 1..10626: note = Description of Artificial Sequence: Synthetic coding sequence
  source 1..10626: mol_type = other DNA
atggaagaagatatttatactaacctttcaaagatggagacagtgctgggccagtctatgagtagtttgccattgtcataccgggaggcactcgaacgcctcgagcagtctaaagctttagtgagcaacctgatcagcaccaaggaggagctgatgaagctgcgacagattctgaggctgctgcgcctgcgttgtaccgaaaatgatgggatctgtctactgaagatcgtatctgccctctgggagaagtggttgagcctcctagaggccgccaaagaatgggagatgtggtgcgaagagctgaagcaggaatggaaattcgtttccgaggagattgagcgtgaggctatcattctggacaatttgcaggaggagctgcccgagatctctaagacgaaggaggccgccactacagaggagctatcggagctgctggactgcctctgtcaatacggtgagaacgtagaaaagcaacagctgctgctgaccttgctgctgcagcgaatccgctccattcagaacgtgccagaatccagcggagcagtggagacagtcccggcctttcaagaaatcacgagcatgaaggagaggtgcaataaactattgcagaaggtacaaaagaacaaggagcttgtgcagaccgagatccaggaaagacactcctttacaaaagagattatcgccctgaagaatttcttccagcagaccactacatccttccagaacatggcattccaagaccaccccgagaagtctgagcagtttgaggaactccagtctattctgaaaaaaggcaaactaaccttcgaaaatatcatggagaaactccggatcaagtattcagaaatgtacacaatcgtgcctgcagaaattgagtcacaggtcgaagagtgcaggaaagccctggaagacatagatgagaaaatctcaaatgaggtcttaaagagtagcccttcttatgctatgcggagaaaaatcgaggaaataaataacggcttacacaatgtggagaagatgctgcagcagaagtctaaaaacatcgagaaggctcaggaaatccagaagaaaatgtgggatgaattggacctatggcattccaagctgaatgaacttgacagtgaggtgcaggacattgttgagcaggatccagggcaggcccaggaatggatggacaatctaatgattcctttccagcagtaccaacaggtgagccaaagagctgaatgtagaacgtcgcagctgaacaaagccacagtgaagatggaggagtattccgacctgttgaaaagtacggaggcttggattgagaacacatcgcacctgctggccaacccagcggattacgacagcctgcgcactttgagtcaccacgcaagcactgtgcagatggctctggaggactctgagcagaagcacaatctgttgcacagcatctttatggatcttgaagatctctctatcatctttgagaccgacgagttaacacagtccattcaggaactgagcaaccaggtgactgcacttcagcagaagattatggagtctctgccccaaatccagcggatggcggacgacgtggtggctattgaatcagaagtaaagtctatggaaaagcgcgtgagcaaaattaagaccatcctgctgagcaaagaaatatttgatttttccccagaggagcatctgaaacacggggaggtcatcctagagaacatccgccctatgaaaaaaaccatcgcggagattgtgtcctaccaagtggaattacggctgccacagacaggcatgaaacctctaccagtcttccagcggaccaatcagcttctgcaggacatcaaactcctagagaacgttacacaagaacagaatgaactgttgaaggtagtgatcaagcagactaatgaatgggatgaggaaatcgagaatctgaagcagatacttaacaattactctgcccagttcagcctggaacatatgtcgccagaccaggctgataagctgcctcagttgcagggtgaaattgagcggatggagaaacagattctgtccctcaaccagaggaaggaagacctgctggtagacctgaaggccaccgtgctcaatctgcatcagcacctaaagcaggagcaggagggagtcgagagggataggctgcccgcagtgacttccgaggaggggggagtggccgagcgggacgcctctgaacgcaaactgaaccgccgaggaagcatgagctacttagcagcagttgaagaggaggtggaggagtcctcagtgaagtccgacaatggagacgaaaaggcggagccaagcccacagtcttggtcgtctttatggaagcacgacaaggatatggaggaagacagagcctcttcatcctctggaaccatcgtccaggaagcgtatggtaaaatatctacctccgacaacagcatggcacaaatcttgactccagactcactaaatacagagcagggacccgagtgcagtctcagacctaatcagacagaggagggcaccactcctcctatcgaagccgacacactggattcgtctgacgcgcagggagggctcgagccccgagtggagaagacccgaccagagcccaccgaggtcctgcacgcttgtaagacccaagtcgcggaactcgagctgtggttacaacaggccaacgtggctgtggagcccgaaaccctcaatgctgacatgcagcaggtgctcgaacagcagctcgtgggctgccaggccatgctgacggaaatcgaacacaaggtggcattcctcctggagacgtgtaaggaccagggactcggcgacaatggcgccacccagcatgaagccgaggctctctccctgaaactgaagacggtcaagtgtaatctcgaaaaggtgcagatgatgctccaagagaagcatagtgaagaccaacaccctaccattttaaagaagtcaagtgagcctgagcaccaagaagcattgcaaccagtgaatctatctgaactggaatccatagttaccgaaaggccccagtttagcagacaaaaagacttccaacagcagcaagtccttgaacttaaacccatggagcagaaggatttcattaagttcatcgagtttaacgctaagaaaatgtggcctcaatactgtcaacacgacaatgacaccacccaggagtccagcgcctccaaccaggcctcttcccccgaaaacgatgtgcctgactccatcttgagtcctcaagggcaaaacggggacaaatggcagtatctgcaccatgagttgtctagcaaaattaagcttcctctgccccagttggttgagcctcaggtttcgacgaatatggggatcctcccatcagttaccatgtacaacttccgatacccaactacagaggaactgaagacatacactacgcagctcgaggacctgcgacaggaagcatccaaccttcagacccaggagaacatgacagaggaagcatacatcaatctggacaagaagctctttgagcttttcctgaccctgagccagtgtctcagtagcgtcgaagaaatgctggaaatgccgaggctgtaccgtgaggacggaagcgggcaacaagttcactatgaaacattggcacttgagttgaaaaagctctatttggcccttagcgacaagaagggggatctcttgaaagctatgacctggcccggggaaaacaccaatcttttgctcgagtgtttcgataatctgcaggtgtgcttggaacacactcaggccgccgctgtctgccgttccaagagcctaaaagccgggctggactacaatcgatcctatcagaacgaaattaagagactgtaccaccagctcatcaagagtaagacctcgctgcagcaaagcttaaacgagatctccggacagagtgtggcggagcaacttcaaaaagctgatgcgtacacagttgaactcgagaatgcagagagccgtgtggcaaagctccgcgacgagggggaaaggttgcacttgccatatgccctcttacaggaggtctacaaactggaagacgtgctcgactctatgtggggaatgctccgagcacgctataccgaacttagctctccttttgtgacagagtcccaacaggacgctctcctgcagggcatggtcgaactggttaagatcggcaaagaaaagcttgcccacgggcacctgaagcaaacgaagtcaaaggtagccctccaggcacagattgagaaccataaagtattctttcagaaattggtcgccgacatgcttcttatacaggcgtattccgcaaagattttgccatcactgctccagaaccgcgagaccttctgggccgagcaagtgacggaggttaaaatccttgaggagaagtctcggcagtgtggaatgaaactccagtctttgctgcagaagtgggaagaattcgacgaaaactacgccagtctggaaaaagacctggaaattctgatctcaaccctgccctctgtgtctcttgtggaggagaccgaagagaggctggtggagcgcatttcattctatcagcagatcaaacgcaatatcggaggaaaacatgcacgcttgtatcagaccctgaacgaagggaaacaactggtagcctctgtaagctgcccagaacttgaaggccaaattgcaaaactggaggagcagtggcttagccttaataaaaaaattgaccacgagttgcataggttacaagccctactgaaacaccttctcagctacaatagagactctgatcaattgaccaagtggctggaatcttcccagcacaccctcaactattggaaagaacagagcctgaacgtatctcaggacctggatactatcagatcaaatatcaacaatttctttgagtttagcaaagaggtggacgaaaagtcaagccttaaaaccgccgtgatatccatcgggaaccagctgctccacctgaaagagaccgacaccgccaccttaagagcatctttggcacaatttgagcagaagtggaccatgctgatcacacagctgcccgatatccaggaaaaactgcaccagctgcaaatggaaaagctccccagccggaaggcgattaccgagatgatttcttggatgaacaatgtcgaacaccagacttctgacgaggactctgtccactctccttccagcgccagccaggtaaagcatcttcttcaaaagcacaaggagtttcggatggagatggactacaaacaatggatagtagacttcgttaatcagtctctgctccagttatcaacgtgtgatgtcgagtctaagagatatgagaggaccgagttcgccgagcatctcggggagatgaacaggcaatggcatagggtccacggcatgctcaacagaaagatccagcacctggagcagcttctggagtcaattaccgagtccgaaaacaagattcagattctgaacaattggctcgaggcccaagaggagagactgaaaacactgcagaagccggaaagtgtgataagcgtgcaaaaattgctcctggactgccaggatatagagaaccagttagccatcaagtccaaggcgttggatgagctgaaacagagttatctgaccctggagagcggggcagtccctcttcttgaggacactgcctccagaatcgatgagcttttccaaaagcgctccagtgttctcactcaggtgaaccagttaaaaacctccatgcagtcagtcttgcaggagtggaagatctatgatcagctctacgatgaggtaaatatgatgacaattagattttggtattgcatggagcacagcaagccagtggtactgagtttagagactctgcgctgccaggtggagaacttgcagtccctccaggatgaagccgagagttcagaaggtagctgggagaagctccaggaagttatcggaaaactaaaagggctttgcccatctgtggccgaaataattgaggaaaaatgccaaaacacccataagcggtggactcaggtgaaccaagctatcgccgaccagctccagaaggcacagagcttactgcaactgtggaaagcctacagcaacgcacacggcgaggccgctgctagattgaaacaacaggaggcaaaatttcagcagttggcgaatatttcaatgagtgggaacaatctcgctgagatccttcctcctgccttgcaagatatcaaagaattgcaacacgatgtacagaaaacaaaagaggctttcctgcagaattccagcgtactcgaccgtctgccccagccagccgagagttcgacccatatgctgctgccaggcccactgcacagtctccaacgggcagcctatctggaaaagatgcttctggttaaagcaaatgaattcgaattcgtgctgagccagttcaaggacttcggagtcagacttgaatccctaaaaggactgattatgcacgaagaagagaatctcgacagacttcaccagcaagagaaggagaacccggactcatttcttaaccacgtgttagcgctaaccgctcagtctccagatatcgagcatctcaacgaggtgtctcttaaacttcctttatcggacgtggcagtgaagacgctgcagaacatgaataggcagtggattagagccaccgcgaccgccctggagaggtgtagcgaactccagggtataggcctgaacgaaaaattcctgtattgctgtgagaagtggatccaactgctagagaagatagaggaagctctgaaagtggatgtagctaattcactgcccgagttattagaacagcagaagacctataagatgctggaggctgaagtgagcatcaatcagacaatcgccgacagctatgtgactcagtcgctgcagctgctggacaccacagagatagaaaatcgacccgaattcatcaccgagttctctaagttgactgaccggtggcagaatgcggttcaaggggtgaggcagaggaagggagatgtggatggcttggtgagacaatggcaagacttcacgacgtctgtcgagaatctcttccgcttccttaccgacacctctcatctgcttagcgcagtgaagggtcaagagaggtttagcctgtatcagacccgatcactcatccacgaattaaaaaacaaagagatccatttccagagacgaagaactacatgtgccctgacccttgaagccggagagaagttacttttgactacagacttgaagacaaaggaaagcgtaggacggagaatttcccagctccaggatagctggaaagacatggagcctcagctagcagaaatgatcaagcagttccagagtaccgtggaaacttgggatcagtgtgagaagaaaattaaagaacttaaatcacgcctgcaagtgcttaaagcccagtccgaggatcccctgccagaacttcacgaggacctacataacgaaaaggaactgattaaggaactggaacagtccctggccagctggacacagaatttaaaggaacttcagaccatgaaggccgatctgactcgccacgtcttagtcgaggacgtcatggtactgaaagagcaaatagaacatctgcatagacaatgggaggacctgtgtctacgagtggccatacggaagcaagaaattgaagaccggctgaacacttgggtggttttcaatgagaagaataaggaactgtgcgcttggctggtgcagatggagaataaggtccttcagacagcagacatatctatcgaggagatgattgagaaactccagaaggactgtatggaggaaatcaatttattctctgaaaataagctgcagcttaaacagatgggggaccaactcattaaggcttcgaataagtccagggcggcggagatcgatgataaactgaataagatcaatgaccgttggcagcacttgtttgacgtgatcgggtcaagagttaaaaaactcaaagagactttcgcattcatccagcagctggacaagaacatgtcgaacttgagaacctggctcgcacggatcgagagtgagctgtcaaagccagtggtgtacgacgtctgcgacgatcaggaaattcagaagagactggcggagcaacaggatttacaaagagatattgaacagcactccgccggagtagagagcgtgtttaacatctgtgatgtccttctgcacgatagtgatgcttgtgcaaacgaaaccgaatgtgactccatccaacagactacaagaagcctcgaccgacggtggaggaatatatgtgctatgtctatggagcgccgaatgaagatcgaagagacctggcgcctctggcaaaagttcctggacgattactctcggttcgaagattggttaaagtctgccgagcgaaccgctgcttgcccaaactcaagtgaagttctgtacacctccgccaaggaggaattgaagagattcgaggcttttcagcgccaaatccacgaacgactgactcagttggagctgataaacaagcagtacagacgcttagcacgggaaaatcgcactgatactgcgagtcgcctgaaacaaatggttcatgagggcaatcaacgctgggacaacctccaaagaagggtgaccgctgtacttcgtcgcttgaggcactttaccaaccagcgggaagagtttgaaggaactcgagagtcaatcctagtgtggcttaccgaaatggacctgcagttgactaacgtggagcacttcagtgagtccgacgccgatgacaaaatgagacagctcaatggtttccagcaggaaataaccttgaacactaataagattgatcagctgattgttttcggcgagcagcttatccaaaagtccgagccgttggatgccgttcttatcgaagacgaacttgaagagctccacaggtactgtcaagaggttttcggacgcgtctcccgttttcacagacggctaaccagttgtacaccaggcctggaagacgagaaagaggcctctgaaaatgagaccgacatggaggacccgagagagattcagactgacagctggaggaagagaggggagagcgaagagccttcaagtcctcaatcactgtgtcacttagtcgctccaggacacgagaggtccggttgtgagaccccagtgagcgttgattcaattcctctcgaatgggatcacaccggcgatgtagggggcagcagctctcacgaagaggatgaagagggaccatattactcagccttgtccgacgtcgaaataccggagaaccccgaggcctacctgaagatgactacaaagaccctgaaggcttcatccgggaagagcattagcgatggccactcatggcatgtccctgatagtccgtcctgccctgagcaccactacaaacagatggaaggagaccgcaatgtacccccggtcccgccagcatcgtcaacaccttacaagccgccatatggaaaattgcttttacccccaggtacggacggagggaaagagggccctcgggttttaaatggcaaccctcagcaggaagacggtggccttgccggcattaccgaacagcaaagtggggcattcgacagatgggagatgatccaggcgcaggagctacataacaagttgaaaattaaacagaatctgcagcagctaaactccgacatctccgcaatcacaacttggctaaaaaagaccgaagcggagctcgaaatgcttaaaatggcgaaacccccgtccgacatccaggagatcgagctgcgggttaaacgcctccaggaaatactcaaggcatttgatacctacaaggcattagtggtctccgttaatgtgtcctccaaagaatttctacagacggagagcccagaaagcacagagcttcagtcccggttgcgccaacttagtcttctgtgggaagctgcccaaggtgccgtcgatagttggagaggtgggcttagacagtccttgatgcagtgtcaggacttccatcaactgtcgcagaatttgttattatggctggcatcggcgaaaaataggcgccaaaaggcgcatgtaaccgatccaaaagctgatcctagagcactgctggagtgtaggcgcgaactgatgcagctcgagaaggagctcgtcgagcggcagccgcaagtagacatgctacaggagatctctaatagtctgctgatcaagggccacggcgaggactgcatcgaggccgaggagaaggtgcacgtcattgagaagaagctgaagcagttgagggagcaggtatcacaagatttaatggccctgcaggggactcagaaccccgccagtcctctgccctcctttgatgaagtcgatagcggcgatcagcctccagccacaagtgtacctgcccccagggctaagtttcgcgccgtcaggacaactgagggagaagaagaaacagagtcccgcgtcccagggagcacaaggccacagcgtagcttcctgagtagagttgtgcgagccgcactccccttgcagctcctcctattgctcctcctcctgctagcctgcctcttgcctagttcggaagaggattacagctgcacacaagccaacaactttgcccgctcattttatccaatgctgcgctataccaatggacccccaccaacgtag

SEQ ID NO: 135888 - DNA, 2292 bp, synthetic construct
  misc_feature 1..2292: note = Description of Artificial Sequence: Synthetic coding sequence
  source 1..2292: mol_type = other DNA
atgtccatggagagaaggatgaaaatcgaggagacttggcggctgtggcagaagttcctggatgactatagtaggtttgaagattggcttaagtctgccgagcgaaccgccgcatgccctaattcatcggaggtgttatacaccagcgcgaaggaggaactgaaacgcttcgaagccttccaaaggcagatccatgaacggttgacacagttagagcttattaataaacaatatcgtcggcttgcaagggaaaaccggacagacaccgccagtcgtctgaagcagatggtccatgaaggaaaccagagatgggataacttacagcgcagggtcactgctgtcctccgacgactgcgacattttactaaccaaagggaagaatttgaggggacaagggagtctattcttgtgtggctgacagagatggatcttcagttaacaaatgtcgaacacttttccgagtccgacgcggacgataagatgaggcagctaaacggatttcagcaggagatcaccctgaataccaataagatcgatcagctgatcgtgtttggcgagcagctcattcagaagagtgagcctctggacgcggtactgatagaggatgaactcgaagaattgcaccggtactgccaggaggtctttggacgagtttctcgattccatcgcaggctgacatcttgcactccaggtctggaggatgagaaggaagctagtgagaatgaaacagatatggaggaccctcgggaaatccagaccgactcgtggcggaaaaggggagagagcgaagagccttcctccccgcagtccctgtgccacctggttgcgccgggccatgaaaggagtgggtgcgaaactccagtcagtgtagatagcatccccctggaatgggaccacaccggcgatgtcgggggcagttctagccatgaagaggacgaggagggcccctactattccgccttgagtggcaagagtatatcagatgggcatagctggcacgtgccggactccccatcttgccccgagcaccactacaagcagatggagggggatcgcaatgtgccgccggttccccctgcgtctagcacaccctataaacctccttatgggaagctcctgctcccgcccggtactgacggaggaaaggagggtccaagggtgcttaatgggaatcctcagcaggaagacggaggtctggcgggcattacggagcagcagtccggcgcgtttgaccggtgggaaatgattcaggcacaagagctccataacaagctaaaaattaaacagaatttgcaacagttgaacagcgatatctccgctattaccacatggctgaaaaaaaccgaggcagagcttgagatgctgaagatggctaagccccccagcgatattcaggagatcgagctgagggtgaaacgtctgcaagagattttgaaggctttcgacacctacaaagcgctagttgttagcgtgaacgtgtcttcaaaggaattcctgcagactgaatcaccagaatcaacagaattacaatcaagattgcgacagctgtctctgttatgggaagccgcccagggggccgtggattcttggaggggcgggctgcggcagtctctgatgcagtgccaggactttcaccagctgagtcagaacttgctgctttggctggcatctgccaaaaacaggaggcagaaagcacacgtgaccgatcctaaagcagatccgagagccttgctggaatgcagacgtgagttgatgcagttagaaaaagagctggtggaacgtcagccgcaggtggatatgctgcaggaaatcagcaattccctcctgattaaggggcatggtgaagattgcatcgaagccgaggaaaaagttcatgtgatcgagaaaaaattgaaacagttaagggagcaggtgagtcaggacctcatggccctccagggaactcaaaacccggcaagcccactcccatccttcgatgaagttgattcgggtgatcaaccccctgcaacttccgtgcctgctccaagggcaaagcaattcagggctgtccggactacagagggagaagaagagacggagagcagagtccctggctccacccggccccagaggtcctttctaagcagagttgtaagagctgccctccccctccagttgctgttgctgctgctccttctgctggcgtgcttgctgcccagctccgaggaggattatagttgcacccaggctaataattttgcccggagcttttaccccatgctgaggtatactaacgggcctccgccaacatag

SEQ ID NO: 135889 - DNA, 7251 bp, synthetic construct
  misc_feature 1..7251: note = Description of Artificial Sequence: Synthetic coding sequence
  source 1..7251: mol_type = other DNA
atggaacagttccccaaggaaactgtggtggaaagttcaggacctaaagttctcgagacagccgaggagatacaggaacgcaggcaggaggtattgaccagatatcagtcatttaaggaacgggtcgctgaaagggggcagaagctcgaggattcgtaccatctccaagttttcaaacgagatgcagatgatcttggtaaatggattatggagaaggtcaacatcctgaccgacaaaagttatgaggatcccacaaatatacagggcaagtatcagaaacaccagagcctagaagctgaggtccaaacaaagagtcgcctgatgagtgaactggagaagacgcgggaagaaagattcacaatgggtcacagtgcacacgaggagaccaaagcccacatagaggagttaaggcatttgtgggatctgctcttagaacttaccctggagaaaggagatcagcttttgcgggccttgaagtttcaacagtatgtgcaagagtgtgcagacatcttggagtggatcggagacaaagaagccatagctactagtgtggaactgggtgaagattgggagaggacagaggttctgcacaagaagtttgaggattttcaggtagagctcgtcgcaaaggagggccgggtggtggaagtgaatcagtacgccaacgaatgcgccgaggagaaccatccggatctgcccctgatccagtctaaacaaaacgaggtcaacgcagcatgggaacgccttaggggccttgccctccaacggcagaaagccctcagcaacgccgcaaatctgcaaagattcaagcgagacgtaactgaagcaattcagtggattaaagaaaaagagccagttttgaccagtgaggactatggcaaggacctagttgcatccgaaggcctcttccattctcataaaggtctggagcgaaacttagccgtgatgtctgataaagtgaaggagctctgcgccaaggcagagaaactgacgttgagccatccctctgatgcacctcagattcaagagatgaaagaagacctggtgtctagctgggaacatatccgtgccttggccacctctagatatgaaaagctccaagccacatattggtaccatagattctcatccgacttcgatgaactgtctggatggatgaatgagaaaacagcagccatcaacgcagatgaactccccacggacgtcgccggtggcgaagtgctccttgacagacaccagcaacataaacatgaaattgattcttacgacgacaggttccagagcgcagacgagacgggacaggacttggtcaacgccaatcatgaagccagtgatgaggtccgagagaagatggagattttggataacaactggacagccctcctcgaactttgggacgagcgccaccgccagtatgagcagtgtttagatttccatcttttttatcgggatagtgaacaggtggactcttggatgtcacggcaggaggcttttctggaaaacgaagatctggggaattctctcggctctgccgaagcgctgctacaaaagcacgaagacttcgaagaggcatttaccgctcaagaagagaaaattattactgtggacaaaaccgccacgaagctgatcggagacgatcattacgactcagaaaacataaaggccatccgagatggtctgttggcacgccgcgatgccctgagggaaaaggccgctacgcgacggcgattactcaaggagagcctcctgctgcagaagctgtacgaggatagtgacgatttgaagaactggatcaataaaaagaaaaagttggcagacgacgaggattacaaagatatccagaacctaaagtcaagggtccagaagcagcaggtgttcgagaaggaattagccgtgaataaaacgcagttggaaaacattcagaagactggccaggagatgatcgaaggcggacactatgcttcagataatgtgacgacgaggctcagtgaagtggcgagcctttgggaggagctacttgaggccaccaagcagaagggcacgcagctccatgaagccaatcaacagttacagttcgagaacaatgctgaagacctgcagaggtggctggaggacgtggaatggcaggtgactagtgaggactatggaaaaggactggccgaagtgcaaaatcggctgcggaaacacggccttctggagagcgctgtcgcagcacggcaggatcaagtcgatatcttgacagacttagctgcttacttcgaggagattggccatccagactcaaaggatattcgggcaagacaggagagcctcgtctgtcgcttcgaagctctgaaggaacccctcgccacccgcaaaaagaaattactcgatcttcttcatttgcagctcatttgccgtgacacagaagacgaggaagcatggattcaagaaacagagccctctgccacatcaacctatctggggaaggacctgatcgcttcgaagaagctgttgaataggcatcgtgtgatattggagaatattgcaagtcatgagcctagaatccaggaaattacggagaggggcaacaagatggtagaggagggacactttgctgcagaggatgtggccagtcgcgtaaagagtctgaaccagaacatggagagcctgcgcgcgagggccgcccgcaggcaaaacgatctcgaggctaatgtacaattccagcagtacttggccgacctgcatgaggccgagacttggatcagggagaaagagccaatcgttgacaacaccaattacggggccgacgaggaagcagccggggcccttcttaagaagcacgaggcttttctgcttgacctcaacagctttggcgacagcatgaaagccctgagaaaccaggccaacgcttgtcagcagcaacaggccgcccccgttgaaggcgtagccggcgagcagagggtgatggcactctacgacttccaagcgagatcgccccgggaagtgacaatgaagaagggagatgttttgaccctgcttagctctatcaataaagattggtggaaggtggaagccgctgaccaccagggtatcgtgccggctgtgtacgtccgccgcctcgcccatgatgagtttcccatgttgccacagaggcgtagagaggagccaggcaacattacccaaaggcaggagcagatcgaaaaccagtaccgatcacttctagacagagcggaagaacgtcgacggcgcctactgcagcggtacaacgagtttcttttggcctacgaggcaggggacatgctggagtggatccaggaaaaaaaagccgagaatacaggcgtcgaattagatgacgtgtgggaattgcaaaagaagtttgatgagttccaaaaggatcttaataccaacgagccccgactgagagacattaacaaggtggcagatgacttgttatttgaaggtctgttaacccctgagggtgcccagattaggcaggaacttaacagtaggtggggatctctgcagagattggcagacgaacaacgacagcttctgggctcagcccatgccgtggaagtgttccaccgagaagccgatgatactaaggaacaaattgaaaaaaaatgtcaggcactttctgctgcggatccgggttccgatctgttcagtgtgcaggcgttgcaacgacgccatgagggatttgaacgggatttggtacctcttggcgacaaggtgacaatcttgggggagactgccgagcggttatcagagtctcaccctgacgcgactgaggatcttcagcgccagaagatggaacttaacgaggcttgggaggatttacagggtcgcaccaaggatcggaaagagtccctgaatgaggctcagaagttctacctgttcctgtccaaggcgcgcgatttgcagaattggatctcctctatcggcggaatggtcagttctcaggaactggcagaggatctgacaggtatcgaaattctcctcgaacgtcaccaggagcatcgtgctgacatggaagcggaggcacctacattccaggcactcgaagatttctcggccgagctaatcgactcagggcatcacgccagcccggagatagagaaaaagttacaagccgttaagctggagcgagacgacctcgagaaagcttgggagaagcgcaagaaaattttggaccaatgcttggagctgcagatgtttcaaggcaactgtgaccaagtggaatcttggatggttgctagagaaaattctcttcgtagtgacgacaaatctagtctcgattccctggaggcgcttatgaaaaaacgcgacgacctggacaaagcgataaccgctcaggagggcaaaataaccgatttagagcactttgctgagtctctgatcgcggacgagcactacgccaaggaggagattgccacccgtctgcagcgggtgttggaccgctggaaggctctgaaggcccaactaatagatgagcgcactaaactgggagactatgctaatctcaagcagttttaccgcgatcttgaggaactggaagaatggatatccgaaatgctccctacagcttgcgatgagtcatacaaggatgccaccaacattcagcgcaagtacctgaagcaccagacattcgcacacgaggtcgacgggaggtccgagcaggtgcacggcgtaatcaacttaggaaactcactgatcgaatgtagcgcatgcgacggcaacgaggaagcaatgaaagagcagctcgaacagctaaaggaacactgggaccatctcctggagagaactaatgataaaggcaagaagctgaacgaagcatcacggcagcaaaggttcaatacctctattcgagacttcgaattttggttgagcgaagccgagaccttgttagccatgaaggaccaggctcgcgacctggccagcgctggcaacctcttaaaaaagcaccagctgttggaaagagaaatgctggcaagagaggacgctcttaaggacttgaacacgctagccgaggatctactgtcgtccggaacatttaatgtcgaccaaatcgtgaaaaagaaagacaatgtgaataagcgcttcctaaatgttcaggagctcgcggctgcacaccacgaaaaactgaaagaagcatacgcgttatttcaattctttcaggacttggacgatgaggagtcctggatcgaagaaaaactaatacgggtttcttctcaggactatgggagggatttgcaaggtgtgcagaaccttcttaagaagcataaaaggctcgaaggggagctggtcgcacacgaaccagccatccagaacgtacttgacatggctgagaagttaaaggataaggccgcagtcggacaggaagaaattcagttacgtctggcccagttcgtagagcactgggaaaagctaaaggaactggcgaaagcgcgtggcctcaagcttgaggaatccttggaatatctccagttcatgcagaacgctgaggaggaagaagcttggattaacgaaaaaaacgctttggcagtccgaggcgactgcggggacactttagcagccactcagagtctcctcatgaaacacgaggccctggagaatgatttcgcggtacatgaaacgcgagttcagaacgtctgtgcccagggcgaggacattctcaacaaggaagagagtcagaacaaggaaatcagttctaagatcgaggctctaaatgagaaaaccccttccctggccaaggccattgccgcgtggaagctgcagctagaagatgactacgccttccaggagttcaactggaaggccgacgtcgttgaagcttggattgctgataaggaaaccagtctgaaaactaacggcaatggggcagatctcggtgattttctgacgttgttggccaagcaggacacgctggatgcatcgcttcaatctttccagcaagaaagactgcccgaaatcacagacctcaaggataagctcatctcggcccagcacaatcaaagcaaggcaatcgaggagcggtacgctgcacttctgaaacgttgggaacaactgttagaagcaagcgccgtccatcggcagaaactactcgaaaaacagctgccactccaaaaggcagaggatttgtttgtggagtttgcccacaaggccagtgcactgaacaactggtgcgagaagatggaagagaacctctctgagccagtccattgtgtgtcactgaacgagattaggcagctgcagaaagatcatgaggatttcctggcaagcctggccagagcacaagctgacttcaagtgtttattagagctggaccagcagatcaaagcacttggcgttccttcctctccctacacctggttaactgtggaagtcctggagagaacctggaaacacctcagtgacatcattgaggagagagaacaggagttgcagaaggaagaagccaggcaggtgaagaacttcgaaatgtgccaggaattcgagcagaacgcctctaccttccttcaatggatcctcgagacacgcgcttattttttagatggctccctgttaaaagagactggtactctggagagtcagctcgaagccaacaaacgaaagcagaaagagatccaggctatgaagcgacagcttacaaagatcgtcgatctgggagacaacctggaagatgccttgatccttgacattaagtacagcaccatcggtctcgcccagcaatgggaccagttgtaccagttagggcttaggatgcagcacaacctggaacagcagatccaagcaaaggacattaaaggagtaagcgaggagactcttaaggagttcagtacgatctacaagcacttcgatgaaaatctgaccggaaggctgacacacaaagagtttagatcctgtctgagaggattaaactattacctgccgatggttgaggaagacgaacacgagcccaagtttgaaaagtttctggatgctgtggaccccggacggaaagggtatgtgtctcttgaagattacacagccttcctgatcgacaaagaatccgagaatatcaaatctagtgatgaaatagagaatgcatttcaggcattggccgaaggtaaaagctatattacgaaagaggatatgaaacaagccctgactcccgagcaggtgtctttctgtgctactcacatgcagcagtatatggacccgcgagggcgctctcatctgtccggctacgattacgttggttttactaactcctactttggcaactag

SEQ ID NO: 135890 - DNA, 7260 bp, synthetic construct
  misc_feature 1..7260: note = Description of Artificial Sequence: Synthetic coding sequence
  source 1..7260: mol_type = other DNA
atggagcagttccctaaggagaccgtcgtggagtcgtcaggccccaaggtgctcgagactgccgaggagattcaagaacggcggcaggaggtactgacgcgctaccaatcattcaaagagagggtggccgaacggggccaaaaactggaagatagttatcatttgcaggtcttcaagcgcgatgccgatgatctcggcaaatggattatggaaaaggtgaatatcctgactgataagagttacgaagacccgactaacattcagggcaagtatcaaaaacaccagagcttggaagcagaagtccagaccaagtcacggttgatgtcagaactggaaaagacgcgggaggagcgatttactatggggcattcagcccacgaggagaccaaggcgcatatcgaggagctccgacacctctgggatcttctcctcgagctgaccctggagaagggcgatcagcttttaagggcacttaaattccagcagtacgttcaagagtgcgctgacattctggaatggattggcgataaagaggccatcgccacaagcgtggagctcggagaggattgggagagaacagaggtgctgcacaagaaattcgaagactttcaggttgagctggtggcaaaggaagggcgagtcgtcgaggtgaaccagtatgccaacgagtgtgccgaggagaatcatcctgacttgcccctgatccagtccaagcagaacgaagtgaatgcagcgtgggagcgcctgaggggtctcgctctccaacgccaaaaggccctgagcaatgctgccaacctacagcgattcaaacgtgatgttacagaagctatacagtggattaaggagaaggaaccggtgctgacctcagaggactatggaaaagacttagtggcctccgagggcctttttcacagtcataaaggactcgaacgcaatcttgccgtaatgtccgacaaggttaaggaactgtgcgcgaaggctgaaaagctgactcttagtcacccctccgatgcccctcagattcaggaaatgaaagaagacctcgtgtcttcatgggagcacataagggccctcgctacctctagatatgaaaagctgcaggcgacctactggtatcaccgcttttcgtcggatttcgacgagctgagcggttggatgaacgagaagacagctgctattaacgccgatgaacttccaacggacgtagccgggggtgaagtgttgctggatagacatcagcagcacaagcatgaaattgatagttatgacgataggttccagagtgcagacgagactgggcaggatctagtgaatgcaaatcatgaggcctccgacgaagtcagagagaagatggagatcctggacaataactggacggcactactggagctgtgggatgaacgccaccgccagtatgagcagtgtcttgactttcacctgttttacagggactcagagcaggtggattcctggatgagtcggcaagaagcctttctggaaaatgaggacctaggaaactcgctcgggagcgctgaggctctgctgcagaaacatgaagacttcgaggaagctttcactgctcaagaggaaaagatcattacagtagacaaaacggccaccaagctgatcggcgatgaccactatgacagcgagaatattaaagcgatcagggatggactgttggcccgtcgcgacgccctgcgggagaaggccgccactcgacgtcgccttttaaaggagagtctgttgctgcagaagctctatgaagacagtgacgatttgaaaaattggattaataagaaaaagaaacttgctgacgacgaagactacaaggacatccagaatctgaaaagcagggtccaaaagcagcaagtctttgaaaaggaactggctgtgaataaaacccaactggaaaatatccagaaaactgggcaggagatgattgaaggaggacactacgcctcagataatgttaccacacgactctccgaggtcgcatcattgtgggaagaactactcgaggccaccaaacagaaaggaacacagcttcacgaggctaatcaacagctgcagtttgagaataatgccgaagaccttcagaggtggctcgaggacgtcgagtggcaggttacttctgaagactacggcaagggcctggccgaggtgcagaatagactgagaaaacatggactcttagagtctgcagttgctgccagacaagaccaagtcgacatccttaccgatttagcggcctatttcgaagagatcggccacccagattccaaagacattagggcccgacaggaatccctggtgtgccggtttgaggcactcaaagagcctctggctaccaggaaaaaaaagcttctcgacttgctccatctgcagcttatctgccgagatactgaggatgaagaagcttggattcaagagacagaaccaagcgccacctcaacttatctgggcaaggacctgatcgcatctaagaaactcctcaatagacacagagtgatacttgagaatatcgcatcccatgagcctaggattcaggaaatcaccgaacggggcaataagatggtggaggagggacattttgctgccgaggacgtggcatccagagtaaaatctttgaaccagaatatggagagtctgcgggcacgcgccgcccggagacagaatgaccttgaggctaatgttcagtttcagcagtatctggccgaccttcacgaggctgaaacatggattcgagaaaaagagcctattgtcgataataccaactatggtgcagacgaggaggctgccggagccctactcaagaaacatgaagcttttttgctagacctgaacagctttggcgatagcatgaaggcgctgaggaaccaggccaacgcctgccaacaacagcaggcggctcctgttgaaggagtcgccggggagcagcgagtcatggccctgtatgactttcaggcaaggagtccccgggaggtgacaatgaagaaaggtgatgtgttaactctgctgtcatcaattaataaggattggtggaaagtggaagctgccgaccaccaaggcattgtgcctgccgtgtatgtgcgaagactggcccacgatgaattcccgatgctcccacagcgccgaagggaagaacccggcaacatcacacaaaggcaggagcagattgagaaccagtacagaagcctgctggaccgtgcagaggagcggaggcgcagactgctgcaacgatacaacgaatttctattggcctatgaagccggcgatatgctagagtggatccaggagaagaaagccgagaatacgggcgtggaactggatgacgtatgggagctgcagaagaaattcgatgagttccaaaaggatctgaacacaaatgaacctcggttgagggatattaataaagtcgccgacgacttgctcttcgaaggattactgacccctgagggtgctcagatcagacaggaactaaactccaggtggggatcgctgcagagactcgctgacgaacagagacagctgctgggctccgcccacgctgtggaagtgtttcaccgcgaggccgatgacaccaaggagcagatcgaaaaaaaatgccaggccctaagcgctgctgatccgggctctgatctctttagtgtgcaagcgctgcagcgcaggcatgagggctttgaacgggaccttgtgccattaggtgataaagtgactattttgggcgagaccgctgagagactctctgagtcccacccagatgcaacagaagatctgcaaagacagaaaatggagttaaacgaggcatgggaggatctgcaggggaggacgaaggatcggaaggaatcactcaacgaagctcaaaagttttatctgtttctgtccaaggcacgggatctccagaactggattagttccatcggcggtatggtcagctctcaagaactggccgaggacttaacaggaatcgagatcctcctggagcgacaccaagagcacagagctgacatggaagccgaggctcctacttttcaagctctggaggacttctcagccgagctaattgatagcggccatcacgcaagtcccgaaattgagaagaagcttcaggcagtaaagctggagagggatgatcttgagaaagcctgggagaagagaaagaagatcctcgaccagtgccttgaactacaaatgtttcagggcaactgcgaccaggtcgaaagctggatggtggcacgcgaaaactccctcaggagtgacgataaatcatcccttgactccctggaggctctgatgaaaaagcgggacgacctggacaaagctatcacagcgcaggagggtaagatcaccgatttggagcattttgcagagtctctgattgcggacgagcattacgcaaaagaggaaattgctactaggctccagcgcgtgctggaccgctggaaagctctgaaggctcagttgatcgacgaaagaacgaagctcggtgactatgcaaatctgaagcagttctaccgagacctggaagaacttgaagaatggattagcgaaatgctacctacagcttgcgatgagtcctacaaggatgcgacaaatatccagaggaaatacttgaaacatcagacctttgcccatgaggtggacggcagatctgagcaagtgcacggtgtgattaatttagggaattcgctcatagagtgtagcgcatgtgacggcaacgaggaggcgatgaaggaacaactggagcaactgaaagagcactgggatcatttgcttgagagaacaaacgataagggaaagaaactaaatgaggccagcaggcagcaacgcttcaacacgtctatacgggattttgaattttggttaagtgaggctgagacccttctcgcgatgaaggatcaggccagggacctggcatccgcaggaaacctcctcaagaaacatcagcttctggaacgggagatgcttgcgagagaagatgccctcaaagacctgaacaccctggccgaggatttactgagtagcgggaccttcaacgtggatcagatcgtcaagaagaaagataatgtcaacaaaagatttctgaacgtgcaggagctggcggctgcacatcacgagaagctcaaggaggcttacgctctgttccaattctttcaggatcttgacgatgaggagagctggatcgaggaaaaactcattagagtgtcaagtcaggactacggtcgagatctgcaaggcgtccagaacctgctcaagaagcacaaacgtctggagggcgagctcgtggcccatgaacccgcgattcagaacgtgctggatatggctgaaaaactcaaggacaaagccgcagtgggtcaagaggagatccaacttcggctagcccaatttgttgaacactgggaaaagcttaaagagctcgcgaaggcacggggcctgaaactggaggaaagtctcgagtatttacagtttatgcagaatgccgaagaggaagaggcttggattaatgagaaaaatgctctcgctgttagaggagattgcggcgacacgcttgccgcaacccagagcttgctcatgaagcacgaagcattagagaacgattttgcagtgcatgaaactcgggtccagaacgtctgcgcccaaggggaagacattctgaataaggtgctacaggaagagtcccagaacaaagaaatttcgtcgaagatcgaggcgttgaacgagaagactccctccctcgcgaaggctatcgccgcctggaagctgcagctggaggacgactatgccttccaagaattcaattggaaagccgatgtcgtggaagcatggatcgccgacaaggagacaagtctgaagaccaatggtaatggggccgatctgggagactttctgaccctgttagctaaacaggacactcttgacgcctcgctgcagtcattccagcaggaacgcctcccagagataaccgacctgaaggataagctaatctctgctcagcacaatcagtccaaggccattgaggaaaggtatgccgccttgttgaaacggtgggagcagctgttagaggctagcgccgtgcaccggcaaaagctcctggaaaagcagttaccacttcagaaagcagaagaccttttcgttgaattcgcccacaaagcctccgccctcaataattggtgcgaaaaaatggaggagaatctttccgagcccgtccattgcgtttctctcaatgaaattcggcaattacagaaggatcatgaagatttccttgccagcctggccagagctcaagctgactttaaatgtctgctagagcttgatcagcagatcaaagcgctgggagtccctagctccccttatacctggctgaccgttgaggtcctcgaaaggacgtggaagcatctgagcgacataatagaagagcgagagcaagaactgcagaaggaggaagcccgccaagttaagaattttgagatgtgccaggaattcgagcagaatgcctcaacatttctgcagtggatactcgaaacccgagcctatttcctggatggatcactgttgaaggaaacaggcacactggagtctcagctcgaggccaataaacggaagcagaaggagatccaagctatgaagagacagcttacaaagatagtggatctgggcgataacctggaggatgcgcttattctggacattaagtattctacaatcgggctagcccaacaatgggaccagctatatcaactggggctgaggatgcagcacaatttggaacagcagatccaggcgaaggatatcaaaggcgtctccgaagaaacacttaaagagttctccacgatctacaagcactttgacgaaaacctgacaggccggctgacccacaaggagttccggtcctgtttgagggggctgaattattatctgccaatggtcgaagaagacgaacacgaaccgaagttcgagaagtttctggatgctgttgaccctggtcggaagggatatgtatccttagaagattacacagccttcttgatcgacaaagaaagtgagaacatcaagtcttccgacgagatcgaaaatgcttttcaggctttggcggaaggcaagtcctacatcacgaaggaagatatgaaacaggcactgaccccagagcaggtgagtttttgtgccacccatatgcagcaatacatggacccacgcggacgatctcacctatcaggctacgattatgttggttttacaaatagctatttcggtaattag

SEQ ID NO: 135891 - DNA, 7434 bp, synthetic construct
  misc_feature 1..7434: note = Description of Artificial Sequence: Synthetic coding sequence
  source 1..7434: mol_type = other DNA
atggacccaagcggcgtcaaagtgctcgaaaccgctgaggatatccaagaaagacggcagcaggtgctggatcgttaccaccgctttaaggagttgtccaccttgcgcaggcagaagcttgaggattcctaccgattccagttctttcagcgagatgcagaggagctggagaaatggatccaggagaaactgcagatcgccagcgacgagaactacaaggacccgacaaaccttcaaggcaagctacaaaaacaccaggccttcgaagctgaagtccaagcgaattccggcgccattgtgaagctagacgagactgggaaccttatgattagcgaaggtcacttcgcatctgaaactatccgcaccagactcatggaactccatcgccaatgggagttactgttagagaaaatgcgggaaaaggggattaaactattgcaggcccagaagctggtgcagtacttgagagagtgcgaggatgtcatggactggatcaatgataaagaagccattgtgacatctgaagaacttggtcaggacctggaacatgtcgaggtgctgcagaagaagttcgaagagtttcagaccgacatggctgcgcacgaagaaagagtcaatgaagtcaaccaatttgctgcgaaactgattcaggagcaacaccccgaagaggaattaatcaagaccaaacaggacgaagtcaatgctgcctggcagcgtcttaaggggttagccttgcagcggcagggaaaactgttcggggcggcggaggtgcaaaggttcaatcgagacgtggatgagaccatttcctggattaaagagaaggagcaactcatggcatctgacgatttcggcagagatctcgctagcgttcaggctctgctccgtaagcacgaggggctggagagggatctggcggcgctggaggataaagtaaaagctttatgcgcagaagcagatcgactccagcaatcacacccactgagcgctactcaaattcaggttaagcgcgaagagttaattaccaattgggagcaaatccgcacgctggccgcggaaaggcacgccaggctcaatgatagctatagactccaacggtttctggcggattttcgggatttaaccagctgggtgaccgaaatgaaggctctcatcaatgcagatgagctcgcctcggatgtggctggcgctgaggcactgctggaccggcatcaggagcacaagggagaaatcgacgcccacgaagatagcttcaagagtgcagatgaatccggacaggcactcctggccgcaggccactatgccagcgacgaagtcagggagaaactcaccgtgcttagcgaggagagagctgctctccttgagctttgggaactgaggcggcaacaatacgagcaatgtatggacttgcagctgttctaccgcgacactgagcaggtcgataattggatgtccaagcaggaggcgttcctccttaacgaggaccttggagattccctggactccgtggaagccctacttaaaaagcacgaagattttgagaagtcccttagtgcccaggaagagaagatcactgccctggacgaatttgccaccaagctcattcaaaataatcactatgccatggaggacgtggccacccgccgggacgccctgttgtcacggaggaacgccctgcacgagcgagccatgagaaggcgagcgcagcttgcagattcttttcacctacagcagttttttcgggactcagatgaactgaaaagctgggttaacgagaaaatgaagaccgccaccgacgaagcttacaaggaccctagtaatttgcaaggaaaggtccagaaacatcaggcgttcgaggccgaactgagcgccaatcagagtcgaatcgacgccctggaaaaggcagggcaaaagctaatcgatgtcaatcattatgccaaggatgaggtcgcggcccgaatgaacgaggtcataagcctctggaagaagctcctcgaagccaccgagctaaaggggatcaagctaagggaagcgaaccagcagcagcagttcaatagaaatgtagaagacatagagttgtggctctacgaggtcgagggccatctggctagcgatgattacgggaaggaccttaccaacgtgcagaatctgcaaaaaaaacacgctttgctcgaagctgatgtggctgctcaccaggatcggatcgatggcattacaatacaggcgcggcagttccaggacgcaggtcactttgacgctgaaaacataaagaagaagcaggaggcattagtggcccggtacgaggccctcaaagagcccatggtggctagaaagcaaaagttagcagattccctgaggctacagcaactcttcagagatgtcgaggacgaagaaacttggataagagagaaggagcccatcgccgccagtacaaaccggggcaaagaccttatcggggtgcagaatcttctaaaaaagcatcaagccctgcaggcggagatagccggacacgagccccgtattaaggcagtgactcagaaaggaaacgccatggtggaggaaggtcatttcgcggcagaggatgttaaggcaaagcttcacgagctgaatcagaagtgggaggcccttaaagccaaggcctcccagcgccgacaggacctggaagatagtctgcaggcgcaacagtacttcgccgacgctaacgaggccgagagctggatgcgggagaaagagccaattgtggggagcaccgactatgggaaagatgaggactccgccgaagcactgctgaagaaacacgaagcattaatgtcagacctgagtgcttatggaagcagcattcaggcactgcgggaacaggcccaatcatgcagacagcaggtcgcgccaaccgacgacgagacaggcaaggaactggtgctggctctgtacgattatcaggaaaagtccccacgggaagtcaccatgaagaagggcgacatcttgacactgctgaattcgactaataaggattggtggaaagtcgaagttaatgatagacaggggtttgtccctgcggcctatgtgaaaaagctggaccctgctcaatccgccagtcgcgaaaacctgctggaggaacagggctccattgcgctgcggcaagagcagatagacaatcagacccgtattactaaagaagcagggagcgtcagcctccgcatgaaacaggtcgaagagctctatcattctctgttggaactcggcgagaagcggaagggaatgctggagaaatcttgtaaaaaattcatgttgttccgggaggcgaacgaactacagcaatggatcaatgaaaaggaggctgccttaaccagcgaggaggtgggcgcagatctcgagcaagttgaggtactgcagaagaaattcgatgactttcagaaggacctcaaggccaatgagtctcgattaaaagatatcaataaggtggccgaggacctcgagtcagaaggcttaatggctgaagaagtccaagcggtgcagcagcaagaggtatacgggatgatgccccgggatgaaacagacagcaaaacagcctcaccatggaaatctgcgcgcctcatggtacataccgtggccacctttaacagcatcaaggaattaaatgagagatggagaagtctccagcagctcgcggaggagcgctcgcagctcctgggcagtgcccatgaagtgcaaaggtttcacagggacgctgacgaaaccaaggaatggattgaggagaaaaaccaggcgttgaataccgacaattatggtcacgacctcgcgagcgtgcaggctctacagaggaagcacgagggttttgagcgggacctggcagccctgggcgacaaggtgaactcattgggagagaccgccgagcgacttatccagagtcacccagaaagtgccgaagatctccaggagaaatgcaccgaactcaaccaggcctggagtagcctggggaagagggcagatcagagaaaggcaaaattaggtgattcacacgatctccagaggttcctgtctgattttcgggacctgatgtcttggataaacggcatcagggggttggtgtcctctgacgaactagcaaaggacgtgacaggggctgaggcgctcctggaaagacaccaggagcataggaccgaaattgacgctcgagcaggcaccttccaggcctttgagcaatttggtcagcaattgctggcccacggacattacgcctcccccgagattaaacaaaaactggatatcctggatcaggaaagagccgacctggagaaagcctgggtgcaacgtaggatgatgctggatcagtgcttagagttacagctgtttcatagagactgtgagcaagcggagaactggatggccgccagggaggcatttttgaacacagaagacaagggcgattcgctggattccgtggaagctcttattaaaaaacatgaagactttgacaaagcgatcaatgtacaagaggaaaagattgccgcgctgcaggctttcgccgaccagctcattgctgcgggccactatgcaaagggggacatcagctcccgtcgcaacgaggtccttgatcgatggaggcgactgaaagctcaaatgatagagaaacgctctaaactcggggagagccaaacgcttcagcagttcagccgagacgtcgacgaaatcgaggcctggatcagtgaaaaactgcagactgcctctgatgagtcctataaagatcctacgaatattcaagtcagcctgatgttgtctaagcatcaaaagcaccaggcgttcgaggccgagcttcatgctaatgcagatcgcatccggggcgtaattgatatgggtaactccctcattgagaggggcgcctgcgctggctctgaggacgctgttaaggctagactggctgccttggcggatcagtggcagtttttagtgcagaagagcgccgaaaagagtcagaaactcaaggaagccaacaagcagcagaattttaataccggtattaaggacttcgacttctggctttctgaggtggaggctctcctcgcctcggaggactatggaaaggatctggccagcgtgaataacctgctcaagaagcaccaactgctggaggccgacatttctgctcatgaggatcgattaaaagacttgaattcccaggccgactcgctgatgaccagctcggcgttcgataccagccaagtgaaggataaacgggacaccatcaacgggaggttccagaaaatcaagtcaatggccgcgtctcggcgagccaagctcaacgagtcacacagactccatcagttttttagagacatggatgacgaagaaagctggatcaaggaaaagaaactcctcgtcggcagtgaggattacggacgggatctcacaggagtacaaaatcttcggaagaagcacaaaagactggaggccgaacttgccgctcacgagcccgcaattcagggagttctcgacaccggaaaaaagttgagcgacgataacacaattggaaaagaggagatccaacagaggctggctcagttcgttgaacattggaaagagctgaagcagctcgccgccgctcgcggacaacgcctcgaagaatcccttgagtatcagcagtttgttgccaatgtggaggaggaagaggcttggattaatgaaaaaatgacattagtcgcgagcgaagattacggcgacactctcgcagctatccagggtctcttgaaaaaacacgaggccttcgagacagattttacagtccataaggacagggtgaacgatgtgtgtactaacgggcaggacctgataaagaagaacaaccatcatgaggaaaacataagctcaaaaatgaaagggcttaatggaaaggtctctgatctcgaaaaagctgcagcccagcggaaggccaaactggatgagaatagcgctttcctgcaattcaactggaaggctgatgtagttgaaagctggattggcgagaaggagaacagtctgaagaccgacgattacgggcgcgatctgagctccgtccagaccttactgactaagcaggaaactttcgacgctggcctgcaggccttccagcaggagggaatcgcgaatattactgccctgaaggaccagctactggctgccaagcatgtgcaatccaaggccatcgaggcacgacatgccagtctgatgaagcgctggtcccagctccttgctaacagcgcggctcgaaagaagaagctcctagaggctcaatcccattttcgcaaggtggaggacctgttcctgaccttcgccaaaaaggccagcgccttcaatagttggtttgagaacgcggaagaggacctgacagaccctgtgaggtgcaatagccttgaagaaatcaaggctctgcgggaagcccacgacgcttttagaagcagcctgtcttcagcacaggcagattttaaccagctggctgaactggatcgccagatcaaaagttttcgggtggcctcgaacccatacacctggttcaccatggaggcacttgaggagacgtggaggaacctacagaaaatcatcaaggagcgggagctggaattgcaaaaggaacagcgcaggcaggaagagaatgacaagctccgccaggaattcgcccaacacgctaatgcctttcatcaatggattcaggagactcgctgtcaacccgcgggggcttcatgcatggtggaggagtctgggacactagagtcccaactagaagcaacaaaacgcaagcatcaggagatcagggctatgcgctcacagctgaagaaaatcgaggacctcggtgccgctatggaggaggccctgatcctggacaacaagtatacagagcactctaccgtaggattagcccagcagtgggaccaacttgatcagctgggaatgaggatgcaacacaacctagaacagcagatccaggccaggaacaccactggcgtcacagaggaggcacttaaggagtttagcatgatgttcaaacacttcgacaaggacaaaagcggcagactgaaccaccaggaatttaaatcctgcctgagatcgcttggttatgacctccctatggtggaggagggggaaccagatccagagttcgaagccatccttgacaccgttgaccccaatcgtgacggacatgtctctctgcaagagtatatggcattcatgattagccgtgagacggagaacgttaagagctccgaagaaatagaaagcgccttccgggccttgtcaagtgaaggaaaaccctatgtgactaaagaagaactgtatcagaatttgacccgcgaacaggctgactactgcgtctctcacatgaaaccttacgtggacggaaagggacgggaattaccaaccgcgttcgattacgttgaattcactcgctccctttttgtgaactag

SEQ ID NO: 135892 - DNA, 7359 bp, synthetic construct
  misc_feature 1..7359: note = Description of Artificial Sequence: Synthetic coding sequence
  source 1..7359: mol_type = other DNA
atggatccaagtggggttaaagtactggagacggcggaagacatccaggagaggaggcagcaggtactggaccgctatcatcgattcaaggaactgtcaacactacggaggcagaaacttgaagacagttatcgctttcagtttttccagagagacgccgaggagcttgagaaatggatccaggaaaagcttcagatagcctccgatgagaattataaggatccgactaacctccaagggaagttgcagaaacaccaggcctttgaggcagaggtccaggcaaacagcggtgcaatcgtgaagcttgatgagactggtaatcttatgatctcagaaggccattttgcatctgagactatccgtactcgcctcatggagctccaccggcagtgggaactgcttctagagaaaatgcgagaaaagggaattaaactgttgcaggcccagaaactggttcaataccttcgggaatgtgaagatgtgatggactggatcaacgacaaggaggccattgtgacctccgaggagctcggccaggacttagaacacgtagaagtgctgcaaaaaaagtttgaagagttccagacagacatggccgcacacgaagagcgagtgaacgaggtcaaccagttcgccgcaaaactgatccaggaacagcaccctgaagaagagctgatcaagacaaagcaggacgaggtgaatgctgcatggcaacgcctgaagggcctcgcgttgcagcggcagggcaaactgttcggcgccgcagaagtgcagcgcttcaatagggacgtggacgagacaatttcttggatcaaggaaaaagaacagctgatggcgtccgacgacttcgggcgcgaccttgcctcagtgcaggctctgctgagaaaacacgagggactcgagcgagatttagcagcattggaagacaaggtgaaggccctgtgcgcagaggccgacaggctgcagcagtcacacccactctcagccacccagattcaggtgaagcgggaggaactcattaccaactgggaacagatccggacacttgcggcagaaaggcacgctcgtcttaacgatagctacaggctacagaggtttttggctgatttccgagacctgacttcatgggttaccgaaatgaaggctctgatcaacgccgacgagctggcctctgatgtcgccggagcagaggccctcctagatcgacatcaggagcataaaggagagattgatgcccatgaagacagcttcaaaagcgcagatgagtccgggcaggctctgttggccgccggccactatgccagtgacgaagtgagagaaaaattgactgttctaagtgaagaacgggccgctttgctggagctgtgggagctgcgccgtcagcagtatgaacagtgtatggatctgcagctcttctatcgcgacacggaacaggttgacaattggatgtccaaacaagaggccttcctacttaacgaggatctgggggacagtctggattctgtggaagcattgctaaaaaaacatgaggactttgaaaaatctctgagcgcccaagaggaaaagattacagcgttggatgaatttgctacaaaactgattcagaataaccactacgccatggaggacgttgctacacgaagagacgccctactgtctcggagaaatgcactccacgagagagcgatgcgcaggagagctcaactggccgatagtttccatcttcagcagttcttccgcgactcagatgaactcaaatcttgggtgaacgagaaaatgaagaccgcgaccgatgaggcttataaggatccaagcaacctgcagggcaaggtgcaaaagcaccaagcttttgaggccgagctgtcagccaaccagagccgcattgatgccctggaaaaggcaggccagaagctgatcgatgtgaatcattacgctaaagacgaggtggccgctcggatgaacgaagtaataagtttgtggaagaagctgcttgaagctactgagcttaaaggtataaaactaagagaagcgaaccaacagcaacaatttaatcgaaacgtcgaggatattgagctctggctgtacgaagtggagggccatctagcatcagatgattacggcaaagatctgaccaacgtccagaacctgcaaaaaaaacacgctctgttggaggcagacgtggccgcccaccaggacagaattgatggaattacaatccaggccaggcaatttcaagacgccggacacttcgacgctgagaacattaaaaagaaacaagaggcactggtggcacgctatgaggctctgaaagaaccgatggtcgcccggaagcagaaacttgccgatagcctaagactacaacagctgttcagggatgttgaggatgaggagacatggatacgggaaaaggagcccattgccgcatcaaccaaccgaggtaaggacttaattggcgtccagaatctgctgaagaagcatcaggcattacaggctgaaatagcaggacacgaaccacggattaaagccgtgacccagaaaggcaatgcgatggtcgaggaaggacatttcgctgccgaggatgttaaagccaagctgcacgaactgaaccagaagtgggaggccctaaaggcgaaagctagccagagaaggcaggaccttgaggactctctacaagctcagcaatactttgcagatgctaacgaggcagagagctggatgagagaaaaggaacccattgtggggtccacggattacgggaaggatgaagactcggcggaggctctcctgaagaaacatgaagctctgatgagcgacctatcggcgtatggctcatccattcaggctcttagagagcaggctcaaagttgcagacagcaagtggctcccactgacgacgaaaccggcaaggaactggtcctcgcgctgtatgattaccaagaaaagtccccacgagaagtgacgatgaaaaagggggacatactgacattgcttaactctaccaataaggactggtggaaagttgaagtgaatgaccggcagggtttcgtgccggccgcatatgtaaagaaattagatcccgctcaatccgcatcaagggagaatcttctggaggaacagggcagtattgcactgcgccaggagcagattgataaccagtatcactcactgcttgaactgggagaaaaacgcaagggtatgctggagaagagctgcaagaagtttatgctttttagagaagcaaatgagctgcagcagtggattaacgagaaggaggcagctctgacaagcgaggaggttggagcagatctggagcaggtggaagtcctgcagaagaagttcgacgacttccaaaaagatttaaaagccaacgagtcacgactcaaagacatcaataaggtggctgaggacctggagtccgagggactgatggctgaagaggtgcaggcggtgcagcaacaggaggtgtacggaatgatgccccgggatgagacagactccaaaaccgcctctccgtggaagagcgcccgcctaatggtacacaccgttgcaactttcaattcaatcaaggaattgaacgagaggtggcgctctctccagcagttggcagaagagaggtcccagcttttgggttccgcacacgaggttcagcggttccaccgggacgctgacgaaacaaaggaatggatcgaggaaaaaaaccaggcgctcaacactgataactacggtcatgacctagcatctgtccaggccctgcaacggaaacacgaaggctttgagcgggacctcgcggcactgggggacaaggtgaactctctcggtgaaactgctgagagattgatccagtctcaccctgagagtgctgaggacctgcaagaaaagtgtaccgagttgaatcaggcgtggagcagcctaggcaagcgcgccgaccaacgtaaagcaaagctcggagacagccatgatctgcagagatttttgtccgattttcgggacctgatgtcttggattaatggcattcgcggactcgtgtcctctgatgaattggctaaagatgtcacaggggctgaagctctcctggagcggcaccaagaacaccgcacggagatcgacgcgagagcagggacctttcaggcgtttgaacagttcggccagcagcttctggcccatggccactacgcatccccggagattaagcagaaactggacattctcgaccaggagcgggccgacttggagaaggcgtgggtccagcgccggatgatgctggatcagtgcctggaactgcagctttttcaccgggattgcgaacaagccgagaattggatggccgccagagaagcttttctaaacactgaagacaaaggagactcacttgatagtgtagaggcactgatcaagaaacacgaagactttgataaggccatcaacgtccaggaggaaaaaatcgctgcactgcaggcatttgccgatcagctcatcgctgcaggtcattatgcaaaaggggacatatctagccgtagaaacgaggtgcttgaccggtggaggcggctgaaggctcaaatgatcgagaagaggagtaaactgggcgagagccaaacactccagcagtttagcagagacgtggacgagatcgaagcgtggatctccgaaaaacttcagacagcatctgacgagagttacaaggacccaacaaacatccagtccaaacatcagaaacaccaggccttcgaagccgagctgcacgcaaacgcggataggatcagaggtgttatagacatgggcaattccctcatagaacgtggggcttgcgcggggagcgaggatgccgtcaaggctagactggcagcactggctgatcagtggcaatttctcgtacaaaagagcgcggaaaaaagtcagaaactgaaagaggccaataaacagcaaaactttaatactggcatcaaggatttcgatttttggctgtctgaggtggaagctctgctggccagtgaggactatggtaaggatttggcctctgtcaacaatctcctgaagaagcatcagttactggaggcggacatatccgcccacgaggatagattgaaggacttaaattcccaggcagattcattaatgacctcttctgcctttgacacctctcaagttaaggataaaagggataccatcaatggcaggttccagaagattaagtctatggccgcatccaggagggctaaactgaatgaatcccaccgattgcaccagttttttagagatatggatgacgaagaaagttggatcaaggagaaaaagctgctggtgggctcagaggactacggccgcgacctgaccggggtccagaatcttcgaaaaaaacacaagagactggaagctgagcttgccgcccacgagccggcgatccagggagtattggataccggcaaaaagctgtctgatgataataccatcggtaaggaagagattcagcagcgccttgcacagttcgtcgaacactggaaggagttgaagcagctggcagctgcacggggtcagaggctggaggaatctctcgagtatcagcaattcgtggcaaacgttgaggaagaggaagcttggattaacgaaaagatgacactggtcgcaagcgaagattacggcgacacccttgccgcaattcaaggactcctgaagaagcacgaggcattcgagaccgactttaccgtccataaagaccgcgtgaacgacgtctgtaccaacggacaggatctgattaagaagaataatcaccatgaagaaaacatctcctccaaaatgaagggactgaacggcaaggtgtcagatctggagaaggcagcagcgcagcgcaaagcaaaacttgacgaaaactcagcgtttctccaatttaactggaaggccgacgtggtggaatcctggattggcgaaaaagagaactctctgaagactgacgactatgggcgcgacctgtcatctgttcagactctgttgacaaagcaggaaactttcgatgccggtctgcaggccttccagcaggaaggcatcgcaaacatcactgctttgaaggatcagctccttgcagcaaagcacgtgcagtcaaaagcaattgaagcccgtcacgccagcctcatgaaaagatggagccagctgctggcaaacagtgccgctcggaagaagaagctgctagaagcccaatcccactttagaaaagttgaggatctgttcctgacttttgccaaaaaggctagcgcctttaactcctggttcgagaacgcagaggaggacctgacagatcccgtgcggtgcaactcactggaggagattaaggccttgcgggaagcccatgatgcctttcgaagcagtctgagctccgcccaggccgatttcaaccagttggctgagctggatcgtcagatcaagagcttcagagtagcttctaacccctacacctggttcaccatggaagctctggaagaaacttggagaaacctgcagaagattatcaaagaaagggaactggaactgcagaaggaacagcgacggcaagaggagaatgataagctaaggcaagagttcgcccagcacgctaacgctttccaccagtggattcaggagactcggtgtcagcccgcgggcgcctcttgtatggtagaagagtccggcacactagagtcccaacttgaagccaccaaaagaaaacatcaggagatacgggccatgagatctcagctgaaaaaaattgaagacctgggggctgccatggaggaggccttgattttagacaataagtatacggaacactcaactgtaggactggcccagcagtgggatcagttggaccagctggggatgaggatgcagcacaacttggagcaacagattcaggccaggaacacaaccggggtcacagaggaggccctgaaggagttctccatgatgttcaaacacttcgacaaggacaagtccggaaggttgaatcaccaggagttcaaaagttgtctgcgatctctggggtacgatctgcctatggtcgaagagggggaacctgacccagagtttgaggctatcctggataccgtcgaccctaatagggatggacacgtctcccttcaagagtatatggcctttatgatcagtagggagactgagaatgtgaaaagttcagaggaaatcgaatctgcctttagggctctgagttcggagggaaaaccgtatgtgaccaaagaagaactttaccagaaccttacccgagagcaggctgactactgcgtctcccacatgaaaccttatgtggatggcaagggccgcgagctccccacagcctttgattatgtagagttcactagatccctgttcgtgaattag

SEQ ID NO: 135893 - DNA, 1485 bp, synthetic construct
  misc_feature 1..1485: note = Description of Artificial Sequence: Synthetic coding sequence
  source 1..1485: mol_type = other DNA
atggccgcttcccgtagggccaagcttaacgagtcccatcgcttacatcagttctttcgcgacatggatgatgaggaatcttggattaaggagaagaagctgctcgtcggtagtgaggactatggcagggacctgaccggcgtgcagaatcttcggaagaaacacaagagacttgaggcagagttggctgctcatgagcctgctattcagggcgtactggataccggcaagaaactgtccgacgacaatacaatcggcaaggaagaaatccagcagcggcttgcccaatttgtggagcactggaaggagctgaaacaattagctgccgcccgcgggcagcggctcgaagaatcactcgagtatcagcaatttgtggccaatgtggaagaagaggaagcatggattaatgagaaaatgacactggtagcatccgaggactatggtgatactctcgccgcaattcaaggcctccttaaaaaacacgaagcatttgagacggacttcaccgtccacaaggaccgagtgaatgatgtttgcactaacggacaggacttgattaagaagaacaaccaccatgaggaaaacatctctagcaagatgaaaggcctcaatggcaaagtctcggacttggagaaggcagcagcacaacgcaaggccaagttggatgaaaactcagctttcctgcaatttaactggaaggccgacgtcgtggagagttggataggtgaaaaggaaaactcacttaaaaccgacgattacgggagggacttgtcgtctgtgcagacactgttaacgaagcaggaaacatttgacgcgggccttcaagcatttcagcaagaagggatcgcgaacattacagccctgaaggatcagttactagctgccaagcatgtccaatctaaggccattgaagcacgacacgcatctcttatgaagaggtggagccagctactggccaattctgccgcccgtaagaaaaaactcttggaggctcaatcgcatttccgcaaggtggaagatttattcctgacctttgccaaaaaggcgtccgccttcaatagttggtttgagaacgccgaggaggaccttacagatccagtccgctgcaacagtctggaagagataaaagctctgcgggaggcccatgacgctttccggagctcactgtcctccgcacaagctgacttcaatcaactggccgaactggatcgccagattaaatctttcagggtggcctcaaatccctatacctggtttacaatggaagccctcgaagagacctggcgtaacctacaaaaaatcattaaagagagagagttggagctccaaaaagaacagcgtaggcaggaggagaatgacaaattgcgtcaagagttcgcccagcatgctaacgcctttcaccagtggatccaggaaaccagatgccagaggaaggatggtcagttacagggtggcagggtgggagatccccgaattcccgcgtag

SEQ ID NO: 135894 - DNA, 7419 bp, synthetic construct
  misc_feature 1..7419: note = Description of Artificial Sequence: Synthetic coding sequence
  source 1..7419: mol_type = other DNA
atggaccccagtggtgtcaaggtgcttgaaaccgccgaggatatccaggaacgtagacagcaggttctggataggtatcaccggttcaaagagctgtccaccctaaggcggcagaagctggaggattcctatcgcttccaattcttccagcgggacgcagaagagctggaaaagtggatccaggagaagctccagatcgcctccgatgagaactataaagatcctaccaacctgcaaggcaagctgcaaaagcatcaggctttcgaggccgaggtacaggccaacagcggcgcaatcgtgaaactcgacgaaacggggaacttgatgatctccgaagggcattttgcttcggaaaccattcgaacgcgactgatggagctacatagacaatgggaactgctcctggaaaagatgcgcgaaaagggaatcaagctcttgcaggcccagaaactggtccagtatttgagagaatgcgaagatgtgatggattggattaatgacaaggaagctattgtcaccagcgaagaattaggtcaggacctggaacacgtcgaggtactgcagaagaaatttgaggagttccagaccgatatggctgcacatgaagagcgtgtgaacgaggtcaatcagttcgctgccaagctgattcaagagcagcacccggaagaggagcttatcaagaccaaacaggatgaagtaaacgcggcgtggcaacgtttgaaggggctggctctgcagaggcaggggaagctcttcggcgccgctgaagtgcagaggttcaacagagatgtcgatgagactatctcttggatcaaggagaaagagcagctgatggcatcagacgattttggcagagacttggctagcgtgcaggcgctcttgaggaaacacgaaggtctggagcgcgatctcgccgctcttgaggataaggtgaaggctctatgcgcggaggccgatcgtcttcagcagtcccaccccctgtctgctacccagattcaagttaagcgcgaagaactcatcactaattgggagcagattcggacactggccgccgagagacatgcacgcctgaatgacagctaccgcttgcaaaggttcctggcagacttcagggaccttacatcatgggtgaccgagatgaaagcacttattaacgcagacgaattggcatccgacgttgctggagccgaagccctgttggacaggcaccaggagcataagggggagatcgatgcgcacgaggactctttcaagtccgcagatgagagcggacaggccctacttgccgctgggcattacgcatctgacgaggtgagggagaaactcacagtgctgtccgaggagcgggctgcattgctcgagttgtgggagttacggagacagcaatacgagcaatgtatggacttgcagcttttttaccgagacacagagcaagtagataattggatgagtaaacaggaagcgtttttgctgaacgaggatctcggcgattcactagattccgtcgaggccctcctgaagaagcatgaagatttcgaaaaatcacttagcgctcaggaggagaagatcacagcgctggatgagttcgccacaaagttaatccaaaataaccactatgccatggaagacgtggccactaggcgtgatgcactattatctaggcggaacgctctgcacgaacgggccatgcgacgccgcgcccagctggccgactcctttcacctgcagcagttttttcgggattctgacgagctgaaaagctgggtcaacgaaaaaatgaagacagctacagacgaagcctataaagatccaagcaatctccaggggaaggtacagaaacaccaggcctttgaagctgaactttccgccaaccaatccagaattgacgcactggagaaggcaggccagaaattgatcgatgtgaatcactacgctaaagacgaggttgctgctagaatgaacgaggtcataagcctgtggaaaaaactgctggaagccacagaactgaaaggaatcaaactaagggaggccaaccagcagcagcagttcaatcggaatgtagaagacattgaactgtggttgtatgaggttgaaggacacctggctagtgatgattacggaaaggacctcacaaacgtgcagaatttacagaaaaagcacgcactgctggaggccgacgtcgcagcccaccaggataggatcgacggaatcactattcaagccagacagttccaggatgcggggcacttcgatgccgaaaacataaaaaaaaaacaggaggcacttgtcgcccgatacgaggcactcaaagagcctatggttgctcggaagcagaagctggcagactctttgcgtttgcagcagctgtttagggatgtggaggatgaagaaacatggattcgagaaaaggagcctatcgccgctagcactaatagaggcaaggacctgatcggcgtgcaaaatcttctgaagaaacatcaggccctgcaggccgagatcgccggacatgagccacgaatcaaagcagtgacccagaaaggcaatgccatggttgaagagggccatttcgctgctgaggatgtgaaggccaaacttcacgaactgaaccaaaagtgggaagccctaaaggctaaggcaagccagagacggcaggatcttgaagacagtttgcaagcccagcaatattttgctgatgccaacgaggcggaatcctggatgcgagagaaggagccgattgtggggtctactgattacgggaaagatgaggattccgcggaagcactgctcaagaagcacgaggcgttgatgagcgatttatcagcctatggcagttctatccaggcgctccgcgagcaagcccaatcttgccggcagcaggttgcacccactgatgacgagactgggaaagaattggttttggcactgtatgactatcaggagaaatcacctcgtgaagtaacaatgaaaaagggagacatcctcactttactgaacagcaccaataaggattggtggaaagtggaggtgaatgaccggcagggcttcgttccggctgcttatgttaagaaactggacccggctcagagtgcttcacgagaaaacctgctggaggagcaagggtccattgcactccggcaagaacagatagataaccaaactcggatcaccaaagaagctggttcagtgtcactaagaatgaagcaggtggaggagctttatcacagcctgctggagctgggggagaagaggaaagggatgctcgagaaatcatgcaagaagttcatgctttttcgtgaggccaacgaactgcagcagtggattaacgaaaaagaagcagcactgactagtgaggaggtgggggccgatctggagcaggtagaagtgctgcagaagaagttcgatgattttcagaaggacttaaaggcaaatgaatctaggctgaaggatatcaataaagttgcagaggacctggagtcggaaggcctgatggcagaagaagtgcaagccgtccagcaacaagaggtatacggaatgatgccacgggacgagactgattcaaagaccgcctctccgtggaagtccgcacggctgatggtgcacaccgttgctactttcaacagcattaaggagctgaacgagcggtggcggtctctgcagcagcttgcagaggaacgctcacagctcctgggttccgctcacgaagtgcagcggtttcatcgggacgctgacgagactaaggagtggatagaggagaaaaatcaggctcttaatactgataattatggccacgacctggcttctgtccaagcactgcagcggaagcacgaaggctttgaacgcgacctggcggccctcggtgataaggtcaactccttgggagagaccgcagagcgactcattcagagtcaccccgagtcggctgaggatctgcaggagaagtgcacagaactgaatcaggcatggtcttcacttgggaagagagccgaccagagaaaagctaaactcggcgactctcacgacctgcaacggtttttgagcgattttagagatctcatgagttggattaatggtatcagaggactagtcagctccgacgagttggctaaagacgttaccggtgctgaagctctgctggaaaggcatcaggagcatagaaccgagattgatgcgcgggccggaacgttccaggctttcgaacagttcggtcagcagctgctggctcacggtcactacgcatcacccgaaataaaacaaaagctcgacatcctcgaccaggaaagagcagacctggagaaagcatgggtgcagcgtagaatgatgcttgaccagtgcttggagctgcagctatttcatagagattgtgaacaagcagagaactggatggcagcccgagaggcatttctaaacacggaggataagggggattcgctcgacagtgttgaggctctgatcaaaaaacatgaggacttcgataaagcaataaatgtccaagaggagaaaatagcagctctccaggcctttgcagaccagttgatagccgcaggccactacgcaaaaggcgatattagctcaagaaggaacgaagtcctggacaggtggaggcgtttgaaggcacaaatgattgagaagcggagtaagctgggtgaatcccagacactgcagcagttcagcagggatgtcgatgaaatcgaagcctggatctctgaaaagctgcagacagcctcggatgagtcttacaaagacccaacgaacatccaatcgaaacatcagaagcaccaggctttcgaagcggagctgcacgccaacgcagacaggatcagaggggtgatcgatatgggcaacagcctcattgagcgaggggcctgtgccggctcggaggacgcagtgaaggcgcggttggctgcactggcggatcaatggcagtttctggtgcagaagtccgccgagaaaagccagaagcttaaagaggccaacaaacagcaaaattttaatacaggcatcaaggacttcgatttttggctctccgaagtggaagcactccttgcgagcgaggactatggaaaagatttagccagtgtgaacaaccttcttaagaaacatcagttacttgaggccgacatttctgcccacgaggataggcttaaggacttaaactcccaggcagattccctgatgacctcgagcgccttcgacacatcacaggtgaaggataagcgggacaccattaacggacggtttcagaagatcaagtcaatggctgcaagtcgccgagcaaagttgaacgaaagtcacagactgcatcagtttttccgagatatggacgatgaggaatcttggatcaaagaaaagaaactgctagtggggagcgaagattacgggagagatttgactggggttcagaaccttcgaaagaaacataagcgcctcgaagcggagctggccgctcacgaacccgcgatccagggggtactggacaccgggaagaagctgagcgacgacaacaccattggcaaggaagagatccagcagcggcttgcccaattcgtggaacactggaaggagctcaaacaactggccgcagcacgtggtcaaaggctcgaagagagtctggaatatcaacagttcgtggccaatgtcgaggaggaagaagcctggatcaatgagaaaatgaccttggtggcttccgaagactatggcgacacgttggcagcgatccaaggattacttaaaaagcatgaggcatttgagacagactttactgtgcataaggacagggtgaatgatgtgtgcacaaacggccaagacctgatcaagaagaacaaccaccatgaagagaatatttcaagcaaaatgaagggactcaacggcaaggtgagtgacttggaaaaagctgccgcccagaggaaagctaaacttgacgaaaactctgcttttctgcaattcaactggaaagccgacgtagtcgagagctggattggggaaaaggagaactccttaaagaccgacgactacggacgcgacctcagctctgttcagacactcctcacaaagcaggagacctttgacgcagggttgcaggccttccagcaggaaggaatagctaacatcaccgctcttaaagatcagctgcttgccgctaagcacgttcagtcgaaagcgatcgaggcccggcatgcctccctcatgaaacggtggtctcaattactggcgaactccgcggcccgaaagaagaaactgcttgaggcccagtcacattttaggaaagtcgaggatctgttccttacattcgcaaagaaagccagtgccttcaacagttggttcgagaatgcagaggaggacctgaccgaccccgttagatgtaactccctagaggaaattaaagctcttagagaagcacatgatgcatttcgttctagcctgtctagtgctcaggctgattttaatcagctggccgagctggacaggcagataaagtcctttagagttgcttcaaacccatacacctggtttacaatggaagccctggaagagacttggagaaatctgcagaagatcatcaaagagcgcgaactcgaattgcagaaggagcaaaggaggcaagaagagaacgataaactgcggcaggagttcgctcagcatgccaatgccttccaccagtggatccaggagacaaggacataccttttggacggctcctgcatggtcgaggagagtggcacccttgaatctcaactcgaagccaccaaacggaaacaccaggagatcagagcaatgagatcccagttgaaaaagattgaagatttgggggcggctatggaagaggcactgattctggataataaatacactgagcacagcaccgtcggattggcacagcagtgggatcagctggaccaattaggcatgcggatgcagcacaaccttgaacagcagatccaggcacggaacacgacaggtgtcacagaagaggccctcaaagagttttctatgatgttcaaacacttcgacaaagacaaatccggtagacttaatcatcaagaattcaaatcttgtctgcggtccctgggctacgatcttcctatggttgaggaaggcgagccagatcctgaattcgaagctatactcgatacagtggacccgaatcgcgacggccatgtgtccctgcaagaatatatggcattcatgatcagccgcgaaacagagaatgtgaagagttcagaggagatcgaaagcgcctttagggctttgtcatctgagggtaagccttacgtcaccaaagaggaactgtaccaaaacctgacgcgggagcaggccgattactgcgtgtcacacatgaagccatacgtggacgggaagggacgtgaactgccaaccgctttcgactatgtggaatttacccggagcctgttcgtaaactag

SEQ ID NO: 135895 - DNA, 7434 bp, synthetic construct
  misc_feature 1..7434: note = Description of Artificial Sequence: Synthetic coding sequence
  source 1..7434: mol_type = other DNA
atggacccctcaggggtgaaagtcctcgagaccgccgaggacattcaggaacgaagacagcaggttctcgacaggtaccaccgctttaaggaactgagcactctaagacgacagaaactggaggatagctaccggtttcagtttttccagagagatgccgaagagctagagaagtggatccaggaaaagctgcagatcgcatctgacgaaaattacaaggatcccacaaatctgcaaggcaaacttcagaagcatcaagccttcgaagcagaggtgcaagcaaactctggcgcaatcgtgaagttggatgaaaccggcaatcttatgatctctgagggtcacttcgcatcagagaccatccgaacccgtctcatggagctgcatcgccagtgggagctgctcctcgagaaaatgcgcgagaaggggatcaagctcctgcaggcccagaaactcgtgcagtaccttcgcgagtgcgaagatgtaatggactggatcaatgacaaggaggcgatagtgaccagcgaggagctcggacaggatctggaacatgtggaggtcttgcagaaaaagttcgaagagtttcagactgacatggcagctcatgaagaaagggtgaacgaggtgaaccagtttgccgccaagcttatccaggaacagcaccccgaagaggagctgataaagactaaacaggacgaagtcaacgctgcctggcagcggctgaaggggttggcccttcagaggcaggggaaactgtttggggcagctgaggttcagagatttaaccgggacgttgacgaaacaatctcctggataaaggaaaaagaacagctgatggcctccgacgattttggccgagatttggcgtccgtgcaagcccttcttaggaaacacgagggacttgaacgcgatctggccgctctggaggataaagtgaaagcactctgcgccgaggctgaccggctccaacagtcgcaccctctttccgcaacacaaattcaagtcaaacgtgaagagttaatcaccaattgggagcagatccggacactggcggccgaaaggcacgcccgcctgaacgattcttacaggctccagcgtttcctggctgattttcgggatctgactagctgggttactgaaatgaaggccctcattaacgcagacgagctggcgtcggacgtggcaggcgccgaagcactgctagatagacatcaggagcacaagggcgaaatcgatgcgcacgaagatagctttaaatccgcggacgagtctgggcaagctctccttgccgcaggccactatgcctccgatgaggtcagagagaagctgaccgtgttgagtgaggagcgggctgcactgctcgagctctgggaattgcggcggcagcagtacgagcagtgcatggacttacagctattttaccgtgacactgagcaggtggataactggatgagcaagcaggaagctttcctcctgaatgaggacctgggggattctctagactccgttgaggcacttctcaagaagcatgaggactttgagaagagtctgagcgctcaggaggaaaagatcaccgccctggacgagtttgcaaccaagctgattcagaataatcactatgccatggaggatgtggcaactcgaagagatgcactgctcagcaggcggaatgctttacacgaacgcgcgatgagacgtagagcgcaactggccgacagctttcatctgcagcagttttttcgggatagtgacgaattgaaaagctgggttaacgaaaagatgaagacagccactgatgaggcttataaagatcctagcaacttacagggaaaagtccagaaacatcaggccttcgaggctgagctctccgccaatcagagccgcatcgatgcactcgaaaaagcaggccagaaacttatcgatgttaatcactatgctaaggacgaagttgcagcacgcatgaatgaggtaattagtctatggaagaagttactcgaagcaacagaactgaaagggattaagctgagggaagcaaatcaacagcagcagtttaatcgcaatgttgaggatatcgagttgtggctttatgaagtcgagggccacttagccagcgacgactacggaaaggacttgactaacgtccagaatctgcaaaagaaacacgccctgctggaggctgatgtcgccgcccaccaggatagaatcgatggaatcacaatccaggcacggcagttccaagacgctggtcatttcgacgccgagaatattaaaaagaaacaggaggcccttgtggcccggtacgaagccctaaaggagcccatggttgcccgaaagcagaaattggccgatagcctgagattgcagcaattgttccgcgacgttgaagacgaagagacttggatacgagagaaggaacccatcgctgcctcaacaaatcggggcaaagatctgatcggtgtacagaatctgctgaaaaagcaccaggccctgcaagcggaaatcgcaggtcacgaaccacgtattaaagccgtaacacaaaagggaaatgccatggtagaggagggccactttgccgccgaggatgtgaaagcgaagctgcatgagctcaatcagaaatgggaggctttgaaagccaaggcgagccaacgcaggcaagacctggaggatagcttgcaggcccagcagtactttgccgatgctaatgaagcagagagctggatgagggagaaagaacctatagtaggaagcacagattacggcaaagacgaggactccgctgaggccctgctcaaaaaacacgaggcactcatgagcgatctgagtgcgtatggaagctcaatccaggctctgcgtgagcaggcccagtcttgccgacagcaggtcgcacctacagacgatgaaaccggcaaggaactcgtgctcgccctatatgactaccaggaaaagtcgccacgggaggtcacaatgaagaaaggcgatatcctgactctgctcaactcgacaaataaagactggtggaaggtagaagtgaatgatcgtcagggcttcgtgccagcagcttacgtcaaaaagctagaccctgcacagagtgctagtagggagaacctgctggaagagcagggaagtattgccttaaggcaggagcagattgacaatcaaaccaggatcaccaaagaggcgggatctgtctccttgcgaatgaagcaggtggaagaactctatcactcactgctggagttaggggagaaacgaaagggtatgctcgaaaaatcttgtaagaagttcatgctgtttcgagaggccaacgaattacaacagtggatcaacgaaaaagaagctgcgctcacgtccgaagaggtcggcgcggacctagagcaggtggaggtgctgcagaagaaattcgatgatttccaaaaagacttgaaagctaacgagagcagactgaaagacatcaataaggtagcagaagacctggaaagtgaaggtctgatggccgaggaagtgcaggcagtgcaacaacaggaggtctacggaatgatgcctagggacgagacggacagcaagactgctagcccatggaaatccgcccgccttatggtgcacactgtggctacattcaactcaatcaaagagttgaacgaacgctggcgatcactccagcaactggctgaagaaagaagccaattactgggttccgcccacgaggtgcaacgcttccatagggacgcagatgaaaccaaggaatggatcgaggagaagaaccaggcccttaacactgacaattacggacacgacttggcttcggtccaggcactacagcggaagcatgaaggctttgaaagggatctagccgctctcggggacaaggtgaattctctgggagaaactgcagagcggctgatccagagccaccctgagtcggctgaagatcttcaagaaaagtgtacggagctcaatcaggcctggtcctctcttggcaagcgcgcagatcagcgcaaggctaagttgggagatagtcatgacctgcagcgttttctaagcgacttcagagatttgatgtcctggattaacggaatacgtggcctggtttcatcagatgaattagccaaggacgtcaccggcgctgaggctctgttggagcggcatcaggaacacagaaccgaaattgacgccagggccggcacgtttcaggccttcgagcagttcggccagcagcttttggctcatggccattatgcctcccctgaaattaagcagaagctagacattcttgaccaggagcgagcagatttggaaaaggcatgggtgcaaaggagaatgatgcttgatcagtgtctggagctccagctcttccatagggattgtgaacaggcggagaattggatggctgctcgggaggcattcttgaatacggaggataaaggagactccttggactcggttgaagcactaataaagaaacatgaagactttgataaggcaattaatgttcaagaggaaaagatcgccgctctgcaggcttttgcagaccagctgatcgcagctggccattacgccaagggtgatataagttcccgcaggaatgaggtactggatcggtggagaaggctgaaggcacagatgatcgaaaaacggagtaagctgggcgagtcccaaaccctgcagcagttttctagggacgtcgacgagattgaggcctggatatctgaaaagctccaaacagcctctgacgagtcgtacaaggatccaacaaatatacagctgtccaaactcctcagcaagcatcaaaagcaccaggctttcgaagcggagctgcacgccaacgctgatcgaatcaggggagtgattgatatggggaattcactcatcgagaggggcgcatgtgccgggagcgaggatgcagtaaaagcccggttagccgcactcgctgaccaatggcaattcttagtccagaagagcgccgaaaaaagccaaaagctgaaggaggccaataaacagcagaacttcaacacaggcatcaaagatttcgatttctggctgagcgaggtggaagcccttctggccagtgaggactatggaaaagatctcgctagcgtgaacaatctgctaaaaaagcaccagctgctggaggccgatattagcgcccatgaggacagattgaaggaccttaattcgcaggcggatagcctcatgacgagctccgcatttgacactagccaggttaaagacaagagggatactataaacgggagattccagaaaatcaaaagcatggccgcatctcgtagggcaaaactaaacgaatcccaccggcttcaccagtttttccgcgacatggatgacgaggaatcctggatcaaagagaaaaagcttcttgtgggcagcgaggactacggccgggatcttacgggcgtgcaaaatctgaggaagaagcataagaggctagaggccgagctggccgctcacgaacctgccattcagggtgtgctggacactggcaaaaagctgtccgacgacaacaccattggcaaggaggaaattcaacaaaggctcgcccagtttgtggagcactggaaggaattgaagcagttggctgccgctcgggggcagagactggaggaatcactcgagtatcagcagtttgtcgccaacgtggaggaagaggaagcctggatcaatgagaagatgaccctggtggcaagtgaggattacggcgatactctggcagctattcagggccttctgaaaaaacacgaagccttcgaaaccgatttcacggtgcacaaagaccgggtgaacgacgtctgtacgaacgggcaggatctcatcaagaagaataaccaccatgaagaaaatatttctagcaagatgaagggcctcaacggaaaagtgagcgaccttgaaaaagctgctgctcagagaaaggcaaagctggatgagaactccgcatttctgcaatttaattggaaagcggacgtggttgaatcatggattggggagaaagagaattctctcaaaaccgacgattacggccgagacctgtcttctgtgcagaccctgctgactaagcaggagaccttcgacgcgggcctacaggcgttccaacaggagggaatagcaaatatcacagccctcaaagaccagttactggcggccaaacacgtccagtccaaggctattgaagcgcgtcacgcttcactgatgaaaagatggtcccagttgcttgccaactcggccgcccggaagaaaaagctcctggaagctcagtcccatttccgcaaggtggaggacctcttcctcacctttgcgaaaaaggcttccgcctttaattcttggttcgaaaatgccgaagaagacctgaccgatccagtgagatgcaactctcttgaggagattaaggccttacgcgaagctcatgatgctttccgatccagtctctctagcgctcaggctgacttcaaccagctggccgagcttgataggcaaataaagagcttccgagtagcttccaacccttacacctggttcacaatggaggccctagaagagacttggcgcaatctccagaagatcatcaaggaacgggaactcgagctgcaaaaagagcaacgcagacaggaggaaaacgataagctaagacaggaatttgctcagcatgccaacgcatttcaccagtggatacaggaaacgcgaacctacttgctcgacggcagctgtatggttgaagagagcgggacgctcgagagtcaacttgaggccacaaagcggaaacatcaggagatcagagccatgaggtcccagttaaaaaaaatcgaagacctcggcgcagccatggaagaggccctgatcctggacaataagtacactgagcattctactgtcggactcgcacagcagtgggaccagctggatcagctgggcatgagaatgcagcacaatctcgaacagcagattcaagcgcgcaacaccactggggtgaccgaagaagccttaaaagaattttctatgatgtttaagcatttcgacaaggacaaatccggtcggttaaatcaccaggagttcaagagttgcctaaggagccttggatatgatctgccaatggtagaagaaggtgaaccggacccagagtttgaggcgatcctcgacacggtggaccccaaccgcgacggccatgtgagtctgcaggagtatatggctttcatgatctccagggagaccgaaaatgtgaaaagctcagaggaaatcgaaagtgcttttcgtgctttatcttccgaaggtaaaccatacgtgactaaggaggagctctaccaaaacctgacacgggagcaggccgactattgcgtcagccacatgaagccttacgtggatggcaagggacgggaactccccacggcatttgattacgtcgagttcaccagaagtctgttcgtaaactag

SEQ ID NO: 135896 - DNA, 3444 bp, synthetic construct
  misc_feature 1..3444: note = Description of Artificial Sequence: Synthetic coding sequence
  source 1..3444: mol_type = other DNA
atggaaaacaatcgggacaaagtactctcaccagtggattctgggaacaagcttgtggcagaggggaatctgtattccgacaaaatcaaggaaaaggtgcagttaatagaggaccggcacagaaaaaacaatgagaaggcccaggaagcctcggtgttgcttagagataatctcgagcttcagaacttccttcagaactgccaggagctgactctatggatcaatgacaagctgctgacaagccaagatgtatcatacgacgaggccagaaatctccacaacaaatggttgaagcaccaggctttcgtggctgaactcgcatcccatgaaggttggctggagaatatcgacgccgaaggtaagcagctgatggacgaaaagccacagtttacagctctggtatcacagaagctcgaggcattgcaccgtttatgggatgagcttcaggccacaaccaaggagaaaactcagcacctttcagcggccaggtcatctgatctgcgacttcagacgcatgcagacctgaacaaatggatctcggccatggaagaccagcttaggagcgacgatcccggtaaagatctgaccagcgtgaatagaatgctggccaagctcaagcgggtggaagatcaggtgaacgtgcgaaaagaggaactgggggagttattcgcgcaagtaccgagtatgggtgaggaaggcggagacgcagacctatccatcgagaagcgatttcttgacttgctggaaccattgggaaggagaaagaaacagctagagagctctcgtgccaaattacagatctctagggatctcgaggacgaaactttgtgggtagaagaaagattgcctctggctcaatctgccgactacggtactaacttgcagactgtacaactctttatgaagaagaaccagaccctgcagaacgaaatcctggggcatactccgcgagttgaagacgtcttgcagaggggccagcagctggtggaagccgccgaaattgactgccaggatctggaggagagactcggccaccttcagtcgtcctgggacaggctacgagaggccgcggcaggacgcctacaacgcttaagagacgccaacgaagcccagcagtattatcttgacgccgacgaagccgaagcctggattggtgaacaggagctgtacgtcataagtgacgagatccccaaggacgaggaaggcgccatcgtgatgctcaagcgccacctgcgccagcagcgtgccgtcgaagactacgggagaaatattaaacaattggctagtagagctcagggcctcctgtcagctggccatcctgaaggcgagcagatcatacggctacaggggcaggttgacaaacattatgcagggcttaaggacgttgcagaagaaaggaagcgaaaactggagaacatgtaccacttgtttcagctgaagcgggaaacagatgacctagagcagtggatcagcgagaaagaactggtggcctccagtccagaaatgggccaagatttcgatcacgtcacccttctgcgcgacaagtttagggattttgctcgagagacaggcgcaattggccaagaacgcgtggataatgtgaacgcattcattgagaggcttatcgacgccggacattccgaagcagctaccatcgccgagtggaaagacggtctcaacgaaatgtgggctgatctccttgaattaattgacacccgcatgcagctcctggccgccagctacgatttgcatcgatacttctacaccggcgctgagattctcggcctgatcgacgagaaacatagagagctgcctgaggatgtcggcctggacgcatcaacagcagagagtttccacagggtccataccgctttcgagagagaattacatcttctgggggtccaggttcaacaatttcaggacgttgccactaggctccagactgcctatgctggcgagaaggccgaggccatccagaacaaggagcaagaggtgagtgcagcctggcaagccttgctggatgcttgcgcagggagaaggacacagcttgtagatacggcagacaaattcagatttttcagcatggccagagacttactttcttggatggagagcattatccggcagattgagacacaggagcgaccccgggatgtgagctcagtggaacttctaatgaagtatcatcagggaattaacgctgagattgagacccggagcaagaatttcagtgcttgtctagagcttggggagagtttgttacaaaggcagcatcaggcaagcgaggaaataagggagaagttgcagcaggtgatgtctcgaagaaaagagatgaacgaaaagtgggaggctaggtgggaaaggctgaggatgctcctggaggtatgccaattctcacgggacgctagtgttgctgaggcatggcttatagcccaggagccctacctagccagtggcgacttcgggcataccgtggacagcgtggagaagctgatcaaacgccacgaagccttcgagaagtcgactgctagctgggccgaacgtttcgccgcacttgagaaaccaaccaccctggagcttaaagaacgccagatagccgagagacccgccgaggagacaggtccacaagaagaagaaggggaaactgccggcgaagcacccgtgagccaccacgccgcaacagagcgtacatctccgggcgaggaagaaggtacatggccccagaacctccaacagccccctccaccaggacagcacaaagatggtcaaaagtctacgggcgacgagagacccactactgagccactgttcaaagtgctggatacccctctctccgagggcgacgaacctgctacattgccagcgccccgggatcacgggcagtctgtacagatggagggttatctgggccgcaaacatgatctcgagggtccaaacaaaaaagcatccaatagtaagggtgaggagggcgaggaaaggcgggagacggaggaggaggatgaagaagaagaggagacagagtccgtggccgtggagatgcaacagcacgcatctcacgtctcttggaacaatctgtactgtgtgttgaggaactcagagttgaccttctataaagacgcaaagaacctcgctcttggaatgccttatcatggagaggaaccactcgccctccgacatgcaatatgcgagattgccgccaattacaaaaaaaaaaagcacgtgttcaaacttcgactgagcaacgggagtgaatggctttttcacgggaaagacgaggaggagatgctctcatggctccagggcgtcagcaccgctattaatgagtcacagagtatacgggttaaagcccagtcactcccgttgccaagtctctctggacccgatgcctcacttgggaaaaaggacaaggagaaacgattttctttctttccaaagaagaaatag

SEQ ID NO: 135897 - DNA, 6321 bp, synthetic construct
  misc_feature 1..6321: note = Description of Artificial Sequence: Synthetic coding sequence
  source 1..6321: mol_type = other DNA
atgacttcagcaacagagttcgagaacgtgggcaaccaaccaccatactcaagaattaatgcccgctgggatgcgcccgacgacgaacttgacaatgataactccagcgcccgattgttcgaacggtctcggattaaagctcttgcggatgagcgggaggtggttcagaagaagacttttacgaaatgggtcaatagtcacttggcgagagtctcctgtaggattacagacttgtacaaggacttacgcgatggtcggatgcttattaagcttcttgaggttctctctggggaaatgctgccaaagcctactaaaggcaagatgaggatccactgtctggagaacgttgacaaagccctacagtttctgaaggaacaacgagttcatctggaaaacatggggtcccacgatattgtggatggaaatcataggcttgttctgggtttgatttggacaattattctgcgatttcaaatacaagatatagtcgttcaaacacaagagggcagggaaacccggtcggctaaggatgctttactgctttggtgtcagatgaagacagccggttacccacacgtgaacgtaacaaacttcacaagcagttggaaggatggcctggccttcaatgcactgatccataaacatagacctgacctaatagacttcgataagctcaaagacagcaatgcgagacacaacctcgagcatgccttcaatgtggctgaacgccaactcggtattataccgctcctcgaccctgaggacgtgtttacagagaatcctgatgaaaaaagtattattacttatgttgtggcattctaccactatttctccaaaatgaaagtgctggctgtagagggcaaacgggtagggaaggtgatcgaccatgcaatcgagactgaaaaaatgatagagaaatattcaggattagcatccgaccttctgacctggatcgagcagaccattacggttctgaattctcgtaagttcgccaatagtttaaccggcgtgcaacagcagttgcaggctttttccacctacagaacagtagagaagccgccaaagttccaagagaaggggaacctggaagtgcttctgttcaccattcagtcccgaatgcgtgcaaacaatcagaaagtatatactcctcacgatggcaagttagtcagcgacatcaatcgcgcatgggaatctctggaggaggcggaatacagaagagaactggcattgcggaatgaattgattcggcaagagaaactcgagcagcttgccagaagattcgacaggaaagccgctatgcgtgagacgtggctgagcgagaatcagcgtcttgtagcccaagacaatttcggctatgacctggccgctgttgaagcagccaagaagaaacatgaggcgatcgaaacagacaccgctgcatacgaggaacgcgtgcgagctctcgaggatcttgcgcaggaactggaaaaggaaaattatcatgaccagaagcgcatcactgctaggaaagacaacatcctgcgcctgtggtcctacttgcaagagctcctacagtctcgccggcaaaggctggagacgaccttagcactacagaagctgtttcaagacatgctgcactccatcgactggatggatgaaatcaaggcacacctcttatccgccgaatttgggaaacacttgctcgaggtggaggacctgctccagaaacacaagctgatggaagccgatattgcaatacagggagacaaagtgaaagccatcaccgctgcaactctgaaattcacggaagggaaaggataccagccatgtgaccctcaggtgatacaagacagaatctcacacctcgagcagtgttttgaggagctcagcaatatggccgctggccggaaagcacagctcgagcagtcgaaaagactttggaagttcttctgggagatggacgaggcagagtcatggatcaaggaaaaagaacaaatttactcttctctcgactatgggaaagatctgactagcgtgctgatcttgcaaaggaaacacaaggccttcgaagatgagttacgaggcttggatgcccatctagagcagatctttcaagaggctcacggtatggtggctcggaagcagtttggacaccctcagatcgaggcccgcattaaggaagtttccgcacagtgggaccaactgaaagatctggccgctttttgcaaaaagaaccttcaggacgctgagaacttttttcaatttcagggggacgccgatgatctgaaggcatggctgcaggacgcacacaggctgctgtctggcgaagatgtgggtcaagacgagggcgccacgcgcgccctgggcaagaaacacaaagatttcctggaggagctggaagaaagtcgtggagtaatggagcatttggaacagcaagcacagggtttccctgaggaattcagagacagtcccgatgtgacacataggctgcaggcgctccgcgagctttaccagcaggtcgtagcacaggccgatctgagacaacagcgtctgcaggaagctcttgatctgtatactgtcttcggtgaaactgatgcatgtgagctgtggatgggagaaaaagagaaatggctcgccgaaatggaaatgccagacacactagaagatctggaagtcgtacagcacaggttcgacatcctggaccaggagatgaaaactttaatgacgcagattgacggagtgaatctcgcggccaatagcctggtggagtccggccaccctaggtctagagaagtgaaacaataccaggatcaccttaacactcggtggcaggcgttccagaccctcgtcagcgagcggagagaggccgtggattccgcgctgagggtccataattactgtgtcgactgcgaggagacatccaagtggattacagataagaccaaagtggtggagtcaaccaaggacctggggagggatctcgctggaattattgccattcaaaggaagttgtctgggctggagcgcgacgtcgccgctatccaagcaagggttgatgcacttgagagggagtcccagcagcttatggactcccaccccgagcaaaaggaggacataggacagagacaaaagcacttggaggaattgtggcagggcctgcaacagtccctgcaaggacaggaggatctcctcggggaggtctcacaactgcaggcctttttacaggatcttgacgacttccaggcctggctgagcatcacgcaaaaagccgtcgcttcagaggacatgccggaatcattaccggaggctgaacaacttctgcagcaacacgccggcatcaaggatgagattgacgggcatcaggactcctaccagcgggtgaaggagagcggggagaaagtcatccagggacagacggaccccgagtacctgttacttggacagagactggagggtctagacacagggtggaatgccctcggacggatgtgggagagtagaagccacactctggctcagtgtttaggattccaggaattccagaaggatgccaaacaggccgaagccatcctcagcaatcaggaatataccctggctcacttggagccacctgacagcctggaggccgcagaagctgggatccgaaaattcgaggacttcctaggaagcatggaaaacaatcgagacaaggttctttctcccgttgattctggaaacaaactagtggcagagggaaacctttactcagataagattaaagaaaaagtccagctgatcgaggaccgccacagaaaaaacaatgaaaaggcacaggaagccagcgtactgctcagagataacctggaattacagaacttcctgcagaattgccaggaactaaccctgtggattaacgataagcttcttacgtctcaagacgtgagttacgacgaggcacggaacctccacaataaatggctgaaacatcaggccttcgtagcggagctggcgtcccatgaaggatggctggaaaacatcgatgcggagggtaaacagcttatggacgaaaagccccagttcaccgccttggtgtctcagaagttagaagccctccacaggttgtgggatgaactgcaagctacaacaaaagagaaaacacagcatctgagcgctgccagaagcagcgacctgaggctccagacacacgctgacctgaacaaatggatttccgcaatggaggaccagctgcggtctgatgaccccgggaaagatttaacttccgtgaacagaatgctggctaaacttaaacgggttgaggaccaggtgaacgtaagaaaggaggaacttggggagttattcgcccaagttccctccatgggcgaagaaggaggtgatgccgacctgagcatcgaaaagcgttttctcgatctcctagagcctctgggccgccgcaagaaacagctcgagtcttcaagggcaaaattacagatcagccgagatctagaagacgagacactttgggtcgaggaacgattgcccctggcccagtccgctgactatgggaccaatttgcaaactgtgcagctgttcatgaagaaaaaccagactctgcaaaatgaaatcttagggcacactccacgtgtggaggacgtcttacagcgagggcagcaattagtggaggccgcagagatagactgccaggatctcgaagagcgactaggccacctgcagtcaagctgggacagacttcgagaggccgcagctggaaggctgcagcgactccgggacgcgaacgaggcccagcaatattatctggatgcagacgaagcagaagcctggattggggaacaggaactctacgtgatttccgacgagatccctaaagacgaagaaggcgctatcgtaatgctgaaacgacacctccgccagcagcgtgcagtagaggactacgggcggaacattaaacagttggcttctcgggctcaaggacttttatctgcagggcaccccgaaggggagcagatcatccgtcttcaaggacaggtggacaagcactacgctggcctgaaggatgtggccgaagagcgaaaacgaaaacttgaaaacatgtatcatctgttccagttaaaacgggaaactgacgacctggagcaatggattagtgaaaaggaacttgtggccagttcacccgaaatggggcaggactttgaccacgttaccctgctccgcgataaatttagggatttcgcccgagaaactggcgccataggccaggagagagtagataacgtgaatgcatttatcgagaggctcatcgacgccggccattccgaggccgctacgatcgcagagtggaaagacgggcttaacgaaatgtgggccgacctgcttgagctcattgacaccagaatgcagctgctggctgcctcatacgacctgcatcggtatttctataccggtgcggaaattctggggctcatagatgaaaaacatagagagcttccggaggacgtgggcctcgatgcttctactgctgaatcgtttcatcgcgttcatactgccttcgaaagagagctacacctgttaggtgttcaggtacaacagttccaggacgtggcgacccgactccagactgcctatgcaggcgagaaagcggaggctatacagaataaggagcaggaggtctcagcagcttggcaggcccttttggacgcatgtgcaggcagacggacgcagctagtcgatactgctgacaagtttcgcttcttctccatggccagagatctgctttcctggatggagtcaatcatccgccaaatcgaaacccaagagcggccacgtgacgtgtcttccgttgagctgctcatgaagtatcaccagggcatcaatgctgagattgagacacgctccaagaactttagtgcctgtctagagctgggcgagtctctgctccagagacagcaccaggctagcgaagagatccgtgagaagttacagcaggtgatgagccggcgcaaggaaatgaatgagaagtgggaggcaaggtgggaacggctccgaatgctgctggaagtatgccagtttagtagagatgccagtgtggcggaggcttggttaattgcacaagagccatatttagcttctggggacttcggccatacagtggacagcgtcgagaagctaatcaagcggcacgaggcattcgagaaatcaaccgcatcctgggccgagcgcttcgctgctttggagaagccaaccaccgccagccgaggagggaggcgggacagccgggggggctcaagttttccgccgtgtggtcatagagagaatgttcctgggcagagtttggtgtcatttgtgtag

SEQ ID NO: 135898 - DNA, 6414 bp, synthetic construct
  misc_feature 1..6414: note = Description of Artificial Sequence: Synthetic coding sequence
  source 1..6414: mol_type = other DNA
atgacgagcgccacagagttcgagaatgtggggaatcagccgccatactctagaattaatgcgcggtgggatgctcccgatgacgagctagacaacgacaatagtagcgcacggctgttcgaaagaagccgaataaaggctctcgcagatgaacgcgaagttgtccaaaagaaaaccttcaccaagtgggtgaactcgcatctggctcgcgtatcatgtcgcattacagatctctacaaggatttacgcgatggaaggatgctgattaagctacttgaagtactctccggtgaaatgttacccaagccgactaagggaaaaatgaggatccattgcttagagaacgtagataaagctctgcagtttctgaaggagcagagggtgcatcttgaaaatatggggtctcatgacattgtagatggaaaccatcgcctggtcctgggattgatctggaccatcatattacgattccaaattcaggacatcgtggttcagacacaggaggggcgagagacgaggtccgccaaagatgctcttttactttggtgtcagatgaagaccgccggatacccacacgtgaatgtgacgaattttacctcttcctggaaggacggcctcgcgttcaatgcgttgatccataagcaccgccccgacctcatagacttcgacaaattaaaggattcaaacgcccgccataatctagaacatgcgtttaacgtcgccgagcgccagttgggcattatccccttattggatcccgaagacgtgtttaccgagaaccctgatgaaaagagcatcattacttacgtggtcgctttctaccactacttcagtaaaatgaaagtgctcgctgtagagggaaaacgggtgggcaaggtgatcgatcacgctattgaaacagagaaaatgatcgagaagtactcaggccttgctagcgatctgctcacgtggatcgaacaaaccattaccgttctcaacagcagaaaatttgcaaacagcttgactggagtgcagcagcaactgcaggctttctcaacctaccggacagttgaaaagcccccaaagttccaggagaagggcaacttagaggtgctactcttcactattcagtcacggatgagagccaataaccaaaaggtgtacaccccacacgacgggaaactcgttagcgatataaatagagcgtgggagagtttggaagaggccgagtacagacgcgaactggccctgcggaacgagctgattcgacaggagaaactggaacagctcgctcggcggtttgaccgcaaggcggctatgagggagacttggctcagcgagaaccagagactcgttgcccaggacaactttggctatgacttagccgccgtggaggccgcaaagaagaaacacgaagctatcgagacggacaccgccgcctatgaagaacgggttcgtgccttggaagatctcgctcaggaattggaaaaggaaaactaccacgatcagaagcgcatcaccgctcgcaaggataatattctcaggctatggagttacctgcaggaattgcttcagtcaaggaggcaaaggcttgagaccaccttggcgctgcagaagctgttccaagatatgctgcactcaatcgactggatggacgagataaaggcccatcttttatccgccgagtttggcaagcatcttctagaagttgaggaccttctacagaaacataaacttatggaggcggacatagccatccagggggataaagttaaggccatcacggccgctactcttaaatttactgaggggaagggctatcaaccttgtgacccacaggtaatccaggaccggatcagccatctggagcaatgctttgaggagttatcaaacatggcagccggaagaaaagcccagcttgaacagagcaaacgcttgtggaaatttttctgggagatggacgaagccgaatcttggattaaggaaaaggaacaaatctatagcagcttggattacggcaaagacctgacatcagtgcttattctgcagagaaaacataaggcatttgaggacgagctgagaggattggacgctcaccttgaacaaatcttccaggaggcacatgggatggtggctaggaagcaattcggccaccctcaaatcgaagctcgcattaaggaagtgtccgcccagtgggatcagctgaaggatctggcggcattctgtaaaaaaaatctgcaggatgcggagaatttttttcagtttcagggcgatgctgacgatctaaaagcatggcttcaagatgcccacaggcttctctccggcgaggacgtaggacaggatgagggcgctactagggcactcgggaaaaaacacaaggactttctggaagagttggaagaatccagaggagttatggaacatctggagcaacaagcccaggggttccctgaagaatttcgcgactcgccagacgtgacacacagactgcaggccctacgggagctctaccaacaagtagtcgcacaagccgacctccggcagcagcggctgcaggaagcgctggacctttacaccgtttttggtgaaaccgatgcctgcgagctttggatgggcgaaaaagaaaagtggctagctgaaatggagatgcctgacacactcgaagatctggaagtggtgcagcaccgctttgatatcctcgatcaggagatgaaaaccctgatgacccagattgatggtgtgaatcttgcagctaacagtctcgttgagtcgggtcatccaaggagccgagaggttaagcagtatcaagaccacctgaataccagatggcaggcattccagactttggttagcgagcggcgggaggccgtggacagcgcactcagagtacacaactattgcgtggattgcgaggagacatccaaatggatcaccgacaaaaccaaagtggtcgagtctactaaagacctcggtagagacttggccggcattatcgccatacagcgcaagctcagtggtttggaaagggacgtggccgctatacaagcccgtgtcgatgcacttgagcgggagagccagcaattaatggattctcaccctgagcagaaggaagacattggtcagaggcaaaaacatctcgaggagctgtggcaaggtctccagcagtctttacaaggacaggaggacttactgggggaagtctctcaactccaggcatttctccaggacttagatgatttccaggcttggctgtcaattacacaaaaggctgtagcttcagaggatatgcctgagtccctcccagaagctgagcagctcttgcaacaacacgcagggataaaagacgagattgatgggcaccaagacagttaccagagagtaaaggagagcggagaaaaagtgatccaggggcagacagacccagagtacctcttgttaggccagagattagagggcttggatacaggctggaacgccctgggccgcatgtgggagagccggtctcacacactcgcacagtgtctgggtttccaggagtttcaaaaggatgccaaacaagcagaggccatcctgtctaaccaagagtatacactggctcatctggaaccccccgactcactagaggcagccgaggcgggtatcaggaagttcgaggattttctgggctctatggagaacaatagggacaaagttctgagcccagtagattcgggaaataagctcgtggccgagggtaacctgtacagtgataaaattaaggagaaggtgcaactaattgaggatcgacaccgaaagaataacgaaaaggcgcaggaggcatctgtgctcctgcgcgacaacttggaactacagaatttcttgcaaaactgccaggagctgacactctggataaacgacaagcttctcacaagccaggatgtctcctatgacgaagctagaaatctgcacaataaatggctaaaacaccaggctttcgtcgctgagctagcttctcacgaaggatggctggagaacatagatgccgagggcaagcagctgatggatgaaaaaccccagttcaccgccctcgtgtcccagaagttggaggcactgcatcgtctgtgggatgaactacaagcgacaacaaaagagaagacacaacacctgtcagcagctcggagttccgatttgagattgcagactcatgcagatttaaacaagtggattagcgcgatggaagaccagctgaggtcagacgatcccgggaaagatctcaccagcgtgaatcggatgctggccaagttgaagcgagttgaagatcaggtaaatgtgaggaaggaggaactcggagaattattcgcccaggttccatctatgggtgaagagggcggggacgctgatctgtcaattgagaagcgctttctggatcttctcgagccccttgggaggcggaaaaagcaactggagtcctcccgggcaaagctgcagatcagccgagacctggaggacgagaccctgtgggtagaagagcgattaccactggcccagagcgccgactacggaacaaatcttcaaactgtgcaactgttcatgaagaaaaatcagacactgcaaaacgagatcctcggacatacacctagggtggaagacgtgcttcaacgcgggcagcagctcgtcgaagccgctgaaatcgactgtcaagatcttgaggagcgattggggcacttgcagtcttcatgggacagattgcgggaggcagcagccgggcggttacagcggctccgggacgcaaacgaggctcagcagtactatctggacgctgacgaagccgaagcgtggatcggagagcaggaattgtacgtgatctcagacgagatccctaaagatgaggagggcgctattgtgatgctgaagcggcacttacgccaacagagggctgtggaggactacggtcgtaacattaagcagctggcctctagagcccaaggcctgctgagcgccggtcacccggagggcgagcagatcatccgcttgcagggacaggtagacaaacattacgccggcttaaaggacgtggcagaggaaaggaaaagaaaactcgaaaacatgtaccacctcttccaactcaagagggagacagacgatcttgagcagtggatttctgagaaagagctcgtggcttctagccccgagatgggtcaggatttcgatcatgtgactttattgagggacaaattccgcgacttcgccagagaaaccggagctatcggacaggagagggttgacaacgtcaatgccttcatagagcgcctaatcgacgcgggccacagtgaagccgcaacaattgccgagtggaaagacggcttaaacgagatgtgggctgacctactagaactgattgatacacgaatgcagctgctggcagcaagctacgacctgcatcgctatttttatactggcgcagagatactggggctgatcgatgagaagcatagggagctgccagaggatgtcggcctggacgcatccactgctgagtcattccatcgcgttcatacagctttcgagagggagttgcacctgctgggggtacaggtgcaacagttccaggatgtagctacccgacttcagaccgcttacgccggcgaaaaggccgaggcaatccagaacaaggaacaggaggtgtcagcagcctggcaggcattgctggatgcatgtgctggtaggcgaacccagctggtggatactgctgataagtttcggttcttcagcatggctcgggacttgctttcatggatggagagcatcatccggcaaatcgagacacaagagcgaccacgcgacgtgagctcagtggagctgttaatgaagtatcatcagggaataaatgccgagattgagacccgatcaaagaatttttctgcctgcctcgagctgggtgagtcactgctgcagcgccaacaccaagccagcgaagaaatccgggagaaactgcagcaggtgatgtctcgccggaaggaaatgaacgaaaaatgggaagcccgatgggaaaggcttagaatgttgctagaggtgtgtcagttttccagggatgccagcgttgccgaggcatggctgattgcacaagaaccatatttagcaagcggcgattttgggcatacagtcgactctgtggagaagctgatcaagcgtcatgaggctttcgagaagtctaccgccagctgggccgagcgttttgctgctcttgaaaagcctacgactctggaactgaaagagcgccagattgcagaacggccagctgaagagactggtccccaggaggaagagggagaaactgctggcgaggcaccagtctcacatcatgcagcaactgagaggacctctccagtttcactttggagtagactctcatcttcatgggaatctttacaaccagagccatctcatccctattag

SEQ ID NO: 135899 - DNA, 6987 bp, synthetic construct
  misc_feature 1..6987: note = Description of Artificial Sequence: Synthetic coding sequence
  source 1..6987: mol_type = other DNA
atgacctccgccacagagttcgaaaatgtgggcaatcagcctccttacagtagaatcaacgctaggtgggatgctccggatgacgaactggacaacgacaatagtagcgcaaggctcttcgagcggtcacgaattaaggcactggcagacgaacgagaggtggtgcagaaaaagacgttcacgaaatgggtcaattctcacttagctcgggttagctgcaggatcaccgacctgtacaaggatctgcgcgacggcagaatgttgatcaaattacttgaagtgttaagtggcgagatgttaccaaaaccaactaagggcaagatgaggattcactgtctcgaaaacgtggacaaggctttacagttcctcaaggagcaacgcgtgcacctcgaaaacatggggagccatgacatcgttgatggcaaccatagactcgtgctgggcctcatctggactatcatcctccgcttccagattcaggacatagtcgttcagacccaagaaggcagggagaccagatcagccaaggacgccctgcttctatggtgccagatgaaaaccgccggatatcctcacgtgaatgttacgaattttacctcctcatggaaagacgggctggcctttaatgctctgatccacaagcatcgccctgacctgatcgattttgacaagctgaaagattctaatgctcggcataacctggagcacgccttcaacgtggccgagcgtcagcttggaattatcccactgcttgaccctgaagatgtattcactgagaaccctgatgagaagtcgattattacgtacgtggtggccttctaccactacttctcgaaaatgaaggtgttggccgtggaggggaagagggtgggaaaggttatcgaccatgcaatagaaacagagaaaatgatagaaaaatattctgggcttgcctctgatttgctgacatggatcgaacaaaccatcaccgtgctgaactctcggaagttcgccaacagccttactggagtccagcagcagttgcaggcgttcagcacttacaggactgtcgaaaaaccgcctaagtttcaggagaaaggtaatctggaagttttactgttcacaattcaatctcgcatgagagcaaacaaccaaaaagtgtacacgccgcacgacggtaagctggtctctgatattaaccgtgcctgggaaagtctggaggaggccgagtatagaagggaattagccctgaggaacgagcttatccgccaggagaaactcgagcaacttgcccgacgcttcgaccggaaggcagccatgcgggagacctggctgtcagagaaccaacggcttgttgctcaggacaactttggatacgatctcgcagccgtagaggcggccaagaagaaacacgaggctattgagacggacaccgccgcatacgaagagagagtacgcgctctagaagatctcgctcaggaactggaaaaagaaaactatcatgaccaaaagaggatcaccgcccgaaaagataatatcctgagattatggagttatctccaggagctcctgcagtccaggagacaacgactcgaaacaaccctcgctttacaaaagctcttccaggacatgttgcatagcatcgactggatggatgaaattaaggctcatcttctatctgcagaattcggaaaacacctcctggaggtcgaggaccttctccaaaagcacaagctgatggaggctgatatcgctatccaaggggacaaggtaaaagcaattacggctgccacgctgaagtttaccgaagggaagggctatcagccttgtgacccacaggtcatccaggatagaattagccacttagagcagtgctttgaggaactatcaaacatggccgccggtaggaaggcccagcttgagcagtcaaagcgtctctggaagtttttttgggaaatggatgaggccgaatcctggattaaagagaaagagcagatttactcatccctcgactatggcaaagatctgacaagcgttctaatactgcagagaaagcataaagcgttcgaagacgaactgagaggattggacgctcatctagagcagatttttcaggaggcccacggaatggtggctaggaaacagtttggacatccccagattgaagcccggattaaagaagtttccgcacaatgggaccagctcaaagatttggccgcattttgcaagaaaaacctccaagacgccgagaacttttttcagttccagggtgacgccgatgacctcaaggcctggcttcaagacgcccaccgtctgctgagcggcgaggatgttggacaggatgagggagctacgagggcgctaggaaaaaaacataaggatttccttgaggagctggaagagagcaggggggtcatggaacatctggaacagcaagcccaaggcttccctgaggaattccgcgactcacccgacgtgacccacaggctgcaagccctcagggaactgtaccaacaggttgtagctcaagcagaccttcgacagcagcgattacaggaggcgctggatctgtacacagttttcggggaaaccgatgcttgcgagttgtggatgggcgagaaagagaaatggctggccgaaatggagatgccagatacattagaggacctagaggtcgtacagcaccgttttgacatattggaccaagagatgaagacactgatgacccagatagacggcgttaatttggccgccaatagtctggtggagagcggccaccccaggagccgagaagttaagcaataccaggatcatcttaacaccaggtggcaggccttccaaaccctcgttagcgagcggcgtgaagctgttgactctgcccttcgagtgcacaactactgcgtagactgtgaggagactagcaaatggatcacagataaaaccaaagtggtcgaaagcaccaaggacctgggtcgcgacctggcagggatcattgccattcagcgcaaactatctggtctggaacgggatgtagctgccattcaggctagagttgatgcactggagcgggagagtcagcagctaatggactcacaccctgagcaaaaagaggacataggtcagcgtcagaagcacttagaggagctatggcagggtctacagcagtcccttcagggacaagaggacctcttgggtgaggtgagtcagctccaggcctttttgcaggatttagatgacttccaagcctggctctcaatcacccaaaaggctgtcgctagtgaagatatgccagagagtctcccagaggcagagcagcttctgcaacagcatgcgggcatcaaggacgagatcgacgggcaccaggatagctaccagcgggttaaggagagcggcgaaaaagtgatacaggggcaaaccgatcctgaatacctgttacttgggcagcgtctcgaagggctggacacaggatggaatgctttgggaagaatgtgggaatccaggtctcacaccctggcgcagtgtttggggtttcaggaatttcagaaagatgctaagcaggcagaggctattctcagcaatcaagagtatactctggcccacttggaaccacccgattctctcgaggccgctgaagctggcatccgcaagtttgaggatttcctcggatccatggagaataatagagataaagttctaagtccagttgacagcggcaacaagctggtggccgagggaaacctctactcggataagattaaggaaaaggtccagctaatcgaagatcgccatcggaagaacaacgaaaaggcacaggaagcaagtgtgcttcttcgggataatctggagttgcaaaacttcttacagaactgtcaagagcttactctctggatcaacgacaagctcctaacttcccaagacgtttcctatgacgaggccaggaatctccacaacaagtggttaaaacaccaagctttcgtcgcagagttagccagccacgaggggtggcttgaaaacatcgatgcggagggcaaacagctgatggatgagaaacctcagtttaccgccctggtgtctcagaagcttgaggccctgcatcgcctatgggacgaattgcaggctacaaccaaggaaaagacacagcatttgtcagcagcgcggtcgagtgacctgaggctgcagacgcacgccgacctcaataagtggatctccgcaatggaagaccagctgcggagtgacgaccccggtaaggacctgaccagcgttaaccggatgctcgctaagctgaagcgggtagaggatcaagtcaacgtcaggaaagaggagcttggtgaactttttgctcaggtgcccagcatgggggaggagggcggggatgcagaccttagtatcgaaaagagatttttggacctgctcgagccacttggtcggcgcaaaaaacagctggagagttcaagagcaaaactccagattagccgggaccttgaggatgagacactgtgggtcgaggagcgactccccctggcgcagtccgcagattacggtacaaatttacagaccgtacaattgttcatgaaaaaaaaccaaactctgcaaaacgaaatcttgggacacacgcctcgagtcgaggacgtcttacaacggggtcaacagttagtagaggcagcagaaattgactgccaggatcttgaggagagactgggccacctgcaatccagctgggatagactgcgagaagctgccgccgggcgtttacagcggctaagggacgccaacgaggctcagcagtattacctggacgccgacgaggccgaagcctggattggcgaacaggagctctacgtcatctctgacgaaattccaaaagatgaggagggggccatcgtgatgctaaagaggcatctgaggcagcagcgcgcggtggaagattacggcaggaatattaaacagctcgcctctcgcgcgcagggactgctgtctgccggtcatcccgaaggagagcagatcattagactgcagggccaagtggataagcactatgcaggcctcaaagatgtagctgaagaacgaaagcgaaaacttgaaaatatgtaccacctgttccagctcaagcgagagacggacgatctggagcagtggatatcagaaaaggagttggtagcgagttcccctgagatgggtcaggattttgatcacgttacgctgcttcgtgacaaatttagagacttcgcccgtgaaacaggagcaatagggcaggagagagttgataacgtgaacgcattcattgagcgcctaatcgacgctggacatagtgaagccgccactatcgctgaatggaaggatggactaaacgagatgtgggctgatcttctggagcttatcgacacccggatgcagttgctggccgccagctacgaccttcatcgctatttctatactggagcagaaatactgggcttgatcgatgagaagcatcgagaactcccagaagacgtgggtcttgacgcgtccaccgcagagagctttcatcgcgtgcacaccgcatttgaacgggagctgcatctgctgggcgtgcaggtacagcagtttcaggatgtggccaccaggcttcaaacagcttatgctggggaaaaagccgaagcaatccagaacaaggagcaggaggtcagtgctgcctggcaggccctcttggatgcctgtgccggtcggcggacacagctggttgacaccgccgacaagtttaggttctttagtatggcaagggacctacttagttggatggaatcaataatccggcagattgaaactcaggaacggccacgggacgtgtcttccgttgaactcttgatgaagtaccaccaagggattaacgcggagatcgagacaaggtctaaaaatttttcagcatgcctcgagcttggcgaatccctgttgcagagacaacatcaagcctcagaggagatccgggaaaagttacagcaggtaatgagtaggagaaaagagatgaacgaaaaatgggaggctagatgggaacgcctcagaatgctgctggaggtctgccagttttcacgggatgcaagcgtagcagaggcctggttaatcgcacaagagccataccttgcatcgggggatttcggccacacagtggattctgtggagaagcttattaaacgacacgaagccttcgaaaaaagcacagcctcctgggccgagcggttcgctgccctggagaagcctactactttggaattgaaagaacgccagatcgctgagcgaccagccgaggagactgggccacaggaggaggagggcgaaacagccggggaggcccctgtctcacatcacgccgctacagagcgaacctcacctggcgaggaggaggggacatggccacaaaacctgcagcagccccccccacccggccaacacaaggatggtcagaagtccacaggagacgaacgccccacgactgagccgctatttaaagttttggatacccctctttccgagggagacgagcctgcgaccctccctgcccctagggatcacggccagtctgttcagatggaaggttatctggggaggaagcacgacctggagggcccaaacaaaaaagcatcaaacagaagctggaacaatctgtattgcgtgttacgcaatagtgagctgacgttttataaggatgcgaagaatttggcactcggcatgccctatcacggcgaggaaccactcgctctacgccacgcaatctgcgaaatcgcagccaattataaaaaaaaaaagcacgtgttcaaattgagactgtccaacggctccgaatggctcttccatggaaaggacgaggaggagatgctctcctggctccagggagtgtcaacagccataaacgagtcacagtccattcgggtgaaagcgcaaagccttcctctgccttctcttagcggtcctgacgctagtctcggtaagaaggacaaggaaaaaagattcagctttttcccaaagaaaaagtag

SEQ ID NO: 135900 - DNA, 6999 bp, synthetic construct
  misc_feature 1..6999: note = Description of Artificial Sequence: Synthetic coding sequence
  source 1..6999: mol_type = other DNA
gaacccgctgacatgacgtctgcaaccgaattcgagaacgtgggcaaccagcccccttactcacgaataaacgccaggtgggacgcaccagatgacgagctggacaatgataatagctcagcaaggttattcgaaaggtctaggattaaagctctggccgacgagagggaagtggttcagaaaaagacatttacaaaatgggtaaactcacacctggctagggtcagctgtaggatcacggacctctacaaggatctgagagatggtcgtatgctgataaagcttctggaagtcctctccggtgaaatgctgcctaagcccactaaaggcaaaatgcgtattcattgcctggaaaatgtagacaaagccctgcagttcctgaaagagcagcgcgtccacctggagaacatgggctcccatgacatcgtagacggaaatcacaggctggtcctgggattgatctggacaattatcctgaggttccagatccaagacatcgtcgtgcagactcaggaagggcgggaaacacgcagcgctaaggatgccttgctgctctggtgtcagatgaaaactgctggctatcctcatgtcaatgtgacgaactttaccagtagctggaaggatgggctggcctttaatgcgctgatccacaagcatcggcccgacctgattgactttgacaaactgaaggatagtaatgctagacacaacttagagcatgctttcaacgtggcagaaaggcagctgggaataataccactgctcgaccctgaagatgtgttcaccgaaaatcctgatgaaaagtccatcattacctacgtggtggccttctaccactacttttcaaaaatgaaggttctggccgtggaaggtaagcgggtgggtaaagttatcgaccacgccatagaaacggaaaagatgatagaaaaatattccggcctggcgagcgatctgctaacgtggatagagcagaccattacagtcctcaatagccggaagtttgcaaactcccttactggcgtacaacagcaactgcaggcctttagtacgtaccgtacagttgagaagccacctaaattccaggaaaaaggaaacctggaagttctcctgtttaccatccagagcagaatgcgcgcaaacaaccaaaaggtatatacccctcacgatggcaagctggtaagcgatatcaaccgcgcttgggagtcattggaagaagcagaataccgccgagaactcgctctgcgcaacgaattgatcagacaggagaagctagaacagttggcccgaagatttgaccggaaagcagcgatgagagaaacatggctgagcgaaaatcaaagacttgtggcacaggacaactttgggtatgatctcgcagcagtggaggcggcaaaaaaaaagcacgaagctatagagacagacactgccgcgtacgaggagcgggtgagggcattagaggatttggctcaggaactggagaaggagaactatcatgatcagaagagaattactgccaggaaggacaatatattgcgcctatggtcatacctacaagaactcctgcaatcgcggcgacaacggctggaaactactctagcgttacagaagctctttcaggatatgttgcatagcatagattggatggacgaaattaaagctcacctgctttccgcagagttcgggaagcatttgctggaggtggaagatctgctgcagaagcataagttgatggaagctgacattgcaatccagggtgataaggtgaaagctatcaccgcagccactctgaagttcacagaaggcaagggttatcagccatgcgatccacaggtaatacaagaccgtatctcccatctggaacagtgcttcgaggagctgagcaatatggccgcggggagaaaagcacagctggaacagtctaagcgcttatggaagttcttctgggaaatggacgaggccgaaagttggatcaaagaaaaggaacagatttacagcagcctggattatggaaaggatttgactagcgtgctgattctccagcgcaaacataaggcatttgaggatgagctccgagggttggatgctcacctagagcagatattccaggaggcacacggaatggtcgctcgcaaacaattcggtcatccccaaattgaagccaggataaaagaggtgtccgcccagtgggaccaactgaaggatctggccgctttctgcaaaaaaaacttgcaggacgctgagaattttttccagttccaaggagatgcagatgatttgaaggcatggctgcaggacgcacatagattgctgagtggagaggatgtcggccaagatgagggcgcgacacgtgccctcggcaagaagcacaaggacttcctggaggagttggaagagtcgaggggggtaatggaacacttggagcaacaggcccaggggtttccagaggaattccgagatagcccggatgtcacacacagactccaggcactccgcgagttgtaccagcaggtagtggcccaggctgatctgaggcagcaacgactacaagaagccctggatctgtatacagtattcggtgagacagatgcctgcgagttatggatgggagaaaaggagaagtggcttgccgaaatggagatgcccgatactttggaggatctggaggtggtccagcacagattcgacatcctggaccaagaaatgaaaactctgatgacccagatcgatggagtgaacctggccgctaatagccttgtggagagtgggcacccccggagccgcgaggtgaagcagtatcaggatcacctgaatactcggtggcaggcctttcagacactggtcagtgaacgccgcgaggctgtggactcggccctgagggttcacaactattgtgtcgactgcgaagagaccagcaagtggattaccgataagacgaaggtggtggagtctaccaaggacctcgggcgcgacctggctggtatcatcgctattcagcggaagctatcggggcttgaacgagacgtggccgccatccaagcgcgagtggatgcactcgaacgggaaagtcagcagctgatggatagccatccagaacagaaggaggatattggacagaggcaaaaacatctggaggagctgtggcagggcctccagcagtcactccaaggccaggaggacttactgggcgaggtgtcccagcttcaggcttttctgcaggatcttgatgacttccaggcttggctgagtatcacacagaaggctgtggcaagtgaagacatgccagaatctcttcctgaagcagaacagctgctgcagcagcacgccggtatcaaggatgaaattgatgggcaccaagacagttatcaaagagtgaaggaatcgggcgaaaaggtcatccaggggcaaaccgaccctgagtatctactgttaggacagcgcctggagggacttgacaccgggtggaacgcacttggcaggatgtgggagtctcgctcccacaccttagcccagtgtctaggcttccaggagttccagaaggacgcgaagcaggcggaggccatcctcagcaaccaggaatacactcttgcacatctggagcctcctgattccctggaggctgctgaagctggtatacggaaattcgaagacttcttagggtcaatggagaacaatcgcgataaggtgctgtcaccggttgactccggaaacaagctggtcgccgagggaaacctgtactccgacaagataaaggagaaagtgcagctgatagaggacagacatcggaaaaataatgaaaaggcacaggaggcctcagttctgttacgcgacaacttagaactgcaaaactttttgcagaattgccaggaattgaccctgtggatcaatgataaactgctaaccagtcaggacgtgagttacgacgaagctcgtaatctacataacaaatggttgaagcatcaggcattcgtggctgaactggcgagtcatgagggttggctggaaaatatagacgccgaaggtaagcaattgatggatgagaagccgcagttcactgccctggtgtcccagaagctggaggcattacaccggctttgggacgaactacaagccacgaccaaggagaaaacacagcatctaagcgccgctcggtcaagcgacctgagacttcagacccatgcggatctgaataaatggatctcagccatggaggatcaactgaggagtgatgaccccgggaaagacttgaccagtgtcaaccgcatgcttgccaaactgaagcgggtcgaagaccaagtgaatgtcaggaaagaggagctaggggagcttttcgctcaggttccaagcatgggcgaagaggggggtgatgccgatctcagcatagagaagaggttcctggatctcttagagcctctcggaagaaggaagaagcagcttgaaagcagccgtgccaagctgcagatttcccgcgatttagaagacgaaactttgtgggtggaggagcgattaccgcttgcgcagagtgctgattatgggaccaatctgcaaactgtgcagctgtttatgaaaaaaaaccagacgctccagaacgagattctggggcacacgccacgcgtggaggacgtactacagagggggcagcagttggtcgaggccgcagagattgattgccaggatcttgaggaacgattggggcatttgcagagtagctgggaccgcctgcgggaagcagcggcggggaggctgcagcggctgcgggatgccaacgaggcccagcagtattacctagatgcagatgaggcggaagcgtggattggagagcaggagctgtacgtcatttccgacgagattccaaaggatgaagaaggcgccatagtaatgttaaaacgacaccttcggcagcagcgagctgtggaggattacggccgcaatatcaagcagctggcaagtcgtgcccaggggttgctgagcgcagggcacccagagggcgagcaaatcatccgtttgcaaggtcaggtggacaagcattatgctggcttgaaggacgtggccgaggagcgtaaacgaaaactcgagaatatgtatcacctgtttcagctcaagagagagaccgatgacctggagcaatggatcagcgagaaagagctggtcgccagtagcccagagatgggccaggacttcgatcatgtaacattgcttcgagataagttccgggatttcgcccgggagactggagctatcgggcaggaacgggtagataacgtgaacgcctttatcgagagactaatcgatgctgggcactctgaagccgcaaccatcgccgagtggaaggacggacttaatgagatgtgggcggatctgcttgagctgattgatactcgcatgcagcttctggcggcatcctatgatctacataggtatttctacacgggggccgaaattcttggtcttatcgacgaaaagcaccgggaacttccagaggacgtcggcctggacgcatccacagctgaatcatttcaccgcgttcacacagctttcgaacgcgaactgcatctgctgggcgtgcaagttcaacaatttcaggatgtggcaaccagactccagactgcctatgccggggagaaggctgaagccatccagaataaagaacaagaagttagcgccgcctggcaggcattgctggacgcctgcgcgggacggcgcacccagctcgtcgatactgccgacaagtttcgatttttctccatggcccgagatcttctctcctggatggagagtattatccgccagattgagacacaggagaggcccagagacgtctcgtcggtggaactcctgatgaagtaccaccagggcatcaacgcggaaattgaaactcggtccaagaacttctccgcttgtctggagctcggggagtctttgctccagaggcagcaccaagcctccgaagagattcgagagaaattgcagcaagtgatgtctcggcgcaaggagatgaatgagaaatgggaggcaaggtgggagagactgcggatgctgctcgaggtctgccagttctccagagacgcaagcgttgctgaggcctggctcatagcccaggagccctatctggcctccggagatttcggccatactgttgacagtgtggaaaaactcataaagcgacacgaggctttcgagaagtcaactgcctcctgggcagaaagattcgctgctttggagaagcccactacccttgaactgaaggagagacaaatagcagaaagacctgctgaagagacgggacctcaggaggaagaaggcgaaactgcaggcgaagccccggtgtcacatcacgccgccaccgaacggacgagccccggggaggaagaagggacttggcctcaaaatctgcagcagcccccacctccgggccagcataaagatgggcaaaagagcacgggtgacgagaggccaaccaccgaaccactgttcaaggtgctagacaccccactctccgagggcgatgagccggcaacactgcccgctcctcgcgatcacggacaaagtgtccagatggaaggatacctcgggaggaagcatgacctcgagggccccaacaaaaaggcttcaaatcgatcgtggaacaacttatattgtgtcctgagaaactcagaactgacattttataaggacgcgaaaaaccttgcactgggaatgccataccacggcgaggaaccactggccctgcgtcatgccatctgtgagatcgcagcaaactataagaagaaaaagcatgtgttcaagctgcgcctctcaaatggtagcgagtggctctttcacggcaaggacgaagaagaaatgctcagttggctgcaaggggtgtccacggccattaatgaaagccagtctattcgtgtgaaagcccaatctctgcccctccctagcttaagcggacctgatgctagtctgggcaagaaagataaagagaagaggttcagcttcttcccgaagaagaaatag

SEQ ID NO: 135901 - DNA, 6414 bp, synthetic construct
  misc_feature 1..6414: note = Description of Artificial Sequence: Synthetic coding sequence
  source 1..6414: mol_type = other DNA
atgacatctgctacagagttcgagaatgttggaaaccagcccccttattcccgcatcaatgcacggtgggacgcgcccgacgacgaattggataatgataactccagtgctagattatttgaaagaagccggattaaggctctggcggacgagcgcgaagtggtgcagaagaaaaccttcaccaaatgggtcaacagccacctcgcccgcgtttcttgccggattactgacctttacaaggatttgagggatggcaggatgctgatcaaattactggaggtgctgtccggcgaaatgctccccaagcccaccaagggaaagatgaggatccattgcctagagaacgttgacaaggccctgcagttccttaaggagcagcgcgtccaccttgagaatatggggtcacatgacatcgttgacggcaatcaccgactggtgctgggcctaatctggacaatcatcttgcgcttccaaatccaagatatagtcgttcaaactcaggaggggagggagacgcgatcagccaaggatgcactgctgctgtggtgccaaatgaagacggcaggctatccccacgtcaacgtgaccaacttcacatcctcttggaaggacgggctcgctttcaacgcccttattcacaagcaccggccggatctcattgattttgataaattaaaggactcaaacgctcgccataatcttgaacatgcttttaacgtcgccgaaaggcaacttggtataatcccacttctggatccggaagatgtgtttacagagaaccctgatgaaaagagcatcataacctatgttgttgccttttaccattacttcagcaaaatgaaggttctcgcggttgagggcaaaagagttgggaaggtaatcgatcatgcaattgagacagaaaagatgatcgaaaagtactccggcttggcatctgacctcctgacctggatcgaacaaacaattacagtcctcaactcacgcaagtttgctaatagcctaactggtgttcagcagcagctgcaggcgttctctacctaccgaactgtagaaaagccgcctaaattccaagagaagggaaacctggaagtactcctgttcaccattcaatcaaggatgcgagcaaataatcagaaggtttataccccacacgacggcaagctagtttccgacatcaatcgagcgtgggaatctcttgaggaagctgagtatcgcagggagctggccctccggaatgagttaattcggcaggagaaactggagcagctggcacggcgcttcgatagaaaagctgcgatgagggagacttggctgtcagaaaaccagcgattggtagcccaggacaacttcgggtacgatctggccgctgttgaggccgccaagaaaaaacatgaagccattgaaactgacacagcagcctacgaagagagagtaagagctctggaggatctcgcccaagaactagaaaaggaaaattaccacgatcagaaacgcataaccgcacggaaagataatattctgcgcctttggtcgtacctgcaggagctgcttcaatctcgtaggcagagactggagaccacactcgctctgcagaagctgtttcaagacatgctccattctatcgattggatggacgaaattaaagcccatctgctttccgccgagtttgggaaacatctcctggaggtggaggatctgctgcagaagcacaaattgatggaagcagacattgctatccagggagacaaagtcaaggctattacagctgccacactgaaatttacagaaggcaagggctatcaaccatgcgatcctcaggtaattcaggatcgtatctcacacctcgaacagtgtttcgaagagctttccaatatggctgcagggaggaaggcacagttggaacagtccaagcggctctggaaatttttctgggaaatggacgaagctgagagttggatcaaagagaaggagcagatatatagctctcttgattacggcaaagatctgacaagtgttctgatcctccagcgcaaacacaaggccttcgaagatgagctgcggggtctcgacgctcacctggagcagatttttcaggaggcacacggtatggttgcccgcaaacagtttggccaccctcagatcgaggcccgtataaaagaggtgtccgctcagtgggaccagttaaaggaccttgctgcattctgtaaaaaaaatttgcaagatgctgagaatttcttccagtttcagggcgacgctgatgatcttaaagcctggctgcaggacgcccatagattgttgagtggtgaagacgtgggacaggatgaaggtgccacaagagccctcggtaagaagcacaaggacttcctggaagaactggaggagtcccggggtgtgatggagcatctagaacagcaggcgcagggttttccagaagaatttagggattcaccagacgtgacccacaggctccaggctttacgcgagttgtaccaacaggtcgtcgcacaagcagatctgcgtcagcagcgcctccaagaagcactggacctgtatactgtctttggtgaaacggatgcctgcgagctttggatgggggagaaggaaaagtggctggccgaaatggagatgccagatacacttgaggatttggaagtagtgcaacacagattcgacatcctagaccaggaaatgaaaaccctcatgacacagatcgacggagtgaacctggctgcaaattccctggtggaaagtggtcaccctaggtcccgcgaagttaagcagtaccaggaccacctgaacacaagatggcaggctttccagactcttgtctccgagaggcgggaggccgtggatagcgccctgcgagtgcataattactgcgtggattgcgaggaaactagcaagtggatcacggacaaaactaaagtggtggaaagcacaaaagatctgggaagagaccttgcaggaattatagctatccagaggaaactcagtggactggaacgagatgtggctgctattcaagcacgggtggatgctctagaacgcgagagccagcaactcatggatagccatcctgaacagaaagaagatatcgggcagcggcagaagcacctggaagaactctggcagggcctacagcagtctttacagggacaagaggacctcctgggcgaggtgtctcagctccaagcatttttacaggacctagatgatttccaagcctggttgagcataacacagaaggctgtcgcaagcgaggacatgccggaatcactgccggaggcagagcagctcctgcagcaacatgctggaattaaggacgaaatcgatggtcaccaggactcctaccagcgggtcaaggaaagcggtgaaaaagtgatccaaggccagaccgaccctgagtatctccttctgggacagagactggaggggctggatacgggttggaatgcactgggacgtatgtgggagagcagatctcacacactcgcccagtgtctgggattccaggagtttcagaaagatgctaagcaggcagaggcaattttaagcaaccaagagtataccctcgcacatcttgagccacccgattcattggaggccgctgaggcaggaattagaaagtttgaagattttttagggtcgatggaaaacaacagagacaaagtgctctcacctgttgattcgggcaacaagcttgtcgccgaaggaaatctgtattcggataaaataaaagaaaaagtccagctaattgaggatcgacataggaagaacaacgaaaaggcgcaggaggcgtccgtgctattaagggacaatctcgagctgcagaacttcctgcagaactgccaagaacttaccctgtggatcaatgacaagctgctgacaagtcaggatgtaagctacgatgaggctcgaaacctgcacaacaaatggctgaaacaccaggcctttgtggccgagctggcctcacacgagggctggttggaaaatattgacgctgagggcaaacagttgatggatgaaaagccacaattcaccgctcttgtctctcagaagttagaagccttgcatcggctgtgggatgagctacaggctacaacaaaggaaaagacccagcacttaagcgctgcgcggtcttccgacctacgcttgcagacccatgccgacctgaacaagtggatttccgccatggaggaccagctccgcagtgacgacccagggaaagacttgacgagcgtcaatcgaatgctggccaagctaaagcgcgtggaggaccaagtgaacgtgagaaaagaagagctcggcgaattgttcgcccaggtccccagtatgggcgaggagggcggagacgcggatttatcaatcgaaaaaagatttctcgatctcctggagcctcttggccgcagaaaaaagcagttggaaagcagccgggcaaagctccagatcagtcgtgacctggaggacgagaccttatgggtggaagaacgtttacccttagcacagtcagcagactatggaaccaaccttcaaactgtacaactgtttatgaaaaagaatcagacgctgcagaacgagatccttgggcacacaccacgtgttgaagacgtacttcaacgcggccagcagctggttgaagctgccgaaattgactgccaagacctggaagagaggctgggccaccttcagtcaagttgggaccggttgcgggaggccgccgccggcagacttcagcggttgcgcgacgcaaacgaggctcagcagtattatctagacgccgacgaggccgaagcatggattggagaacaggagctctacgttatatccgatgagatcccaaaagatgaggaaggagcgatcgtcatgctgaagcggcacttaagacaacaacgcgcagttgaagactacggacgcaatattaagcagttagcttcgcgcgcacaggggctcctcagcgctggacacccagagggagaacaaatcattcgcctccagggccaggtcgataaacattatgcagggctcaaggatgttgcggaggagagaaagagaaagctagaaaacatgtaccatttgttccagctcaaacgagagacggatgacttggagcagtggattagtgaaaaagagctggtagcttctagcccggagatggggcaggactttgaccatgttaccctgcttcgagacaagtttagggacttcgcgagggaaaccggggcgattggccaggagcgcgtggataatgtgaatgcatttattgaacggcttattgatgccgggcattccgaagccgctaccattgccgagtggaaggatggacttaatgagatgtgggccgatctgctggaactcattgacacgagaatgcagctgctggctgcatcctacgatctccaccgttatttttataccggtgccgagatcttggggctaatcgatgaaaaacaccgcgaactgcccgaagacgtagggctcgatgcctctacggccgaaagctttcatagagtccataccgcgttcgaacgggaactccatctactgggagtgcaggtgcagcagttccaggacgtcgcgacaagactccagacggcatacgcaggtgaaaaagcagaggcaattcagaataaggagcaggaggtgtctgctgcttggcaagcgctgcttgatgcctgtgccggccgcaggacacagctggtggacacagccgacaagtttagatttttctctatggcaagagacctgcttagttggatggagtcaataatcagacagatcgaaacccaggagaggcccagagacgtcagcagcgttgagctcctgatgaagtatcaccaaggcatcaacgcagaaatcgagacgcgcagcaagaacttctccgcatgtttagagctgggcgagagtttgcttcagaggcagcaccaagcatccgaggagataagagaaaagctgcagcaagtgatgagccggcgcaaagaaatgaatgaaaaatgggaggctcggtgggagcgactgcgaatgttgctagaagtctgtcaattctctcgcgacgcaagcgtggctgaggcgtggctgatcgcccaggaaccctacctggctagcggcgactttggtcacactgtggactcagtggaaaagctgattaaacggcatgaagccttcgaaaagtccaccgccagttgggccgagagatttgccgcactggaaaagcctactacactggagttgaaagagagacagattgctgagcggcctgcagaagaaacaggacctcaggaggaggagggagaaactgcaggggaggcccccgtgagccaccacgctgccacagagcgtacatcaccagtctcactgtggtcaagactctcctcttcgtgggaaagcctgcaaccagagccctctcacccatactag

SEQ ID NO: 135902 - DNA, 6987 bp, synthetic construct
  misc_feature 1..6987: note = Description of Artificial Sequence: Synthetic coding sequence
  source 1..6987: mol_type = other DNA
atgacctctgcaacagagttcgagaacgtgggcaatcagcccccttattcgcggatcaacgcacggtgggacgcccccgacgacgagctggataacgacaactcttcggccaggctgttcgagcggtcaaggattaaagcactggcagatgagcgggaggtggtccagaaaaagactttcactaagtgggtcaattcacatctggcaagggtttcctgcaggattaccgacctgtataaggacctccgcgatgggagaatgctgataaaacttctggaggtcctttccggagaaatgctgccaaaacccaccaaggggaagatgagaattcattgtctggaaaatgttgacaaggctctgcagtttctcaaggagcagcgcgtccatttggagaacatggggagccatgacatagttgacggcaaccacaggcttgtgctgggcctcatctggaccatcatattgcgatttcaaatacaagatattgttgtccagacacaagaggggagagaaacgcggtctgcaaaggatgccctgctgctgtggtgtcagatgaaaaccgccggttaccctcacgtcaatgtgactaattttacttcgtcttggaaggacggcctcgccttcaatgcactcatacacaagcaccggcccgacctgatcgactttgacaaactgaaagactccaatgcccgacacaacctggaacacgcattcaacgtggccgaacgccagctcgggattattccgttgttggatcccgaggacgtctttacagagaaccctgacgaaaaatctatcattacatacgtggtcgccttttaccactatttctccaagatgaaggtgctggccgttgaaggtaaacgcgtaggcaaagtgattgaccacgccatcgagacagagaaaatgatcgagaagtatagcggtttggcgagcgacctcctcacctggatcgaacagaccatcaccgtcctgaactcccgcaagttcgccaatagcctcacaggggtccagcagcagctccaagccttctcaacgtaccgaacggtggagaagccgccaaagtttcaggagaagggcaacttggaggtgctgctttttactattcagtctcgaatgagggctaacaaccagaaggtatatacaccacacgacgggaaattggtctccgacatcaaccgagcatgggagtccttggaggaagcagagtacagaagggagctggcactgaggaatgagttaatccgacaggagaaactagagcaactggcaagacgctttgacagaaaagccgccatgcgcgaaacctggttatctgaaaaccaacggctggtcgctcaggacaatttcggctacgacttggctgccgttgaagccgccaagaagaaacatgaagcaattgaaactgataccgcagcttatgaagagagagtcagagctctcgaggatctcgctcaggagctggagaaagaaaactaccacgaccagaagcgcataacagctagaaaggataatattttgcggctatggtcgtacctgcaggaactcctgcagtcccgccgtcagcgccttgagaccaccctcgctctgcagaaacttttccaggatatgttacactccatagactggatggacgaaattaaggctcatctcttgtccgctgagtttgggaagcatttgctggaggtggaggacctgctgcaaaagcataagctgatggaggcagatattgcaatacagggggacaaagttaaagccattaccgccgccacactcaagttcactgagggaaaaggctaccagccttgcgacccgcaggtaattcaagatcggattagccatctcgaacaatgcttcgaagagttatctaacatggcggctgggcgcaaggcccaacttgagcagtctaagagactttggaaatttttctgggaaatggacgaagcggaatcgtggattaaggaaaaagagcagatttacagctccttagactacggcaaagacctgacatcagtactcattctgcagcgcaaacataaggcctttgaggacgaactgagaggactggatgcacacctggagcagatatttcaggaagctcacgggatggtcgccagaaaacagtttggtcacccacagattgaagctcggataaaggaggtgtccgctcagtgggaccagctaaaagacttagcagctttttgtaaaaagaacctccaggatgcagaaaatttcttccagttccaaggagacgccgacgatcttaaagcttggctgcaggatgcacaccgcctgttgagcggcgaagatgtgggccaggacgaaggagcaacaagagctctcgggaaaaagcataaagactttcttgaggaacttgaggagtctcgtggagtgatggagcatctggagcagcaggctcaaggcttccctgaagagttcagagactccccagacgttacccatagactccaagccttacgtgagctctaccagcaggtcgtggcccaggcagacctacgacagcagcgcttgcaagaggcactcgacctgtataccgtgttcggtgaaactgacgcttgcgagctctggatgggtgaaaaggagaagtggctggctgaaatggaaatgcctgacaccctggaggatttggaggtggtccaacaccgattcgacattctggatcaagaaatgaaaactctcatgacacagattgatggcgtgaacctggcggctaactccctcgtcgagtccggccatcctcgaagccgggaggtgaagcaataccaggaccacctgaacactcgatggcaggctttccaaaccctggtgagcgaacgcagggaagcggtggactctgcgttgagagtgcataattactgtgtggattgtgaggaaacttccaagtggataacagacaaaacgaaggtggtggaatctacaaaggacctaggccgagacctcgcagggattatagcaatccaaagaaagctcagcggtctcgagcgagatgtggcagcaatccaagcccgggtggatgccctggagcgggaaagccagcaactgatggatagccaccctgaacagaaggaagatatcggccagcgccaaaagcatctggaagagctctggcagggcctccagcagtctcttcaaggacaagaagatttactgggcgaggtttctcagctgcaggcgttcttgcaagacctcgacgactttcaggcctggctcagtatcacccagaaagcagtggcttctgaggacatgccagaatctcttccagaggctgaacagctgttgcagcaacatgccggcatcaaggatgagatagatggccaccaggatagctaccaacgagtgaaagagagcggggagaaagtcattcagggacagaccgatcctgagtacctcctcctcggccagcggctagaagggttggacacgggatggaatgcactgggcagaatgtgggagagccgaagtcacacgcttgctcagtgtctcggattccaggagttccagaaagacgctaagcaagccgaagccatcttgtctaatcaggagtatacactggcccatcttgagccacccgactctctggaggcagctgaagccggcatccggaaatttgaagacttcctcgggagcatggagaacaaccgtgataaggtgctgtcacctgtggactctggcaataagctcgtcgcagaaggaaatctgtattcagataagatcaaagaaaaagtgcagctaatagaggatcggcaccgcaagaataacgaaaaggcccaggaagccagcgtgctgttacgggataacttagaactacagaattttctgcagaattgccaggaactcactctctggataaacgacaaactgctgacctcacaggacgtgagttatgacgaagccaggaaccttcataataagtggttgaaacatcaggcattcgtcgctgagctggcctcgcatgaagggtggttggaaaacatcgacgctgagggcaaacagctgatggacgagaaaccacagttcaccgctctggtgtcacaaaaacttgaagcactccacagactgtgggatgaactacaggccaccacaaaagagaaaacccaacatcttagcgcagctcggtctagcgatttgaggttacagacacatgctgatcttaacaagtggatcagcgccatggaagaccaactccggtcagacgatcccggcaaagacctgaccagcgtcaaccggatgctggctaaattaaagagagtggaggaccaggtcaacgttcggaaggaggaactgggagagttatttgcgcaagtcccttctatgggggaagaagggggagacgccgacctgagtatcgagaaacgatttcttgatctgctggagcctcttgggcgccggaagaaacagcttgagtctagtcgagcaaagttgcagatttctagagacctggaagatgagactttatgggtagaagagcgtctgcccctagcccagtcagctgactacgggacaaatctgcaaaccgttcagctgttcatgaagaagaaccaaacattacagaacgaaattttgggacatacgcctagggtagaagacgtgctgcagcgtggccaacagttagttgaggccgcagaaatcgactgccaggatctggaggaacgccttggccacctccagagtagctgggacagattgcgcgaagcagccgccggtcgcctgcagcgtttacgggatgcgaacgaagcccagcagtactatctcgacgcggacgaggctgaggcttggatcggtgagcaggaactatacgttatcagcgacgaaattcccaaagatgaggagggcgcaattgtgatgttaaagaggcacctgaggcagcagcgggcagtcgaggactacggccgcaacattaaacagctcgcttctagggcccaggggctgctgtcggccggacatccagaaggtgagcagatcatcagactgcagggtcaggtggacaagcactacgctgggctcaaggatgttgcagaggaaagaaagcgcaagctagaaaacatgtaccacctctttcagctgaaaagggaaaccgatgatttagaacagtggatcagcgagaaagagctggtcgcgtcttcgcccgagatgggacaggacttcgatcacgttactctgctgagggacaagtttcgcgattttgccagagaaaccggcgcaataggacaagagagggtcgataatgtgaatgcctttatcgaacggctcattgatgcagggcactccgaagccgccactattgcagaatggaaagatggtctgaatgagatgtgggcagatttactggagctcatagatacccggatgcaactgctggccgctagctatgacctgcatcggtatttttataccggagctgagattttaggtctcattgatgagaaacatagagaactcccagaggatgttggtttagatgcatccacagcagagtccttccaccgcgtgcatacagcgttcgagcgggagttgcacctgctcggggtgcaagttcaacagtttcaggacgtggctactagactgcagaccgcttacgccggagaaaaagccgaagccatacaaaataaggagcaggaggtatccgcagcctggcaggctcttctcgacgcctgcgccggaagacgaacgcaactcgtagacacagctgacaagtttaggttcttcagcatggcccgcgacttgttaagctggatggaatccatcatcaggcaaatcgagacccaggagaggcctagagatgtctcctccgtggaactcctcatgaagtaccaccagggcattaacgcagagatcgagacccgaagtaagaacttctccgcctgtctggaattgggagagagcctactccaacgacagcaccaggcttccgaagagatacgcgagaaattacagcaggtaatgagtagacgtaaagaaatgaacgaaaaatgggaggcaaggtgggaaagactgagaatgcttctcgaagtctgtcagttcagccgggacgccagtgtggcagaagcttggcttatcgcgcaggagccatacctcgccagtggagattttggccacacagtggatagcgtggagaaactcataaagcgtcacgaggcattcgagaagagtacagctagctgggcagagagatttgcagccctggagaagcctacaaccttggagctcaaggaacgccagatcgctgaacgtcccgctgaagaaactgggcctcaagaggaggagggggagaccgccggggaggcgcctgtgtctcatcatgccgcaacagaacggacttcccctggggaggaggagggcacatggccacagaatctacaacagcctcctccaccagggcagcacaaagacggtcagaaaagtactggggacgagcgccccacaacagagcccctcttcaaggtgctcgacacccctctgagcgagggcgacgaacctgccacactgcctgctcctcgggaccatgggcaaagcgtgcagatggaaggctatttaggacgcaaacatgaccttgaggggcccaacaaaaaggcctccaatcggagttggaataatctctattgtgtgctcaggaacagtgagttgactttctataaggatgctaagaaccttgccctgggcatgccttaccacggcgaggagcccctcgcgctgcggcatgctatttgtgagatagccgccaactacaagaagaagaagcatgtatttaagctccggctctcaaacggatccgaatggctttttcacggcaaagacgaggaggagatgttgagctggctacagggcgtttcaactgccatcaacgagagccagtccatacgggtaaaggcccagtctctccctttgccctctctgtcgggtccagatgcctcccttgggaagaaagacaaggagaagaggttttctttcttccccaaaaagaagtag

SEQ ID NO: 135903 - DNA, 6468 bp, synthetic construct
  misc_feature 1..6468: note = Description of Artificial Sequence: Synthetic coding sequence
  source 1..6468: mol_type = other DNA
atggaactgcaacgcacatcctctatttccgggcccttatcccccgcttataccggccaagtaccatataactataatcagctggaaggaagattcaagcagctgcaggacgaacgtgaggcagtgcaaaaaaaaacatttacaaagtgggtcaatagccatttagcgcgcgtatcttgtcgcattaccgatttatatacagatcttagggacggccgtatgctaattaagctgctggaagtgctgagtggcgagcgcctgccaaagcccacaaaaggccgaatgcgcatccactgtctcgagaatgtggataaagcactacagtttttgaaagaacaacgcgtgcatttggaaaatatgggttctcacgacatagtcgatggcaatcataggttgaccctggggctgatttggacaattatcctgagattccagatacaggacatctccgtggagacagaagataacaaagagaagaagagtgcgaaggacgcactgttgttatggtgtcagatgaaaactgccggctaccccaacgtgaacatccacaattttactactagctggagagatgggatggcgttcaacgccctgattcacaaacaccggccagacctgatcgactttgacaagctgaagaagagcaacgcccattataacttgcagaacgcatttaatctggctgaacagcatctgggacttactaaactcctcgaccccgaggatatttcggtggatcatcctgacgagaagtccattatcacgtacgtggtcacctactatcactatttttcaaaaatgaaggcccttgctgtggaggggaagcggattggcaaagtactcgataacgccatcgaaaccgaaaaaatgatcgagaagtacgagtcgctggcttctgacctgcttgagtggatagaacaaactatcattatattgaacaaccgcaagttcgccaacagccttgttggggttcaacagcagctgcaagctttcaatacctacagaactgtggaaaagcctcccaagttcaccgagaaaggaaatctcgaagtgctgctgttcactatccaaagcaaaatgagggcgaataaccagaaggtctacatgccccgagaaggcaaactgatctctgatataaacaaggcgtgggaacggctggagaaagcagagcacgagcgggagcttgccttgagaaacgagctgatacgccaagaaaaactggaacagcttgcccgccgctttgaccggaaagctgccatgcgtgagacttggctgtcagaaaatcagagacttgtgtcgcaagataacttcgggtttgacctgccagctgtcgaagccgcgaccaaaaagcacgaggctatcgaaacagatattgccgcctatgaggagcgggtacaggcagtggttgccgtggcacgtgaattggaggctgaaaactaccacgatattaagcggattactgcacgcaaagacaacgttatccgtctttgggaatatttgcttgagttacttcgtgctagacgccaaaggctggagatgaatcttggcctgcaaaagatcttccaggagatgctctacattatggattggatggacgaaatgaaggtgctggtcctcagtcaggattacggcaaacacctgctgggggtagaggacctgctgcagaaacatacgctggtagaagccgacatcggaattcaggctgaaagggttaggggcgtcaacgccagcgcacagaagtttgccaccgatggagagggctacaaaccttgcgaccctcaggtgattagggaccgcgtggcacacatggagttctgttatcaggagctctgccagttggctgcggaacgccgagctcgcttagaagaaagtagacggctgtggaaattcttctgggaaatggctgaggaggaaggctggattcgggagaaggagaagattctctcctctgacgattacggtaaagaccttacttcagtgatgagacttttaagcaaacatcgtgcattcgaggacgaaatgagtggaagatccggacatttcgaacaggccatcaaggagggggaagatatgatcgccgaagaacatttcgggagcgaaaagataagagaaagaataatctacatacgcgagcagtgggccaatctggagcaactgagtgctatccgtaagaagcgtctggaggaagccagtctgctacaccagtttcaggcagacgccgacgacattgacgcgtggatgctggacatactgaagattgtgtcgtcctcagatgtgggccacgacgaatactctacacaaagtctggtgaaaaaacacaaagacgtggcggaggaaattgctaattaccggccaaccctggatactctgcatgaacaggcttcagccctgcctcaggagcatgctgagtccccagatgtgcgtggtcggttgtctggcatagaggagcgttataaggaggtggcagagttgacccgcctgcggaagcaggcccttcaggacactctcgcactatataaaatgttctctgaagccgatgcctgcgagctatggatcgatgagaaagaacaatggctgaacaacatgcaaattcccgaaaagttggaggatctagaggtcattcaacaccgcttcgaaagtttggaacccgagatgaataaccaggcgtccagagtggcagttgtgaatcaaatcgctcgccagctgatgcactccggacaccccagcgagaaggagattaaggcccagcaggataagcttaacacgcgatggtcacagttccgcgaactcgttgataggaaaaaggatgccttattatcagccttatcaattcaaaactatcatcttgagtgcaacgagacgaaaagttggatccgcgagaagacaaaggtcattgagtccactcaagatttgggcaacgatctggccggtgtgatggctctccagcgcaaactgactggaatggaacgggatcttgttgccatcgaagccaaactgtcagacctgcaaaaggaggctgaaaagctcgagagcgagcacccagatcaggctcaggccattttgagccgattggccgagataagcgatgtgtgggaagaaatgaaaaccactctgaaaaatagagaagccagcttaggcgaggcctccaagctgcagcagttcctgcgggatttggacgatttccaaagttggctgtcccgcacgcaaaccgcaattgcttcggaggatatgccaaacacccttacagaagctgaaaaacttctgacgcagcatgagaacatcaagaacgagattgacaattacgaggaggattatcagaaaatgagagacatgggcgaaatggtgacacagggccaaaccgatgctcagtacatgtttttgcggcaacggctacaggccttggatactggttggaatgagcttcacaaaatgtgggaaaatagacagaacctcctgtctcagagccacgcctaccagcagttcctgcgcgacaccaaacaagctgaggccttcctgaataaccaagagtatgtgcttgcgcacactgaaatgccaacaacattagaaggagccgaggctgctatcaagaagcaggaagacttcatgaccactatggatgcaaatgaagagaagattaatgccgtggtagaaactggaagacgcctcgtgtccgacgggaatataaatagtgaccgaattcaggaaaaagtcgacagtatcgatgataggcaccgaaaaaaccgtgaaaccgcatctgagctgctgatgaggctgaaggacaaccgcgacctgcaaaaatttctccaggactgccaggaactgagcctctggattaatgagaagatgctgaccgcccaggacatgtcatatgatgaagcccgtaacctccactcaaagtggctcaagcatcaggccttcatggctgagctcgcaagcaacaaagagtggctagacaagatcgaaaaggagggaatgcagctgatctctgaaaaacctgagaccgaggccgtagtgaaggagaagcttactggcctacacaaaatgtgggaggtgctcgagtccactacccaaaccaaggctcagaggctcttcgatgccaacaaggctgagctattcactcagagctgcgccgacttggataaatggctacacgggctcgagtcccagatccagagcgatgactacggtaaggatctgaccagcgtcaacatcttactcaagaaacaacagatgctggagaatcagatggaggttaggaagaaagaaatcgaagagctgcagtcccaagcacaggcactgtcccaagaagggaaaagtactgatgaagtggactccaaaagattgaccgtgcagacgaaatttatggaactccttgagccacttaacgaacggaagcataatttgttagcctcaaaggaaatccaccagttcaatagagatgtggaagatgaaatcctgtgggtgggcgagagaatgcccctggccacttccaccgaccacggccataatctgcagacagtgcaactcctcattaaaaaaaatcaaacactgcaaaaagaaatccaagggcatcagccgcggatcgatgatatttttgagcgatcccagaacatcgtgactgacagttctagcctgtctgctgaggccatccgacagaggctggccgatttgaagcaactctggggattactcatcgaggaaaccgagaaacggcatagaagactcgaagaggctcatagggcacagcagtactacttcgacgccgctgaggctgaggcctggatgagcgaacaggaactgtacatgatgtccgaggaaaaggccaaggatgagcagtcagctgtctctatgctgaaaaaacaccagatcctcgaacaggccgtggaagactacgcggagaccgtgcaccaactgtcaaagacgtctagagcattggtcgccgactcacaccccgagagtgaaagaatcagcatgcggcagtccaaagttgacaagctctatgctggactgaaagacttggccgaggagaggaggggcaaattagatgaaagacaccggctgtttcagttgaatcgggaggttgatgatttggagcagtggattgccgaaagggaggtggttgctggatctcatgaactcgggcaggactatgaacacgtcacaatgctgcaggaaaggtttagggaattcgcaagggataccggtaacattggccaggaacgtgtggacactgttaatcatttggccgatgaacttatcaatagcgggcacagcgacgcagccaccatcgccgaatggaaggatggcctgaacgaagcctgggctgacctgctggaacttatcgatactcgtacccaaattctggcggcatcttacgaactccataagttctatcacgacgctaaggagatttttgggagaatccaggataagcataaaaagctccctgaagaacttggccgcgaccaaaataccgttgaaacgttgcagagaatgcataccactttcgaacatgatatacaggcccttggaacacaggtacggcagctccaggaagacgccgctcggttgcaggccgcctatgccggcgataaagccgatgacattcagaaaagggagaacgaagttctagaagcttggaaaagtctcttagatgcctgtgaatctagaagagtgcggcttgttgatactggggacaagtttcgcttcttctccatggtgcgggatctcatgctctggatggaagatgtcatcagacagatcgaggctcaggagaagccgcgggacgtgagctctgttgagctcctgatgaataatcaccagggaatcaaggcagagatcgacgccaggaatgattcattcacaacctgtattgaattaggcaagagccttttggccaggaaacattatgcttccgaggagatcaaggagaaactactccagctgacggagaaacgaaaggaaatgatcgacaaatgggaggataggtgggagtggctgcgactgattttagaggtccaccaattcagcagagacgcaagcgtggcagaggcatggttgctgggccaggagccctacctttccagcagggaaataggccaatcggtggacgaagtagagaagttgatcaagcgacatgaagcttttgagaaaagcgcagctacttgggacgagcgcttctcagcccttgagaggttaaccaccctggagctgctggaggtcaggaggcagcaggaggaagaggaaaggaaaaggcgacctccatcgcctgaacctagcaccaaggtgagcgaagaagcagagtcacagcagcagtgggacacttccaaaggggaacaagtctcccaaaacgggctccctgccgagcagggttcaccccgggtctcgtatcgctcccagacataccagaactacaaaaacttcaactcacggcgcactgcatccgaccaaccctggagcggcctttag

SEQ ID NO: 135904 - DNA, 7095 bp, synthetic construct
  misc_feature 1..7095: note = Description of Artificial Sequence: Synthetic coding sequence
  source 1..7095: mol_type = other DNA
atgaccacgaccgtcgcaacagattacgataatatcgagatccagcagcagtactccgacgtgaataacagatgggacgtggatgactgggacaacgaaaattcatctgctcggctgttcgaacgtagcaggattaaagccctggctgacgagagagaggccgtgcagaagaagacctttaccaaatgggtaaacagtcaccttgccagagtgtcatgccgaatcacagacctgtataccgaccttcgcgatggacggatgctgattaaactcctcgaggtactgtcgggtgagagactgcccaagcccaccaagggcagaatgagaatccactgtctcgaaaacgtagataaagctctgcagtttctcaaggagcagcgagtccatttggagaacatgggcagccatgacatcgtagatggaaaccatcgactcaccctggggctaatatggactatcatcctgaggtttcagattcaggacattagtgttgagacggaggacaacaaggagaaaaagagcgctaaagatgctttgctgctgtggtgccagatgaaaactgctgggtatcccaatgtgaatatccataacttcacaaccagctggagggatggaatggcctttaatgcactcatccataaacacaggcctgaccttattgacttcgataagctaaagaagtcaaatgcccattacaatttacaaaacgcatttaatcttgcagaacagcaccttggtttgactaagctcctggatcccgaagacatttcagtcgatcaccctgacgagaagtcaattataacgtacgttgtgacatactatcactatttttcaaagatgaaggctctcgccgtcgaagggaagcgcattggaaaggtcctggacaacgctatcgaaacagaaaaaatgatagagaagtacgagagcctggcttcagacctcttagagtggatagaacaaactatcatcatactgaataaccgaaaatttgctaattcccttgtaggagtgcaacagcaactccaggcgttcaacacatatcggaccgttgaaaaaccacccaagtttactgaaaaggggaatctcgaagtgctgctgtttaccatccagtctaagatgcgagccaacaatcagaaagtatacatgcctcgcgagggcaagctcatttccgatatcaataaggcgtgggagcggcttgagaaggccgagcacgaacgggagctcgctctgaggaatgagcttatcaggcaggagaaattagaacagctggcccgccggttcgaccgtaaggcagctatgagggaaacatggctctcagaaaaccagcggctggttagccaagataatttcgggtttgatctgccagccgtcgaagccgccaccaagaagcacgaggctatcgagactgacatcgccgcctacgaggagagggtgcaggcagtggtcgctgtcgctagggaactagaggcagagaactaccacgacataaagcggatcacagccaggaaagacaatgtgattcggctgtgggagtacctactggagctgttgcgcgctcggagacagaggttggagatgaatcttggactgcaaaaaatcttccaggagatgttgtacataatggattggatggacgagatgaaggtcttggtactctctcaagattatggtaaacatctcctaggagtggaggacctactgcaaaaacacacccttgtagaggcggatattggcatccaggctgagcgtgtcagaggtgtgaacgcctccgcgcagaagtttgctacagatggggagggatacaaaccttgcgacccacaggttattagagacagagttgcccacatggaattctgctatcaggaactctgccagctcgcagccgaacggagggcacggctggaggagtccagacgcttatggaaatttttctgggagatggcagaagaagagggttggattagagagaaagagaagatactatcctccgatgactacggcaaggatctcacttcagtcatgaggttgcttagtaaacaccgggcttttgaagacgagatgtctggtagatctggtcatttcgagcaggcaattaaggaaggcgaagacatgatcgcagaagagcacttcggcagtgagaaaatccgcgaacggattatttacattcgagagcaatgggccaacttagaacagttaagcgccattcgcaagaaacggctggaggaggccagtcttctgcaccagtttcaagcggatgccgatgatattgacgcctggatgctggacatccttaagattgtaagctcgtccgatgtggggcatgatgagtactccactcaaagtttggtgaaaaaacacaaggatgtggccgaggaaattgcgaactatagaccaacactcgacaccttgcatgaacaggcatccgctctcccacaagagcacgctgagtctcctgacgttcggggccgtctcagcggcatagaggagcgctataaagaggtggcggaactgactcggcttcggaaacaggctctacaggacacacttgcgctctataaaatgtttagtgaggccgatgcgtgtgaactgtggattgacgagaaagagcagtggctgaataacatgcagatcccggagaagctggaagacttagaggtgattcagcaccggttcgagtccctcgagcccgagatgaacaatcaggcctctcgggtcgccgtggtgaaccagatcgcccggcagttgatgcatagcggtcatccctccgagaaagaaattaaagcccagcaggacaaactgaatacccgctggtcccagttccgggagctcgtggatcgaaagaaggatgcgttgttgtcagccctgtccattcaaaactaccacctggagtgtaatgagaccaagagctggattcgtgaaaaaacgaaagttatcgagtcaactcaggacctggggaacgacctcgctggtgtcatggccttgcagcggaagttaacaggcatggaacgcgatctagttgctatcgaggctaagttgagcgacctccagaaggaagctgaaaagctcgagtccgagcatcccgatcaggcccaggcgatcctctctcgtcttgctgaaatttctgacgtctgggaggagatgaagaccacactcaagaaccgagaagccagcctgggagaggccagcaagttgcagcagtttctgagggatctagatgacttccaatcctggttgtcgaggacccagacggccatagcgtcggaggacatgcccaatacactaaccgaggccgaaaagctgcttacgcagcatgaaaacattaaaaatgagatcgataactatgaggaggattatcagaaaatgcgggacatgggagagatggttactcagggacagacggatgcccagtatatgtttctgaggcagcggctgcaggcccttgatacaggttggaacgaactgcacaagatgtgggagaataggcagaatttgctgtctcagtcccacgcttaccagcagttcctgcgagatactaagcaagccgaagcttttctaaacaatcaggagtacgtcttggcccacactgaaatgcccacaaccctggagggcgcagaagccgctatcaagaagcaagaggactttatgaccactatggacgcaaacgaggagaagattaacgccgtcgtggaaaccggtagaaggcttgtgtctgacggtaacataaactcggaccgcatccaggagaaagttgacagcatagacgatcggcatagaaaaaatcgcgaaactgcctccgagcttctgatgcggttaaaagacaacagagatctgcagaaattccttcaagattgccaggaactttctctgtggattaatgagaagatgctcaccgcccaggacatgtcatacgatgaggctcgcaaccttcattccaaatggttgaagcaccaggcatttatggccgaactggcgagtaataaagaatggttagataagatcgagaaagagggcatgcagctcatctccgagaagccagagactgaagccgtggtgaaagagaaactgactgggctgcataagatgtgggaggtgctggagtctaccacacagaccaaggcccagagattgtttgacgccaacaaggccgagctgtttacgcagtcttgcgccgacttggataagtggctgcatggactggagagccagatccaatccgacgactacggcaaggatcttacatcggtaaatatcctgctgaagaagcaacaaatgctcgagaatcaaatggaggtgcgtaagaaggagatcgaggagctgcagtctcaggcacaggctctcagtcaggagggtaagtcaaccgatgaggtagacagcaaaagattgaccgtgcagactaagtttatggagctgctggaacctttgaatgaaaggaaacataatctactcgccagcaaggagatccaccagttcaatagggatgtggaggacgaaatcctgtgggtcggtgaacgcatgccactggcaacctccacagaccatgggcataatctgcagaccgttcaactcctgattaagaaaaatcagacactccagaaggaaattcaaggtcaccagccccgaattgacgacatatttgaacggagccagaacattgtaacggattcttcatctctctcagcggaagccatacggcagcgcctggccgacttaaagcagctatggggcttgcttattgaggaaaccgaaaaacgacatcggagactggaggaggcccatcgtgcacaacagtattatttcgacgcagccgaggctgaggcctggatgagtgagcaagagctatatatgatgtccgaagagaaagctaaagacgagcagagcgctgtcagtatgctgaaaaagcaccagatcctcgagcaggctgttgaggactacgcggagacggtgcatcaactgagcaagacaagtagagccctagtggccgactcccatccggaatcagaaagaatctccatgcgccagtcaaaggtagataaactgtatgcaggcctcaaagacctggctgaggaaagaaggggcaaattggacgagcggcatcggctgtttcagctgaatagagaagtagatgatctcgagcagtggattgccgaacgtgaggttgtggctgggtcacacgaactggggcaggattatgagcacgtaactatgctgcaggaacggtttcgcgagttcgcccgcgacacaggaaacatcgggcaggaaagagtcgatacggtcaaccacttggccgatgaattaatcaactctggccacagcgatgcagcaactatagccgaatggaaagacgggttgaacgaggcctgggcagatttacttgaactcattgataccaggactcagatcctcgccgccagttacgaattgcacaagttctaccacgacgctaaggagatcttcggccgaatacaggacaaacacaagaagcttccagaggaactcggtagagaccagaatactgtcgagactctgcagcgaatgcacacaacctttgagcacgatatacaggctctaggaacgcaggtgaggcagctgcaagaggatgctgcaagactgcaggccgcttacgccggagacaaagcagacgacattcagaaacgagagaatgaggtattagaagcttggaagagtttgcttgatgcatgtgagtctaggcgagtcaggcttgtcgataccggtgacaaattccgattcttttcaatggtgcgggatctgatgttatggatggaggacgtcatccggcaaatcgaagcacaggaaaagccacgcgatgtgtcaagtgtcgaactcctcatgaataatcaccaggggattaaagccgaaatcgatgcccgcaacgattctttcactacctgtatcgagctggggaagtccctcctagcaagaaaacactacgcatctgaagagatcaaggagaaacttctgcagttgacggaaaagaggaaggaaatgatcgacaagtgggaagaccgttgggaatggcttaggcttatcctcgaagtccaccagttcagcagggacgcctcggtagccgaggcctggcttttgggccaggagccctacttatcttctagagaaattggacagagcgtcgacgaagtagagaagttaatcaaacgacacgaagcattcgagaagtctgcagcaacctgggatgagagattctccgcccttgagcgccttaccacactggagcttctggaggtgaggcgccagcaggaggaagaagagagaaagcgccgccctccatcccccgagcccagcacaaaggtatctgaggaagccgagagtcaacagcagtgggacacaagtaagggagagcaggtttctcaaaatgggctgcccgccgagcaggggtcaccccggatggcggagactgtggacacttctgagatggtaaatggcgccactgagcagcggacgtcctcaaaggagagctccccaataccaagtcctacttcagatcgaaaggccaagactgccttaccagcccaaagcgctgctacactgcctgctagaactcaggagaccccatccgcacagatggaaggcttcttaaacaggaagcacgagtgggaagctcataataagaaagcgtcatcccggagttggcacaacgtgtattgcgtaataaacaaccaggaaatgggattctacaaggatgccaagaccgccgcaagtggtattccttaccattccgaagtgcccgtcagcttaaaggaggccgtgtgtgaggttgccttggactataagaaaaaaaaacacgtgttcaaactgcgtcttaatgatggcaacgaatacctgtttcaggcaaaggacgacgaagaaatgaacacctggatccaggctatcagttccgctatctcttcagataagcacgaggtgtctgcttccacccagtctacccccgccagttcccgtgcgcagacccttcccacgtcagtggttacaattacatcagagagctctcctggcaaaagggagaaggataaggagaaagacaaagagaaacgcttctcgctattcggcaagaagaagtag

SEQ ID NO: 135905 - DNA, 2073 bp, synthetic construct
  misc_feature 1..2073: note = Description of Artificial Sequence: Synthetic coding sequence
  source 1..2073: mol_type = other DNA
atgacaaccaccgtggcaactgactacgataacattgagatacaacagcagtattcagatgttaacaatcgttgggatgtcgacgactgggataacgagaactccagcgccagactctttgagagaagccgcatcaaggccctcgccgatgaaagggaggcagttcagaaaaaaacgttcaccaaatgggtcaactcccacctggcacgggtgagctgcaggatcacggacctctataccgacctgcgggatggacgaatgttgataaagctgttggaggttctaagcggcgagcgcctcccaaagcccaccaagggcaggatgcgcattcactgcttggagaacgtcgacaaggccctgcagtttctgaaggagcaaagggtccatcttgaaaatatgggtagccacgacatcgtggatgggaaccatcgcttgactctggggttgatctggacgatcatcctcaggttccagattcaggatatctctgtggagacggaagacaacaaggagaagaagtccgccaaagatgctctgttactgtggtgccaaatgaaaaccgcgggttatcctaatgttaatatacataatttcactacatcatggcgggatggtatggcatttaacgccctcatacacaaacatcgtccagacctgatcgatttcgataagctaaagaaaagtaatgcccactataatctacagaacgcattcaacctggccgagcaacacctgggactgactaaactgctcgaccccgaagatatctcagttgatcacccagatgaaaagtctattatcacctacgtggtaacctactaccattacttctccaaaatgaaagcccttgctgtcgagggcaagcgaataggcaaggtacttgacaatgctattgaaacagaaaagatgatcgaaaagtacgaatctttggcaagtgacctcctggagtggatcgaacagaccatcataatactgaacaaccgcaagttcgcaaatagccttgttggcgttcagcagcagcttcaggccttcaatacgtatcgtacagtggagaaaccgcccaagtttactgagaaaggcaacttagaagtgttgctcttcaccatacaaagtaagatgcgggcgaacaatcaaaaggtgtacatgccaagagaggggaaactgatttcagatatcaataaggcttgggagaggctggaaaaagccgagcacgagagagagttggccctaaggaacgagcttatcaggcaggaaaaactagaacagctggcaagaagatttgatcggaaagccgccatgcgcgaaacatggctgagtgagaatcagagactggtctcccaagataactttggctttgatctgcccgccgtggaggcagccacaaaaaagcacgaagctatcgagacagacatcgccgcttacgaggaaagagttcaagcagtcgtggctgtggctcgggagctggaggctgaaaactaccacgacatcaaaaggataaccgcacgtaaggacaacgtgatacgcttatgggaatacctcctcgaactcctgcgagcccgcagacaacgactggagatgaatttaggactacagaaaatattccaggagatgttatacatcatggactggatggacgagatgaaggtcttggtgctgtcgcaggattacgggaagcacctcctcggggtcgaagacttgctgcaaaaacacaccctggtcgaggcagacattggtatccaagcagaacgagtgagaggcgtcaatgcatccgcccagaagtttgccacagacggggaagggtacaagccctgtgacccccaagtgattcgggaccgggtggctcatatggagttctgctatcaggaactatgccagctcgccgccgaacgacgggctaggctggaggagtctcggcggctgtggaagtttttctgggagatggctgaagaggaagggtggattcgcgaaaaggagaagatcttgagtagtgatgattacggcaaagatttgacttcagtgatgcgactgctttccaagcaccgtgctttcgaggatgaaatgagcggcagatag

SEQ ID NO: 135906 - DNA, 7173 bp, synthetic construct
  misc_feature 1..7173: note = Description of Artificial Sequence: Synthetic coding sequence
  source 1..7173: mol_type = other DNA
atgtcgagcacacttagtccaaccgatttcgatagcctcgagattcaggggcagtactctgacatcaacaacaggtgggacttgcccgactccgactgggacaacgattctagcagcgcacggttattcgagaggtctcgaataaaggcactcgccgatgagcgtgaagccgtccagaaaaagactttcacaaagtgggtgaactctcaccttgctcgcgtcacttgtcgagtgggtgacctatattccgatctaagggacggaagaaacctgctgaggctcctcgaggtgctatctggcgaaatcctcccgaaacctacaaagggccgcatgaggatacactgtctcgagaatgtggataaagccctgcagttcctgaaagaacagaaggtccatctcgaaaacatgggttcgcatgatatagtggacggaaaccacaggctgactctgggcctagtgtggacaattatcctgcgcttccagatccaagatatatctgttgagaccgaggataacaaggagaagaaaagcgctaaggacgccctattactgtggtgccagatgaaaaccgctggttatccaaatgtcaatgtgcacaacttcaccacctcatggcgggatgggctcgctttcaatgcgatcgtgcacaaacacagaccggacctgctcgacttcgaaagcctgaaaaagtgcaatgctcattataacttgcaaaatgctttcaacctggctgaaaaggagctgggcttgacaaagctcctggaccccgaagatgtgaatgtagaccaacccgacgaaaagtcaataatcacttacgtggctacatactatcattactttagcaagatgaaagcattggctgtggaagggaaacggataggcaaggtgttggatcacgctatggaagccgagcggttagtggagaagtacgaatcccttgcgagcgaattgctccagtggattgagcagaccatcgtcacactcaatgacagacaactggctaacagcctctcgggagtacagaaccaactccagagtttcaacagctatcgtacggtggagaaaccaccaaaattcacagagaagggcaatctggaggtcttgctgttcaccatacaaagcaaactgagagccaataaccagaaagtctacacccctcgcgaggggcggctcatctcagatatcaacaaggcttgggagagactggaaaaagcagaacatgagcgtgagctggctcttcggaccgaactgatccggcaggagaagttggaacagctagcagcccgcttcgataggaaagcggccatgagagaaacttggttgtctgaaaatcagagactcgtaagccaagacaactttggtttagaactggcagcggtcgaggccgccgtgcggaagcacgaagccatcgaaacagatatagtggcctatagtggcagagtgcaagcagtggatgcagtagcagcggaactggcagctgagcgttatcatgatatcaagaggatagcggcccgacagcataacgtcgctcgcctctgggactttctccgtcagatggtcgcagcccgcagagagaggctgctgctcaatctcgaactgcagaaggtgtttcaagacctgctttatttaatggattggatggaggaaatgaaggggaggctgcagtctcaggacctcggacgccatctcgccggagtagaggacttgctccagcttcacgaattagttgaagccgatattgctgtgcaggccgaacgtgttagggctgtctcagcctctgccctgagattttgcaaccctggcaaagaatacagaccctgcgacccccagctggtgtccgagagagtagcaaaactggagcagagttacgaagcactgtgtgaattggctgcagcccggagagccagactggaggaatcacgtcgtctgtggaggtttttatgggaggtcggtgaggccgaggcatgggtaagagagcagcaacacctactcgcgagcgccgatactggcagggatctgacgggcgctctgcgcctgctgaacaagcacacagccttgaggggggaaatgtctggacgccttggcccattgaaactgaccctggagcagggccagcaattagtggccgaaggtcacccgggagcatcacaggccagcgcccgggccgcagaactgcaagcccagtgggagagacttgaggccctcgccgaggagcgagctcagcgcctagctcaggccgcaagcctgtaccagttccaagccgacgcaaacgatatggaggcctggctggttgacgctctccggcttgtcagctctcctgagcttggtcacgatgaattctccacccaagccttagcgcgccagcaccgtgctctggaagaagagatacgcagccataggcctacactggatgcccttagagaacaggccgccgcattgcccccaacactgtctcggactcctgaggttcagagccgggtgcctacgctggaaaggcattacgaggaattgcaagcaagggccggtgaacgcgcccgggctctcgaagcagctctggctctgtatacaatgttaagtgaagcaggagcatgtggactgtgggtggaggaaaaggagcagtggctgaatggactggctctcccagaacgcttagaggacctggaggtggttcagcagcgctttgaaacactggagcctgagatgaacactctggctgctcaaatcacagctgttaatgacatcgctgagcagctgttgaaggcaaatccccctgggaaggacagaatcgtgaatacacaggagcaactcaaccacaggtggcagcagtttcgacgcttagccgatggcaaaaaggcagcgttgacctctgccctgtctatccagaactaccatcttgagtgcaccgagactcaggcttggatgcgtgagaagacgaaagtaattgaaagcactcaagggctgggaaatgatttggccggagttttagccctgcaaagaaaactggcgggaaccgagagggatcttgaggcaattgcagctagggtgggagagttaacgcgagaagctaacgccctggccgccggtcatccggcccaagctgtcgcgattaacgcccgtcttcgggaggttcagacaggctgggaagacctgagagctactatgaggaggcgggaagagtcgctcggtgaggccaggaggttgcaggacttcttgcggagccttgatgatttccaagcatggttggggaggacgcaaacggcggtggccagcgaggagggccccgcgaccctgcccgaagccgaagctctgctggcccaacatgccgctttgcgtggcgaagtcgagcgcgcccagtccgaatattctagattgcgcgccttgggtgaggaggtgactcgcgaccaggccgacccccagtgcctgtttcttcgccagcggctggaggctctggggacagggtgggaagagctcgggagaatgtgggaaagccgtcagggacgcttagcccaggcacatggctttcaggggtttcttcgagacgcaagacaagctgagggcgtcctgtcctctcaggagtacgtgctttcccacacggaaatgcccggcacgctccaggccgccgatgctgccatcaagaaactggaagacttcatgagcaccatggacgctaatggcgagagaatccatggccttcttgaggctggtagacaactggtttccgagggcaacatccacgctgacaagattcgcgagaaggctgacagtatagaacggcgtcacaagaaaaaccaggatgccgcacagcagtttctggggaggctccgggacaatagggagcagcagcactttctccaggactgccacgagcttaaactgtggattgacgagaagatgttaaccgcccaggatgtgtcttatgatgaagccaggaacctgcataccaaatggcaaaaacaccaagcctttatggccgagctggccgcaaacaaagattggctggacaaggttgataaggagggcagggaactgacacttgagaagcctgaactcaaagctctggtgagtgagaagttacgggacctccaccgcaggtgggatgagctcgagacgacaacccaagctaaggcaagatcacttttcgatgccaaccgcgcagagctgttcgcgcagagttgctgcgccctggaatcatggctggagagccttcaggcgcagttgcactctgatgactatggcaaggacctcacgtccgtgaacattctcctcaagaaacaacagatgttggaatgggagatggcggtgagagaaaaggaggttgaggccatccaagcgcaggcaaaagccctggcccaggaggaccagggtgccggtgaagtggaacgtactagcagggccgttgaagaaaaatttcgagcactctgtcagcctatgcgggagcgttgcaggcgattgcaggcttcccgcgagcaacaccaatttcatcgagacgttgaagacgagattctatgggtgactgagcgcctgcccatggcaagttctatggaacacggcaaggacctgcctagcgtgcagctccttatgaagaaaaatcagaccctgcaaaaggaaattcagggacacgagccaaggattgccgaccttcgagagaggcagcgggcgctaggcgcagcggccgccggccccgagttagccgagttgcaggaaatgtggaagcgcctcgggcacgaactcgaactgcggggcaaacggctggaagacgctctgagggcccagcaattctatcgcgatgccgctgaagctgaagcttggatgggggaacaggaactccatatgatgggtcaggaaaaggccaaagatgagctttccgctcaggccgaagtgaaaaagcatcaagtgcttgaacaggctctcgccgattacgcgcaaacgattcaccagctggctgcttcgtcacaagacatgatcgaccatgagcacccagaatcaacccggatctctataaggcaggcccaagtggacaagctgtatgcaggcctcaaggagttggccggggaacgcagagaaagactccaagagcatctcaggctgtgtcagcttagaagggaattagacgatcttgagcaatggattcaggaacgagaagtcgtcgctgcatcgcacgagttgggacaggactatgagcacgttacgatgctgcgcgacaagttcagagaattcagcagagacactagcacaatcgggcaggagagagtcgattctgccaacgctctggcgaatgggctgattgcaggtggccacgccgcacgggctacagtggctgagtggaaggactccctgaacgaggcatgggctgacctgttagaactcctggatactagaggacaggtactcgctgcagcatatgagctccagagattcttgcatggtgctcggcaggctctcgctcgcgtccagcacaagcagcagcagctgcccgacggcactgggcgcgatttgaatgcagcagaagcactgcagaggaggcactgcgcatacgagcatgacatccaggcgctctcaccgcaagtacagcaggtgcaggatgacggacaccggctccaaaaggcttacgcaggagacaaggccgaggagatcgggaggcatatgcaggctgttgctgaagcttgggcacagctgcagggcagttccgcagctaggagacaacttctcctggacaccacggacaaatttcgtttttttaaagctgtcagggagctgatgttgtggatggatgaggtgaatcttcagatggacgcccaggagcgacccagggatgtgtcttcagccgacctggtaataaaaaaccagcagggaataaaggccgaaatcgaggcgcgggctgacagattttccagctgtattgatatgggaaaagagctgctggcgcgttcccattatgctgctgaagagatcagcgaaaagctctcacagttgcaggcaagaagacaggagactgccgaaaaatggcaggagaaaatggactggttacagctggtccttgaagtacttgtattcggccgcgatgcagggatggccgaggcatggctgtgcagccaggagcccctggtgaggagcgccgagcttgggtgtaccgttgatgaagttgagagtctgatcaaaagacatgaagcttttcaaaaaagcgcggtcgcatgggaggagcgcttctgcgccctcgagaaattgaccgctcttgaggagagggagaaagaacgcaagagaaaaagggaagaggaagagaggcggaagcagccccccgctcccgagcccacggcaagcgttcccccgggcgatctggtgggcggccagactgctagtgacactacttgggacggcacacagccccgcccccctcccagtactcaggcgccatccgtgaacggtgtgtgtaccgacggtgaaccgtcccaaccactgttggggcagcaacgcctggaacacagcagtttccctgaagggccaggccccggcagtggagatgaagctaacgggcctaggggcgagagacaaacccggaccaggggtccagctccttccgcaatgccacaatccaggtcaactgaatctgctcacgcagcaaccttaccccctcgtggccctgagccctcagcacaggaacagatggaaggaatgttgtgcaggaagcaggagatggaagctttcggtaagaaagcagctaacaggagctggcagaatgtgtactgtgtgctccgaaggggatccctaggcttttataaagacgctaaggccgctagcgccggtgtgccctatcatggtgaggtgcccgtctcgcttgccagggcgcagggtagcgtggcgtttgattaccggaaacgcaagcacgtatttaagcttggactacaagacggaaaagaatatctgttccaggcaaaagacgaggctgagatgagtagctggctgagagtggtgaatgccgcgattgcaactgctagcagcgccagtggggaacccgaggagcccgtagtgcccagcaccacacgtggcatgaccagggcaatgacaatgccccctgtgagcccggttggtgctgaagggcccgtggttctgcgcagtaaggatgggagagaacgtgagcgggagaagagattcagcttctttaaaaagaataagtag

SEQ ID NO: 135907 - DNA, 2805 bp, synthetic construct
  misc_feature 1..2805: note = Description of Artificial Sequence: Synthetic coding sequence
  source 1..2805: mol_type = other DNA
atgtcgtccacgcttagcccgacggattttgatagccttgagatccagggacagtattcagacataaacaaccgatgggacttgccggacagtgattgggataacgattcttcctctgctcgcctatttgagcgctcgaggatcaaagcactcgccgatgagcgagaagccgtgcagaaaaaaacattcactaaatgggtgaacagccatcttgcacgagtgacttgccgggttggtgatctttactctgatctccgggatgggaggaatctcctccgcctgctggaagtattgagtggcgaaatcctgccgaagcctaccaagggccgcatgcggatacactgtctggagaatgttgacaaagccctgcagtttctgaaggaacagaaggttcacctcgagaatatggggtcccatgacattgtagacggtaaccaccgtttgaccctgggactagtatggactatcattctgcgcttccaaattcaggacatctccgtggaaacggaggataacaaggaaaaaaagtccgctaaggacgcactgctgttgtggtgtcagatgaagacagctggatatccaaacgttaacgtccataattttactacctcttggcgggacggcctcgcttttaacgcgatagtgcataagcaccgccccgatctcttagactttgaatccctgaagaagtgcaatgctcattataacctccagaacgccttcaatctggccgaaaaggaactgggcctgacaaaactcctggatccagaagatgtgaacgtcgaccaaccggatgaaaaaagtataattacatacgttgcaacatactatcactacttctcgaagatgaaagcgttggccgtggaggggaagaggattggcaaggtgttagaccacgccatggaggccgaacggctggtagagaagtatgaaagcttagcctccgaactgcttcagtggattgaacagactattgttaccctcaacgaccgccagctggccaattcgctgtcaggagttcagaatcagctccagagctttaattcttatcgcacggtagagaagccccctaaattcaccgaaaagggaaacctcgaggttctgctgttcactattcaatctaagctgagggcaaacaaccagaaagtgtacactcccagggaggggaggcttattagcgacatcaataaagcatgggagcgactggagaaggctgagcacgaaagagaactcgccctacggacagaacttatccggcaagagaagttggagcagctggcagcccggtttgaccgtaaggccgctatgagagagacatggttgtctgaaaaccagaggctagtgtctcaagataacttcgggttggagttggccgccgtcgaggctgccgtgaggaaacatgaagcgattgagactgacatcgtggcatactccgggcgcgtgcaagccgtggatgcagtggccgccgagttagctgccgaaagatatcatgatatcaagcgcatagcagcgagacagcataacgtggccagactctgggactttctgcggcagatggtggccgccaggcgggagaggctgcttctgaacctcgaattgcagaaagtgttccaggatctgctgtacctgatggactggatggaggaaatgaagggaagactccagagtcaagacttgggcaggcatctggccggagtggaggacttactccaactgcacgaacttgttgaagcagatatcgctgtgcaggctgagcgagtgagggctgtctctgccagtgctctgagattttgcaacccaggcaaggagtacaggccctgcgacccgcagctggtgagcgagagagtggctaagcttacagcactcgaagagagggagaaagagaggaaacgaaagagggaggaggaggagcgacgtaagcagcctccagcccccgaaccgaccgcctctgtgccgccaggcgatctggtgggtggacagacggctagcgacaccacatgggatggcacacagcctcgcccccccccttcgacacaggcgccatcggttaacggagtttgcacggatggagagccaagccagcctctgttagggcagcaacgcttagaacatagcagcttccctgagggccctggccccggtagtggcgatgaggccaacggcccgcggggcgagcgtcagactaggactagaggacctgctccttccgctatgccccaaagtcgctcaaccgaatccgcacatgccgccacattgccacctcggggacccgaaccaagcgctcaagaacaaatggaaggcatgctgtgtagaaagcaggaaatggaagcttttggtaagaaagctgccaatagaagctggcagaacgtttattgcgtgctcaggcggggttccctgggattttacaaggatgcaaaagcggcaagcgccggagtcccgtaccacggcgaggtgccagtttcactggcccgggcgcaggggagcgtggcgttcgactatagaaagcgtaagcatgtttttaagctaggactccaggatgggaaggagtacttattccaagccaaggacgaggccgagatgtcctcttggctgagggtggtgaacgccgcgattgccaccgcttccagcgcctcaggggagcctgaggagccagttgtcccatctaccaccagagggatgacaagagccatgactatgcctcctgtgagccccgttggagctgaagggccggtggtcttgcgctccaaggatggccgcgagcgggagcgggagaaacggttctctttctttaagaaaaacaagtag

SEQ ID NO: 135908 - DNA, 354 bp, synthetic construct
  misc_feature 1..354: note = Description of Artificial Sequence: Synthetic coding sequence
  source 1..354: mol_type = other DNA
atgtcttccaccctgtccccgacagactttgatagtctagaaatccaaggccagtatagcgacatcaataaccgttgggatctccccgactcagattgggacaacgatagttcgagtgctcgtctgttcgagcgctctcggattaaagccctggcagatgagagggaggctgtgcagaagaagaccttcaccaaatgggtcaattcccatttggccagggtgacttgccgcgtgggtgacctgtactccgacctgagggacgggcggaatctgctgcgactgctggaagtgctgtccggagaaatactgcctaaaccgacaaaaggtagaatgcgaattcattgtctggagtag

SEQ ID NO: 135909 - DNA, 7098 bp, synthetic construct
  misc_feature 1..7098: note = Description of Artificial Sequence: Synthetic coding sequence
  source 1..7098: mol_type = other DNA
atgagtagtaccctaagccccacagacttcgactcgctcgagattcaaggccagtacagcgatatcaacaatcgttgggaccttcctgactccgattgggataacgacagttcctccgctcgcctgtttgagcgctcccggatcaaagccctggccgatgagagagaggccgtccagaaaaaaacgttcacgaagtgggtgaactcacatctagctcgagtaacatgtcgcgtgggagacctgtactccgatttgcgagacggtaggaatctgctccgcctgttggaggtcctctctggggagatccttcctaaaccgacaaagggacgaatgcgaattcactgccttgagaacgtcgacaaggctctgcagttcctgaaggaacagaaagtccatctggaaaacatgggaagccacgatatcgtggatggcaatcaccggctaacattggggttggtgtggacaatcatccttagatttcagatccaagatattagcgttgagaccgaagataacaaagaaaagaagagcgctaaggatgccctgctgctatggtgtcagatgaagacagctgggtatcccaatgttaatgttcataatttcactacttcttggcgcgatggcctggccttcaatgcaattgtccacaagcaccgccctgatctcctggactttgagtccctcaagaaatgtaatgctcattataatctgcagaacgcatttaacctggccgagaaggagttgggactcacgaagctgctcgacccagaggatgtgaatgtcgaccagccagatgaaaagtcaatcattacctatgtggctacctactatcactacttcagtaagatgaaggctttagccgtcgaaggaaagaggatcggcaaggtactggaccacgcaatggaagctgagagactggtggaaaagtacgaatccttagcatccgagttgttacagtggattgaacaaaccattgtgacactgaatgataggcagctggccaattctctttccggcgtgcagaaccagttgcagagcttcaatagctatcgcactgtcgagaaacctccgaaattcacagaaaagggaaatctagaggtccttctcttcacgatccagtcaaaacttagagccaataaccaaaaggtatatacccctagagagggcagacttatttccgacatcaacaaagcttgggagcgcctggagaaggccgagcatgaaagagaactcgcccttaggacagaattgatccgtcaggaaaagctggagcagctagcagcgagatttgaccgtaaggccgctatgagggagacttggttgtctgaaaatcagcggctggtttctcaggataatttcgggttggaattggccgccgtcgaggctgccgttaggaagcatgaggcgattgaaaccgatattgtggcctatagcggaagggtgcaggctgtcgatgcagtggcagccgaactggctgccgagcgctatcatgatatcaagcgcatcgccgcccggcagcataatgtcgcccggctgtgggacttccttaggcagatggtcgctgccagaagagaaaggctgctgttgaatctggagctccagaaagtattccaggatctactgtaccttatggattggatggaggaaatgaaggggagattacagtcccaggatctcggtcggcacctggcaggggtggaagatctgctgcagctgcatgagctcgtcgaggctgatattgcggttcaggcagaacgagtccgggccgtgtccgcttctgcactgagattctgtaatccaggaaaggagtatcgaccttgcgacccccagctcgtgtcagagagagtggctaagctagagcaaagctacgaggccctttgcgagctggcagccgctcgcagggcccgcctcgaagagtctcgccgactgtggagattcctctgggaggtcggggaggcggaagcttgggtgagggaacagcagcatcttctggcttctgccgacactggtcgcgatttaactggcgccttacgactcctgaacaaacacactgccctgagaggcgagatgtccgggagattgggccccctcaagctaaccctggaacagggacagcagctggttgctgagggacatcctggggcctctcaggcttccgctagagccgctgagctccaggcacagtgggaaagactggaggccctagcagaggaacgagcccagagactggcacaggctgcttcactgtatcagtttcaagcagacgctaatgatatggaggcttggctggtagacgcactgcgcctggtgtccagcccggaactggggcacgatgagttcagcacccaggctttggcgagacagcacagagccctagaagaagagataagaagtcatcgacccacccttgacgcgcttagagaacaggcagccgccctaccacccacacttagccggacccccgaggttcagtcccgtgttcccacattggaaagacattacgaggagctgcaggctcgagcgggcgagagggctagagcactggaagcggctctcgcgctgtacacaatgttatctgaagcaggagcttgtgggctgtgggtcgaggagaaggaacaatggctgaatggcttggcccttccggaacgcctggaggacctggaagtagtccagcagcgttttgaaaccctcgagcccgagatgaataccctcgccgctcagatcacagctgtgaacgatatcgctgaacaactgcttaaggcaaacccccccggtaaagacaggatagtaaacactcaggagcagttgaatcacagatggcagcaattccgtaggctcgccgacggaaagaaagcggcactgacgagcgccctgtcgattcagaattaccatttagaatgtactgaaactcaggcctggatgagagagaaaactaaggtaatagaaagcacacaagggcttgggaatgatctggcgggggtattagcgctgcagagaaaactcgccgggactgagcgcgacctcgaggcaatcgctgcgcgtgtaggcgaactgactcgggaggcaaatgctctggccgctggacaccctgcacaggctgtcgctataaacgctcgtcttcgggaggtgcagactggatgggaagatctgcgcgccactatgaggagacgggaggagtcactgggggaggcccggcggctccaagactttctgagatcgctagacgacttccaggcctggcttggcagaacacaaacagctgttgcgtcagaagagggtccagccactctgccggaggctgaggctctactcgcccaacacgctgccttaagaggtgaggtggagagagctcagtccgagtattctaggctgcgcgccttaggcgaagaagtgacccgggaccaagctgatccccagtgtctgtttctgaggcagaggcttgaggcactaggtacgggctgggaagaactgggtcgtatgtgggagtccaggcaaggccgtcttgctcaggcgcatgggtttcagggctttttgagggatgctaggcaggcggaaggtgttctgagcagtcaggaatacgtgctgagccacacagagatgccgggtaccctgcaagctgctgacgcggcgatcaagaaactggaggatttcatgtcaacgatggatgcgaacggcgagcgaatccacggattattggaagccggtcgacagctggtcagcgagggcaacattcacgcagataaaataagagaaaaagcggattctattgaacgccgccataaaaagaatcaggatgcagcccagcagttcctcgggcgacttagggacaaccgagaacagcagcactttctgcaagactgtcacgaactaaagctgtggattgacgaaaagatgcttactgcccaagatgtgagttatgacgaagcaagaaatcttcatactaagtggcagaaacatcaggcgttcatggcggagctggctgcgaacaaggattggctggataaggtcgataaagaggggagggagttgaccctggagaagcccgagttaaaggctctggtctctgagaagctgcgcgatttgcatcggcgctgggatgagcttgagaccactacccaggctaaggctaggtctctgtttgacgctaaccgggccgagctgttcgcccagagctgttgtgcgctagagagctggctcgaaagcttacaggcgcagctgcactctgatgactatggcaaggacctgactagtgtgaacattctgctaaagaaacagcaaatgctggagtgggagatggctgtaagagaaaaggaggtggaggcaatccaggcacaggcaaaggcgttagcccaggaagaccagggcgccggcgaggtggagaggacgtctagagctgtggaagaaaagtttagagcattatgtcagcctatgagggaacgctgtagacggttgcaagctagcagagagcagcatcagtttcatcgcgacgttgaggacgaaatcctgtgggtgaccgaaagactccctatggctagctcgatggaacacggtaaagatcttccctcggtccagctcttaatgaaaaaaaaccaaaccttacaaaaagagatccaagggcacgaacctagaattgccgacctcagggagcgccagcgagctcttggcgctgccgccgccggcccggagctggcagagcttcaggaaatgtggaagcgtctggggcacgagctcgaactgcgagggaaacggttagaagacgccctgcgggctcaacaattctatcgggatgccgctgaggccgaagcatggatgggagagcaagaactgcatatgatggggcaggagaaagcaaaggatgaacttagtgcacaggccgaggtgaagaaacatcaagtgcttgaacaggcccttgccgactatgctcagaccatacaccagctcgcagcaagctcacaggacatgatagaccacgaacacccagaatccactcggatctccatcagacaagctcaggttgacaagttatatgcaggtctcaaggaattggcgggcgagaggcgcgaacgcctgcaggaacatcttcgcctgtgccagctcaggcgcgaactcgatgatttggaacagtggattcaggagcgtgaggtcgtggctgcctcccatgagctcgggcaagactacgagcacgtgacaatgttgagggacaagttccgagagtttagcagggatacatctactataggacaagaacgggtggattctgctaatgccttggctaacgggctgattgccggtgggcatgccgcaagagcaactgtggctgagtggaaagattctctcaatgaggcctgggcagacctgctcgagcttctggacacacgtgggcaagtgctggctgcagcttacgaactacagaggtttctacatggagcaaggcaagctttagccagggtgcagcacaagcagcaacagctgcctgacggaaccgggagagacttgaacgccgcagaagctttacagcggcgccattgtgcctatgaacacgacatacaagccctgtcgccccaagttcaacaggttcaggatgacgggcaccgcttgcagaaggcctatgctggcgacaaagccgaagagattggccggcatatgcaggctgtggccgaggcctgggcccaactccagggctcaagcgcggctcgtagacaactgctgctcgatacaaccgacaaattccgatttttcaaagcagtacgcgagctcatgctctggatggacgaagtgaacctgcaaatggacgcgcaagagagaccccgcgatgtctcctcagctgatctggtcattaaaaatcagcaaggcattaaggccgaaatcgaagctcgcgctgatagattcagcagctgtattgacatgggcaaggagctcctggctcggtcccattatgccgccgaggagatttctgagaagctgtctcagctgcaggcacgccggcaggaaaccgcagagaagtggcaggagaagatggattggctgcagttagtgttggaagtgctagtgttcggccgcgatgctggaatggccgaggcttggctttgttcgcaagagcctctggttaggagtgctgaactagggtgtaccgtggacgaggtcgagtccctcatcaaacgtcacgaagcttttcagaaatcggctgtggcttgggaagagaggttctgcgctttagagaagctcacagccctcgaggaaagggaaaaagaacgtaagcgcaagcgggaagaggaagaacggcggaagcagccacctgcccctgagcctaccgcctccgtacccccaggagaccttgtgggcggtcaaactgcgtccgatacaacttgggacggcacccagccccggcccccacccagcacgcaggcgccttctgtgaacggtgtatgcacggatggggaaccgtcccagccattgctggggcaacagcggctggagcatagctcatttccagagggccccggacctgggtcaggcgatgaagctaatggcccgcgaggggagaggcagactcggacccgtggaccagctccatccgctatgcctcagtcaagatccacagaatcggcccatgccgcgactttacctcctcgtggcccagagccaagtgcgcaggagcagatggagggcatgctctgccgaaaacaggagatggaggccttcgggaagaaagccgccaacagatcttggcagaacgtgtactgcgtactcagacgcggctcactggggttttataaagacgcaaaagcagcatcagctggcgtgccataccatggtgaagtgccagtttccctcgctagagctcagggatctgtggcctttgattaccgtaagcgcaaacacgtattcaaactgggcttacaggacggcaaagagtacctttttcaggccaaagatgaggtctcctgcccttcctgttcgagcctaagtgttcccttccagaagctgcccgctgcggattcgccctcatttccggtgctcccactgtttccaggcctcgtcctatgcggcaagaccggatgcgtgaggaggccacatcaggccgccctgcccgtctag

SEQ ID NO: 135910 - DNA, 7173 bp, synthetic construct
  misc_feature 1..7173: note = Description of Artificial Sequence: Synthetic coding sequence
  source 1..7173: mol_type = other DNA
atgagctcgacgctaagtcctaccgacttcgactcattggagattcagggccagtactcagacatcaacaaccgctgggacctgcccgactctgactgggataacgatagcagttccgcaaggctgtttgagcgaagtagaatcaaagctctcgctgacgagagagaggctgtgcagaaaaaaaccttcacaaaatgggtcaactcccacttagccagggtcacatgcagggtcggggacttatacagcgacctgagggacggccgcaaccttctgcgcctcttagaagtgctgagcggcgagattctccccaagcctactaaaggacgtatgagaatccactgcttagagaatgtagacaaggctctgcaatttctcaaggagcagaaagtgcacctcgagaacatgggctctcatgatattgtagacggaaatcataggctcaccttgggacttgtgtggaccatcatcctgcggttccagatacaggatatatctgttgaaacagaagacaacaaggaaaaaaagagtgcgaaggacgcgctgctgttgtggtgccagatgaaaaccgcaggctatcctaacgtgaatgttcataatttcaccacgagttggagggacggtttagcctttaacgctatagtccataagcatcggccggatctactggactttgaatctttgaagaagtgtaacgcccattataacctgcaaaacgcctttaacctggccgagaaggagttgggcctgactaaactcttagacccagaagacgttaacgtagaccaacctgatgaaaagtccatcataacctacgtcgccacatactatcactacttttcgaaaatgaaagccttggcagtagaagggaaacggattggaaaagtcttagaccacgccatggaggccgagcgcctggttgagaagtacgagagcctagcttctgaattgcttcagtggatcgaacagactattgtaacactgaatgatcggcaactagccaattccttgtcgggagtgcagaaccagttgcagtcttttaactcttaccgaacggtggagaagccccctaagttcacggagaagggtaaccttgaggtattgctgttcaccatccagtcaaaactgagagccaataatcagaaggtctataccccgcgcgagggccgactgatctcagacataaacaaggcctgggagcgcctggagaaagcagagcatgagcgtgagctcgccctgcgaaccgagctcattcgacaggagaagctggaacaactggctgcacggtttgaccggaaagcagctatgcgggaaacctggttgtcggagaatcagaggcttgtatctcaggacaattttggactcgaactcgcagccgttgaagcggccgtgcgtaaacacgaggcaatagaaactgatatcgttgcctacagtggccgcgtacaggctgtcgacgccgtggcagcagagctggctgcagagaggtaccacgacatcaagagaattgctgcaagacagcacaacgtcgctcgcctgtgggactttttaaggcaaatggtagcggctcgccgcgagagactcctgctgaacctcgagctgcagaaagtattccaggatctgctgtatctaatggattggatggaagagatgaagggaaggctgcagtctcaggatctgggccggcaccttgcaggcgtggaggatctcctgcaactgcacgagctagtggaggctgacattgccgtgcaagcggagcgggtacgcgccgtgtcagcttcagcgttgcggttctgcaaccctgggaaggagtatcggccttgcgaccctcagttggtcagtgaacgcgttgcaaaactcgaacaatcttatgaggccttgtgtgagctggcagcagcgcggcgggcccgactggaggaatcacgacggctctggcgctttctgtgggaagtgggagaggctgaggcctgggttagagaacagcagcatctcctggctagcgccgacaccgggcgcgaccttaccggcgcactccggttgcttaataagcatacagccctgaggggtgaaatgagcggacggctgggaccactaaaattgacactagagcagggccaacagctcgtggctgaagggcaccctggagcatctcaagccagtgcacgcgccgcagaattgcaggcacagtgggaaagactcgaagccctcgctgaggaaagagctcagcgtctggctcaggctgctagcctgtatcagtttcaagctgatgccaatgatatggaagcctggctcgtggatgctctgcgcctagtgagttcccctgagctagggcacgacgagttctccacccaagcgctggctagacaacacagagctttggaagaagaaattcgcagtcataggcccacgctggatgccctcagggaacaggcagcagccttacctcccacactgtctcgtacccccgaggtgcagtcaagggtgccaaccctcgaaaggcattacgaagagctgcaggccagggcaggcgaacgcgctagagctttagaggcagccctggcactatacactatgctcagtgaggctggcgcctgtggactctgggttgaggagaaggagcagtggctcaacggtctggccctaccagagcgactggaggacctcgaggtcgttcagcagcgattcgagacactggagcctgagatgaacacactggcagcacaaataaccgccgtgaatgatatagctgagcagcttctcaaagccaatcctccagggaaagacaggattgtaaacactcaggaacagctgaatcatagatggcagcagttccgtcgtctggctgacgggaaaaaggccgctctgactagcgctttgagcattcaaaactaccacctcgagtgcacggaaacacaggcctggatgcgtgaaaagaccaaagtcatcgagagcacgcagggcctgggcaacgacctggctggcgtgctcgccctgcagagaaagctcgccggcaccgagcgggacctggaagccatcgccgccagagtgggagagctgacacgagaggcaaatgcactggcggccggccatcccgcccaggccgtggctattaatgcgcgcctgcgagaagtccagaccggctgggaagacctgcgagccaccatgcgtagacgcgaagagagcctaggcgaggctagacggctacaggattttcttaggagtctggatgatttccaagcatggcttggccggacacagactgcggttgcatcagaggaagggcccgcaacgctgcccgaggcagaggcccttctggctcagcatgcggcgttaagaggagaggtggagagggctcaaagcgaatactcaagactccgcgccctaggagaggaggtcacgcgggatcaggccgatcctcagtgtctgttccttaggcaacgattggaggcgctgggaaccgggtgggaagaactggggcgaatgtgggagtcacggcagggacgcctggcgcaggcccatggattccaagggtttctgcgtgatgcccggcaagcagagggcgttctgagctcccaagagtatgtgctctctcacacggagatgccaggcacactacaggcagcggatgctgccatcaaaaagctggaggactttatgagcactatggacgctaatggcgagcgcattcacggcttgcttgaggccggtcgtcagctcgtgtcagagggaaacattcatgcggataaaatcagggaaaaggcagactcaatcgagaggaggcataaaaagaatcaagacgccgctcagcagtttctaggccgtctgagggacaaccgcgagcagcagcacttcctgcaggattgtcatgagctgaagctctggatagatgaaaaaatgctcacagcgcaagatgtgtcctatgatgaggcccgcaacctccacaccaagtggcagaaacatcaggcttttatggctgaactcgcagccaataaggactggctggacaaagtggacaaggaaggccgtgaactaaccttagaaaagcccgagctaaaagccttagtcagtgagaagctgcgggacctgcacagaagatgggatgaactggagaccacgactcaagccaaggcgcgttctctcttcgacgctaacagagctgagctgtttgcccagtcctgctgtgcattggaatcgtggctcgaaagcttacaggcccagcttcatagtgatgattacggcaaggatctgacctctgtgaacattcttcttaagaaacagcagatgcttgaatgggagatggcagtccgcgagaaggaggtggaggccattcaggcacaggcaaaggcactggcccaggaagatcagggtgcaggggaggttgagcgaacctcacgggctgttgaggagaagtttcgagctttgtgtcaacctatgagggagaggtgtagaagactgcaggcctcacgggaacagcatcaattccaccgggatgttgaagatgaaatactgtgggtcactgaaaggttgccaatggcatcctccatggagcatggcaaagatttgcctagcgtccaacttctgatgaagaaaaaccagaccttacagaaggaaatccagggccacgaacctaggatcgccgatcttcgtgaacgccaaagagccctgggtgccgccgccgccggtccagaattggccgaactgcaggagatgtggaagagactgggacacgaattggagctgcgtgggaagaggttagaggacgccctgcgtgctcagcagttttaccgagacgccgcggaggcagaggcctggatgggggaacaggagttgcacatgatggggcaggaaaaggcaaaagatgagctgagtgcacaggcagaagtgaaaaagcaccaagtgctcgagcaggcccttgccgactacgctcagaccattcaccaactggctgcctcatctcaagatatgattgaccacgagcacccggagtcaacccgaatatcaatcaggcaggcccaggtcgacaaactgtacgcaggacttaaagagctggccggggaaaggcgagaacgtttgcaggaacacctccgtctctgtcaactcagaagagaactcgacgatctcgaacagtggatccaggagagagaagtggtcgccgccagtcacgagctcgggcaagattacgagcacgttacaatgttgcgggataagttcagggagtttagtagagacacttctacgattggtcaagagagggtggatagtgccaacgcgctcgcgaacggtctgattgcgggaggccacgccgcgagggcaacagtggccgagtggaaggattcactgaatgaagcatgggctgacctgctggaactcttggacacccggggccaggttctggccgccgcctacgaactccagcggttcttgcatggagcacgacaggccctggcccgcgtccaacataaacagcagcagttacccgacggtacaggccgggatctgaatgctgctgaggccttgcaacggcgacactgcgcttatgaacatgatatccaagccctgagcccacaagtccagcaagtgcaagacgacggccatcggctgcagaaagcctacgctggcgacaaagccgaagaaattggaaggcatatgcaggccgtggcagaagcctgggcccagcttcaggggtcttcagcggcacgccggcagctgctcctagatactacagataagtttcgcttcttcaaagccgttcgcgaactcatgctgtggatggacgaggtcaatcttcagatggacgcccaggaaagacctcgtgacgtgtcatcagcagatctcgtcatcaagaatcaacaaggtattaaagctgagattgaagcacgtgctgaccgtttttcgtcctgcattgacatgggcaaagaattactggctcggagccattacgctgcagaagaaatctccgagaaattaagccagttgcaggctcgccgccaggagactgccgagaagtggcaggaaaaaatggattggctgcagctcgtcctcgaggtactggtatttggacgtgacgccggaatggccgaggcttggctctgcagccaagagcctctcgtgcgttcagctgaattgggctgcactgtcgacgaagtggaatcactgatcaagcgacatgaggctttccagaaatctgccgtggcctgggaagaacggttctgcgcattagagaagcttaccgccctcgaagagagagaaaaggagaggaaacggaagagagaggaggaagaacggaggaaacagccaccggccccagaacccaccgcaagcgtgccccccggtgacctggtggggggacagactgcctcagataccacatgggacggcacccagcctcgtccaccacctagcacccaggcccccagtgtcaacggagtctgcactgacggagaacccagccaacccttgctgggccagcagcggctggagcactcatcctttcctgagggaccaggcccaggatccggggacgaggccaacgggccgaggggtgagcggcagactcgcacccgtggtcctgccccctctgccatgcctcagtctcggagtaccgagtctgcccatgccgccactctgcccccgagaggccctgagccttcggcccaggagcagatggagggcatgttatgtcgtaagcaagagatggaagcctttgggaaaaaggccgctaacagatcttggcaaaacgtctattgcgtccttaggagggggtcattagggttctataaggatgcaaaggcagcttcagctggggttccctaccacggggaggtgcccgtcagcctcgcccgagctcagggctctgtggccttcgactacagaaaaagaaagcacgtttttaagctggggctgcaggacggaaaggagtacttgtttcaagcaaaagacgaggctgagatgagctcatggcttagagtggtgaacgcagcaattgcaacagcatcttcggcctcaggtgagcccgaggaaccggtcgtgccaagcacaacaaggggtatgactcgagcgatgaccatgccacctgttagtccagtgggagccgaagggcccgtggttctgcggtccaaggacgggcgggagagggagcgagagaagaggtttagcttcttcaaaaaaaataagtag

SEQ ID NO: 135911 - DNA, 6465 bp, synthetic construct
  misc_feature 1..6465: note = Description of Artificial Sequence: Synthetic coding sequence
  source 1..6465: mol_type = other DNA
atggcacaagttccaggcgaagtggacaacatggaaggcctgcctgcgcctaacaataacccggccgcacgttgggaatcgcccgatagagggtgggagcgagagcagcctgccgcctcgacagccgcagcctctttatttgagtgttcccgtattaaggcgctcgccgatgagagagaggccgtacagaaaaaaaccttcactaaatgggtcaacagccacctggcccgtgtcggatgccatataggcgacctgtacgtggatctgcgggacggtttcgtcctcacacggcttctggaagtgctatcaggtgaacagctaccccgacctacaaggggccggatgagaattcatagcctggagaatgtcgacaaagcgttgcagttcctgaaagaacagagggttcacctagagaacgtagggagtcatgacatcgtggatggtaaccacaggttgaccctgggccttgtctggacgatcattctgaggttccagatccaagtgatcaaaatcgagactgaagataatcgagaaacccggtccgctaaagacgccctcttgctctggtgccagatgaaaacagccgggtatcccgaagtgaacatccagaactttaccacttcatggcgggacggtctcgctttcaacgccctaatccatcgccaccggccggacctggtagatttctctaaactcactaagtccaacgctaactataatctgcagcgggccttccgaactgctgagcaacacttggggctggctcgactgctagatcctgaagatgtcaacatggaggccccggacgaaaagtcaatcatcacctacgtggttagtttctatcattatttcagcaagatgaaagctctcgctgtggagggtaaacgcattggaaaggttctggatcaggtattagaagtcggaaaaatcattgaaaggtatgaagagctggcggcagagctgctggcctggatccaccgtacggtaggactgatcagcaatcagaagttcgctaactccctttctggagtgcaacagcagctgcaagccttcactgcctactgtacccttgagaagcctgtcaaatttcaggagaagggcaacctggaggtgctgctgttctctattcagtcaaagttaagggcatgtaaccgcagactgtttgttccgagggagggatgtgggatctgggatattgacaaagcctggggagagctagaaaaagccgagcacgagcgggaagccgctctgagagctgagctcattaggcaagagaaactggaactcctggctcaaagatttgaccacaaagtggcaatgcgggagagctggctgaacgagaaccaaagactcgtcagccaggacaacttcgggtacgagttgcccgcagtcgaggcagctatgaagaaacacgaagcaatcgaagccgatatcgcagcttacgaggaacgcgtccagggtgtggcggagctggcccaagctttagctgcggaggggtactacgacatcaggcgggtggcagcacagagagattccgtcctccggcagtgggctctgcttactggcctggttggcgcaaggcgaactcgcctagaacagaatcttgcactccagaaggtgttccaagaaatggtgtacatggtggattggatggaggaaatgcaggctcaacttttgtcgagggagtgcggtcagcacctagtggaggctgacgacctcctgcagaagcacggactactcgaaggcgacatcgcggctcagtcggaaagggtggaagccctgaatgcggccgcgcttagattcagccaactacaggggtaccagccctgtgaccctcaagtcatatgtaatcgtgtcaaccatgtgcacggatgcctggccgaattgcaagaacaggcagctaggcggcgcgcagaactggaagccagcagaagcctgtgggctctactgcaggaacttgaagaggcagaatcttgggcccgggacaaggaaaggttgctggaggccgcgggcggaggcggtgcggccggcgccgctggagctgccggcacggctggcggagcacacgatctctctagtaccgcaaggctgctcgcccagcacaagatcctgcagggtgagctcggaggcaggcgggcgcttctccagcaagccctccgttgtggagaagagctggttgcagcgggtggagccgttggtcctggtgcggacaccgtccatcttgtagggctagcggagagagccgcatccgccagacgccggtggcagcgattagaggaggccgcggcccgtcgggagcgtcgcctgcaggaggcccgtgcccttcaccagtttggcgccgacctcgatgggcttcttgactggttgcgagacgcataccgtttagccgctgcaggcgatttcgggcacgacgaggcctcttcccggagactcgcaaggcagcatagggcactcacgggggaggtggaggcccaccggggcccggttagcggtctccgtcgacagctagccaccctgggcggagcttcgggagccggccctctggttgtagctctccaggtaagggtggtggaggccgagcagttgttcgcagaagtgaccgaagtcgccgcacttcgccgtcagtggctgcgggacgctttggctgtctatcggatgtttggtgaggtgcacgcctgcgaactgtggatcggtgaaaaggagcagtggctgttgagtatgcgcgtacccgacagcctcgatgatgtggaggttgtgcagcatagattcgagagcttagatcaagagatgaacagcttaatgggacgggtgctggacgtcaatcacaccgtgcaggagctggtggaaggcggacacccaagttccgatgaggttcgaagttgccaagatcacctgaactctcgctggaatcgaattgtagaactcgtggagcaaagaaaagaggagatgagtgcggtgctcctagtggaaaaccacgtattggaagtggctgaggtccgggcgcaggttcgggagaaacgacgtgctgtggagtccgcacctcgcgctgggggagcattgcagtggcgcctgagcggactggaagcagccttacaagctctggagcctcggcaggcagctttgctggaggaagcagccctgctggcagaaaggttccccgcccaggctgcgagactgcaccagggggccgaggagctgggcgcggagtggggagccctggccagcgccgcacaagcttgcggcgaggccgtggccgctgccggtagattgcagaggttcctgcacgacctggacgcgttcctcgattggctggtgagagctcaagaggcagccgggggctccgagggacctctgcctaacagcctggaggaagcggatgctttactggcccgccacgctgccctaaaggaggaagtggatcaaagggaagaggactacgcccgaatagtggctgcctctgaagccctgttggctgcagacggcgccgaactcggccccggactagcactggatgagtggcttccacacctcgagttaggctggcataagctgctgggcttatgggaggcacgtagggaagcattagtgcaggcccacatctaccaattgttcctgagagacctccgccaggctctggtcgttttacgtaatcaggagatggctctatccggagcggagctgcctggcactgtggaaagcgtggaagaggccttgaaacaacatcgcgattttctgacaacaatggaactgtctcagcagaaaatgcaagtcgcagtccaggcagctgaggggcttcttcggcagggcaacatctatggggaacaagcccaggaggctgtgaccagacttctcgaaaagaaccaagagaaccagctacgggcccagcagtggatgcagaaactccacgatcagttagaactccagcattttcttcgagattgtcatgaattggacgggtggatacatgaaaaaatgttaatggccagagatgggacccgcgaggacaatcacaagctccacaagcgctggcttaggcatcaggccttcatggccgagttggctcagaataaggagtggcttgaaaaaattgaacgagagggacagcaactgatgcaggaaaagcccgagctggcagctagcgtcagaaagaaactgggggagattcgccagtgttgggcagagctggagtccactacacaggccaaggcaagacaactgtttgaggcatctaaggccgaccagctagtgcaaagcttcgctgaactggataaaaagctgctccacatggagagccagctgcaggacgttgaccccgggggcgatctggcgacagttaatagccagctgaagaagctccagagcatggagtcccaggtcgaagagtggtatagggaggtgggtgaactacaggcccaaacagccgcactgcctttggaaccagcctcaaaggagctcgtgggtgagaggcagaatgccgtaggcgagcgcctggtccgtttattagaacctctgcaggagcgccggcgcctactcttagcctccaaagagttgcatcaggtggcccacgacctcgacgatgagctcgcatgggtgcaggagaggctgccactcgccatgcagactgagagagggaatggactgcaggctgtccagcaacatattaagaagaatcagggactgcggcgtgagatccaagcccacgggccgaggttagaggaagttctagaacgggcaggagctctggcatctctgaggtccccagaggccgaagccgtgagacgggggctggagcagctccagtcggcatgggctggactacgagaagcggcagagcgtagacagcaggtgctagacgctgcatttcaggtggaacagtattactttgacgttgccgaagtggaggcctggttaggggaacaggagctgctgatgatgtcagaagacaagggaaaggatgaacaaagcacgctacagcttttaaagaagcatcttcaattagagcagggcgtggagaattacgaggagtctattgcccaactatcgcgccaatgccgcgcactactcgaaatggggcaccctgacagtgaacagatcagtcggcgacagagccaggtggatagactctatgttgcactcaaagagctgggagaagagcggcgcgtagctcttgagcaacagtattggctatatcaactgtcccgtcaggtgtcagagctggagcattggatcgcagaaaaggaagtagtggccggctcccctgagttggggcaggactttgaacacgttagtgtgcttcaggaaaagttcagcgaattcgcgtcggagactggcatggcagggcgcgaaaggctcgccgccgtgaatcagatggtagacgagctgatcgagtgtgggcacaccgctgctgctaccatggcagagtggaaagacggtctgaatgaagcctgggccgaattactggaactgatgggcacaagagcccaactcctggcggcaagcagggagctgcacaagttcttctctgatgccagggaacttcagggccagatcgaggagaagcggagacggttgccaaggctgaccactccccctgagccacggccatctgcctcttccatgcagcggaccctccgagccttcgagcacgatctccaactgctggtgtcccaagtgagacagctacaggagggagccgcccagcttcggaccgtgtatgccggcgagcatgcagaagcaatcgcctcccgcgaacaagaggtgttgcaagggtggaaggagctgctgtcagcctgtgaggatgctcgcttgcacgtctctagcacggctgacgctctccgattccattcacaggttagggatctactatcgtggatggacgggatcgcatcacagattggagcggccgataagccccgggatgtgtcttccgtcgaggtcctcatgaattaccatcagggcttaaagacagaactcgaggccagagtgccggagctcacgacctgtcaagagctcggccgatccctgctcctgaataagagcgccatggcagatgaaatccaagcacaacttgataaactagggacaagaaaagaggaggtgagcgaaaagtgggacagacactgggaatggcttcagcagatgctcgaggttcaccagttcgcccaggaagctgttgttgcggacgcatggctcactgcccaggagccactgttacagagcagagaacttggctcttccgtcgacgaggtggagcaacttattcggcggcatgaagccttcaggaaagccgctgcagcatgggaggagcggttctcaagtcttcggaggttaacgacccccagaagggaggatcacctcaatcctggggtgcaggatcaaccatggcagcacaccgagaaaccatcattacctaaaccaaaagcaaacaaggagaaaactgcacgccgcgacggcacttgcctttag

SEQ ID NO: 135912 - DNA, 3930 bp, synthetic construct
  misc_feature 1..3930: note = Description of Artificial Sequence: Synthetic coding sequence
  source 1..3930: mol_type = other DNA
atggcgcaagtacccggggaagtcgacaacatggaaggtctgcccgctcctaataacaatcccgcggcaagatgggaatctcccgacagaggctgggagcgtgagcagcctgccgctagcacagcagctgcttccctgttcgagtgctctcgcatcaaggccttggctgacgagcgtgaggccgttcagaagaagacattcaccaagtgggtgaattctcaccttgcccgggtgggctgtcatattggcgatctttatgtggaccttcgcgacggcttcgtgcttaccagactccttgaggtcctgtcgggagagcagctgcctcgtcccaccagggggcgaatgagaatacactccctcgagaacgtggataaggccctgcagtttctaaaggagcagcgagtccatcttgaaaatgtcgggtcgcacgacattgtggacggaaatcacagacttaccctgggactggtctggacaattattctgaggttccagatccaagtgatcaagatcgagaccgaagacaatagagagacccgtagcgccaaggatgctctcctgctctggtgccaaatgaagactgcagggtaccccgaagttaatatccagaatttcacgacatcctggcgagatgggttagcgtttaacgcactgatacacagacacaggcccgatcttgttgacttcagtaaattgactaagtccaatgcaaactataatctccaacgcgcgtttagaaccgccgagcagcacctcggcctggcccggcttctagatccggaggacgttaatatggaggctccagacgagaaaagtataatcacatacgtggtatcattctaccactatttctccaaaatgaaggctctagctgtagaaggcaaacgaataggcaaagtgctggaccaggtgctcgaggtgggcaaaatcatcgagcgctatgaagaactggcagccgagctgttagcctggatccatcgcaccgtaggcctgatttccaaccagaagtttgccaattctctgtcaggggtgcaacagcaattacaagcatttaccgcttactgtacgttagaaaaaccagtcaagtttcaagaaaagggcaacttggaagtgctgttgtttagtattcagagcaagctacgggcctgtaatcggaggctgtttgtacccagggagggctgtggcatctgggacatcgacaaagcttggggcgagctggagaaggctgaacacgaaagggaggccgcgcttcgtgcagaattaatccgccaggaaaagttggagctgctcgcccagcggtttgaccataaggtcgctatgcgggagtcctggcttaatgagaaccagagactcgtgtctcaggataattttgggtacgagctccctgccgtggaagcggcgatgaaaaaacatgaggcaattgaagctgatatcgccgcctatgaggaacgtgtccagggtgtagccgagttggcgcaggccttggccgctgaggggtattacgatatccggcgagtcgcagcacagagggattccgtgctgagacagtgggccctcctgacaggattggtcggggctagacgaacaaggcttgaacagaatctggcgcttcagaaggtgtttcaggagatggtctacatggttgattggatggaagagatgcaagcccagctcctgtcccgggaatgcggccaacacctggtagaggctgacgacctgctgcaaaaacacggcctgttggaaggagacatcgcagctcagtcagaacgtgtggaagctcttaacgccgccgctctgcgctttagccaattgcaaggctatcagccttgtgaccctcaggtaatctgcaaccgagttaatcacgtgcatggctgcttagcggagctgcaagagcaggccgcaagacggagggccgagctagaggcaagccgctccctttgggcgctgctgcaggagttagaagaggctgagtcctgggccagagacaaggagcggctgttggaagctgcaggtggtggaggagctgccggggcagctggggcagccggaaccgctggcggagcccacgaccttagctccacggcgcgactactcgcccagcataaaatcctccagggcgaactcggtggacggagggccttgcttcagcaggccctgcgatgcggcgaagagttagtcgcggccggcggcgcagtcggcccaggcgctgatactgtgcacctggttggtctggcagaaagggccgcctctgcaaggcgaaggtggcaaagactggaagaggccgcagctcgtagagaacggaggttgcaagaagctagggctctgcaccagttcggagccgacttggatggactcctggactggctgcgagatgcatacagattagccgccgccggcgatttcgggcacgatgaggcatcttcccggcgccttgcaagacagcaccgagcactaacgggggaagtggaggcccatagggggcccgtttctggcttaaggagacagttggccacactggggggggcctcaggggctggcccactggttgtggctctgcaggtccgcgtcgtcgaggctgagcagctctttgccgaggtgacagaagtagcggcactcaggcggcagtggctgcgagatgccctcgccgtgtatcggatgtttggtgaggtgcatgcatgcgagctatggattggagaaaaggagcagtggttgctgagtatgcgagtccctgactctctggatgacgtggaagtcgtacagcacagattcgagagtctagatcaagagatgaattctctcatgggccgggtgctggacgttaaccatacagttcaggaactggtagagggtggacatccgagtagcgacgaagtaaggagctgccaggaccatctaaactctagatggaatcggatagttgagctcgtcgagcagcggaaagaggagatgtccgctgtactgcttgtggagaatcacgttcttgaggtcgctgaagtgcgggcacaggttcgggaaaaaagaagggcggtagagagcgcgccccgggctggcggcgccctgcagtggcgcctctccggattggaggccgccctccaggccttggagcctagacaggccgccctgctggaggaggccgctcttctggccgaacgcttccccgcacaggcggctcgcctccaccaaggagccgaggagttaggcgccgagtggggcgctttggcttcagccgcccaggcttgcggagaggcagtggctgccgccggacgcctgcaacgcttcctgcacgacctcgatgctttcctggattggctcgtgcgcgctcaagaggccgcaggtggaagtgagggccctctgcccaatagcctggaggaagccgatgccttgctagcaagacatgccgctcttaaggaggaagtggatcagagagaagaagattatgccaggattgtggctgccagcgaagccctcctggcagccgacggcgccgagctgggacctggcttggcattggatgaatggctccctcatctggaactgggatggcacaagctgctgggtctttgggaggcccgtcgcgaggccctggtacaggcgcacatataccagctgtttctccgcgacctgcgtcaagctttggtagtcttgaggaatcaggagatggctctgtctggggccgaacttcccggtactgtagaatccgtcgaggaagctctgaagcagcatagggattttctcaccaccatggagttgagtcagcagaaaatgcaagtagctgttcaggccgccgagggtcttctgcggcagggcaatatttatggagagcaggctcaggaggcagttaccagactcctcgagaaatgcctgattattcatccagccctgctgcaccccccatgggaacccccagaccttccacgaagctcaagctag

SEQ ID NO: 135913 - DNA, 7695 bp, synthetic construct
  misc_feature 1..7695: note = Description of Artificial Sequence: Synthetic coding sequence
  source 1..7695: mol_type = other DNA
atggcccaggttcctggcgaggtggataatatggagggactgcccgcccctaacaataacccagccgcccgctgggaatctcctgacaggggttgggagagagagcagcccgctgcttctaccgctgccgcctccctctttgaatgcagcaggatcaaagccctggcagatgaaagagaggccgtgcagaagaagaccttcacgaaatgggtaaattcccatcttgcgagagtagggtgtcacattggagacttgtacgtagatttgagggacggattcgtgctgacccgactgttggaggttctctctggggaacagctcccccggccaaccaggggccgcatgaggattcattctctcgaaaatgttgataaggctttacaatttctcaaggagcagagggtgcacttggaaaatgtcggatctcacgacatcgtggacggcaatcatcggctaacactgggactcgtgtggaccattatccttaggtttcaaattcaagtgattaaaatcgagacagaagacaaccgagaaaccaggtccgcaaaggacgccttgctgctatggtgccagatgaagaccgccggctatccggaagtgaatatccagaattttacaacctcctggagggacggcctggccttcaatgctctgattcacaggcatcgaccggatttagtggatttcagtaaactgacaaagtcaaatgctaactataacctccagagagcctttaggactgccgagcagcacctgggactggcacgactacttgaccccgaagatgtgaacatggaggccccagatgaaaagtctattatcacatatgtcgtaagcttctatcactacttcagcaaaatgaaagccctggcagtggaaggaaagaggatcggaaaagttcttgaccaggtgctggaggtgggaaagattatagaacggtatgaagaattggcagcagagctcctagcgtggatccaccgtaccgtgggcctcatctctaatcagaagtttgccaattccctgtctggggtgcagcagcagttgcaggccttcacagcctactgtaccctagagaagcccgtgaaattccaagaaaagggcaatttagaagttctgctgttcagcattcagtccaaacttagggcgtgcaaccgccgactcttcgttcctagggaggggtgtgggatttgggatatagacaaagcttggggtgagctcgagaaggcagaacacgagagagaagctgccctgagggccgagctcatcaggcaggagaaacttgaattactggcccagcgatttgaccacaaagtcgcaatgcgagagtcttggctgaacgaaaaccagagactggtgtcgcaggacaattttgggtacgaacttcccgcagtcgaagctgctatgaagaaacacgaggcgatagaggctgatatcgccgcctacgaagaacgggtgcagggggtggccgaactggcccaggccctcgccgcagaagggtactacgatatccgcagggttgccgctcagcgcgactccgtgctacgccaatgggcattactgaccggccttgtcggcgcccgcagaacacgacttgaacaaaatctggcgctacagaaggtgtttcaggagatggtctacatggtcgactggatggaggaaatgcaggcgcagctgctctccagagaatgtggccagcacctggtggaggccgatgatttactgcaaaaacacggactgctagagggagatattgccgcacagtccgaaagagtggaggctcttaacgccgccgccctaaggttttctcagctccagggctatcaaccatgtgacccacaggtgatctgcaatagggtgaatcacgtacatggttgtcttgctgaactccaggagcaagccgcccggcgcagggcagaactcgaggctagcaggtctctgtgggctctgctccaggaacttgaggaggccgaaagctgggcacgagataaagaacgcctgctggaggctgcaggaggcggcggtgccgccggggccgcaggcgccgctgggacagcaggaggggcccatgacctgtccagtaccgcacgcctgctggcacagcacaagatacttcaaggtgagttgggcggaaggagggcactcctccagcaggccctgcgatgcggcgaagagctggtggccgcaggtggcgcagttggcccgggcgccgataccgtgcacctcgtgggcctggctgaaagagcggcgtctgctcgccggcgttggcagcggctcgaagaggcagccgcaagacgcgagcggcgccttcaggaggcgcgtgctctgcaccagttcggggccgatctggacggtttgctcgactggctacgggacgcgtacaggttggctgctgccggcgatttcgggcacgatgaagcgtcaagtaggcgccttgcacgtcagcaccgcgccctgacaggtgaggtggaagcccatagaggccccgtgtccggccttaggcgacaactggccaccctgggcggagcatctggcgccggaccgttagttgtcgcattgcaggtgcgcgtcgtagaggccgaacagttgttcgctgaagttaccgaggtggccgccctcagacgccaatggctgagagatgcactggcggtctatcgaatgttcggcgaggtgcacgcatgtgaactgtggatcggagaaaaggaacagtggctgctatctatgcgcgttccagacagcctagacgatgtcgaagttgtgcaacaccggttcgaaagtctcgaccaggaaatgaattccttgatgggcagggtgctggacgtgaaccacacagtccaggagctcgtggaaggagggcacccaagttccgacgaggttcggagctgccaggaccatttgaactctcgatggaacaggatcgtggagctggtcgagcagcgtaaggaagagatgagcgccgtgctgctggtggagaatcatgtcctcgaggtggctgaggtacgagcccaagtgcgggagaaaagaagggccgtggagtcagcgccgagggccggtggcgcacttcagtggagactcagcggcctggaggcggcgctgcaagccttggaacctcggcaggccgcactgttagaggaagccgccctcctggcggagcgctttcccgcccaggctgcacgcctgcaccagggcgccgaggagctcggcgcagagtggggtgccctggccagtgctgctcaggcttgcggcgaggccgtcgcagcagctggaaggctgcagaggttcttacatgacctggatgcattcctagactggctggtgcgggcacaggaggccgccgggggttccgagggacccttgcccaactctctcgaagaggcagatgcgctccttgctcgccacgccgctctcaaggaggaagtggatcagagagaggaggactatgcaagaatagttgccgccagtgaggctctgcttgcggcagacggagcggagctaggcccaggcctggccctggatgagtggttgccccatcttgagctaggctggcacaaattgctggggctgtgggaagccaggcgagaggcacttgtgcaagcacatatataccagctctttttgagggacctaagacaggctcttgtggtcctcagaaaccaggagatggctctgtctggcgccgaactgcctgggactgtggagtccgtggaggaggctttaaagcaacaccgcgatttcctgaccactatggaactcagtcagcagaaaatgcaggtagctgtgcaggccgctgagggcctactgaggcagggcaatatttacggagaacaagctcaggaggcggtaacccgcttgctagagaagaatcaggaaaatcagctacgggcgcaacaatggatgcagaagttgcatgatcagttggaactccagcatttcctccgagattgccatgaactcgacggatggatacacgaaaagatgctgatggcccgagatggcacacgcgaggataatcacaagcttcataaacgctggctcagacaccaggcctttatggctgagctcgcacaaaacaaggaatggctcgagaagatcgagcgagaagggcagcagctcatgcaggaaaagcccgagcttgctgcctccgtccgtaaaaagctgggggaaatcagacaatgttgggctgagcttgaaagtacaacccaggcaaaagcccggcagctttttgaagctagtaaggctgatcagcttgttcagagcttcgctgaactggataaaaaattactccatatggagtcacagcttcaggatgtcgatccaggaggcgatttggccacagtaaactcccagttaaaaaagcttcaatcaatggagagccaggtcgaggagtggtacagagaggttggtgagctccaagcccaaactgctgctcttcctcttgagcctgcgagcaaagagctagtgggggaacgccaaaacgccgtaggagaaaggcttgtcaggctgctggagcccctacaggaacgacggcggctgctcctcgccagcaaagaactgcatcaggtggcccatgacttagatgacgagttggcttgggtgcaggagaggctcccgctggcaatgcaaacggagagaggtaacggcctccaggccgtgcagcagcatattaagaagaaccaaggtctgcggagggaaatccaggcacacggcccacggcttgaagaggtgctggaaagggccggcgccctggctagtctgcggtccccggaggcagaggcagtgaggagaggcctggaacagctgcagagtgcctgggccgggctcagggaggcagctgagaggcggcagcaggtgctggatgctgccttccaggttgagcagtattactttgacgtcgccgaggtcgaagcctggttgggcgaacaggaactactgatgatgagtgaggataaagggaaggatgaacagagcacactgcaactacttaaaaaacatctccagctcgaacagggggtggaaaattacgaagagagcatagcccaattaagtcggcaatgtagagccctgttggagatggggcaccctgatagcgaacagatctcccgacgacagtcgcaggtggatcgcctgtatgtagccctgaaagaactcggcgaagaacggcgggtggcccttgagcagcaatactggctctatcagctctctaggcaggtctccgaattggaacactggatcgccgagaaggaagtcgttgccggtagccccgagctgggacaggatttcgagcacgtgtcagtgctgcaagaaaaattttccgagttcgcttccgagaccggcatggctggacgcgagagattggccgctgtcaatcagatggtggatgagctgatcgagtgtggtcacaccgcggccgccactatggcagagtggaaagacgggctcaacgaagcctgggccgagctcctggagctcatggggaccagagcccagcttctggctgccagtcgtgaactccataagttcttcagcgacgctcgggagctccagggccagatcgaggagaagcggagaagactgccccgacttacaactccaccagagcctcgcccatcagcatcctctatgcaaaggaccttgagggcgtttgaacatgacctgcagttactcgtctctcaggttaggcagcttcaggagggcgctgcacagttgcgaaccgtgtacgccggcgagcacgctgaggccatagcaagccgggaacaagaggtcctgcaaggttggaaggaactcctgtccgcatgcgaggatgcccgtctgcacgtttcatcgacagcggacgccctccggtttcattcgcaggtgcgagacctgctcagctggatggacggaatcgcatcgcaaataggcgccgcagacaaacccagagatgtgagtagcgtggaagtgctgatgaactaccaccagggactgaaaacagagcttgaagcccgggttcctgaactgaccacctgccaggagctggggagaagccttttgctgaacaagtctgccatggccgacgagatacaggcccagcttgacaaacttggaaccaggaaggaggaagtatccgaaaaatgggatagacattgggagtggctccaacagatgcttgaagtgcatcagttcgcacaagaggccgttgtggccgacgcttggctgactgcccaggagcccctgctgcagagcagggagctgggatcctctgtggatgaggtggaacaactgatacgccgacacgaagcatttcggaaagccgcagcagcttgggaggaaaggttttcatcactgagaaggctaaccaccattgagaaaataaaggcggagcagtcaaagcagccgccaacccctctcctggggagaaagttctttggagaccccacagaactagccgctaaggctgcacctctgctgagacccggcggatacgagcgtggcctggagcccctcgcccgaagagctagcgatacgctgtcagctgaggtgagaaccagagttgggtacgtgcgccaggagctcaaaccagagcgcttgcagcccaggatcgaccggctgcccgagattcctggacgtgtagaaccagctgcactgcctgcagcacctgaggatgctgctgagacaccagcaacacccgctgcagcagagcaggtcagaccacggccggaaagacaggagagcgccgatcgggcggaagaactgccccgccggaggagaccagagagacaggagtctgttgaccagtccgaagaagccgctagacgcagaaggccagaaagacaagagagtgcagaacatgaggccgcacattcactcaccttgggtcggtatgaacagatggaacgccggcgggaaagacgggaacggcggcttgaaaggcaggagagctccgagcaagaaatgcccatcagaggcgatctggtaaagggcaaagccacgctggcagatatcgtggaacaacttcaagaaaaggaagccgggcctggcctgcccgccggcccctctttgccccagcccagagaactgcctccgggtaggctgccaaacggcctggaacttcccgaacggaccccccggcctgatcggcctcgggctcgggaccgtcccaagccccgaaggaggcccaggccacgagagggtggggagggaggtggaagtcgccgtagccgtagcgccccggctcagggggggagtgccccggcccctccaccaccaccaactcacaccgtgcagcacgaggggttcctgctccgaaaacgggaactggacgcgaaccgaaagtcatcaaaccgctcctgggtctctctctattgcgtgctgtcgaagggcgagctgggtttttataaggatagcaaggggccggcctcagggtccacgcatgggggggagcccctgctctcactgcataaggccacaagcgaggtggcctcagactacaaaaagaagaagcatgtctttaagctacaaactcaggacggctctgagttcctcctgcaggcaaaggacgaggaggaaatgaatggctggttggaggccgtggcttcaagtgttgctgagcacgccgagatcgcccggtgggggcaaacgctgcctacgactagctctacagacgagggcaatcccaagcgagagggcggggacagacgcgccagcggtagacggaagtag

SEQ ID NO: 135914 - DNA, 2037 bp, synthetic construct
  misc_feature 1..2037: note = Description of Artificial Sequence: Synthetic coding sequence
  source 1..2037: mol_type = other DNA
atgctcatggctagggatggcacccgggaggataaccataagctgcacaagcggtggctgagacatcaggcattcatggccgagctggctcaaaacaaggaatggttagagaaaatcgagcgcgagggccaacaactgatgcaggaaaagccagaactcgcggcgagcgtaaggaaaaagctcggcgaaatacgtcaatgttgggccgagttggaatcaactacccaggcaaaggcaagacagttatttgaagcctctaaagcagaccaactggtgcagagctttgcagaactggataagaaacttctgcacatggaatcccagctgcaagacgtggacccaggaggcgaccttgctacagtcaactctcagctgaaaaagctgcagtctatggaatcccaggtcgaagaatggtatagagaagtgggggaacttcaagctcagaccgcggccttgccactggagcctgctagcaaagagcttgtgggagagagacaaaacgcggtcggagaaagactcgtgcggctccttgagccactgcaggaaagaaggcggctgttgcttgcctcaaaggaactgcatcaggtggcccatgacctggacgatgagcttgcatgggttcaggaaaggctcccactcgctatgcagactgaaagaggcaatggtttgcaggcagtgcaacagcacattaaaaaaaaccagggactgagaagggagatccaggcacacgggcccaggcttgaggaggtccttgagcgagcaggcgcccttgcttctctccgctctccagaggctgaggcggtgcggcgaggactggaacagctccagtccgcctgggctgggctgcgagaggctgcagagaggaggcaacaggtgttggacgctgccttccaggttgagcagtactattttgatgtggcggaggttgaagcttggttgggcgaacaggagctgctgatgatgagtgaggacaagggtaaagacgagcagtcaactctgcagctgctcaaaaagcatctgcagctggagcagggcgtggagaactacgaggagtccatagcccagctcagccgtcagtgccgcgcacttctagaaatgggccaccccgattcagaacagatctccagacgacaatcccaagtggaccgcctttacgtggcccttaaggaactgggcgaggagaggagggtcgctctggagcagcagtattggctctatcagctatcacggcaggtcagtgagctggaacactggattgccgaaaaggaagtagttgcgggctcgccagagctgggacaggacttcgagcacgtaagtgtgctgcaggagaaatttagcgaattcgcctcagagacaggcatggccgggagggagaggctggcagccgtgaaccaaatggtggacgagcttatcgaatgtggccacaccgccgcggcaacaatggcagagtggaaagatggactgaatgaggcgtgggcagagctgttggaactcatgggcacgcgagctcagctgttggcggcatccagagaactgcataaattcttcagtgacgcgcgtgaactgcaaggtcagatcgaggaaaagagacgccgcctgccccgactgaccacaccaccggaacctaggccctccgcttctagtatgcagcgcactctgagggccttcgagcacgacctgcagttgctcgtgtcccaggtcagacagctgcaagaaggtgctgcccaactccgcacggtttacgctggggagcatgcggaggcgattgcttcacgagagcaagaagtcctgcagggttggaaggaactgttatcagcatgtgaagacgccaggctacatgtgtcgtctacggccgatgccctgcggtttcacagccaggttagagatctgctgagctggatggatgggatagcctctcagatcggagccgcagacaaaccccgctgcccatcaagcttgttggggctgccagcatccccgtggtggccaacgcctgctacgccatcccccctgacagccccctttagtatggagtag

SEQ ID NO: 135915 - DNA, 3924 bp, synthetic construct
  misc_feature 1..3924: note = Description of Artificial Sequence: Synthetic coding sequence
  source 1..3924: mol_type = other DNA
atgccccactatccctcctgtagtagcgcgccatccctggggactccgagaccgccccagattcagcagctggaagcccgccatcgcaatcaggagaatcaactgcgtgcgcaacagtggatgcaaaaactgcacgaccagctggagcttcagcattttctccgtgactgccatgaattggacggctggattcatgaaaagatgcttatggcgagagacggcacccgagaagacaatcataagcttcacaagcgctggctgagacaccaagctttcatggccgagctcgcacagaataaagagtggttggaaaaaattgaacgggagggtcagcagttgatgcaggagaaaccagaactggccgcatccgtaagaaaaaagctgggagagattaggcagtgttgggcggagctcgaaagcactacccaggcaaaagcaaggcaattattcgaagcctcaaaggccgaccagctggtgcagtcattcgcggaattggataaaaagcttttacacatggaatctcagctccaggatgttgacccaggcggcgatctggccacagttaattctcaactcaagaagctccagtctatggagtcgcaggtagaagaatggtatagggaggtgggggagctacaggcccagactgccgctttgcccctggagccagcgtccaaggaactcgtgggggaaaggcaaaacgccgtaggggagcggttggtccgcctcctcgagccactgcaggagaggaggcggcttctgttggcctctaaagagctacatcaagtggcacacgatctcgacgatgaactggcctgggtccaggaacgtttaccactggctatgcaaaccgaaagggggaacggattacaggccgtgcagcagcacatcaagaagaaccagggcttaaggagggaaatccaagctcacggaccacggcttgaggaagtgctcgaaagagccggtgcactcgcaagcctgaggagccctgaagccgaggccgtcagaagggggttggagcagctgcaatccgcatgggccggactcagagaggctgcggaaagacgacagcaagtgctagatgcagccttccaggtggagcagtactactttgatgtcgccgaagtggaggcctggcttggagaacaggaattgctgatgatgtccgaagacaaaggaaaggatgaacagtcaactctacagttgctgaaaaagcatctgcagctcgaacaaggcgtagaaaactatgaagagtctattgcccaactgagtaggcaatgccgcgctctgctggaaatggggcatcccgactccgaacagatttctcgtaggcagagtcaagtggatcggctatacgtggccctgaaggaattaggggaggaacgacgagtggctctcgaacagcagtactggctgtatcaactgagcagacaggtgtccgagttggaacattggatagctgagaaagaagtggtggcgggaagccccgaactcggacaagattttgaacacgtttcagtgctgcaggaaaaattctctgagtttgcgtccgagacaggaatggctgggcgtgagcggctcgccgccgtcaaccaaatggtagatgagctcatagagtgtggccatactgcagccgctaccatggctgagtggaaagatgggttaaacgaagcttgggcagagctgctagaattgatgggtacccgcgcccagctcttagcagcttctagggaacttcacaaatttttttcagatgcccgagagcttcagggtcagattgaagagaaaaggcggcggctgccacgactgacgacccccccagaaccacgcccatcagccagctccatgcaaagaacactcagagcctttgaacacgacctccagctcctcgtgagccaagtgcgacagctgcaagagggtgcagcccaattgcggactgtgtacgccggggaacacgcagaagctatagcaagtcgcgagcaggaagtcttgcagggctggaaagaactcttatccgcctgcgaggatgcaaggctgcacgtgtcctccaccgccgacgcgctccgattccacagccaagtcagagaccttttgtcatggatggacggcattgctagtcagataggggccgcggacaagccacgggatgtgagctcagtggaggtgctgatgaactaccatcagggactcaaaaccgagctggaggcccgcgtgcccgaactcacgacctgtcaggaattgggccggagcttgttgttgaacaaaagtgccatggcggacgaaatccaggcccagctggataaactcggaactcggaaggaggaagtgtcagagaagtgggatcgacactgggagtggctgcaacagatgctcgaagtgcatcagttcgcccaggaggcagtagtcgctgacgcttggctcacggcccaagagcccctgttgcaatcaagagaattgggatcgtctgttgacgaggttgaacaacttattcgacgccacgaagccttccggaaggcagctgccgcctgggaagagaggttctcctcccttagacggctgaccaccatagagaagatcaaggccgagcagtccaagcagcctcccactcccctgctcgggaggaaatttttcggtgatccgacagaactcgccgcaaaggctgcacctctgctacgtccaggtgggtacgagagggggttagagccactggcccgccgtgcttctgacactttatctgccgaagtcagaacacgggttggttacgtccgacaagaactaaagcccgagcggctgcagcctagaatcgatcgcctgcctgagattcccggaagggtagaacccgcagcgcttcctgctgcacccgaggatgcagcggagactccggcgaccccagctgcagcagaacaggttcgcccccgaccagagaggcaggagtccgctgatcgggcggaagagctgcctagacgtcggaggccagaacggcaggagagcgtcgatcagagcgaggaagcagctcgcaggcgacgcccagagcgtcaggagtctgccgagcacgaggcggcacacagccttaccctcggtaggtacgaacagatggaacggcgcagagagcggagagagaggcggttagagcggcaggaatcatcagaacaggaaatgccaatccgcggagacttagttaagggcaaggcaactttggcggatatcgttgagcagctgcaggagaaagaagcaggaccaggactgcccgcaggaccttctctgcctcagccaagggagctccccccgggccggctgcctaatggtctggagctgcccgagcgtacaccacgaccagatcgtcctagagccagggatcgacctaagcctagaagaagaccccggccaagagaaggtggagaggggggtggcagtaggcgcagccggtcagcgccagcacagggaggcagcgctccagccccgccccctccaccgacacatacagttcagcacgaaggatttttgctaagaaagagagagcttgacgcaaaccggaaaagcagcaaccggtcttgggtgagtctctattgcgtgctgtcgaagggggagttgggtttttacaaagactcaaaaggtcctgcgagcggctctactcatgggggcgaaccgctgctcagcctccacaaggccacaagcgaggtcgctagcgattataaaaagaagaagcatgtgtttaaattacagacacaggacgggtccgaattcctccttcaggctaaggatgaggaggagatgaatgggtggttggaagcagttgctagctccgtggctgagcacgctgagatcgctagatggggtcagaccctgcccaccactagtagcacagacgagggaaatccaaaaagggaaggaggggataggcgggctagcggcaggcggaagtag

SEQ ID NO: 135916 - DNA, 7695 bp, synthetic construct
  misc_feature 1..7695: note = Description of Artificial Sequence: Synthetic coding sequence
  source 1..7695: mol_type = other DNA
atggcccaggttcccggagaggtggacaacatggagggcctgcccgccccaaacaataatcccgctgctagatgggaaagccccgaccggggttgggagagagagcagcccgccgccagtacagccgctgcatctctcttcgaatgttcccgaataaaagccctggctgacgagagagaggctgtgcaaaaaaagacttttacgaagtgggtcaattcccacctggctcgcgtcgggtgccacataggggatctttatgtggatctgagagacgggttcgtgcttactaggctcctggaagttctgagcggtgaacaactaccacggccaacgagagggaggatgcggatccactccctggaaaatgtcgacaaagctctgcagtttctgaaagaacagcgggtacatttggaaaatgtcggatcccacgacatcgtggacggcaaccataggttgacactcggacttgtctggacaattatcctgcggtttcagattcaagtcataaagatcgaaaccgaagataaccgggagacacggtcagcgaaggatgcgttattgctatggtgtcagatgaaaactgccggatatcctgaggttaatatccaaaactttaccaccagctggcgagatggtctggcttttaatgccttgatccacaggcataggcctgatctcgtggacttcagcaaattaacaaagtcaaatgcaaactacaaccttcagcgggccttccggactgccgagcagcatctaggattggctcgcctgttggacccagaagatgtgaacatggaggcacccgatgagaaatccatcataacttacgtggtgagtttttatcactacttcagtaaaatgaaggccctcgcggttgagggcaagcgaattgggaaggtgttggaccaggtgctcgaggtgggcaagattattgaacgctatgaggaattagcagccgagcttctcgcttggattcatcgaacggtgggactgatctccaaccagaagttcgccaactcgctctccggggttcagcagcaactgcaagcttttaccgcctactgcacactcgaaaagcccgtaaagtttcaggaaaaagggaacctggaggttctcctcttcagcatccagtccaagctgagagcttgcaacaggaggctgttcgtaccgcgagagggttgcggaatatgggacatcgacaaagcctggggggaactcgagaaggctgagcacgaacgcgaggctgctctgcgcgccgagcttatccgacaggaaaagctggagctgctggcccagcgattcgatcataaggtagcgatgagggaatcttggcttaatgaaaaccagaggcttgttagtcaagataatttcggctatgagcttcctgctgtggaggccgccatgaaaaagcatgaggcaatcgaggccgatatcgccgcgtatgaagaacgggtccagggggtggccgagctggcgcaggccctggccgccgagggatactatgatatccgccgtgtggccgcgcagagagactcagtgctgcgccaatgggctttgctgaccggtctcgttggagctagaagaactcgcctagagcagaacctggcactccaaaaagtgtttcaagagatggtgtatatggtggactggatggaggagatgcaggctcagctgctatccagagagtgtggccagcacctggtggaggccgatgacttgctgcagaaacatggcttgctggaaggagatatcgctgcgcaatccgaacgtgtcgaggcattgaacgccgcagctctgaggttttcccagctccaaggctaccaaccttgtgatccacaggtgatttgcaaccgagtgaaccatgttcacggttgtctcgccgagctgcaggaacaggctgccagacgtagggctgaactcgaggcttccaggagtttgtgggcactcctgcaggagcttgaggaggctgagagttgggccagggataaggaaagactgctggaggccgccggaggcggaggcgccgctggtgccgcgggtgcagcggggacagcagggggagctcacgacttgtccagcaccgcacgactgctggcccagcacaaaattcttcagggcgaactgggagggcgcagggctcttttacaacaagcgctcagatgcggggaggagctggtcgccgcaggaggcgccgtgggtcctggggctgacaccgtgcacctggttggcctggccgagcgggcagccagcgcacgacgtagatggcaacgccttgaagaagcagcggcccggagggagaggaggctccaggaagcccgggccttgcaccagtttggtgcagacttggacggactccttgactggctgagagacgcctatagactcgccgctgcaggtgacttcggacacgacgaagcaagttctaggcgactcgctcgccagcaccgggcgctcaccggtgaggtggaggcccacaggggaccagtctcaggcttgcgccggcagcttgcaactctcggaggggccagcggcgccggtcccctggtcgtggcattgcaggtgcgcgtagtggaagctgagcagctctttgccgaggttacggaggtggccgctctcaggagacagtggcttagagacgcactggccgtgtacagaatgttcggagaggttcacgcttgcgaactgtggatcggggaaaaggaacagtggctattgagtatgcgagtgccggactctctggacgatgtagaggtggtgcaacaccggtttgagtccctggaccaggaaatgaactctctaatgggcagggtgctggatgttaatcacaccgtccaggaattggtggaaggggggcacccctcttccgatgaagtccgcagttgtcaggaccatttaaacagcagatggaaccgaattgtggaactggtagagcagcgaaaagaagagatgtccgcagtgttgctcgtcgaaaaccatgtactggaggtggccgaggtccgtgctcaagtccgcgagaagaggcgcgccgtggagtctgctccacgcgccggtggggcgttgcaatggcgcctgagcgggctggaggcagcgctccaggccctggagcctcgtcaggccgccctgctagaagaagctgctctgttggccgaacgtttcccagcccaggcagccaggctgcaccagggggccgaagagctgggagctgaatggggggccctggcaagcgctgcccaggcctgcggagaagcggtcgcagccgctggtagattgcagagatttctgcatgatctggacgcatttcttgactggcttgtaagggctcaggaagccgccgggggctctgagggtcccctgccaaattcgctggaggaggcagatgccctcttggcacggcacgcagcactcaaagaggaggtcgatcaacgcgaggaggattatgctcggatagtggctgccagcgaagcacttctggccgccgatggcgccgagctggggccaggactcgccttggatgagtggctgccccatctggaactcggatggcacaagctattggggctgtgggaagctcggagggaggccctcgtgcaggcccatatctaccaactcttcttgagggaccttcggcaagctttagtggtcttgagaaaccaggaaatggcactgtccggagccgagcttcctgggacagtagagagtgtggaagaggccctcaaacagcaccgggacttcctaaccaccatggagttgagccagcagaagatgcaggtggccgtgcaggccgcggagggcctcttacgtcaaggaaatatctatggcgagcaggcccaggaggctgttacccggctgttggagaagaatcaggaaaatcagttacgggcccagcaatggatgcaaaagctccatgaccagctggaactgcaacactttctgagagactgtcatgagcttgatggttggattcacgaaaagatgttaatggcacgcgatggtactagagaagataaccacaaactacacaaaagatggttgaggcaccaagcattcatggctgaactcgcccagaataaggaatggcttgagaaaatcgaacgggagggacagcaactgatgcaggagaaaccggaacttgctgcctcagtaaggaaaaagctgggagaaatcagacagtgttgggccgagctcgaatccaccacacaggctaaagcccgccagttgttcgaggcctctaaggctgaccagcttgtgcagtccttcgcagagctagataaaaagctgctgcacatggaatcccagcttcaggacgtagatcccggtggcgacctcgcaactgtgaatagtcagcttaagaagcttcagtcaatggaatcacaggtggaagaatggtatagagaggttggcgaactccaagcccagacagccgctctgcctctggagcctgcatcaaaagaattggtaggggaaaggcagaacgcagtgggagagagattggtacggttactggaacccctgcaagaacgacggagactgttacttgcgtcaaaggagctgcaccaggtggctcacgattggactacgagctgggcctgggtgcaagagaggctccccttagctatgcaaacagagcgaggtaacgggctgcaagctgtccagcagcacatcaagaagaaccagggtctgagacgagaaatccaggctcacggacctcgtttggaagaggtcctggagagggccggagcactggctagcctgaggagccccgaagcagaggccgtacgtagaggactggagcagctccagagcgcctgggctggactcagagaggcagcggagaggaggcagcaagtcttagacgccgcattccaggtggagcagtactatttcgacgtagccgaagtagaagcatggctcggggagcaagagttgctcatgatgtccgaagataaaggcaaggatgagcaatccaccttgcaactcctgaagaagcatcttcagctggaacagggtgtcgagaattacgaggagtcaatcgcacagctgagcaggcaatgtcgcgcccttttggaaatgggacacccggatagcgaacagatcagtaggagacagagtcaggtggataggctttatgtcgctttaaaagagcttggagaggaacgccgcgttgcgctcgagcaacagtactggctgtaccagttaagccgccaagtttcggaactcgagcactggatcgccgaaaaggaggtagtcgcaggcagcccagagctgggccaggatttcgaacatgttagtgtactgcaggagaagtttagcgaattcgccagcgagaccggcatggcaggccgggaaaggcttgctgccgttaatcagatggtcgatgaattaattgaatgtggacataccgcagccgctactatggctgaatggaaagacgggctgaacgaggcatgggccgaactcctcgagctgatgggcacgcgagctcagttgctcgctgctagcagagagctgcataaattttttagtgacgctagagaacttcagggacaaattgaggagaagcgaaggagactaccaaggctaacgacccccccagaaccccgccctagcgctagctctatgcagaggacacttcgagcgtttgagcacgacctccagctccttgtcagtcaagtgcgtcagttgcaggagggggccgcgcagctgagaactgtttacgctggcgaacacgcagaggccatcgcttcaagagagcaggaagtactgcagggatggaaagaactgttatccgcctgtgaggacgcccgactgcatgtgtcaagcacagcagacgctctgagattccatagccaggtgagagacctgctttcgtggatggatggcatagcgtctcagataggagccgccgacaaacctcgagatgtcagctctgtggaagtgctgatgaactaccatcaaggacttaaaaccgaactggaagctcgggtgcctgagctcaccacttgtcaggaactgggcaggagcctgctgctgaacaagtccgcaatggctgatgaaattcaggcccagttggataagctggggaccagaaaggaggaagtctctgaaaagtgggaccgccactgggaatggcttcagcaaatgctagaggtacaccaatttgctcaggaggcagtggtagctgacgcatggctcactgcgcaggagccactgctccaaagtcgcgagcttgggtcttcagtggacgaagtcgaacaactcattagaaggcatgaggcctttcgcaaagctgctgctgcttgggaagaacgtttttcgagcttgagacggctgacaacgatcgaaaagatcaaagcagaacaatcaaagcagccacccacacccctccttggtcggaaatttttcggggacccgaccgagctcgctgcaaaggccgcccccctcctgcggccagggggatatgaaagaggtctggaacccctggctcgacgcgcgtccgatactctcagcgctgaggtccgaaccagagttgggtacgttcgccaggagctaaagccagagaggctgcaacctaggatagacagactcccagagattcctgggcgagtcgaacctgcagcactgcctgccgccccagaagatgctgcagaaaccccagcaacccccgctgctgccgagcaggtgcgcccacgccccgaaagacaggagagcgccgaccgcgcagaagagcttcctagacgcagaaggccagagcgtcaggagtccgttgaccagtcagaagaggccgcacgccgacggagacctgagcgtcaggagagtgctgagcatgaagctgcgcatagcctgacactagggcggtacgagcagatggagaggcgcagggagcgccgggagagaaggctggagcggcaggaatctagtgaacaggaaatgccaatccgtggggacctcgtcaaggggaaggctacccttgcagacatcgttgagcaacttcaggagaaggaggccggccctggccttccagctggaccctcgttaccacagccaagagaactgcctcctggcagactgcctaacggcctagagttgcctgaacggactcctagaccagatagaccaagagccagggatcgtccaaagcctcgacgacgaccacgtccccgggagggaggcgaaggtggtgggagtaggcgcagtcgaagcgcccctgcccaggggggcagtgctcccgcccctcctcccccacctacgcacaccgttcagcatgaaggcttcctgttacggaaacgcgagctggacgctaaccggaaaagctctaaccgctcttgggtgtcgctgtactgcgtcctgtccaagggcgaactgggattctacaaagactctaaaggccccgcctctggtagtacgcatgggggcgagcctctgctgtcgcttcacaaagccaccagcgaagtcgcttcagactataaaaaaaaaaagcacgtctttaagctccaaacccaggacggctccgagttcctcctccaggccaaggatgaggaggagatgaatgggtggctcgaggcggtggcatcatctgtcgcagaacatgccgagatcgccaggtggggacaaaccctgccgaccacctctagcaccgatgaagggaatcctaaaagagaggggggggacagaagggccagcggacgacgaaaatag

SEQ ID NO: 135917 - DNA, 11025 bp, synthetic construct
  misc_feature 1..11025: note = Description of Artificial Sequence: Synthetic coding sequence
  source 1..11025: mol_type = other DNA
atggctggccagcctcacagcccacgagaactgcttggagccgcaggacatcgctcacgcaggccaagtaccgagctgagagtgcccccttctccctccttaaccatggactcccagtacgaaacggggcacattcgcaagctccaggccagacatatgcaaatgcaagagaagacttttaccaaatggatcaataatgtatttcagtgtgggcaggccggaatcaaaataaggaacctgtatacagagctggccgatggcatccacctgctgcgcctgctggagctgatctctggggaggctttgccacccccctcaaggggacggcttcgagtccactttctcgagaactcatctcgagcgctggcctttttacgggccaaggtaccggttcctctaatcggtcccgaaaatatcgtcgacggggatcagaccctgatacttgggctgatttgggttatcatcttgcggtttcagatttcacacatctccctcgacaaggaagagtttggagcgtctgcagcacttctgtcaaccaaggaggcactgctggtctggtgtcagcgcaagacagcatcatacacgaacgtaaacattacagatttcagtcgctcatggtccgacggcctgggattcaatgcactgattcacgctcaccggcctgatctgcttgactacggctcacttaggcctgacagaccactgcacaatctcgccttcgcatttttggttgccgagcaggagctaggcatcgcccagctcctcgatcctgaggatgtcgccgccgctcagcccgatgaacggtctatcatgacctatgtcagcctctattatcactattgcagccgcctgcatcagggccagacagtgcaacggaggctgaccaagatcctattacagttgcaggaaactgagctattgcagacacagtacgagcagctggtcgcagatctccttcgctggattgcagaaaaacagatgcagttggaggcacgcgatttccccgactcattaccagccatgcgccagctgctggcagcttttactattttccggacgcaggagaaacctcctagacttcagcagagaggtgccgcagaggccctgcttttcagactacagacagctcttcaggcccagaaccgccgaccatttctgcctcacgaaggcctgggccttgccgagttgtcacaatgttgggccggtctggagtgggccgaggccgctcggtcccaggccttacagcagagacttttgcagctccagcgtcttgaaaccctggcccgtagatttcagcacaaagcagccctgcgagaatcattcctgaaagacgctgagcaagtgctcgatcaggcccgcgccccccccgcttctcttgccactgtcgaggccgctgtccagcgtctggggatgctggaagccggcatcctgcctcaggagggccgtttccaggctttggccgagattgctgatattctgaggcaggaacagtaccactcatgggcagacgtggcacgccgccaggaagaagtgaccgtgagatggcaacgattacttcagcatctgcaggggcagcgcaagcaggttgcagacatgcaggcagtcctgtctctcctgcaggaagttgaggcagccagtcatcagctcgaggagttgcaggagcccgccaggtcaaccgcctgcggacaacagcttgcggaggtggtggaactgcttcagaggcacgatcttctggaggcgcaggtctctgcccatggtgcacatgttagccacctggctcagcagactgctgagctcgacagcagtctgggcaccagtgtggaggttcttcaggcgaaagccaggaccctcgcccagctgcaacagtccttggtcgcactcgttagggcccggagagcattactagagcagactctgcagcgcgcggaatttctgaggaattgcgaagaagaagaagcatggttgaaagagtgtgggcaacgggtaggtaatgccgctctaggacgcgacctgagccagatagcaggcgcgctgcaaaaacataaggcgctagaggccgaggtgcacaggcatcaggcagtgtgcgtagatctggtgcggagaggacgagacctctccgcaagacgaccccccactcagccagaccccggcgaacgggctgaggccgtgcagggcggctggcagctgctgcaaactcgcgtggtcgggcgcggggcgcggctgcagactgctctgttggtgctacagtactttgctgatgcggctgaagccgcgagctggctcagggagagacggtcctcccttgagcgcgccagctgcggccaagatcaggccgccgctgagaccctgctacggaggcacgttaggctggagagggtccttagagccttcgctgctgaactgcgcaggcttgaggaacagggaagagccgcgagcgcccgggcttcactttttaccgtgaacagcgccttgtcaccacccggggagtctttgaggaaccccggtccctggtcggaggctagttgccatccaggccctggcgacgcttggaagatggcgctgcccgcagagcccgatcctgatttcgacccaaatacaatcctacagacccaggatcatctgtcccaggactacgagagcctcagagccctggcccagttgagaagagcaagacttgaggaggcgatggcgcttttcggcttttgcagttcatgtggtgagcttcagctctggttagagaagcaaacagtgctcctgcaaagagtacaaccacaggctgatactcttgaggtgatgcagctgaaatatgaaaactttctcactgccctggcagtggggaagggcctgtgggccgaagtttcctctagcgctgagcagctgcggcagaggtatccaggaaattcaactcagattcagcgccagcaagaagagttgtctcagcggtggggccagctggaggccctgaaaagagaaaaggctgtgcagctggcccactcagtagaggtttgctcctttttgcaggaatgcggcccaactcaggtccagttgagagacgtcctgcttcagttagaggcacttcagcctggaagcagcgaagatacttgccatgctctccagctcgcccaaaaaaagacgctagttctggagcgtagagtacatttcctgcaatctgtcgtggtgaaagtagaagagcctggctatgccgagtcccagccactccaggggcaggtggagaccttgcaaggactgctgaaacaggtgcaggaacaagtagcgcagcgcgcccggagacaggctgagacacaggccagacagtcattcttacaggagtctcagcagcttctcttgtgggctgagagtgttcaagctcaactgaggagcaaagaggtctctgtagatgtggcgtctgctcagcggctgctgcgggagcatcaagatttgctggaggagatccacctatggcaggaaagactccagcaactggacgcccagagtcagccaatggcagccctggactgcccggacagccaagaggttccgaatactctccgagtgttaggacaacagggacaggagctgaaggtgctgtgggagcagaggcaacagtggctgcaggaaggactcgaactgcaaaagttcggtcgggaagtcgacgggtttaccgccacatgcgcgaaccatcaagcatggcttcacctggacaacctcggagaagacgtcagggaggccttgagcctgctgcagcaacatcgggaattcggtaggctcctgtctaccctgggacctagggcagaagccctacgtgcacatggagaaaagctggtgcaatctcagcacccagccgcccacaccgtgcgggagcagctacagagcattcaggcgcagtggacacggttacaggggcgcagcgagcagagacgccgccagcttctggcttctctgcagctgcaggagtggaagcaggacgtcgcggaattgatgcaatggatggaggagaaggggctgatggcagctcatgagccatctggcgccagaagaaacattctgcagacgctcaaaaggcatgaagccgctgagtccgaattgctcgctaccagacggcacgtggaagccctgcagcaggtaggccgcgaactgctgagtcgtagaccatgcgggcaggaggacatccagacgaggctccagggcctgcgctccaagtgggaggcactgaatcgcaaaatgaccgagcggggtgacgaactccaacaagctggccagcaagagcagctgctgcggcagcttcaggatgcaaaggagcagcttgagcagctcgagggggctctgcagtcatcagaaaccggccaggatctgcgctctagccagcggctgcaaaaaaggcatcagcagttggaatcggaatctagaactctggcagcaaaaatggccgctctcgccagcatggctcatggaatggctgccagccccgcaattctggaggaaacacagaaacatctgcggagactcgaactgttgcaggggcacttggccataagggggttgcagcttcaggcatctgtcgaattgcaccagttctgtcacctatcaaatatggagcttagctgggtagccgaacacatgcctcacggatctcctacctcttacactgaatgcctcaacggagcacaaagccttcatagaaagcacaaagagctgcaagtcgaagtgaaggcccaccagggacaagtacaacgggtcctgagctccggcaggagcctggccgcaagtggccaccctcaggcccagcatattgtggagcagtgccaagaacttgagggtcactgggccgaactggaaagagcctgcgaggcaagagcccagtgtttgcagcaggccgtaacttttcaacagtatttccttgacgtctccgaactagaaggatgggtggaggaaaaacgaccattggtctccagcagagattacggaagggatgaagccgcgacactccgacttattaataagcaccaggctcttcaggaggagctggctatctactggagttcaatggaagagctggaccagactgctcaaacactcacgggccccgaagttccagagcaacagcgcgtagtgcaggagagacttcgtgaacaactccgggcattacaggaactcgccgcgacccgagaccgcgagttggagggcacactgagattgcacgagttcctgcgcgaggcagaggacctacagggctggctcgcctcgcaaaagcaggcggctaaaggcggcgaatcactgggggaagatcctgagcacgcccttcacctctgcaccaaatttgcaaaattccagcatcaggtggagatgggctctcagcgtgtcgctgcatgccgtctcctggctgagagcctcctggaacgcggccactctgccggtcctatggtaaggcaaagacaacaagatctgcagacggcctggtccgagctctgggagctcacccaggcacggggccacgctctgcgcgatacagagaccaccctgcgggtacacagagacctgttggaggtgctgacccaggtccaagaaaaggcaacttcattgcctaataacgtggctagagacctgtgtggcttggaggcccaattgcgcagtcatcagggactggaacgcgaactggttggaactgagcgtcagcttcaggagctgttggagaccgcaggaagggtgcagaaactctgccctggaccgcaggcccatgctgtccaacagcgccagcaggcggtgactcaggcctgggctgttctgcagcgccgaatggagcagcgcagggcgcaattggaacgggcgagactgttggcacgcttccggacagcagtgcgagactacgcatcctgggctgccagagtacgccaggaccttcaggtcgaggaatcgagccaggagccttcctctggccctctgaaacttagtgcccatcagtggctgcgggctgaacttgaggccagggaaaagttgtggcaacaggctacacaattaggccagcaggctctgctggcagcaggaactccaacaaaggaggtgcaggaagaactccgggccttgcaggaccagagagaccaggtgtaccagacctgggcccgaaagcaggagagactgcaggctgagcaacaggagcagttgtttctgagagagtgtggccgcttggaagagatactcgctgcccaagaggtctctctcaagacctccgctctgggcagctccgttgaggaggtcgagcagttgatacgaaaacacgaggtttttctgaaagtgctcactgctcaggacaagaaagaggccgcattgagggaaaggttgaagactctgcgacggcctcgggtacgggatcgccttcctattctgctacagcgtagaatgcgagtgaaagagctggccgagagtaggggtcatgctctccacgctagcttgctgatggcgagcttcacccaggctgccacacaggccgaggactggattcaggcctgggcgcagcaactgaaggaaccagtccctcctggggacctcagggataaactcaaaccactgctgaaacatcaggccttcgaagcagaagtgcaggcacacgaggaagttatgaccagtgttgcaaagaaaggcgaggccctgctggcacagagtcacccccgggcaggggaagtgagtcaaagactacagggactccgcaagcattgggaagaccttagacaagctatggctctgcgcggccaggaacttgaagatcgccggaatttcctcgagttcctgcagagagtcgacctggctgaggcctggatacaggagaaggaggtcaaaatgaacgtgggggacctaggacaagatttggaacactgcctgcaattgaggagaagattgagggaatttagaggtaattctgccggggataccgtgggcgatgcctgtattcgcagtatctccgacctgtcactgcagctgaaaaatagggaccccgaggaggtaaagatcatttgccagaggcgctcccagctgaataacagatgggcttctttccacggaaacctgttgcggtatcagcaacagctggagggcgcacttgagattcacgtgttgagtcgggagttggataacgtgactaagagaatccaggagaaggaagcactgatccaggcactggattgcgggaaggacctggaaagtgtacaaaggcttcttaggaagcacgaagagctcgagagagaggtccaccccatacaggctcaggtggagagtctggaacgagaggtgggccgtctatgtcaaaggagtcccgaggccgcacacggattgcgccatcgccaacaagaggtagcagaaagttggtggcaacttcggagtagagctcaaaaacgaagggaagctttggacgctctccaccaggcccagaagctgcaggctatgcttcaggagctgttagtatctgctcagaggttgcgggctcaaatggataccagtcccgcgcctcgcagccccgtggaggcccgacgtatgttagaggagcatcaggagtgtaaagccgaactggacagttggaccgatagcatctcgctggcaagatccaccggccagcaacttttgaccgcgggccaccccttttcctctgacatccgacaggttctcgctggattagaacaagagttgtctagtttagaaggagcttggcaggaacatcagttacagctgcaacaggcattagagctccaactatttctcagttccgtggaaaagatggagcgctggctttgttctaaagaggatagcttagcatctgaaggtctgtgggaccccctggctccaatggagcccctgctttggaaacacaaaatgctggagtgggacttggaagtccaagcgggaaagatctcagccctggaggctaccgcccgtgggctgcaccagggaggccaccctgaggcccagagcgccctgggccggtgccaagccatgctgctaagaaaggaggcgcttttccgccaggcgggcacaagacgacacagactggaggagttgaggcaactacaagcattcctacaggactctcaggaagtggccgcttggctgagagagaagaacctcgtcgctctagaggagggactgctagacactgccatgttacccgcccagctgcaaaaacagcagaactttcaagcagagctagatgcatcaatgcatcagcagcaagaattgcaaagggaaggtcagcgtttactccagggaggccatcccgcgtccgaggctatacaggaaaggctggaagaactgggcgctctctggggcgagctgcaggacaattcacagaaaaaggtggcgaaactgcagaaggcctgtgaggctctacgcctgcggcggtcgatggaggaattagagaattggcttgagcctatagaagtggaactccgtgcaccaaccgtggggcaggcccttcccggagtgggcgagctcctcgggacacagcgtgagctggaggccgccgtggataagaaggcaagacaggcagaagccctcttggggcaggcccaagccttcgtccgggaagggcattgcttagctcaagacgtggaagagcaggcacgccggctcctgcaaagattcaaaagtttgagggaacctttacaggagagaagaacagccctggaagcgcgctcgctactgctgaaattttttagggatgctgacgaggagatggcctgggtccaagaaaaattacccctggcagctgcccaggattacggccagtctctgagcgcggtccgccacctccaagaacaacaccagaatctggaatctgaaatgtcttctcacgaagcactgactcgcgtggttcttgggactgggtataagttagtgcaagccggccatttcgcagctcatgaggtggctgcaagagtgcagcagctggagaaggctatggcgcacttaagagccgaagctgcaagaaggcgcctcctgctccaacaagctcaggaagcccagcaattcctgactgaactgctcgaagctggatcttggctcgctgaacgtggtcacgtgctcgattccgaggatatgggccatagcgcagaggctactcaggcgctcctaagaagattagaggcgacaaaaagggatcttgaagcgttctcccctcggattgaacggttgcaacagactgccgccctcctggagtccagaaagaatcctgaaagccctaaggtgttggcccaattacaagcggtcagagaggcccacgccgaacttctgcggcgtgcagaggccagggggcatggcttgcaggaacagctccagcttcatcagctggagcgagagactttgttattagatgcctggctcactacaaaagccgccaccgctgagagccaagattacggccaggatctggagggcgtgaaggttctcgaagagaagtttgatgcattccgaaaggaggttcagtctctgggacaggcaaaagtatacgcgctgcgtaaactggccggcaccctcgagaggggggcacctcggcgctatccacacatccaggcacagcgctcccgcattgaggccgcctgggagcggttagaccaggccatcaaagctcggacggaaaatctcgctgctgctcacgaggtgcatagctttcagcaggccgccgccgaactgcaggggcgaatgcaagagaagacggcgctcatgaaaggcgaagacggcggccattctctgagttccgtccgcactttgcagcaacaacaccgccgactcgagcgagaattagaggccatggagaaagaggtcgctcggttgcagacagaagcgtgccgactgggccagctccatcccgccgcgcccggaggactggccaaagtgcaggaagcctgggccaccttgcaggcaaaagcacaggaaaggggccagtggctggctcaggcagcccaggggcacgcattcctcgggagatgccaagagcttttagcgtgggcgcaggagaggcaggagctggctagctctgaggaactggcggaagatgtggcaggggctgagcagctgttgggacagcacgaagagcttggccaggagattcgagaatgccgcctgcaggcccaggacctccgtcaggagggacagcaactcgtcgacaattctcattttatgagcgctgaggttactgaatgcctgcaggaactggagggccgccttcaggaactggaagaagcctgggccttgcgatggcagaggtgcgccgagtcatggggtctgcagaagttgcgtcagcgactcgagcaagccgaagcttggctcgcttgttgggaaggattgcttcttaaacctgattatggtcatagtgtatccgacgttgagctgctgctgcaccgccaccaggacctggaaaaattgctggccgcccaagaagagaagttcgctcaaatgcagaaaacggagatggagcaggaactgctactccagccccaggagctaaaacctgggagggcagggagctccctcacttccttccaatggcgaccatccggccaccagggcttgggcgcacaacttgccgaaacaagggatccccaggacgccaagggcacaccaacaatggaagggtctttagagtttaagcagcatctccttcctggcggccgacagccatcctccagttcctgggattcgtgccggggtaatttgcaggggtcctctttgtctctttttctcgatgagaggatggccgctgagaaggtggcgtccatcgccctcctggacttgactggagcccgctgcgagcggctcaggggccggcatggccgaaaacacaccttcagcctgcgtcttacatctggagctgaaattctctttgcagctccaagtgaggagcaggccgaaagctggtggagagccctggggtctactgcagcgcagagcttaagtccaaagcttaaggctaaacctgtgagctccctcaatgaatgtacaacgaaggacgcaagaccaggttgcttgttgaggagcgatccatag

SEQ ID NO: 135918 - DNA, 942 bp, synthetic construct
  misc_feature 1..942: note = Description of Artificial Sequence: Synthetic coding sequence
  source 1..942: mol_type = other DNA
atgcggcacaatcagatgtgttgcgagacacccccaaccgtgactgtctacgtcaagtccggcagtaaccgctcacaccagccgaagaagccaattacactcaagcgtcctatctgtaaggacaattggcaggccttcgagaaaaacacacacaacaataataagagcaagcgtccgaagggaccgtgtcttgtgattcagaggcaggatatgaccgcattcttcaaactattcgacgatgacctgatccaggatttcctctggatggactgttgctgtaaaattgccgataaatatctcctcgcaatgaccttcgtatattttaagagagctaaatttactatcagtgagcacaccagaattaacttctttatcgctctgtatctcgcaaatacagtcgaggaggatgaggaggagactaaatacgagattttcccttgggctctggggaagaattggcgcaagctgttccccaactttctgaagctccgggatcagctctgggaccgcattgattacagggcaattgtgtcaaggagatgctgcgaggaggtcatggctatcgcccccacacactatatttggcagagggaaaggtccgtacatcatagcggagccgtgcgcaactataatcgcgacgaagtgcaactcccaagaggcccgagcgctacgcccgtcgactgtagtctatgcgggaaaaaaaggaggtacgtccggctgggcctatcctcttcctcctccctgtcatctcacaccgctggcgtgaccgagaaacatagccaagactcctataacagtctcagcatggacatcattggagaccccagccaagcatatacgggttccgaggtcgtgaatgaccaccagagcaacaagggtaagaaaactaactttctgaaaaaggacaaatccatggagtggtttaccggaagtgaggagtag

SEQ ID NO: 135919 - DNA, 942 bp, synthetic construct
  misc_feature 1..942: note = Description of Artificial Sequence: Synthetic coding sequence
  source 1..942: mol_type = other DNA
atgcgacataatcagatgtgttgtgagactcctcccacggtcaccgtctatgtgaagagcgggagcaaccgatctcaccagcctaagaagcccattacccttaaaaggccgatttgtaaggataattggcaggcgtttgagaagaacacacataacaataataagtcaaaacgccctaaaggtccctgcttggtaattcagaggcaggacatgaccgcctttttcaagctgttcgacgatgatttgatccaggacttcctttggatggactgttgttgtaagatagccgataagtacctcctcgcgatgacgtttgtgtacttcaaaagagcaaaatttaccatcagcgaacatacgcgcattaatttttttattgcactttacctagcaaacacagtcgaagaggacgaggaggagaccaaatatgagatctttccctgggcattgggaaagaactggcggaaactctttcctaatttcctgaagttgcgggatcagctctgggataggattgattatagagccatcgtctcaaggaggtgttgcgaggaagtcatggctatagcccctacacattatatctggcagcgggaaaggtccgtccaccatagcggggcggttcgtaattataatagggatgaagtgcagttgccgcgagggccctccgcaaccccagtggattgttcactctgcggtaagaagcgtcggtacgtgcggcttgggttatcctctagctcctccctgagcagtcatactgcaggggtgacagaaaaacatagccaggactcttataacagtctcagcatggacatcatcggcgatccctctcaggcttatactggcagtgaagttgtcaacgaccaccaatcaaacaagggcaagaaaacaaattttctgaagaaggataagagcatggagtggttcactggaagcgaagaatag

SEQ ID NO: 135920 - DNA, 384 bp, synthetic construct
  misc_feature 1..384: note = Description of Artificial Sequence: Synthetic coding sequence
  source 1..384: mol_type = other DNA
atgagacacaaccagatgtgctgtgagacgcctcccacggttactgtttacgtgaagagtggttctaatcggtcccatcaaccgaagaagcccatcacgcttaaaagaccgatatgtaaggacaactggcaggcttttgaaaaaaacacacacaacaacaacaaatccaagaggcccaagggaccatgccttgtgatccagcggcaggacatgacagcttttttcaaattatttgacgacgacctgattcaggatttcctgtggatggactgttgttgtaaaatcgctgacaaatatctgttagctatgacattcgtgtattttaagagagccaaattcaccatcagcgagcataccaggatcaacttttttatcgccttatag

SEQ ID NO: 135921 - DNA, 882 bp, synthetic construct
  misc_feature 1..882: note = Description of Artificial Sequence: Synthetic coding sequence
  source 1..882: mol_type = other DNA
atgttgtgggctataccggagctcggatccccctgcccgatatcgatctcttacgaaatgtccgactcccaggatcctaccacttcacccgtcgtgaccactcaagtcgaacttggcgggtgcagccgacaaggaggaggtaacggatttctgcgcttcagacagcaccaggaggtgcaagcatttctgtcgctcctggaggatagctttgtgcaggaatttctctctaaagacccttgcttccagatttcggataagtacttgctggctatggtgctggtttatttccagcgagcccacctaaagcttagcgagtacacgcactcctcactgttcttagctctgtatctcgccaatgacatggaagaagatcttgaaggtcctaaatgcgagatttttccctgggccttggggaaagattggtgcctcagggttggcaaattcttgcaccagcgagataaactgtgggctcgcatgggattcagggcggtcgtgtctagacaatgttgtgaagaggtgatggctaaagagccttttcactgggcctggaccagagatcgccggcctcatcatgggggtgtgcagcgcgtgtgtccccaagttccggtgaggttaccaagaggacccggtctttcccccccacactgctctccctgtggtctcccacagcactgctctagccatttactcaagcccgttagctcaaaatgtccgtccctgaccagtgaatgtcatcggccaccatcccagaattacctgtctcgcgtaaagaatgcttgggggggggatttcctcatagtgctaccccctcaaatgcagctggagccaggaacctacagtctgcgcatatttcccaaaccacctgctagacccggtcactag

SEQ ID NO: 135922 - DNA, 1122 bp, synthetic construct
  misc_feature 1..1122: note = Description of Artificial Sequence: Synthetic coding sequence
  source 1..1122: mol_type = other DNA
atgaacgtggacaagtttttaattgtgtgctaccttaagaaagaagtgtggggctttgagagctattccctgtcagggacaacgtgtttccagtggaattatttcgtatggtctctgcgattctttttttcttgtggttcttccaaatatcacttgactccgctaccaattaaaaaagtagattacccacacaagcgcgggcagaactggggctcgtacgtgcacaattctctgccgcggttcaattgggactatcgatcatgttttcacacctggaagcgcgcctcggataacagggaaagagcctatgagcattcagcatatggacaccacgaacgtgggaccgggggatttgacagaactagacattacgatcaggactactacagagatcccagggagagaacccttcagcacgggctttactatgcctcaaggtctaggtcccctaatcggttcgatgctcatgatccaagatacgagccccgagcaagagaacagttcactctgccatccgttgtgcatagagatatctaccgagacgacataactagggaagtgcggggaaggcggcccgagaggaactatcagcattccaggagtagatcgccgcattcatcacagtcacgaaatcagtcaccacagcgcttggctagtcaagcgtcacggcctacacgctccccaagcggttccgggagccggtctaggtcaagttccagtgactccattagcagctcatcctcaaccagctctgacagtagcgacagtagctcatcctcgagtgatgattcccccgcacgcagcgtgcagtccgccgcagtgccagctcccacttcccaactgctctcatcactcgaaaaggatgagcctaggaagtcctttggaatcaaggtacagaacttacccgtgcgttcaacggatacttccctgaaggacggcctattccacgaattcaaaaaattcggcaaggtgacaagcgtgcagatccacggcaccagcgaggaaaggtacgggctggtgttcttcaggcagcaggaggaccaagaaaaggctctgaccgccagtaaaggaaaactgttctttggtatgcagattgaagtgacggcctggataggcccctag

SEQ ID NO: 135923 - DNA, 10995 bp, synthetic construct
  misc_feature 1..10995: note = Description of Artificial Sequence: Synthetic coding sequence
  source 1..10995: mol_type = other DNA
atggttagagagactcgccacctatgggtgggcaacttgccagaaaacgtgagagaagagaagataattgaacactttaagagatacggacgtgtagaaagcgtgaaaattctgcctaagcgcggctccgagggaggcgtggctgcattcgtggactttgtggacattaaatctgctcaaaaggcccacaactctgttaacaaaatgggcgatcgcgacctacgcacagattacaacgaacccggtacaatacctagcgcagcaagaggactagacgacacagtatccatcgcctctcggtcgcgggaggtgagtggtttcaggggcggtggggggggccccgcctatggaccacccccatccctccacgcacgagaggggcgttacgaacgacgccttgatggggctagcgacaacagagagcgggcttacgagcactcagcctatgggcatcatgaacggggaaccggaggcttcgaccggaccagacactacgatcaggactactaccgggatcctagagagagaacattgcagcacggcctgtattacgcatcacggagcagatctccaaatcggttcgatgctcacgatcctaggtacgaacctagagcgcgagagcagttcactctgccatcagtggtccatcgcgatatctacagagacgacattacacgggaggtcagaggccgccgaccagagcgcaattatcagcatagcagatccaggtctcctcatagctcccagagcaggaaccagtcaccacagaggcttgcgtcgcaagcatcccgtccaacccgttccccgtcgggctccggcagcaggagccgctctagctccagcgatagtatctcctcgagctcaagtacatcctccgacagctctgattcctcatcctcatcgagcgatgacagtcccgcccgatcagtgcagtcagcagccgtccccgcccccacaagccagcttttaagtagcctggagaaagatgaaccgcgaaagtctttcggaatcaaagttcagaatctccccgtgcgctccacagatacctctttgaaagacgggctgttccatgagtttaaaaagttcggcaaagtgacatcagtccagatccacgggacaagcgaggaacgatacggcctcgtcttctttaggcagcaggaagatcaagagaaggctctcactgcctccaaaggaaaactgttttttggcatgcagattgaggtgacggcttggatcggtccggaaactgagtctgaaaatgagtttcgacctttggatgagagaatcgacgaattccatcccaaagcgacacgtacccttttcatcggaaacctggagaagaccacgacttatcacgatctgagaaacatcttccagagatttggggagatcgttgatattgacattaagaaggtcaacggggtccctcaatatgcctttctgcaatactgtgatatagcgtctgtgtgcaaggccattaagaagatggacggagagtacttggggaacaataggctgaagctggggttcggaaaaagcatgcccaccaattgtgtttggctggatggcttgtcctctaatgtgagcgatcagtacctgacccgtcatttttgtcggtatggcccggtcgtgaaggtggtgtttgataggctgaagggtatggccctcgtgctgtataatgagatcgagtatgcccaagccgctgtaaaggaaacaaaaggccggaaaattggggggaacaaaataaaggtggacttcgctaatcgtgaaagccaactagcattttaccactgtatggagaagagcggccaagatataagggatttttacgaaatgttagcagagagaagagaagagcgcagagcgtcatacgactataaccaagacagaacttattacgaaagcgttcggacacccggcacttaccctgaggactcaaggcgggactacccagcaagaggtcgcgaattttactctgagtgggagacgtatcagggcgactactatgaaagtcgttactatgatgaccctagggagtatcgggactaccgcaatgacccctatgaacaagacattagagagtacagctataggcagcgggaaagagagcgcgagcgagaaagatttgaatccgatagggatcgggatcatgagcgcaggcccatagagcgatcacagtctccagttcatttacgcagaccccagagcccaggagctagcccctcacaggcggagcggctccctagtgattctgagcgcagactctattctcgaagttccgaccgctccggctcctgtagctcgttatctccaccgaggtacgaaaaactcgacaaaagcagactggagcgttacaccaagaatgagaagactgataaggagagaactttcgacccagaaagagtcgaacgcgagcgaagactaatcagaaaggaaaaagtggagaaggataaaaccgacaagcaaaagagaaaaggcaaggtccattcacccagtagccagtctagtgagaccgatcaggaaaacgagagggagcagtcccccgaaaaaccaagatcatgcaataaactctctcgagaaaaagccgacaaggagggaattgctaagaatcgtctagaactcatgccctgtgtcgtgctaacgagggtgaaggagaaagaagggaaagtcatcgatcatacaccagtcgagaaacttaaggctaaactcgataatgatacggtgaaatccagtgccttggaccagaaactccaggtttcccagaccgagcccgctaagagcgacctatctaagttagagtctgttagaatgaaggtccctaaagaaaaaggactgagctctcacgttgaggttgttgagaaagaaggacgtctgaaagcacgtaaacaccttaagcccgagcaaccagccgacggtgtgtctgccgtcgacttagaaaagctcgaagcccgaaaacggcgctttgccgacagcaatttgaaggctgagaaacaaaagcctgaggtgaagaagtcgtcccccgagatggaggatgcgcgagttttgagcaagaagcagcccgacgtaagctccagagaagtaatccttcttagagagggcgaggccgagagaaagcccgttcgaaaggagatactgaagcgagaatcgaagaaaatcaagctggaccggcttaacacagtagctagtcccaaggactgccaagagctcgcttcaatttctgtcggttctggctcgaggccctcatcagacctacaggcaaggctgggcgaactggccggggagagtgtagaaaaccaggaggttcagtcaaagaaacctataccatctaagccccagttgaagcagctccaagttctggacgaccaaggacctgaaagagaagacgtgcgcaagaattattgctcccttcgggacgaaactcccgagcgtaaaagtggccaggagaaatctcacagcgttaacacagaggagaagatcggcatagacatcgaccacacacagagctatcggaaacagatggagcagtcacgccgcaagcaacagatggagatggaaatagctaagagcgaaaagttcggttcaccaaaaaaggatgtggacgaatacgagcggcggtctctagtgcatgaggtgggcaaacctccgcaagatgtcacagacgatagcccaccaagcaagaaaaaacgcatggaccacgtggacttcgacatttgtacgaagcgcgagaggaattatcgcagcagcaggcaaatctcggaagattctgagaggactggggggtcaccatctgtgcggcatggatccttccatgaggacgaagacccaatcggctcccctcgacttctgtcggtgaaaggcagtccgaaggtggacgagaaggtgctgccctactcaaatattacagtcagggaagaatccctcaaattcaacccttacgactcgagtaggcgcgagcagatggcggacatggcgaaaattaaactgagtgtgctcaatagtgaggatgagttaaatcgatgggactcccagatgaagcaggacgccgggagattcgatgtttctttccccaattccattatcaaacgggatagtttgcggaagcgtagcgttcgggatctggaaccaggggaggtgccttctgacagtgacgaagacggggagcacaagagtcatagcccccgagccagcgctctgtatgaatcctccaggttgagttttctgctacgcgatagggaagataagttgcgcgagagagacgagagattatccagcagcctggaacgcaataaattctattctttcgctctggacaaaactatcactcccgataccaaagctttgttggaacgagctaaatcgctctcatccagtcgggaggaaaattggagtttcctcgattgggattcacggttcgcaaattttagaaacaataaggataaagagaaagttgatagcgctccgcggcccatcccttcctggtacatgaaaaaaaagaaaattcgtaccgattctgaaggtaagatggatgataaaaaggaggatcataaggaggaggagcaggagaggcaggagctctttgcgagcaggtttctacacagcagcattttcgagcaggatagtaagagattacagcacttagaaagaaaggaggaggattcagatttcatctccgggcgaatttatggaaaacagacttccgagggcgccaactctacaacagactccatacaggagccagtagtattgtttcattcgaggtttatggagctgacccggatgcagcaaaaagagaaggagaaggatcaaaagcctaaagaggtggagaaacaggaagacactgagaaccatcctaagactcctgaaagcgcacctgaaaacaaagatagtgagttaaagactccaccgagtgtggggccgccctccgtgaccgtggtcaccttagaatctgccccttcagcactcgagaagacaactggcgacaaaactgtcgaggctcccctcgtgactgaagaaaaaactgtggagccggctaccgtgtccgaagaggccaaacctgcctccgagcccgcacctgcacccgtcgagcagctggagcaggtggacctcccgccaggtgctgatcctgacaaagaagccgcaatgatgccagcaggcgtggaagagggatcctccggagaccaaccaccatacctcgacgccaagccacccactcctggggcgtcatttagccaggctgaatccaatgtggatcctgagcccgacagcactcagcccttgtctaaaccagcccagaaaagtgaagaagctaacgaacctaaagcagagaagccagacgccactgctgatgccgagcccgatgccaaccagaaagctgaagccgccccggagagtcagcccccagcctcagaggatttggaagttgatcctcctgtcgcagctaaagacaaaaagcctaacaaaagcaaaaggtctaaaacacccgttcaagccgctgcggtgtccattgttgaaaagcccgtgactcgtaagtcggagcgtatcgatcgtgaaaagctgaagcggtccaactcccctaggggggaggcgcagaaactactagaattgaaaatggaagctgaaaagatcactcggactgcgtctaagaattctgcagcggaccttgaacatcctgagcctagtttacctctctctcggacccggcgtcgcaatgtccgaagcgtgtatgccacaatgggagaccatgaaaaccgttccccagtaaaggagcccgttgagcagccccgcgtgacacgcaagagacttgaacgggagctgcaggaggccgccgccgtccctaccacgccacggaggggacgtccccccaagactcgtagacgcgcggacgaggaggaggagaatgaggctaaggagcccgctgagacacttaaacctccggagggttggcgtagccctagatctcagaagaccgccgctggcggcgggccgcagggaaagaagggtaaaaatgagcccaaagtcgacgccacaagaccagaagccaccactgaggtcggcccacagataggggtcaaggagtcctcaatggaacctaaggctgccgaggaagaggccggctccgaacagaaacgcgaccgcaaagatgcgggaacagataaaaatcctcccgaaacagcaccagtcgaggtggttgaaaaaaaacctgctcccgagaaaaactccaaatctaaacgcgggcgatctcgcaattctcggctggcggtggacaagtccgcctctctgaaaaacgtggatgccgcggtctcacccagaggcgctgccgctcaggcaggagagcgggaatctggcgtggtagctgtgagcccggagaaatccgagagcccacagaaggaggacgggctgtcgagtcagctgaaatctgaccccgtggatcccgacaaggagccagaaaaagaggatgtcagcgcctctggcccatcaccagaggctacccaactggccaaacagatggagctagagcaggccgtcgaacatatcgccaagttggctgaggcttccgccagcgccgcttataaggcagatgctccggagggtctcgcccctgaggaccgagataagcctgcccatcaggcttctgagacagaactggccgccgcaatcgggagcattattaatgacatttccggggagccggagaactttcctgccccgcctccttacccaggcgaatctcagacagacctccaacccccggcgggggcccaggcgttgcaaccaagcgaagaaggaatggagaccgatgaagccgtgtccggtatactggagacagaagctgcaacagaatcgtcaaggcctcccgtgaatgcaccagacccctctgctggcccaaccgatactaaagaagcgcgcgggaacagctccgagacttcccattcagttcctgaggccaagggaagtaaagaggtcgaagtgacgcttgtccgcaaagataaggggcggcagaaaacaaccaggagtcggagaaagagaaacacgaataaaaaggtcgtggcaccggtggaaagtcacgtcccggaaagcaatcaggcccagggcgaaagcccggcagccaacgaaggaacgacagtgcagcatccagaagctccccaggaggagaaacaatccgaaaagccacacagtacgcctccccaaagctgcacttctgatctcagcaagataccatctacagaaaactcctctcaggagatttctgtagaggaacggacgcccaccaaagctagcgtgccgcccgatctgccacctccaccccagccggcccccgttgatgaggagcctcaggcacggttcagagtgcattcaattattgaaagcgacccagtgacgcctccttcggacccatcaatccctatcccaactctcccttccgtgaccgctgcaaagttaagtccacctgtggccagcggtggcattccacatcagagcccgcctacaaaagtcactgagtggattacgagacaggaggagccacgagctcagagcaccccttcccccgccctaccacctgacactaaagctagtgacgtcgatacctcctctagcaccctgcggaaaattctgatggatcctaagtacgtgagcgcaacttctgtgacctctacttctgtgaccactgctatcgccgaaccagttagtgcagctccttgtctgcacgaagccccaccccctccagtcgacagcaaaaagccattggaggagaagaccgctccaccagtaaccaacaattctgagattcaggcttccgaggttctggtggcagctgataaagagaaggttgcccccgtgatagcgccgaagatcacttccgttatttcccgtatgcccgtgtcaatcgacttggaaaactcccaaaaaatcaccctggccaagcccgctcctcagacactaaccggcttggttagtgctctgactggcctggttaacgtgtctttagtgccagtcaacgctttaaaaggtccggtcaaagggtcggtaaccaccctgaaatccctggtaagtacccccgccggaccagtcaatgtcctgaaagggccggtcaatgtcctcaccgggcctgtaaacgtgctgacgacccccgttaatgccacagttgggaccgtcaacgccgcgccgggaacggttaatgcagctgcctccgccgtgaatgcgacagccagcgcggtcactgttacagcaggcgcagtgactgcagccagcggaggcgtcactgctacaaccgggacagtcactatggctggggctgtgatcgcccctagcacaaagtgtaagcagagagcaagtgctaatgagaattctagatttcacccagggtctatgcctgtcatcgacgatcgccctgccgacgctgggtcgggcgccggtttgcgggttaatacatcggaaggtgttgtcttgctgagctactccggacagaagaccgaggggccacagcgcatctcagctaaaatctcccaaataccccctgcatctgcaatggatatcgagtttcagcagagtgtgagtaaatcccaggtcaagcctgacagcgtgaccgccagtcagcccccttccaagggtccccaggctccggcagggtatgccaatgtagctactcatagcactttggtcctgaccgcccaaacctacaatgcctcccccgtaatttccagtgtgaaagcagaccggccatctctcgagaaacccgagcctatccatttgtccgtgtctactcccgtgacccaaggtggcaccgtgaaagtcctgacgcagggcataaacacccctcccgtcctggttcataatcagctcgtcttgacacccagcatagtcactaccaataagaaattagccgacccagtcactttgaagatagagacaaaagtgctgcagccggcgaatttgggcagtactctgacccctcaccacccccctgcccttccgagcaaactgcctactgaagtcaaccatgtcccaagtggccccagcatcccagccgaccgcactgtgtctcatctggcggccgctaagttggacgcgcactcccctagaccatccggacccggaccatcatcttttccgcgtgcctcccatccttcgtcaactgcatccaccgcgttgtcgacaaacgccactgtcatgctggcagctggcatacctgttccccagttcatatcgtccattcaccccgagcagtcagtaatcatgcccccccatagtatcacacaaaccgttagtttgagccacctgtcacagggcgaggtgcggatgaatacccccaccctgccttccattacctacagtatccgcccagaggctcttcactccccccgcgctcctttgcaacctcagcaaattgaggtcagagctccacaaagagcttctaccccacaaccagctcctgccggggtgcctgccctggcgtctcagcatccaccagaggaggaagttcattaccacttgcctgtggctcgagctacggcccccgtgcaaagtgaagttctggtcatgcagtccgagtaccgtcttcacccttataccgtgccgcgtgacgtacgcatcatggtgcacccacatgttacagcagtgtccgagcaaccgcgggcagccgatggggttgtcaaagtgccccccgcaagcaaggctcctcagcagcccgggaaggaggccgcaaagacaccagacgccaaggccgcaccgacaccaactcccgcgccggtgccagttcccgtgcccctgcccgctccagcacccgccccgcatggggaagcccggatcctcacagtgacacctagcaaccagctgcagggtctccccctcacacctcctgttgttgttactcacggggttcagatcgtacactcaagcggagagttgtttcaggagtaccgctatggcgacattagaacatatcaccctccggcacaactcacccatacacagttccccgcggccagcagtgtgggcctcccaagtagaacgaagaccgccgctcaggggccaccccccgaaggcgaacccctgcagcctccccaacccgttcagtctactcagccagctcagcccgcccctccatgccctccgtctcagcttggccagcccggtcagccaccatcttctaagatgcctcaggtatcccaggaagctaaagggacccaaaccggtgtggagcagcctcgactgccagcaggcccggctaatagacctccagaacctcacacccaagtgcagcgcgctcaggccgaaacagggcctacatccttcccaagtcccgtcagcgtgtcaatgaagcctgacctccccgtctccctaccaactcagaccgcacctaagcaacccctcttcgtgcctacaaccagcggtcctagtactcccccaggtttggtcctgccccacactgagtttcaacccgctcccaagcaagactctagcccacatctcaccagccagaggcctgtggacatggtacagctgctgaagaaatatcccattgtgtggcagggtctgcttgccttaaagaatgacactgccgctgtccagctccattttgtctctgggaacaacgtgttggcccaccgtagcctgccactcagcgaaggtggaccccctctaagaatagcccaacggatgcggcttgaggctacccagcttgaaggtgtcgcccgaagaatgacagtggagacagactactgtttgttactcgctcttccctgcggaagggatcaggaggatgtagtttcccagaccgagagtcttaaagcagcgttcatcacgtatctgcaggctaagcaggcggcaggcatcatcaacgtgccaaaccccggaagcaatcaacccgcatatgtgctacaaatcttccctccatgcgagtttagtgagtctcacctttcccgcctggcaccagacttgctggccagtatctcaaacatctcaccgcacttgatgatcgtgattgcttctgtgtag

SEQ ID NO: 135924 - DNA, 1122 bp, synthetic construct
  misc_feature 1..1122: note = Description of Artificial Sequence: Synthetic coding sequence
  source 1..1122: mol_type = other DNA
atgaacgtggataaatttttaatagtctgttacctgaaaaaagaggtgtggggctttgaatcatactcacttagcggtacaacttgttttcagtggaactatttcgtgtggtccctccgcttttttttctcttgtgggtcctctaagtaccaccttactcccctgcctatcaaaaaagtggactatccacataaaaggggccagaactgggggtcttacgtgcacaactcgttacccagatttaactgggactaccgcagttgctttcatacgtggaagcgcgctagcgacaatcgggaaagggcatatgaacacagcgcttatgggcaccacgagaggggcacaggcggctttgacagaaccagacattacgaccaggattactatcgggatcctcgcgaaagaactctgcaacacggtttatactacgcctctagatcacgttctcctaatagattcgatgcacatgatcctaggtacgagccccgcgcccgggagcagtttactctgccttcagtagtccatcgcgacatctatcgcgatgatattaccagggaggtcagaggaaggcgacctgaacggaactaccagcactctcggtctagatccccacactcctcccagtcccggaatcagagcccccaaaggttagcttcccaagcgtcacggcccaccaggtcgccttccggctccggatcgagaagcaggagctcatccagcgatagtattagctcatcttcgtcgactagctcagattcctccgacagctcatctagctcctcagacgacagccctgcccggagcgtccagtcagccgcggtgcctgcccctaccagtcagctgttgagctctctcgaaaaagatgaaccacgcaagagttttgggattaaggtccaaaacctccccgttagaagcaccgatactagcctcaaagacggcctctttcacgagttcaagaaatttggcaaggtcaccagtgtgcaaattcacgggacctcagaggagcgatacggcctggtgttcttcagacaacaagaggatcaggaaaaagctttaacagcatccaagggcaagctgttcttcgggatgcagatcgaagtgacagcgtggatcgggccttag

SEQ ID NO: 135925 - DNA, 894 bp, synthetic construct
  misc_feature 1..894: note = Description of Artificial Sequence: Synthetic coding sequence
  source 1..894: mol_type = other DNA
tgacaagcatctaggccaactcgtagcccttcagggtcaggtagcagatcccgcagttccagctccgatagtatctcaagtagcagtagcacctcgtcagacagtgattcttcctcctcaagctcagatgactcccccgccagatccgtgcaatctgccgcggtgccagcacctacatctcagctactgtctagcttagagaaagatgaaccacggaagagcttcggtatcaaggtgcagaatctccctgtgcggtcaaccgacacatccctcaaagatggattgttccacgagttcaagaagttcggaaaagtgacaagcgttcagatccacggcacatcggaggaacgctatggactggtgttctttcgacagcaggaagaccaggagaaggccctgacagctagtaaggggaaactgttcttcgggatgcagatagaagtcactgcctggatcggcccagagacagagtccgagaacgaatttagacctcttgatgagaggatcgatgaatttcatcccaaagcgacacggaccctgtttatcggcaacctggagaaaaccacgacctatcatgacctccgcaatatctttcagcgcttcggggaaatagtggacattgacatcaagaaagtcaacggggttccccaatatgcattcttgcagtattgcgatattgcttccgtttgcaaggctataaaaaaaatggacggagagtatctgggaaataaccggctcaagctcggatttggcaagtctatgcccacaaactgtgtctggctggacggactcagttcaaacgtgtccgaccagtatctgaccagacatttctgtagatacgggccagtggtcaaggttgtttttgatcgtcttaagggtatggccctggtctag

SEQ ID NO: 135926 - DNA, 885 bp, synthetic construct
  misc_feature 1..885: note = Description of Artificial Sequence: Synthetic coding sequence
  source 1..885: mol_type = other DNA
atgagtcccagagggaccgggtgctctgctggtctgctcatgaccgtcggttggttgctactggcaggtttacagagtgcacgcgggacaaatgtgactgccgctgtacaggacgcaggcctcgcccatgagggcgagggagaggaagagaccgaaaataatgacagcgaaaccgctgaaaactacgcgcctcccgaaacagaagatgtgagtaaccggaacgttgtgaaagaggtggagttcggtatgtgcacagttacctgcgggatcggggtgcgagaggtgatcctgactaacggctgccccggcggcgagtcaaaatgcgtggtgagagttgaagaatgtcgtggacccacagattgcgggtggggaaagcctatctccgaaagtctggagtctgtgcgcttggcatgcattcacacaagtcccctgaacagattcaagtatatgtggaaactgctcagacaggaccaacaatccataatcctggttaacgactctgctatccttgaggtaaggaaagaaagtcacccccttgccttcgagtgcgatacattggataacaacgagatcgtggctacgataaagtttacggtgtatacttccagcgagctgcagatgaggaggtcatcccttccagcaaccgacgcagctctgatcttcgtactgactatcggagtgataatctgtgtgttcatcattttcctgctcatcttcatcatcatcaattgggcagcagtgaaggctttctggggcgccaaggcatccacacccgaggtgcagagtgagcagagtagcgtgcggtataaagatagcacttccctcgatcagctgcctaccgaaatgccaggggaggatgatgcactttccgaatggaacgaatag

SEQ ID NO: 135927 - DNA, 648 bp, synthetic construct
  misc_feature 1..648: note = Description of Artificial Sequence: Synthetic coding sequence
  source 1..648: mol_type = other DNA
atggtctctgccttaagaggcgctccccttatccgggtgcattccagtcccgtgtcctcaccttcagttagcggccctcgccgactggtgagctgcctcagtagccaatcaagcgctctgtcacagtccggggggggctcgacttccgccgcggggatcgaggctagatctagagcactgcgtagaagatggtgtcccgccggaataatgttgttagcactcgtgtgtcttcttagctgcctcctcccctccagtgaggcgaaactctatgggcggtgcgaactggctcgagtcctgcacgatttcgggttggacggctatcgcgggtactccctggcagattgggtgtgcctcgcatacttcacgtccggttttaatgccgccgcacttgactatgaggctgacggtagtacaaacaacgggatatttcagattaatagccgaagatggtgtagtaatttgactcccaacgtgccaaacgtctgtaggatgtattgctccgacctgctgaatcctaacttaaaggataccgtgatttgcgccatgaaaatcacacaggagccacagggcctggggtactgggaagcctggcgccaccattgtcaggggaaggatctgactgagtgggtggatgggtgcgatttttag

SEQ ID NO: 135928 - DNA, 627 bp, synthetic construct
  misc_feature 1..627: note = Description of Artificial Sequence: Synthetic coding sequence
  source 1..627: mol_type = other DNA
atgatccaggaggaccatgagggaagccaggatggtggagtgcactcctcccccgtcagcagcccctctgtgagtgggcctaggcgactcgtatcttgcctttccagccagagcagtgccttgagccaatccggagggggctccacctctgccgcaggcatagaagcgcgaagtcgggctctcaggcggaggtggtgccctgccggaataatgctcctggcactcgtgtgcctactcagctgcctgcttccatcctcagaggcaaagttatacgggcgctgcgagttagctcgcgtcctgcatgattttggattagacggctataggggatacagcctggctgactgggtctgtcttgcttacttcacgtcaggttttaatgcggctgcgcttgattatgaggcggacggatctaccaataatggaatcttccaaatcaactccagaagatggtgttcgaacctgacccctaatgtccctaatgtctgccggatgtactgcagcgatttgctgaatccgaacttaaaggacacagtgatctgcgcaatgaaaatcactcaggagcctcaaggccttgggtactgggaggcctggcgccatcattgccaggggaaggacctgacatag

SEQ ID NO: 135929 - DNA, 339 bp, synthetic construct
  misc_feature 1..339: note = Description of Artificial Sequence: Synthetic coding sequence
  source 1..339: mol_type = other DNA
atggtgtccgccctacgaggcgccccacttatccgcgtgtgcctggcttacttcacaagcggtttcaacgctgccgccctggactatgaagctgatgggtcaactaacaatggaatctttcaaatcaacagccgacgttggtgtagcaatctaacgcctaatgtcccaaacgtttgccgtatgtactgcagtgacctgctaaatcccaacctcaaagacaccgtaatttgcgcaatgaaaatcacgcaggagccccagggcctgggctattgggaagcctggaggcaccactgccaggggaaggatctgaccgaatgggtggacggctgtgacttttag

SEQ ID NO: 135930 - DNA, 372 bp, synthetic construct
  misc_feature 1..372: note = Description of Artificial Sequence: Synthetic coding sequence
  source 1..372: mol_type = other DNA
atgacaagtggatggaccgacaccggtgataccgcctggctgacagcatacgccctgccttacgctggtgtctgtctggcctactttacatcagggtttaatgccgccgccctggactatgaagctgacggatcaactaacaacggcatcttccagatcaatagccggcgatggtgctctaacctgacgcctaacgttccgaacgtgtgccgaatgtattgttcagaccttcttaatcctaacctcaaggacacagtgatctgcgctatgaagatcacacaggagcctcaaggactgggttactgggaagcttggcgccaccactgccagggcaaggatcttactgaatgggtggatgggtgtgacttctag

SEQ ID NO: 135931 - DNA, 375 bp, synthetic construct
  misc_feature 1..375: note = Description of Artificial Sequence: Synthetic coding sequence
  source 1..375: mol_type = other DNA
atggtgctctgctggctgctcctgttagtaatggccctccctccaggaaccactggagtcaaggattgcgtcttctgtgagctgaccgacagcatgcaatgccctggaacatacatgcactgcggtgacgacgaagattgcttcaccggacatggagtcgccccaggtactggcccagttattaataaggggtgtctgagagctacctcctgtggactggaggaaccagtgtcttatcggggtgtcacatattcactgaccactaactgttgtacgggccgactctgcaaccgggctccttcctctcaaacagttggcgcgaccacaagcctggctctcgggctcggtatgttacttcctccccgcctgctgtag

SEQ ID NO: 135932 - DNA, 480 bp, synthetic construct
  misc_feature 1..480: note = Description of Artificial Sequence: Synthetic coding sequence
  source 1..480: mol_type = other DNA
atgaaagcctggggcaccgtggtagtcacgctggcgaccctgatggttgttaccgtcgatgccaaaatctacgaacggtgtgaattagcagccaggctggagagggcaggccttaatgggtacaaggggtatggggttggagactggctctgcatggctcattacgagagcggcttcgacaccgcctttgtcgaccacaatcctgacggaagctctgagtatggcatttttcagttaaacagcgcttggtggtgtgacaatggaattacccccaccaaaaatctctgccacatggattgccatgacttgctcaataggcatattttggatgatattcggtgcgctaagcaaatcgtgtccagccagaacgggctttcggcctggacatcttggcgcctgcactgttccgggcacgaccttagcgagtggctgaaaggctgtgatatgcacgttaagatcgacccaaagatccacccctag

SEQ ID NO: 135933 - DNA, 480 bp, synthetic construct
  misc_feature 1..480: note = Description of Artificial Sequence: Synthetic coding sequence
  source 1..480: mol_type = other DNA
atgaaagcttggggcacagtggtcgtaactctggctaccctgatggtggtaacagtagatgccaagatctacgagcgctgcgaacttgccgcccggctagagcgagcaggactcaacggttacaaggggtacggtgtcggggattggttgtgtatggctcactatgaaagcggtttcgatacagcctttgtggaccataaccctgacggaagcagtgaatatggcatcttccaattaaactcggcctggtggtgtgacaatggtattacaccgaccaaaaatctgtgtcacatggattgccacgacctgctcaatcgtcacatcttagatgacatccgctgcgcgaagcagatagtgagctcccagaatggactgagcgcctggacgagttggaggttacattgttcaggtcatgatctgtctgaatggctaaaggggtgtgacatgcacgtgaaaattgatcccaaaatccacccgtag

SEQ ID NO: 135934 - DNA, 3207 bp, synthetic construct
  misc_feature 1..3207: note = Description of Artificial Sequence: Synthetic coding sequence
  source 1..3207: mol_type = other DNA
atgagatctgccgctaagccctggaatccagctattcgtgccggcgggcatgggcccgacagggtgaggcccctcccagctgcctcttctggtatgaagtccagtaaaagttccacatctctggcattcgaatcgcgattgagccgcttaaagcgagcaagcagtgaagatacactaaacaaacccggcagtacagcagcctccggtgtggttcgactgaaaaagactgctacagcgggggctatcagtgaacttactgagtcccggttacggtccgggaccggcgctttcaccacaaccaaacgcaccggtatccccgcccctcgagaattcagcgttactgtgtcaagagaaagatccgtgcctagggggccatctaacccaaggaagagcgtctcctctccaacgagtagcaacactcccacgcccaccaaacatctgaggacaccttccactaagccaaagcaggagaatgaaggcggagaaaaagcagcccttgaaagccaggtgcgtgaactgctggccgaagcgaaagcaaaggattcagagatcaacagattgagatcagagctgaaaaagtacaaagaaaagcgtactttgaatgctgaaggcacagacgcattaggacccaacgtggacggcacaagtgtcagtcctggggataccgagcccatgattcgtgctcttgaagaaaaaaataagaatttccagaaagaactttccgacctggaagaggaaaacagagtcctcaaagagaagcttatctatctagaacactctccaaactcagagggcgccgccagccacactggcgacagcagttgccctaccagcataacacaggagagttccttcggttcgcccacaggtaaccagatgagttcagatattgatgaatacaaaaagaacatccatggcaacgcattaaggactagtggctcctcttcttccgacgtgaccaaagcttctctgagcccagacgcctcggacttcgagcatatcaccgctgagactccaagccgtcctctctcgagcacaagcaatcctttcaagagctcaaaatgttcaacggctggaagctcccctaattcggttagtgagctgtcacttgcctcattgactgaaaagattcagaaaatggaggagaatcatcacagcaccgcagaggaacttcaggcaaccttgcaggagctgagtgatcagcaacagatggtgcaggagcttacagcagagaacgagaaactggtagatgagaaaacaattcttgagactagctttcaccaacacagggagagagccgagcagttgtctcaagagaatgagaagctaatgaacctcctccaggagcgggtcaaaaatgaggaacctacaacccaagaggggaagatcatcgagctggagcagaaatgtaccggaatcctggagcagggacgtttcgaaagagagaagttactgaatatccagcagcaactcacgtgctccttgcgcaaagtcgaggaagaaaatcagggagcacttgagatgataaagagactgaaagaagaaaatgagaaactcaacgagttcctcgaattggagcgccataataataatatgatggctaaaacgttggaggaatgcagagtcaccctggagggcctcaagatggagaacggctctttaaagagtcaccttcaaggtgaaaaacagaaagccaccgaagctagcgctgttgaacagaccgccgagagctgcgaggttcaggaaatgcttaaggtggcaagggccgagaaagatttgcttgagctgagttgtaatgagttgcgacaggagctgttaaaagccaatggtgagatcaagcatgtatcatctctactcgccaaagttgagaaagattactcttacctgaaggaaatttgcgaccatcaagccgagcaactgtctcggacttccttaaaactgcaggaaaaagcatccgaatccgacgccgagattaaggatatgaaagagaccatattcgagctggaggaccaagtggagcagcatcgagccgtcaaactgcataataaccagcttatatctgaattggagagtagtgtgattaagttagaggaacagaaaagcgatctggagcgtcagcttaaaactctcacaaagcagatgaaggaagaaactgaggaatggcgacgatttcaggccgacctacaaactgccgtggttgttgctaatgatattaaatgtgaggcacagcaggagttgaggacggtgaagcgcaagctgctggaggaagaggagaaaaatgcacgcttgcagaaagaactcggagatgtgcaggggcacggccgggttgtaacgtctcgcgcagctcctccgcccgtggacgaggagcctgagagctctgaggtagatgcagccggaagatggcccggcgtgtgcgtctctcggaccagcccaacacctcccgaaagcgccacaacagttaagtctttgatcaaatcctttgacctgggcagaccaggtggagcgggccagaatatttctgtgcataagacccctcgctcgcccttgagcggcattcccgttagaacagccccagccgccgcagtcagccccatgcagcggcactctacatactcttccgtccggcccgcctcccggggtgtgacgcagagactagaccttcccgatttaccactgagtgatatactgaaaggaagaacggagaccctgaagcccgatccacaccttcgtaagtctcccagtttagagagcctgagtagaccacccagcctgggcttcggagacacacggctgctttcagcatccactcgggcatggaagccacagtccaaactgagcgtcgaacggaaggaccctctcgcggctttggctagggagtacggagggagcaaacgaaacgcacttttgaagtggtgccaaaaaaaaactcagggctacgccaacatcgacataaccaacttttcttccagttggtccgacggcctggctttctgtgcgctactccatacatatttgcctgctcacatcccctatcaagagctgaactcccaagagaaaaagagaaatttgctcttagcttttgaggccgcagagtctgtcggcatcaaaccgtctttggagctgagcgaaatgctgtatacagaccgcccggactggcaaagtgttatgcagtatgtggctcaaatctacaagtatttcgaaacgtag

SEQ ID NO: 135935 - DNA, 2112 bp, synthetic construct
  misc_feature 1..2112: note = Description of Artificial Sequence: Synthetic coding sequence
  source 1..2112: mol_type = other DNA
atgggtaaccactccggccgcccagaggatcctgaacccggagcattcaccaccacaaaaagaacggggattcctgcaccccgagagttcagcgtcaccgtgagccgtgaacggtccgtgcctcgtggacctagcaacccacggaaaagcgtgtcaagcccaacctcttctaatactccaactcccacaaagcacctgcgaacgccatccactaaacccaagcaggagaatgaaggaggcgaaaaggcagctcttgaatcacaagtgcgagagctgctggcagaggccaaagctaaagactctgagataaaccgactgaggtctgagctgaagaaatacaaagaaaagagaacactcaacgcggagggaactgatgcgctggggcccaacgtggacggtacatccgtttcacctggcgataccgaaccaatgatccgcgcactagaagagaaaaacaaaaactttcaaaaggaactgtctgatcttgaagaggagaaccgagtactaaaagagaagctgatataccttgagcactcacctaattctgaaggcgccgcatcgcataccggcgactcgagctgccccacatccatcacacaggagtcctcttttggatctccaactgggaaccagatgtcctccgatattgatgaatataagaaaaacatacacgggaatgccttgaggacgagtggatcaagctcatctgacgtaacaaaggcatctctctcgcctgacgcttctgattttgagcacataaccgctgaaacgccatctcgtccgctgtcgtctacgagcaaccctttcaaaagcagtaagtgctcaacagcaggctcctcacccaacagtgtctcagaactcagtctggcttccctgaccgaaaaaatccagaagatggaggagaaccaccactcaaccgcagaggaactgcaagccacattacaggagctgtccgaccagcaacagatggtgcaagagctcacagctgaaaacgagaagttggtcgacgaaaagaccatcctggaaactagctttcaccaacatcgcgaaagggcagaacagctcagccaggaaaacgagaaattgatgaatttactccaggaaagggtaaagaatgaagagccaaccacccaggaaggcaagatcatcgagcttgagcaaaagtgcactggcatcctggagcaggggcggtttgagcgggaaaagttattgaacattcaacagcagctgacctgtagcctgcggaaagtcgaggaagaaaaccagggggccctggagatgatcaagagattgaaagaggagaatgagaaactgaatgagttcttagagctggaacgccataataataatatgatggcaaaaactctcgaggaatgtagggttacactggaggggctcaagatggaaaacggaagtctgaagtctcacctgcagggtgagaaacagaaagctaccgaagcgtccgccgttgagcagactgcagaatcatgtgaagtgcaggaaatgttgaaagttgctcgcgcagagaaagatttgctggagttgagctgcaacgagttacggcaggaactactcaaagctaacggcgagattaaacacgtgagtagcctgctcgccaaagtggagaaggactactcttaccttaaggagatttgtgaccaccaggcggagcagctaagtaggacaagcctaaagctacaggagaaggcatccgaaagtgatgcagagatcaaggacatgaaggaaactatcttcgaactggaagaccaagtggagcagcaccgcgccgtaaaacttcacaacaaccagctcatttctgagctcgaatcaagtgtcataaaattggaggaacagaagagcgacttggaacgccaactcaagacgcttaccaaacaaatgaaggaagaaacagaggagtggcgacgctttcaggcggatctgcaaaccgccgttgttgtagcaaatgatatcaaatgtgaagctcagcaggagctccgcactgttaagaggaagctcctggaggaggaggaaaaaaacgctagactacagaaagagttgggagatgtacagggtcatggccgagttgtcacaagccgggccgctccaccttag

SEQ ID NO: 135936 - DNA, 2130 bp, synthetic construct
  misc_feature 1..2130: note = Description of Artificial Sequence: Synthetic coding sequence
  source 1..2130: mol_type = other DNA
atgggaaatcattcagggcgcccagaggacccagagcccggagcgttcaccacaaccaaaagaacaggcattcccgctccccgagagttctccgtgacagtgtctcgagagcgatccgtcccacggggtccctctaacccaaggaaatcggtctctagtcccacctcgagtaacacgcccactcccacaaagcacctccgaacgccctcaactaagccaaaacaagagaacgagggcggggagaaagccgctcttgaatctcaggtacgtgagttactggctgaagctaaagcgaaggacagcgagatcaacaggctcaggagcgaactgaaaaaatacaaagagaagcgaactttaaacgcagaagggaccgatgctctcggtccgaacgtagacgggacctccgtgagccccggcgataccgagcctatgattcgagctctcgaagaaaaaaacaagaactttcaaaaagagcttagtgacttagaagaagagaatcgcgttctcaaagagaagcttatctacctggagcactctcccaactcggagggagcagcttcccatacgggcgactctagctgcccaaccagcatcacacaggaatccagcttcggatctcctacgggcaaccaaatgagcagtgatattgatgagtacaagaagaacatacatggaaatgccctgcggacctcaggatcgtctagttctgacgtgacaaaagccagtctgagcccagacgccagtgatttcgagcacataactgctgagacaccctctagacccctctcatcgacctcaaaccctttcaagtctagcaaatgctctaccgcaggatcttctcccaattccgtgagcgaactcagtctggcctccctgacagagaagatccagaagatggaagaaaaccatcacagcacagctgaggagctgcaagcaactctccaggagttgtccgatcagcaacagatggtccaagagcttaccgccgaaaacgaaaaactagtcgatgaaaaaacgatcctggaaacatcctttcaccagcaccgtgagagagctgaacaactgagccaggagaacgagaagctcatgaacttgctccaggaaagagtcaaaaacgaggaaccgacaactcaggaggggaaaatcatagaactggaacaaaagtgtactgggatcctcgagcagggtcgatttgagagagaaaaactgctcaacattcagcagcaactcacttgcagtctaaggaaagtagaggaagaaaaccagggcgcactagaaatgatcaagagactcaaagaggagaatgagaaacttaatgaattcctagagctggaacgtcataacaacaacatgatggccaagactctggaggagtgccgggtgacactggagggactgaagatggagaacggctccctgaaatcgcatctccagggcgagaagcagaaggcaacagaagccagcgccgtagaacaaacagccgaatcctgcgaagtccaggaaatgcttaaggtggctagagcagagaaggacctgctggagctctcatgcaatgagctccgccaggagctcctgaaagcgaatggcgaaattaaacatgtcagcagtctgcttgcgaaggtggagaaggattattcatacctgaaggaaatctgtgaccatcaggcagagcagctgagtcgcaccagcctgaagttacaggagaaggccagcgagagcgatgccgaaattaaggacatgaaggagaccatctttgaactggaagatcaagtcgagcagcaccgagctgtcaaactccataataatcaactgatctcagaactcgaatcctcggtcatcaagctcgaggaacagaaaagcgatctcgagcgccagctgaagactttaactaaacagatgaaagaggaaacagaagaatggcgcaggttccaggccgatctgcaaacggccgtggtcgtggcgaacgacatcaaatgcgaagcgcagcaggaactgagaacggttaagaggaagttgcttgaagaggaagaaaagaacgccagactgcagaaagagcttggcgacgtccaggggcatggtagagttgtgacgtcccgcgccgcccctccttcactgggatcagtatcttag

SEQ ID NO: 135937 - DNA, 2964 bp, synthetic construct
  misc_feature 1..2964: note = Description of Artificial Sequence: Synthetic coding sequence
  source 1..2964: mol_type = other DNA
atgggaaaccacagcggacgccctgaagatcccgagccgggggccttcactaccactaagcggaccgggatccctgcccccagggagttttcagtcaccgtttcccgcgaacgctccgtccccagaggtccgagtaaccctcgcaaatccgtttcctcccctaccagctcaaataccccaacaccaacaaaacatctgcgaaccccctccaccaaaccaaagcaagaaaacgaggggggggagaaggctgctctggaatctcaggtgcgcgaactgttggccgaggcaaaagcaaaggattcggagattaataggctgaggagtgagctcaagaagtataaggagaagcggaccctcaatgcagagggcaccgacgcactgggacctaatgttgatggcacctcagtctcacctggggatactgagccgatgatacgggcgctggaagagaaaaacaaaaactttcagaaggaactgtcagacttagaagaggaaaaccgagttttaaaagaaaagctaatttacctggaacacagccctaacagcgaaggcgccgcctctcacaccggagatagttcgtgccctacttcaatcacccaagaatcgagctttggtagtcctacaggcaaccagatgtcaagcgatattgacgaatacaagaagaacattcacggaaacgccctgcgaacctccggaagtagttcaagcgacgtcactaaggccagtctgtccccggacgctagcgactttgaacatatcaccgcagagactccctcacggcccctctcttcaacgagcaatcccttcaaatcctctaagtgttccaccgccggctcttcccctaattctgtctctgaattaagcctagccagcttgacagaaaaaatccaaaaaatggaagaaaatcatcactctactgccgaagagctgcaggctactctccaggagctgagcgaccagcagcaaatggtgcaagaattaacagccgagaatgaaaaactagtggatgaaaagacaattctggagacctccttccatcagcacagggagagggcagagcagctcagccaagaaaacgaaaaacttatgaacctgcttcaggaacgagtgaaaaacgaggagccaacaacacaggaaggcaaaatcatcgaactcgagcagaagtgtactggcattctagagcaagggcggtttgagagggagaagctgttgaatatccagcagcagctgacctgttctttgaggaaagttgaggaggagaatcagggtgccctggagatgatcaaacgtctgaaagaagagaatgaaaagttgaacgagttcctggagctcgagcgtcataacaacaatatgatggccaagactttagaagagtgccgcgttacacttgaggggctgaaaatggagaatgggagtctgaagtcccacctccaaggcgagaaacagaaagctaccgaggcttcagcagtcgaacagacagcggagagctgcgaagtacaagaaatgctcaaagtagctcgggcggagaaagatctgcttgagctgtcctgcaacgaactcagacaggaattactcaaggctaatggagaaatcaagcatgtttcctcactcctggccaaggtggaaaaagattattcttatctcaaagagatctgtgatcaccaggccgagcagcttagcagaacatctctgaagttacaggagaaggcttcggagagcgacgcagagatcaaggatatgaaggagacaatatttgaattggaagatcaggtagaacagcatagagctgtgaagttgcacaataaccagctcatcagtgaacttgagtcgtcagtgatcaagctcgaagagcaaaagtctgacctggagcgccaactcaagaccctcactaagcagatgaaggaagagacagaggagtggagaaggttccaggctgatctgcaaacagcggttgttgtcgccaatgacatcaaatgcgaagctcagcaggaacttcggaccgtcaagcggaagctactcgaggaagaggagaagaacgctagattgcagaaggagctgggagacgtacagggccacggacgcgttgtgacttcacgtgccgcccctccgcctgtggacgaggaaccggaatccagtgaggtcgatgccgccggcagatggccaggcgtgtgcgtctcccgtaccagccccacacctcccgaaagtgccacaactgtcaaatccctcataaaaagttttgatctcggccgtcccgggggggctggtcagaacatctctgtgcacaagacgccgcgctccccactctctggtattccggtccggactgcccctgccgcggctgtgtccccgatgcaaagacattccacctattcgagcgtccgcccagcctctaggggcgttacacagagacttgacctgccagatttgcccctgtctgacatcctgaaaggcagaaccgagactctgaaacccgatccgcatctgagaaagtctccatcattagaatcactgtctagaccgcccagcctcgggttcggagacacacggctactgagcgcttcaacacgagcttggaagcctcaatcgaagctcagcgtggaacgcaaagacccattggccgcccttgccagagaatatgggggttcaaaacgaaatgccctactgaagtggtgccagaaaaaaacccaagggtacgccaatatcgacatcaccaacttttcctcctcatggagcgacgggttagccttctgcgcgctgctgcatacctacctgccagctcatataccataccaagagcttaactcgcaggaaaaaaagcgcaaccttctgctcgcgtttgaggccgctgaaagtgtggggataaagcccagtttggagttgtctgagatgctctacacagatcgacccgattggcagagcgttatgcagtacgtagcacagatctataaatatttcgagacatag

SEQ ID NO: 135938 - DNA, 2373 bp, synthetic construct
  misc_feature 1..2373: note = Description of Artificial Sequence: Synthetic coding sequence
  source 1..2373: mol_type = other DNA
atgcggtccgcagctaagccctggaaccccgcaattcgcgctgggggtcacggccccgaccgtgtgagaccactgccagccgcatcgagtggcatgaagtcctcaaagagctccaccagcctcgccttcgagtctcggctgtcacgcttgaaaagagccagctccgaagacacattaaacaaacccgggagcactgctgcctccggcgtggtacggctgaagaagacggccaccgccggcgcaatttctgagctgacagagagcagactgcgaagcggcacgggcgcctttaccacaaccaaaaggaccgggattcctgccccacgcgaattctctgtaaccgtgtcgcgggaaagaagcgtgcccagaggcccctccaatccgaggaagagtgtaagttcgccaacttcttccaatacaccaacccctactaaacaccttcgcacaccttcaacgaagccgaagcaggaaaacgaggggggcgagaaggccgctttggagagccaggtaagagagcttctcgcagaggctaaggccaaagactccgaaattaacagattgaggtctgagctgaagaaatacaaagagaagagaaccctgaatgctgaaggcacggacgcgttgggacccaacgtggacggcacctctgtctctcccggggacaccgaacccatgatccgggctctggaggagaaaaataagaacttccagaaagaactgtcggacctggaggaagaaaatcgggtgctgaaagaaaagctcatatacctggaacatagcccaaactcagagggcgccgcatctcacacaggggactccagctgtcccacttcaattacccaggagtcctcttttggaagtcccacaggtaatcaaatgagctcagatattgacgagtataaaaagaatatccatggcaacgccctgagaactagcggctccagtagcagcgatgttacaaaggcctctctgtcccccgacgctagcgactttgaacacatcacagctgagaccccgtcccgtcccctcagttcaacgtcaaacccgtttaaatcaagcaagtgctctaccgccggctcatctcccaattccgtaagcgagttgagcctggcaagcctgaccgaaaagatccagaaaatggaggaaaatcaccatagcaccgccgaagaattacaagctaccttgcaggagctttcagatcaacaacagatggtccaggaactcactgccgaaaacgagaaacttgtggacgagaaaacaatcctggagacaagtttccaccaacatagggagcgcgccgagcaactgtctcaggagaacgagaagcttatgaatctactccaggagcgcgtgaagaacgaagagccgacgacccaggaggggaagataatagaattggaacagaaatgtaccggtattctggagcagggtaggttcgagagagaaaagctgctgaacattcagcagcagcttacctgctcccttcgcaaagttgaagaagagaatcagggagccctggagatgatcaagaggctgaaagaagaaaacgagaaactcaacgagtttttggaactggagcggcacaacaataacatgatggccaaaacactggaggagtgtcgcgtgacactggagggcctgaagatggagaacggctcactgaagagtcacctgcagggcgagaagcagaaggctactgaagcatcagcagtggagcaaacggctgagagctgtgaggtgcaggaaatgctcaaagtcgcccgcgctgaaaaggatctgctggagctgagctgtaatgagttgcggcaggaacttttaaaagccaacggtgaaatcaagcacgtgtccagtctgctggccaaggtcgagaaggactactcctacctcaaggagatttgtgatcaccaggccgaacagctgtcccgaaccagtctcaagctgcaggaaaaggcctccgagtctgatgctgaaataaaggacatgaaagaaacaattttcgaactggaagatcaggtcgaacagcatagggccgttaagcttcacaataaccagctgatctcagaactggagagtagtgtgattaagctggaggaacagaagtccgatttggaacggcagctgaagaccctcaccaagcagatgaaggaggaaacagaagaatggcgcaggtttcaggccgatctgcagaccgccgttgttgtggccaacgatatcaagtgcgaggcccagcaggaactccgcaccgttaagcggaagcttcttgaggaggaggaaaaaaacgccaggctccagaaagagctgggcgatgtgcagggacatggcagagtcgtcactagccgggccgcgcctccgagccttggctcagtgtcgtag

SEQ ID NO: 135939 - DNA, 3090 bp, synthetic construct
  misc_feature 1..3090: note = Description of Artificial Sequence: Synthetic coding sequence
  source 1..3090: mol_type = other DNA
atgagatctgccgcgaaaccctggaaccctgcaatccgggccggcgggcacgggccagacagggtccgccccctacctgcggcctcctctggaatgaaaagcagtaaatcctccaccagcttagcgtttgaatccagactgtcccgactgaaaagggcctcttcagaagacacactgaataaacctggcagtaccgcagcctccggcgttgtaagactgaagaaaaccgccactgcgggcgccatatccgaattgactgaatcgagactgcgatctggcacgggagcttttaccactaccaagcgcaccggaattcctgcccccagagagttctcagtgaccgttagcagagagcgcagcgtgccccgtggcccttccaaccccagaaaaagcgtgtccagccccacctccagcaatacccccaccccgactaagcacctgcggaccccttcaaccaagcctaaacaggagaatgagggcggtgagaaggccgcactggaatctcaggtcagagagctgctggcagaagcgaaggccaaagactctgagataaacaggctgcgctcggagttgaagaagtataaggaaaagagaacgctgaacgctgaggggacagacgcactcggccctaatgtggacggaacaagcgtcagccccggggataccgagcctatgatccgcgctctggaggagaagaacaaaaacttccagaaggagctcagcgatctggaggaagagaatagagtgttgaaagagaagctgatatacctggagcattcccctaatagcgagggggctgcgagccacaccggggattcaagctgcccgacatcaattacgcaagagagctctttcggctctccaactgggaaccagatgtcaagtgacattgacgagtataagaagaatatccacggcaacgccctcagaacgagcggcagttcctcgagcgacgtgaccaaggcctctctaagtcctgacgcaagcgatttcgagcatatcacggctgagaccccctcccgcccattgtcaagcaccagtaatcctttcaagagcagtaaatgctcaaccgctggctcatcacctaacagtgtatcagagctctccctggccagtctcaccgaaaaaattcagaaaatggaagagaatcaccattcgaccgcagaagagctacaagcgaccctgcaggagctctcagaccaacagcagatggtccaagagcttacggcggaaaatgagaaattggttgatgagaaaaccattcttgaaacaagttttcatcagcacagggagagagcagaacaactgtctcaggagaatgagaagctgatgaacctgctgcaagagagggtgaagaacgaggaacccacaacccaggagggcaaaatcattgaacttgagcagaagtgtacaggaattcttgagcagggacgcttcgagcgcgagaaactccttaacatccagcagcaattaacttgcagcctcagaaaagtggaagaagaaaatcagggcgccttagagatgatcaagcgcctcaaagaggaaaacgagaaacttaacgaattcttggagcttgagcgtcacaataacaatatgatggcaaaaacactggaggagtgtcgcgtcacactggagggattgaagatggagaatggatcgctaaagtctcatctgcagggcgaaaaacagaaagccaccgaggccagtgcagtcgaacaaaccgcagagtcttgcgaagtgcaagaaatgctaaaggtggccagagcggaaaaagatcttttggagctgtcatgcaatgagctccgccaggagctccttaaggctaatggagaaatcaagcatgttagcagtctcctggccaaagttgagaaggactactcctatctgaaggagatttgcgaccaccaggcagagcagctgtcccgaaccagccttaagcttcaggagaaggcatctgagtccgacgccgaaatcaaggatatgaaggagaccatctttgagttagaggaccaagtcgaacagcacagggcagtgaagctgcataataaccagctgattagtgaactggagtcttccgtaataaagcttgaagaacagaagtcagacctcgaaaggcagttaaaaactctgactaaacagatgaaagaggaaaccgaggaatggcgacggttccaggccgacttgcagactgctgtagtcgttgccaacgacatcaaatgtgaggcccagcaggagctgcggactgtgaagagaaagctgttggaggaggaggaaaagaacgcccgcctgcagaaggagctcggggacgttcagggacatggccgggtggtgacctcaagggcggccccaccccccgtcgacgaggagcctgaatcatctgaggtggacgccgccggcagatggccaggcgtctgcgtgtctcgcacatctcctactccccccgaatccgccacgaccgtgaagtcccttattaagagctttgacctcggacggcccggcggagccggacagaatatctccgtccataaaacaccaagatcacccctgtcaggcatacctgtgcggaccgcaccagccgctgcggtgtcacctatgcagagacactccacttattcatctgtgcggcccgcctctcggggtgtgacccagaggctggatctgcccgacttgccactctctgatatccttaagggcaggaccgagactttaaagcctgatcctcatctgcgaaaatcaccgagcctggagtcgctgtccaggccgccctcgttgggctttggcgatacaagactgctgagcgctagcacccgggcctggaaacctcagagcaaactcagcgtggagcggaaggaccccctggctgcacttgctcgagagtacgggggctctaagaggaacgccctcttaaagtggtgtcagaagaagacacaggggtatgctaaaagaaaccttctgcttgcattcgaggcggcagagagtgtaggcatcaagccatcactggaattgtccgagatgctgtacactgacagaccagactggcaatctgtaatgcagtacgttgcacagatctacaaatactttgagacctag

SEQ ID NO: 135940 - DNA, 237 bp, synthetic construct
  misc_feature 1..237: note = Description of Artificial Sequence: Synthetic coding sequence
  source 1..237: mol_type = other DNA
atgcgctctgccgctaagccttggaaccccgccatccgggcaggaggccatgggcctgatcgggttagaccattgcccgctgctagtagcggtatgaagagtagtaagtcatcaacctctctggcatttgaaagccgcttgagccgtctgaagagagccagcagcgaggacactcttaataaacctggctcaactgccgccagcggtgtggtacgcttgaagaagactgctacctag

SEQ ID NO: 135941 - DNA, 1227 bp, synthetic construct
  misc_feature 1..1227: note = Description of Artificial Sequence: Synthetic coding sequence
  source 1..1227: mol_type = other DNA
atgaaggaaaccatctttgaattggaggatcaggtggagcagcacagagccgtgaagttacataataaccagctcatcagcgagcttgagtcatctgtaatcaagctggaggagcagaaatccgacctagagcgacagctgaagactctcacgaagcagatgaaagaggagacagaagagtggaggcggttccaggctgatttgcagacagccgtggtggtcgccaacgacatcaagtgtgaggcccagcaggagcttaggaccgttaaaagaaagctactggaagaagaagaaaagaatgcgagactgcagaaggaactcggtgatgtgcaaggccacgggagggtcgtgaccagcagagcagccccacctccagtcgacgaggaacccgagagttctgaagtagatgctgctggcaggtggccaggagtctgcgttagccgcacatcacccacaccgcctgaatctgccactacagtgaaatctctgatcaaatcgttcgatctgggaagaccaggcggcgcaggtcagaacatctccgttcataagacaccccgctcacccctcagcggcattcctgtgaggaccgctcccgccgctgcagtatctccgatgcagcggcactctacctactccagtgtgagacctgcttctcgaggcgtcactcagaggctcgatttgcctgacctgcctctgtccgacatacttaaggggcgcactgagacactgaagccagatccgcatttaaggaaatcgccttcgctagaatcactgtcccgccctccttcattgggattcggtgacaccaggcttttgagcgcctctactagggcatggaaaccacagtctaaactatcggtcgagcgcaaggatcccctagcggccttggccagagagtatgggggatcaaagaggaacgcattgctgaagtggtgccagaagaagacacagggatacgctaatatcgatatcaccaacttttctagtagctggagtgatggcctcgccttttgtgctctgctgcacacgtatctgccagcgcacatcccctatcaggagctgaacagccaggaaaagaaaaggaatctgcttctcgcatttgaagcggcggagtctgtcggcattaagccctcgctcgaactgtcagagatgttgtatacagatcggcctgactggcaatctgtcatgcaatacgtggcccagatatataagtactttgaaacctag

SEQ ID NO: 135942 - DNA, 3354 bp, synthetic construct
  misc_feature 1..3354: note = Description of Artificial Sequence: Synthetic coding sequence
  source 1..3354: mol_type = other DNA
atgaaaaaggccagcaggagcgtgggctccgtacccaaagtgtctgccatttccaagacacagaccgccgagaagatcaaacctgaaaatagtagctctgcatccaccgggggcaagctcgtgaagcctgggaccgcagcttccctaagtaaaacgaaatcatccgacgacctccttgccggcatggcgggaggcgttaccgtaacaaatggcgttaaggggaagaaaagtacatgtcctagtgctgctccgagcgcctccgctccggctatgaccacagtcgaaaacaagtctaagatatcaactgggacggcaagttccactaagcgttccacttccacaggaaataaagagtcttcatctaccagggagaggctacgcgaacggactaggctgaatcagtctaagaagctacctagtgctggacagggagcgaacgatatggccctcgcaaagcgctcccgctctcgcactgccactgagtgcgacgtgaggatgtcaaagtcaaaatcagataaccagataagcgatcgggcggccctcgaggcaaaggtgaaggacttgttaaccctggcaaagacaaaagatgtagagatactgcatctccgcaatgagctacgggatatgagagctcaactagggattaatgaagaccatagcgagggggatgagaaaagtgagaaggagaccattatggcgcaccaacctacagacgtagagtctacactgctccagttgcaggaacagaacaccgccattcgcgaggagttaaaccagctcaaaaacgagaatagaatgttaaaagaccgcctgaatgcccttggctttagccttgagcagcgtctggacaactccgagaagctctttgggtatcagagcctgtctcctgagattacgcctgacaaccaatcagatggcggcggcaccttgacttcttccgttgaggggtcagcgcccggcagcgtcgaagatctgttgagtcaggatgaaaacaccctgatggatcatcaacattcgaattccatggataatctcgactctgagtgctccgaggtgtaccaacccctaacttccagcgacgacgcgctcgatgctccttcaagctcggagtctgagggcatcccttccatcgaaaggtcaagaaagggatcttctgggaacgcgagcgaggtgtctgtcgcttgcctcactgagcgaattcatcagatggaagagaaccagcattctactagcgaagagctgcaagccactctccaggagctggccgatctccagcagatcacacaggagttaaattccgagaatgagagactgggcgaagaaaaagtcattctgatggagtccttatgtcaacaaagtgacaagctagagcatttcagtaggcagatcgagtattttcggtcactactggatgaacatcatatcagttacgtcattgatgaagacgttaaaagtggccggtatatggaactagagcagcgttacatggacctggctgagaacgcccgttttgaacgcgaacagctcctgggggttcagcagcaccttagcaatacacttaagatggccgaacaggataacaaagaagcccaggagatgatcggagcgctgaaagaacgtagtcaccacatggagaggatcatcgagtccgaacagaagggcaaagcggcacttgctgccacgctggaggaatacaaggccaccgttgccagcgatcaaatcgagatgaatagactgaaggctcagctggaaaacgagaagcagaaagtcgctgagctatactctattcataacagcggagataagagcgatatacaggacttactggagagcgttcggttggacaaagaaaaggctgagactctagcctcatccctgcaggaggacttggcccacactagaaacgatgcgaaccgtctccaggatgccatagctaaagttgaagacgagtacagggcctttcaggaagaagccaaaaagcagatcgaagatttgaacatgacgcttgagaaactgcggagcgacctggatgagaaagagactgaacgctcggacatgaaggagacaatcttcgaactcgaagacgaggtggaacagcaccgcgctgtgaagctccatgacaatttaatcatttctgatctggaaaacacagtcaaaaagctgcaggaccagaagcacgacatggagcgagagatcaagacgcttcatcggcgactgagagaagaatccgcagaatggcggcagttccaagcggacctccaaacagccgtagtcattgccaatgatatcaagagcgaagctcaagaagaaataggcgatctgaaacgcagactgcacgaggcccaggagaagaatgaaaagctaacaaaggagctcgaagagatcaagagcaggaaacaggaagaagagagaggccgcgtgtataattacatgaacgcggtggaacgagatctggcagcgctgaggcaaggtatgggactaagtaggcgctcatctacctcctccgaacccacacccaccgtgaaaactctgatcaagagctttgactctgccagccaggtccccaatcccgcagccgctgccattccacggacaccccttagcccatcacccatgaaaacaccgcccgccgccgccgtctcacccatgcagcggcattctatcagtggcccgattagcactagcaaacctcttactgccttatccgacaagcgccctaattacggcgagatccccgtccaggagcatctgctccggacttcctctgcaagcagaccagcatctcttccccgcgtccctgctatggaaagcgccaaaactctgtctgtgagtaggcgttcttccgaggaggtcaagagagatatcagcgcccaggagggggccagcccggcatcactgatggcaatggggaccacaagtcctcaactgtccctcagttcttcccccacagcttcagtgacgccgaccacgaggtcccgaataagggaggagcggaaggaccctctgtccgcgcttgcccgtgaatatggagggagtaaacgcaatgcactgctgaaatggtgccagaagaagacggagggataccagaacatcgatatcactaatttttccagcagctggaacgacggcctggcattttgtgctctgctccacacgtatttgcctgctcatatcccctatcaagagcttaacagccaggataagaggaggaactttatgctcgcttttcaggcagcagagtccgttggcatcaagagcactcttgatatcaacgagatggttaggactgagaggccggattggcagaacgtcatgctatacgttactgctatctataaatattttgagacttag

SEQ ID NO: 135943 - DNA, 2820 bp, synthetic construct
  misc_feature 1..2820: note = Description of Artificial Sequence: Synthetic coding sequence
  source 1..2820: mol_type = other DNA
gtacctgaagcagtcaggtggggatatttcatccctgagcaatctcaatttgcctgtaagtgtattaccaaacggcagccgcggatgaaaaaggcctcaaggtctgtgggtagcgtgccaaaggtttctgccatcagcaagacccagactgccgagaagattaaacctgagaatagtagctccgcatcaactgggggcaaacttgtgaagccagggaccgccgcctccttatccaagactaaaagttccgacgacctcttagcgggcatggctgggggagtaaccgtgacaaatggagtcaagggcaaaaagtctacatgcccctctgccgccccttccgcatctgccccagctatgaccaccgtggagaacaaaagtaaaatctccacaggaacagccagttcaaccaagaggagtacctccacgggtaataaagagtcctcatccacgcgagagaggcttcgggagcgcaccaggcttaatcagtccaagaaacttccaagtgccggccagggtgctaatgatatggccctggctaagcgttcccgaagccgcaccgctaccgagtgtgacgttagaatgagcaaatctaaaagcgacaatcagatttccgatagagctgcgttagaagctaaggtgaaggatctgctgacactagccaagacaaaggatgtcgagattctccatctgcggaacgaactcagggatatgcgcgctcagctgggcattaatgaggatcacagtgagggagatgaaaaatccgagaaggaaactataatggcccaccagcccacagatgttgagagcacattgctgcagttgcaggagcagaataccgcgatccgtgaggagctaaatcagctgaaaaacgagaacagaatgttaaaagatagactcaatgctctgggattttcccttgagcagcgactagataactccgagaaactttttggctaccagagtctgtccccagaaatcacccccgataaccagagcgatggcgggggtactctaacctcaagcgtggaggggtctgcccctggttctgtggaggacttgctgtcccaagatgaaaatacgctgatggatcatcagcattccaatagcatggataatctcgattctgagtgctcggaggtgtatcaaccactgacctctagcgacgacgctctggacgccccgtctagcagtgaatctgagggaatacccagcatcgagcggtcaaggaagggttcaagtggcaatgccagtgaagtgtccgtggcctgtcttactgagaggatacatcaaatggaagagaatcagcacagcacttccgaggaactgcaggccacacttcaggagctggcagaccttcaacagatcacccaagagctgaacagcgaaaatgaacggttaggcgaggaaaaggtaattttgatggaatctttgtgtcaacagtcagacaaattagagcactttagtagacagatcgagtacttccgctctctgttagatgaacaccatatctcctacgtgatcgatgaggatgttaaaagcgggagatatatggaactggaacagcgttatatggatctggcggagaacgcgaggtttgaacgggaacagctattaggggtgcagcagcatctgtccaatacgctcaagatggcagagcaagataacaaggaggcgcaggaaatgatcggcgctctgaaggagaggagtcatcacatggaacgcataatcgaaagcgagcagaagggtaaggctgctctggctgctacgctcgaggagtataaagccaccgtggcctcagaccaaattgagatgaatcgcctgaaggcccagctcgagaacgagaagcagaaggtggcggagctctacagcattcacaactctggagataagagtgacatccaggacttgctggagtccgtgcggctggataaggaaaaggctgagacgctggcctcctccctgcaagaagaccttgctcatactcgtaatgacgcaaataggctacaggacgcaatcgctaaagtggaggatgaatatcgagcttttcaggaggaagcaaagaagcagattgaagatctaaacatgaccttggagaaattaaggtccgacctggacgagaaagaaactgagcggagcgacatgaaggaaacgatctttgagctggaggatgaggtcgaacagcatcgggccgtcaaattgcatgataatctcataatctcagatctcgagaataccgtcaagaagctgcaagatcaaaagcacgacatggagagggagataaagacactacaccgtcggctgagggaggagagtgctgagtggagacaattccaggccgacctccagactgcggtggtgattgcgaacgatataaagagtgaggcgcaggaagagatcggggacctcaagcgccgcctgcacgaagcccaggaaaaaaacgaaaagctgacaaaggaattagaagagatcaagagtagaaagcaggaggaggaaaggggtcgggtgtataattacatgaacgccgtggaaagggacctggcagccctgcgacagggcatgggcctatcccggcggtcaagtaccagtagtgagccaacccccaccgtcaaaaccctgattaagtcattcgattctgccagtcaggttccaaatcctgccgctgccgctattcccagaacacctctgtccccctctcctatgaaaacaccgccggcagccgccgtgtcacctatgcagatggagtccagctcagtggcccatgcagggatgcaatggcgtgatcttggaagtctccagcctctccccccaggatttaaatag

SEQ ID NO: 135944 - DNA, 2370 bp, synthetic construct
  misc_feature 1..2370: note = Description of Artificial Sequence: Synthetic coding sequence
  source 1..2370: mol_type = other DNA
atgaagaaagcttcccgctcagttggctcggttcccaaagtaagcgcgatttcaaagactcaaacagctgaaaagatcaagcccgaaaattcaagctccgctagcaccgggggcaaactcgtgaaacctggtaccgcagcgtcactatctaaaaccaaaagcagtgacgacctactcgccggcatggctggaggggtgaccgtcaccaacggagtgaaaggaaagaagagcacatgtccgtctgctgctccgagtgcctctgctcctgccatgaccactgtggaaaataagtctaagatctctaccgggaccgcctccagcacgaaacggtccaccagcacgggtaacaaagagagcagctcaaccagggaaagactcagggagaggacacggctgaatcaatctaaaaagctgccctctgctgggcaaggagccaacgacatggctctggccaagcgctcccggagccggaccgccacggagtgcgatgttagaatgtccaagtctaaatcggataatcaaattagcgatagagccgccttagaagccaaagtgaaagatctactgaccttggcaaagaccaaagacgtggagatcctgcacctcaggaacgagttgcgcgacatgcgcgcacaacttggtattaatgaggaccattcagaaggcgatgaaaaatcggaaaaagagaccattatggcccatcaacccacagacgtcgaatctactcttttacaactccaagagcaaaacacagcgatccgagaggagcttaaccaacttaagaacgagaatcggatgctgaaggatcgcctgaatgcgttgggcttcagtttggagcaaaggctggacaattcagagaagctgttcggctatcagtcactgtctcccgagatcacaccagataatcagtccgacgggggggggacactgacctcatccgtggagggcagcgcccccggcagtgtggaggacctcctctcgcaggatgagaacaccctgatggaccatcagcatagtaacagtatggataacctggactcagagtgctctgaggtttatcagccgctgacctctagcgacgacgcactcgacgcaccatcatcctcggagtcggagggtatcccttccatcgaacggtctaggaaagggtcttccggaaatgctagcgaggtgtctgtcgcctgcctgactgagagaattcatcagatggaggaaaaccagcacagcactagtgaagagctgcaggcaaccttgcaagaattagcagacttacaacagatcacacaagagcttaactcagagaacgagagactgggagaggagaaggtgatcctcatggaaagcctgtgccagcagagtgataaacttgagcacttctctcgacagattgagtatttcaggagcttattggatgaacaccatatcagttatgtcattgacgaggatgtcaagagtggacgatatatggagttggagcagcgctacatggatttggcagagaatgcccgcttcgagagggaacaactgcttggggttcagcaacatctgagcaatacccttaagatggcggaacaggataacaaggaggcacaagaaatgattggcgcattaaaagaaaggtcgcaccacatggagagaatcatagagagcgaacaaaagggaaaggcagccctggcagcgacactcgaagagtacaaagctacagtggcttcggatcaaatcgaaatgaatagactcaaggcacagctggagaacgagaagcagaaggtggccgagctctacagcatacataactccggcgacaaaagcgatatccaggaccttttggagtcagttaggctggataaagaaaaggccgagacgctcgctagtagcttgcaggaagatctcgctcatacgaggaatgacgcgaacaggcttcaggacgctattgctaaggttgaggacgagtatagagcatttcaggaagaagcaaagaagcagatcgaagacctgaacatgaccctagagaaactcaggtctgatttagatgaaaaagagactgaaaggtctgacatgaaggagaccatcttcgagttagaggatgaagtggaacagcatagagccgtgaagctgcatgacaatctcattatcagtgacctcgagaacacagttaagaaacttcaggatcagaagcacgatatggaacgggagatcaaaaccttgcatcgccggcttcgggaggaaagcgcggaatggcgccagttccaagctgatctccagactgccgtggtgatcgcaaatgatatcaagtctgaagcacaggaagagataggcgatctcaaacgcaggctccacgaggcgcaggaaaaaaatgagaagctgacatag

SEQ ID NO: 135945 - DNA, 3354 bp, synthetic construct
  misc_feature 1..3354: note = Description of Artificial Sequence: Synthetic coding sequence
  source 1..3354: mol_type = other DNA
atgaagaaagcgtctcggagtgtgggttctgttcccaaggtcagcgctatcagcaaaacacaaaccgcagaaaaaatcaagccggagaacagcagcagcgctagcacaggaggtaagcttgtgaaacccgggaccgcggcaagtctgagcaagaccaaaagttccgacgaccttttggccggaatggccggaggggtaaccgtcacaaatggggtgaaaggcaaaaagtcaacatgtccatccgccgctccaagtgctagtgctcctgctatgacgaccgtggagaacaaaagcaagatctccactgggactgcaagctccacaaaacgctctacaagtactggtaataaggagtcttcttctactcgggagcgtctccgcgagaggacccggctgaatcaatccaaaaagcttccttcagccgggcagggcgccaatgatatggccctcgcgaaacggtcaagatctcgtacagccaccgagtgtgatgtgcgaatgtctaagtcaaagtccgacaatcagatctccgatagagccgccctggaagctaaggtgaaggaccttttgaccttagcaaagactaaggacgtcgaaatcctgcacctgagaaatgaattacgcgacatgcgcgcccaactgggcattaacgaggaccactcagagggtgacgaaaagagcgagaaagaaacgataatggcacaccaacccaccgatgtagagagcactctgttgcagttacaagagcagaacactgccataagggaagaattgaaccaactcaaaaatgagaaccggatgctcaaggataggttgaacgccctggggtttagcctggagcagcggctagacaactccgagaagctgtttgggtaccagtcactgagtccggagatcaccccggataaccagtcagatggtggggggactctgacaagttcagttgaggggtccgctcctggatccgttgaagatctgttgagtcaggacgaaaataccctcatggatcaccagcactcaaacagcatggataacttggactccgagtgtagcgaagtgtaccaaccactaacatcttctgacgatgcactcgacgccccatctagtagcgagagcgagggtataccctcgattgagcgctccaggaagggtagctccggcaacgcatcggaagtgagcgtcgcgtgcctcactgagagaatacaccagatggaagaaaaccagcatagcacatcagaagaactccaggcgaccctacaagaacttgcagatctccaacagattactcaggagctcaactccgagaacgagcggctaggcgaggaaaaggtgattctcatggagagcctgtgccagcagagcgacaagctggagcacttttcacggcaaattgaatactttcgttccctgttggatgagcatcatatcagctacgtgattgacgaggatgtgaagtcaggacggtacatggagctggagcagaggtacatggatcttgccgaaaatgctcgatttgaaagagagcagctattgggcgtccagcagcatctgtcaaatacactgaaaatggccgaacaggacaataaggaagcccaagaaatgataggcgcgctgaaggagagatcacaccacatggagcgcattatcgaaagtgagcagaagggaaaagcagctctggcagcaactcttgaggaatacaaggccaccgtggcctcagatcagatcgagatgaataggttaaaggcccagctggagaacgagaagcaaaaagttgccgagctgtactctatacacaacagtggggataaatcagacatccaagacttactggaatcagtacgactggacaaagagaaggctgagacgctggccagctccctacaggaagatctcgcccatactagaaatgacgccaatcgactccaggacgccatagcaaaagtagaagacgagtatagggctttccaggaggaagccaagaagcaaatcgaagatctgaacatgacacttgagaaacttcgatccgaccttgacgaaaaggaaactgagaggtccgatatgaaggaaacaatttttgaactcgaggatgaggtggagcaacacagggcagtgaagctacacgacaacctaattatctctgacctggaaaatactgtgaaaaagttacaagaccaaaagcacgatatggaacgtgagattaaaacactccacagaaggctaagggaggaaagcgcagagtggagacagttccaggcagacctgcagacagcagtcgtaatcgccaatgatatcaagagcgaagcccaggaggagatcggcgacctgaaacggcggctgcatgaggcccaggaaaagaatgagaagttgacaaaagagcttgaagaaattaagagtcggaaacaggaggaagagcggggaagagtgtacaactacatgaacgccgtggaacgggatctcgctgctctccggcaggggatggggctgagccgtcggtcctctaccagcagtgagccaacacctaccgtgaagacattaattaaaagttttgattccgcctctcaagtgccaaaccccgctgctgccgcaatcccgaggacgcccctgtccccatcacctatgaagaccccacctgctgctgccgtgtcgccaatgcaaaggcacagcatcagtggacccatctctactagcaagccactgaccgccctcagcgacaaacgtcctaactatggggaaattcccgttcaggagcacctgcttaggacctccagtgcttctaggcctgcctccctgccccgggtcccagccatggaatccgctaaaacccttagcgtgtcaagaagatcttctgaagaggtcaagcgggatatcagcgcgcaggagggggctagtcctgcttctctgatggctatgggtactacgtccccacagctgtccctctcaagttcacccacagcatctgtcaccccgactacccgctccagaattagagaagaaaggaaggatcccctgtcagcacttgctagggagtacggcgggtcgaaaagaaacgctctccttaaatggtgccagaaaaaaacggaaggatatcagaacattgacatcaccaacttttcatccagctggaacgacggcctcgccttctgtgccttgctccatacatatctgccggcccacattccataccaggaattgaacagtcaggataaaaggcgcaatttcatgctggcctttcaggcagccgaatctgttgggattaagtctacattggatattaacgagatggtgcgcaccgagagacctgactggcagaacgttatgctgtatgtgactgccatctacaaatatttcgagacatag

SEQ ID NO: 135946 - DNA, 3237 bp, synthetic construct
  misc_feature 1..3237: note = Description of Artificial Sequence: Synthetic coding sequence
  source 1..3237: mol_type = other DNA
atgaaaaaggccagtagatccgtaggatctgtccctaaggtgtccgccatttctaagacccaaaccgccgagaagatcaagcctgagaacagcagcagcgctagcacaggtggaaagctcgtgaaaccggggactgccgccagtctcagcaaaaccaaatcctctgacgacttgcttgccggcatggctggaggggtgaccgtcaccaatggtgttaagggaaaaaaatcaacatgcccatcagccgcacccagcgcaagtgctcccgccatgaccacagtggaaaacaagtccaagatttccaccggcactgcctcctccactaagcggagcacctctactgggaacaaggagagttctagtacacgcgagagattgcgtgaaaggacccggctaaaccagagcaagaagcttccaagcgcaggccagggggcgaatgacatggcgctggcgaaacgcagccgcagtaggacagccacggaatgcgacgtgcggatgagcaagagcaagtctgacaatcagatcagcgatcgggcagccctggaagcaaaggttaaggatctgttgaccctggctaaaacaaaagatgtggagatcctgcacctgcggaatgagttgagggatatgagggcccagctgggaattaacgaggaccattcggagggagacgagaaatcagagaaggagactataatggcacaccaaccaacagatgttgaatctaccttgttgcaactgcaagagcagaacactgctatccgagaggagctcaaccagttgaaaaacgagaaccggatgctgaaggataggttgaatgccttgggcttttccctcgaacagagactggacaactccgagaaactatttggataccagtccctgtctccagagatcacacccgataatcagagcgacggcggcggaacactgacctcatctgtggagggcagcgcaccaggctcggtcgaggatctgctgtctcaagatgagaacactctgatggatcaccagcattcaaacagcatggacaatttggatagcgaatgctccgaagtgtatcagcctctgacaagcagcgacgatgcacttgatgcccccagctcttccgagtcagaagggattccaagtatcgagagatctagaaagggttcatcgggaaacgcctcagaggttagcgtggcgtgtctgaccgagaggatccaccagatggaagaaaatcaacactctacaagcgaagagctgcaggccaccctccaggaactggccgacctacagcaaattacccaagagctgaatagtgagaatgagcgcctcggggaggagaaggtcatcctgatggagtccctgtgtcaacagtccgacaaattggagcacttttcacgccagattgagtattttagaagccttctggacgaacaccacatatcctatgtaattgatgaagatgtcaagtccgggagatatatggaattagagcagaggtacatggacttggctgaaaacgcccggttcgagcgtgagcagctcttaggggtccaacagcatttgtcaaataccttgaagatggctgagcaggataacaaagaggctcaggagatgattggcgccctcaaggagaggagtcaccatatggagcggataattgaatccgaacagaagggaaaagctgccttagcggcaacccttgaggagtacaaagccactgtggctagcgaccaaattgagatgaaccggttaaaggcgcaattggagaatgagaagcagaaggttgccgagctatacagcatccataattcaggtgacaagagcgatattcaagacctcctagagtcagtgagactcgataaggagaaagcagagactctggcgagcagcctgcaagaggacctggcccacaccaggaacgatgcaaatcggctccaggatgccatcgctaaggttgaggacgagtaccgcgcatttcaggaggaggccaagaagcagatcgaggaccttaatatgacacttgagaagctgagatccgatctagatgagaaggagactgagcgatccgacatgaaagagacaatctttgaacttgaggacgaggtcgaacagcaccgcgctgtgaagctacacgacaatttaatcatctcagatcttgagaacaccgtcaagaaactgcaagaccagaagcacgacatggaacgcgaaataaaaacattgcatcgcagattgcgggaggagagcgctgaatggaggcagttccaggccgatctccagactgccgtagtgattgctaacgacattaagtcagaagcccaggaggagattggagatctgaagcgaagactgcatgaggcccaggagaaaaacgaaaaactcaccaaggaacttgaggagatcaagtctagaaagcaagaagaggaaagaggcagagtgtacaactacatgaatgccgtagagagggacttggcagccctcagacaggggatgggtctgtctagacgaagcagcacgagcagcgaaccaaccccaacagtgaagactttgattaagtcgttcgacagtgcttctcaggtccccaaccctgctgccgccgctattccaaggactcccctgagcccatctcctatgaagactcctcccgcagccgctgtgagccctatgcagcgccattctatcagtgggcctatttcaaccagcaaacccctgaccgccctcagtgataagcggcccaattatggcgagattcctgtacaggagcatctcctgagaaccagcagtgcctctaggcctgcctcactgcctagagtgccggccatggagtccgctaagacattgtcagtgtcaaggcgctccagcgaggaagtgaaacgggacatctctgcccaggaaggcgcttctcccgcctctttgatggctatgggcaccactagccctcagctgtcactgtcttctagccccacggccagtgtcacccccacaacaaggagcagaatcagagaagagagaaaagaccctctcagcgcacttgcaagagagtacggcggcagtaagcgcaacgcactcctgaagtggtgccaaaaaaagacagaaggctaccagagacgcaactttatgctggcgtttcaagcagccgagtcagttgggattaagagcaccttggatatcaacgagatggttcgcacggaacggccagactggcagaatgtcatgctatacgtcacagcaatttataagtactttgaaacatag

SEQ ID NO: 135947 - DNA, 2781 bp, synthetic construct
  misc_feature 1..2781: note = Description of Artificial Sequence: Synthetic coding sequence
  source 1..2781: mol_type = other DNA
atgactacgaaagattacccctccctgtgggggttcggcaccacgaagacatttaagattcctattgagcatctggattttaagtatattgaaaagtgctcagacgtgaaacacctagagaagatcctgtgcgtgttgaggtctggcgaggaggggtactaccctgaactgactgagttctgtgaaaaacaccttcaggccttagctcctgagagcagggcccttagaaaggacaagccggccgcaacggcagcgagcttcactgccgaagagtgggaaaaaatagacggcgatattaagtcatgggtgagcgagattaaaaaagaggaggataagatgcacttccacgaaacagagaccttcccagctatgaaggataacctaccacctgtgcgcggtagcaacagttgcctgcatgtcggcaaggagaaatatagcaaaaggcctactaagaaaaagacaccacgagattatgctgagtgggacaagtttgatgtagaaaaggagtgtcttaaaatcgatgaagattacaaagagaaaacagttatcgacaagagccatctgagtaagatagagacccgtatcgacaccgccggactcaccgaaaaagagaaagactttctggctacccgggaaaaggaaaagggcaatgaggcattcaatagtggcgattacgaggaagcggtcatgtactatacccggagcatctcagcgctgcccaccgtcgtcgcttacaacaacagagcacaggctgagatcaaactgcaaaattggaacagcgcctttcaagactgtgagaaagtcctcgagctggaacccgggaacgtgaaggccttgcttcgcagagcaactacctacaagcaccaaaataaattgagagaggcaactgaggacctgtctaaggtgctggacgtcgagcctgataatgacctggcaaaaaaaacgctctctgaagtggaacgagatttgaaaaactcagaagcagccagcgagactcagacgaaggggaaaagaatggtgattcaagagatcgaaaactctgaggatgaagaggggaagtctgggcgaaaacacgaagacggaggcggcgacaaaaagcctgccgagcctgctggtgccgcaagagccgcccagccttgtgttatgggcaacatccaaaaaaagctaactggtaaggccgagggaggtaaacggcccgcccggggtgccccccaaagggggcagactccagaggcaggagcagacaaacgcagtccaaggcgcgcgtctgctgcagcagcagcaggcggcggcgctactggacaccctggaggcgggcaaggggcagagaacccagctggactgaaatctcaggggaacgagctcttccggtcgggacagtttgccgaggccgcggggaagtacagtgcagcaatcgctcttcttgagccagccggatcagaaatcgccgacgacctatccatattgtacagtaacagggcggcttgttatcttaaggagggcaattgtagcggctgtattcaagactgcaatcgagcacttgaattacacccgttctctatgaagccgctgcttcgacgcgcgatggcatacgaaactttggagcaatatggcaaggcctatgtcgactacaaaaccgtgctgcagatagactgcgggttacagctcgcgaacgatagtgttaatcgacttagtcgtattctcatggagctggacggaccgaactggagggagaaactatcccccatacccgctgtgcccgccagtgtgcccctgcaggcttggcacccggccaaagaaatgatttccaagcaggcaggcgatagctcttcgcaccgccagcagggcataacagatgaaaagaccttcaaggccctaaaggaagaggggaaccagtgcgtaaatgacaagaactacaaggatgcgctgagcaaatatagcgagtgtctgaaaatcaacaataaggagtgtgcaatctacaccaatagggccttatgttatttgaaactttgtcaatttgaggaggccaagcaagattgcgatcaggccctacaacttgcagacgggaacgtaaaggccttctaccgccgggctctggcccacaagggccttaagaactatcagaaatctttgatcgatctgaataaggtcatcctgctggatcctagcatcattgaagcaaaaatggagttggaagaggtgactcggctcctcaatcttaaggacaagacggccccatttaacaaagagaaagagaggaggaagatagagatccaggaggtcaatgaaggcaaggaagagccggggcgcccagctggcgaagtttccatgggctgcctcgctagtgagaaaggaggaaaaagttctagatccccggaggacccagaaaagttgccaattgcaaaacctaataatgcttacgagttcggacagatcatcaacgccctcagcacccgcaaggataaagaggcctgcgcacacttattggccattacggctccaaaggatcttcccatgttcctgagtaacaaattagaaggggacacattcctgttactcatccagtcactgaagaacaatctgatagagaaagacccctcactggtctaccagcacctgctttacctgagcaaagccgaaaggttcaagatgatgctcaccctcatctctaagggtcagaaagaactcatagaacagctcttcgaagacctgtccgacacgccgaacaatcatttcaccctggaggacatacaagccctgaaaaggcagtatgagttgtag

SEQ ID NO: 135948 - DNA, 2781 bp, synthetic construct
  misc_feature 1..2781: note = Description of Artificial Sequence: Synthetic coding sequence
  source 1..2781: mol_type = other DNA
atgacaacaaaagactaccctagtctgtggggttttgggaccaccaaaacctttaagatacctattgagcatctagactttaaatatatcgaaaagtgtagtgatgtgaagcacctggagaagatcttatgcgtgctgagatctggtgaggaaggatattatcccgaactaacggagttctgcgaaaagcacctgcaggcactagcccccgagtcccgagcgctgcgcaaagacaagccagctgccacggccgcgtcttttaccgcagaagagtgggaaaagatcgatggggatataaagtcctgggtatccgagatcaaaaaggaagaggacaaaatgcatttccacgagacggaaacgttcccagcaatgaaggataatctgcctcccgtgcgagggtcaaatagttgtttacacgtgggaaaggagaagtactctaaaagaccaacaaagaagaaaactccacgagactacgccgagtgggacaaattcgatgtggagaaggagtgcctaaagatcgacgaagattacaaggagaaaactgtgattgataagagtcatctctcaaaaatagaaactcgaattgacacagccggactcacagaaaaagaaaaggacttcctggccactagagagaaggaaaagggaaatgaggcattcaactccggggattatgaggaagccgtgatgtactacacaaggagcattagtgccctccctacagtggtcgcctacaataatagagcacaagctgaaattaagctgcagaattggaattctgcttttcaggactgcgagaaagtgctggaactggaaccaggcaacgtgaaggcccttctaagaagagctaccacatataagcatcagaataagctgagggaggcgaccgaggacctgtctaaggttctagatgtggagccagacaacgatctggctaaaaagacattatctgaggtggagcgagacctcaagaacagcgaagcggcgagtgaaacacagaccaaagggaagagaatggttatccaggagatagaaaacagcgaagatgaagaggggaagtccggccggaagcatgaggatggcgggggagacaagaaaccagcagagcccgcgggggccgctagagccgcacagccctgtgtgatgggtaatatccagaaaaaattgactggcaaagcagaaggaggaaaacggccagcccgtggtgctccacagagaggccagacacctgaggccggcgccgataagaggtccccccgtcgggccagtgcggctgctgccgcgggtgggggcgccactggacacccaggcgggggccagggcgcagagaaccctgcgggactcaaatctcagggcaacgaactgttccggtccgggcagttcgctgaagccgctggaaaatacagcgctgctattgctttgttagaaccagcaggctctgagatcgccgacgacttgagtatactctactctaatcgtgcagcctgctatctgaaggaaggtaattgctcggggtgtatccaggattgcaatcgggccctggagctgcaccccttttcaatgaagcctctgcttcgaagggcaatggcatatgaaaccctagagcagtatggcaaggcgtacgtcgattataagactgtcctgcagattgactgtggattgcaacttgccaacgactccgttaaccgcctgtccagaatcctgatggagctagacgggcccaactggagggagaagctgagccccattcccgccgtccctgcttccgttcctctgcaagcatggcatcccgccaaggaaatgatctctaagcaggctggcgattccagcagtcacagacagcagggaattacagacgagaaaacctttaaagctttgaaagaggagggtaaccagtgcgtcaatgacaagaactataaggacgcgttatctaaatacagcgaatgcttaaaaattaacaacaaggaatgcgccatctatactaatagggccctgtgttacttgaaactgtgccagtttgaggaggcgaagcaggattgcgaccaggcactacagttagcagacggtaacgtcaaagcgttctacaggagggctctcgcccacaaaggacttaagaattatcagaagagccttatagatctgaacaaagtcatcttactagatcccagtattatagaagctaagatggagttggaagaagttacacggctgctgaacctcaaagacaagacggctccttttaacaaggagaaagaacggcgaaaaatcgaaattcaggaggttaatgaggggaaggaggaacccggacggccggctggcgaagtgagcatggggtgtctggcttcagagaaaggcggcaaaagctctcgatcacccgaagaccccgaaaaactaccaattgcaaagcccaacaacgcctacgaatttgggcaaatcataaacgccctctcaacccggaaagacaaggaagcctgcgctcatttactggctatcaccgccccaaaggatctgcccatgtttctgtctaataaactagaaggcgacacatttctactactgattcaatcgctcaaaaacaacctgattgagaaggacccctcattagtgtaccagcatctactttatctgtccaaagccgaaagattcaaaatgatgcttacacttatttccaaaggccaaaaagaattaatagagcaactgtttgaggacctgagcgacacacctaacaaccatttcactctggaagatatccaggccctgaagaggcagtatgagctgtag

SEQ ID NO: 135949 - DNA, 1044 bp, synthetic construct
  misc_feature 1..1044: note = Description of Artificial Sequence: Synthetic coding sequence
  source 1..1044: mol_type = other DNA
atggcggcgcagaggggaatgccctcctctgccgtgagggtcctcgaagaggctctaggtatgggcctcacagcagcgggcgatgcccgcgatactgcagacgctgtggcagccgaaggagcctattatcttgaacaagtgacaattacagaagctagcgaagacgattacgaatatgaagagatccccgacgacaacttctccattcctgaaggtgaggaagatctggctaaggcgatccagatggcacaggaacaagctacagatactgagatactagagcgcaagacggtcctaccaagcaaacatgccgtgccagaggtgattgaagacttcttgtgcaacttcctgattaagatggggatgacgcgcaccctcgattgcttccagagcgagtggtatgaattgattcagaaaggggtgacggaattgcgaaccgtgggcaacgtcccagatgtgtatacccaaataatgctcctcgagaacgaaaataaaaatctgaagaaagatctcaagcactacaagcaagctgccgataaggcccgggaggacctcctcaagatccaaaaggagagagattttcataggatgcaccacaaaagaatcgtccaggaaaagaacaaactgattaatgatctgaaaggcctgaaactccactacgcaagttatgagccaacgatcagagtgctccatgaaaaacatcacactctcctcaaagagaaaatgctgacctccctggagcgggacaaagtcgtcgggcaaatttctggcttgcaggagactctgaagaaacttcaacgagggcacagctatcacggtcctcaaattaaggtggatcatagccgggagaaggagaacgctccagagggccccacgcaaaagggcctacgggaggcgcgggaacaaaacaaatgtaagaccaagatgaagggtaataccaagcagtggaccgggaactctcaaacttggaataagactgtgccgctacaagataccatcggaagaagacaggagaataatagcgcccaccagcacatcgactag

SEQ ID NO: 135950 - DNA, 1896 bp, synthetic construct
  misc_feature 1..1896: note = Description of Artificial Sequence: Synthetic coding sequence
  source 1..1896: mol_type = other DNA
atggccgcgcagcggggaatgccttcgagcgccgtgagggtgctagaggaagccctgggaatgggcctgaccgccgccggagacgctcgcgatacggcagatgctgtcgccgcagaaggagcgtattacctggagcaggtaactatcacagaggcctccgaagatgattatgaatacgaagaaatcccggatgacaatttcagtatcccagagggcgaggaggacctggctaaagccatccaaatggcgcaggagcaggccacggataccgaaatcctggaaaggaagactgtgctacccagcaagcatgctgtccctgaggttatagaagactttttgtgcaactttctcattaagatgggtatgactcggaccttagactgtttccagtcagaatggtacgagctgattcagaaaggggttactgagctgaggacagtgggtaatgtccctgacgtgtatacccagattatgctgctggaaaatgaaaacaaaaatctgaagaaagacctgaaacactacaaacaggctgccgacaaagctcgcgaggatctactgaaaatccagaaagagagggatttccaccggatgcatcacaagcgtatcgtgcaggagaagaataagttaataaatgatcttaaggggttgaaactacactacgcctcctatgaaccaaccatccgggttctgcatgagaagcatcataccctgcttaaagagaagatgcttacctctttggagagagacaaggtagtcggtcagatatccggactgcaggaaacgctgaaaaagctccagcgcgggcactcttatcatgggccccagatcaaggtcgaccattcaagggagaaggagaacgccccagaaggtcccacacagaagggactgcgggaggcacgagagcagaataagtgcaagactaaaatgaaggggaataccaaagatagcgaatttcccattgatatgcagcctaacccgaacctgaacgtcagtaaggagagcctgtctcccgccaagtttgattataagctcaaaaacatcttccggcttcacgaattgcctgtgagttgtgtttcgatgcaaccacacaaagacatcctggtttcctgcggagaggaccgcctgtggaaggtactgggacttcctaaatgcaatgtgttgctgacagggtttggccataccgactggctgtctgactgttgttttcatccatccggagataagcttgccacctcctcaggcgataccactgttaaactgtgggacctctgtaaaggcgactgtatcctgaccttcgagggacacagcagggccgtgtggagttgcacctggcattcatgtgggaacttcgtggcttcaagctcactggacaaaactagtaagatctgggacgtgaacagcgaacgctgccggtgtacgctctacggacacaccgactcagtaaattccattgaattcttccctttctcaaataccttgctgaccagctccgccgataaaaccctgtcgatctgggacgctcggaccggaatttgtgaacagtctctttacgggcacatgcatagcataaacgacgccatcttcgatcctagagggcatatgatcgcaagttgcgatgcatgcggggtaactaaactgtgggatttccggaagctgcttccaatagtctccatagatatcggaccctcacccggtaatgaagtcaactttgatagctcaggaagggtcctggcacaagcttccggtaatggcgtcatacaccttctggatctaaagagtggcgagattcacaaacttatgggccacgaaaatgaggctcacacagttgtgttctctcatgatggggagatcctattcagcggcggctcagatggtaccgtgcgcacatggtcttag

SEQ ID NO: 135951 - DNA, 1614 bp, synthetic construct
  misc_feature 1..1614: note = Description of Artificial Sequence: Synthetic coding sequence
  source 1..1614: mol_type = other DNA
atgactatgaacatgaagcgttatcaaatgacaattttagcgtctcaaaaggttaagaaaatatggcaaaagcaatttagatggcccaagaacagattacagattctcaaattctggtacgaactcattcagaagggcgtcacagagctgcggacagtgggaaacgtgcctgacgtgtacacccagataatgttgttagagaatgaaaacaagaatctgaagaaagatctcaaacattacaaacaggccgccgataaagcccgcgaagatctgctgaagatccagaaggaacgggactttcaccggatgcaccacaaacggattgtgcaggagaagaataagctcatcaatgacctgaaaggcctcaagctgcactatgcatcctacgagccaaccattcgggtacttcatgaaaaacatcacacattactgaaggagaaaatgctgacctctctggaaagggataaagtcgttggccagatctcgggtctacaggagactctgaaaaagctacaacgtggccattcataccatggcccccaaatcaaagtggatcacagccgggaaaaggaaaatgcacctgaaggtccgactcagaagggactccgagaggcgagagagcaaaacaaatgcaaaacaaaaatgaagggcaacaccaaagactctgagttccccatcgacatgcagcccaatccgaacttaaatgtgtctaaggaatcacttagccctgctaaatttgattacaagctgaagaacattttccggctgcacgagctgcctgtgtcgtgcgtctcaatgcagccacataaggatatcttggtctcttgcggggaggatcggctctggaaggttttgggtcttcccaagtgcaatgtgttgctgactggttttggccatactgactggctcagcgattgttgcttccacccatccggagacaaactcgccaccagctccggcgatactacggtcaagctttgggacttgtgcaagggggattgcattttgaccttcgaaggccactcgcgggctgtgtggtcctgcacatggcacagttgcggcaattttgtagcctctagttccctggacaaaaccagcaagatttgggacgtgaattctgaacgatgtcgctgtacgctgtatgggcacaccgacagcgttaactccatcgagtttttccctttttctaacacactgctcacttccagcgcagataagacactgtccatatgggatgctcgcacgggaatttgtgagcagtcgttgtatggccacatgcacagtattaatgatgctatttttgaccccagaggacatatgatcgccagctgcgatgcttgtggcgtgactaaattgtgggattttcgaaaactgcttcctatcgtcagtatcgacattggccccagccctggcaatgaagtcaatttcgattcaagcgggcgtgtgctagctcaggccagcggaaatggagtgatccacctgctggatctgaaaagcggtgaaatccacaaactgatggggcatgagaatgaggcccatacagtcgttttctctcacgacggcgagattctgttttctggcgggtcggatggcacagtgcggacctggtcctag

SEQ ID NO: 135952 - DNA, 756 bp, synthetic construct
  misc_feature 1..756: note = Description of Artificial Sequence: Synthetic coding sequence
  source 1..756: mol_type = other DNA
atgggagtgggcacaaaagctagagcttcacactggcggcggctgctgtcccttggtgcgacgccagaggagcctttgctggatttcaagattccagacgacaacttcagcatcccagagggagaggaagatctcgcaaaggccatccaaatggcccaagagcaggctaccgatacggaaatattagaacgaaaaaccgtgttgccatcaaagcacgctgtacctgaagtaatcgaggactttctgtgtaactttctcatcaaaatgggtatgactagaacattagactgcttccagagtgagtggtacgaactgattcagaagggggtgaccgagttgcggacggtaggaaacgtacccgacgtttacacacagattatgctgctggagaatgaaaataagaatttgaagaaggacctcaaacattataagcaggcagccgacaaagcccgggaggacctgctgaagatccagaaagaacgggactttcatcgaatgcatcacaaacgtatcgtgcaggagaaaaataagttgatcaatgacctcaagggtttgaaactccactacgcttcgtatgagcccacaatacgcgttttgcatgaaaagcatcatacactgctgaaagaaaagatgctcacgtcactggagcgggacaaagttgtgggacagattagtggattacaagaaactctcaagaagcttcaaaggggtcattcctatcacggaccacaaattaaaggcaagtgcaagatgtag

SEQ ID NO: 135953 - DNA, 552 bp, synthetic construct
  misc_feature 1..552: note = Description of Artificial Sequence: Synthetic coding sequence
  source 1..552: mol_type = other DNA
atggcggcccaacgaggtatgccgagttccgccgttcgagtcctcgaagaagcccttgggatgggcctcactgccgcgggtgacgcccgcgacacagctgatgcagtcgcagccgaaggggcatactatctcgaacaggtgacgatcacagaggccagcgaggatgattacgagtatgaagaaattcccgacgataattttagtatccccgagggagaagaggacctggccaaggctatccaaatggcgcaggagcaggcaacggatactgagatactcgagcgcaaaaccgttctgccaagcaagcacgccgtgccagaggttattgaagatttcttatgtaatttcctgatcaaaatggggatgacaaggaccctggactgttttcagtctgagtggtatgagctgatacagaagggggttacagagttgcgcaccgtgggcaacgttcccgatgtctacacccagatcatgctcctggagaatgagaacaagaatttgaagaaggatctcaagcattacaagcaagctgcagagtacgtcattttttag

SEQ ID NO: 135954 - DNA, 768 bp, synthetic construct
  misc_feature 1..768: note = Description of Artificial Sequence: Synthetic coding sequence
  source 1..768: mol_type = other DNA
gatagcgagttcccaattgatatgcagccaaacccaaatctgaacgtttccaaggagtctctctcccccgctaaattcgattataaacttaagaatatttttagactccacgaattacctgtgtcttgcgtctcaatgcagccccacaaggacatccttgtctcctgcggtgaggacagattgtggaaggtgctcggactacctaaatgcaacgtcttactgactggctttggacacaccgattggctgtccgactgctgtttccatccgtctgaacgctgtcgttgcacattgtacgggcataccgacagcgtcaacagtatagaattcttcccattttccaacactctgctgacttcttctgccgataaaactctcagtatatgggacgcccgcaccgggatctgtgaacagagcctgtatggccacatgcatagcatcaatgacgctatatttgacccgagaggccacatgattgcatcctgcgatgcatgtggtgtgacaaaactctgggacttcaggaagctgctgccaatcgttagtattgatatcgggccaagccccggaaacgaggtgaatttcgacagcagcggtagagtgctcgcacaggcctcggggaacggggtgattcatctgctggacctgaagagcggagagatacacaagcttatggggcacgaaaacgaggcacacaccgttgtgttctcacacgacggcgagattctgttttccgggggctctgatggtaccgtgcggacttggtcctag

SEQ ID NO: 135955 - DNA, 1314 bp, synthetic construct
  misc_feature 1..1314: note = Description of Artificial Sequence: Synthetic coding sequence
  source 1..1314: mol_type = other DNA
atgaggcgctctagcaggccaggctccgcatcatctagtagaaagcataccccgaatttcttttctgagaattctagtatgtcgattactagcgaggattctaaggggcttaggagcgccgagcccgggcccggggagcctgagggcaggagggcacggggcccgtcatgtggcgaacccgccttatctgccggtgtccctggcggcacgacctgggctggcagtagccagcagaagcccgcgccaaggagtcacaattggcagaccgcctgtggcgctgccacagtgagaggtggggcaagcgagcctactggttcaccagtggtttccgaagagcctttggatctgctgcccaccttggatctgaggcaggagatgcctccgcctcgggtctttaaaagctttttatctcttctgtttcaaggcctgtctgtactgctgtctcttgccggagacgtgttggtgtcgatgtaccgggaggtctgtagcatccgcttcttatttactgccgtgtccttactgtccctgttcctgtcagccttctggcttggcctgttgtatctggtgtctcctctggagaacgagcccaaagagatgctgaccctaagtgaataccatgagcgcgtgaggtctcagggtcagcagctgcagcaattacaggctgagctggacaaactccataaagaagtgagcactgttagagccgccaattccgaaagagtggcgaaacttgtgttccagcgactgaatgaggacttcgtgaggaagccagactacgccctgagctcagtgggggcgtccatcgacctacagaagacaagtcatgactacgccgatcggaatactgcttatttctggaaccgattttccttctggaactacgcccgcccacccacggtcattcttgagccacacgtgtttccaggtaactgttgggcattcgagggcgaccagggacaggtagtgatccagctgcctgggcgagttcagctcagtgacataactctgcagcatccaccaccgtcggttgaacacaccggtggagcaaacagtgcccccagagactttgcggtgtttggactccaggtctatgacgagaccgaggtgtccctcgggaaatttacattcgacgttgagaaaagtgaaatccagaccttccaccttcagaacgacccccccgcagcctttcccaaggtgaagattcagatcttgagtaattgggggcatcctagattcacctgcctttatcgggtcagggctcacggagtgcggacaagtgaaggcgctgaggggtctgcccagggcccgcattag

SEQ ID NO: 135956 - DNA, 1377 bp, synthetic construct
  misc_feature 1..1377: note = Description of Artificial Sequence: Synthetic coding sequence
  source 1..1377: mol_type = other DNA
atgtctcagagacaggttctccaagtgttcgagcagtatcaaaaagcacgaacacagttcgtgcagatggtggctgaactggctactaggccccaaaatatcgagaccttacagaatgccggcgtcatgagtttgctccgcaccctgctgctggacgtcgtgcctaccatacaacagacagcagccctagccctggggaggctagcaaattacaacgacgacctggccgaggccgtcgtgaaatgcgacatccttccgcagctcgtgtactctttggcagaacagaaccgcttctacaaaaaggccgctgcatttgtgttgcgtgccgtgggcaaacattcaccgcagctggcccaggctattgttgactgtggagcgctggacaccctggttatttgtctggaggactttgaccctggagtaaaggaagctgcagcctgggccctgcggtatattgccaggcataatgccgagttgtcacaggccgtggtcgacgccggagccgttcctttactagtgctttgcattcaggagcccgagatcgctctgaaacgcatcgccgccagtgccctatcagacatcgccaagcactcacccgagctcgcccagaccgttgttgacgcaggggctgtggcccatcttgcccagatgatcttaaacccagatgcgaagcttaagcatcagatactctctgcactcagccaggtgagcaaacactcagtagacctagctgagatggttgtggaagccgaaatctttcccgtcgtcctcacgtgtcttaaggataaggatgagtatgtgaagaagaacgcttcaacgttaataagggaaatcgctaaacacacacccgaactttctcagctcgtggtaaacgccggcggtgtggccgctgtaattgattgcatcggaagttgcaagggcaatacaaggctcccaggcattatgatgttgggctacgtggctgcacactcagaaaacttggccatggctgtgattatttccaagggcgtaccccaactgtccgtgtgcctcagcgaggagccagaagatcatattaaggcagccgccgcctgggcactggggcagatcgggcgacacacccccgagcatgcgagagctgtcgccgtgactaacaccctgccagtgctgttatccctctacatgtcaacagagagctccgaggacttacaggtcaaaagtaagaaggcaattaagaacattttgcaaaaatgcacatatctgccagccttagagccgtttctgtatgatgccccacccaatatcctgaaacacgtggtgggccagttctctaaggttctgttcccttggatttttaggtacacctcggccgagggcggacagctgtcgacaacttag

SEQ ID NO: 135957 - DNA, 813 bp, synthetic construct
  misc_feature 1..813: note = Description of Artificial Sequence: Synthetic coding sequence
  source 1..813: mol_type = other DNA
atgtcccaaagacaggttctgcaggtgttcgaacagtaccagaaagcaaggacccaattcgtacagatggttgccgagctcgcaacccgccctcaaaacatcgagacattgcagaacgccggagtgatgagtttgttgagaactctgctcctggatgtggtcccaactatccagcaaacagccgctctcgcactgggacggctagctaattataacgacgacttggccgaagcggtggttaaatgtgatatcctgccccaactggtttatagtctggctgagcagaacggcgtgcctcagttgtccgtatgtctaagcgaggagcctgaggatcacatcaaagcagccgccgcttgggcgctgggtcagatcggaaggcacactcccgagcatgcccgggctgtcgctgtgacaaacacactgccagtgctgctctcgctctatatgtctacggaatcaagtgaagacctccaagttaaatctaagaaggctatcaaaaacatcctgcaaaagtgcacttatctgcctgcactagaaccgttcctttacgacgcaccgcctaacatccttaagcatgttgtaggccagttctctaaggttctaccccatgactctaaagcccgccgactgtttgtgacgtccggcggtctcaagaaggtgcaggaaattaaagctgagccgggcagcttacttcaggaatacatcaactccatcaactcctgctacccagaggagatcgtccgatactactcccctgggtactcagacacactcttgcaacgggtagattcttaccagccgcttaacaattag

SEQ ID NO: 135958 - DNA, 1758 bp, synthetic construct
  misc_feature 1..1758: note = Description of Artificial Sequence: Synthetic coding sequence
  source 1..1758: mol_type = other DNA
atgagccagcggcaggtattacaggtatttgagcagtaccagaaagctaggactcagttcgtccagatggtagccgagttggctacccggccccagaacatcgaaacactgcagaatgccggtgagcccggcgctcgaactcccgtggcccctcgcgccctatccccccgcaggctgagacccgcagccctcccagtcgaactgttgggctcacgctccgttggcaccggggtgaggaagagcatccacagcttccagcgggtgtttgggggacaggctgaacgagttaaattgcccgatgggtgtggccggtgcgccttaagcttgttcccgtcaagccttcacacgggggtgatgtcactcttgcgtactctgttgctggatgtagtgcccactatacagcaaaccgctgcactggctcttggtcggctcgcaaactacaacgacgacctggctgaagccgtggtcaagtgtgacatcctgccccagctagtttattcactcgcagaacagaatcgcttctataagaaagctgctgcgtttgtcctgcgtgctgtgggcaaacactctccacagctggcacaagcaatcgtcgactgtggtgccctggatacactggtgatatgtttggaggattttgatccaggtgttaaagaggctgctgcctgggcgctgcgctatatcgcccggcacaatgcagagctgtctcaagccgtggtggacgctggagctgttcctctgcttgtcctgtgtatccaggagcccgagatagctctcaagcgcattgcagcctccgctctgagtgacatcgcaaagcattcccccgaattggcccagaccgttgtcgacgctggagccgtggcccacttggcacagatgattctcaaccccgacgctaagctgaaacaccagattctgtccgccttgtctcaggtgtccaaacattccgtggatttagctgaaatggtggtggaggccgaaatattccctgtggtgctgacatgtctgaaggataaagacgagtatgtgaaaaaaaatgcaagtaccctgattcgtgaaatcgcaaaacacaccccagaactgtctcagctcgtggttaatgcagggggcgttgctgcggttatcgactgtattggcagctgcaagggaaatacgcgcctgcccggaatcatgatgttgggatatgtcgctgcccatagcgagaacctggctatggctgtgatcatctctaagggtgtgccacaactcagtgtctgtctgtccgaggagcccgaagatcacattaaagccgccgctgcatgggctttaggacagataggacgccacaccccagagcatgcaagagccgtggcagtgacaaacaccctccctgtgctcctgagcctgtacatgagcacggagagtagcgaagacctgcaggtcaaatccaagaaagcaattaaaaacatcctgcaaaagtgcacttaccttccagctctcgagccctttctctatgacgctcctcccaatattctcaaacatgtggtcggccagttttcgaaagtcttaccacatgacagcaaagcccggagactgttcgtgacctccggcggcctcaaaaaggtccaggagattaaggcagagcctgggagcctgctccaggagtatattaattctattaatagttgctacccagaggaaatcgtccgatactattccccggggtattctgacacactactacagcgggtcgatagctatcagccactcaacaattag

SEQ ID NO: 135959 - DNA, 1530 bp, synthetic construct
  misc_feature 1..1530: note = Description of Artificial Sequence: Synthetic coding sequence
  source 1..1530: mol_type = other DNA
atgtctcagcggcaggtgctgcaggtattcgaacagtaccagaaggccagaacgcagttcgtccagatggtggctgagctcgcaactaggccccaaaacattgaaactctgcagaacgccggagtaatgtcactgttacgcactctcctgcttgacgttgtgccaacgatccagcaaactgcagctcttgccctgggtcgcttggcaaattataacgacgacctggcagaagccgtcgtgaaatgcgatatcctgccccagctggtgtactccctggcagaacagaacagattctataaaaaagccgcagccttcgtacttagggcagttggtaagcatagcccacaactggcacaggcgatcgtggattgtggcgcactcgacaccctggtcatatgtctggaagattttgacccaggtgtaaaagaggctgccgcctgggccctgcggtacatcgctcgccacaacgcggagctcagtcaggccgtcgtggacgctggcgccgtgcctctcctggtgctttgtatccaggagcctgaaattgccttaaaaagaatcgccgcctctgcgctgtccgacatcgctaagcattcccccgaactggcccagacagttgtggacgccggggcggtcgctcaccttgctcaaatgatcttgaatccagacgccaaactcaagcatcagattctctcagctctgtcgcaagtgagtaagcacagtgtggatctggcagaaatggtggtcgaagcggagatcttccctgtcgtgttaacatgtctgaaagataaggatgagtacgtaaagaagaacgccagcacacttattagggagattgcaaagcacacccctgagctttcccagctagttgtgaatgctggtggcgtggctgccgtcatcgactgcatcggcagctgtaaagggaatacacgcctccccgggatcatgatgcttggttacgtcgccgctcactccgaaaaccttgccatggctgtgataatctcaaagggggtccctcagctgtccgtgtgcctctctgaagagcccgaagaccacatcaaggcagctgccgcctgggcattgggccaaattggccgtcatacacccgaacacgctagagctgtggctgtgaccaatactctgcctgttttactgtctttgtacatgtcgacagaatcatcagaggacctgcaagtaaaatcaaaaaaagcaattaagaatatcctccagaagtgtacgtatctacccgcactggaaccattcctgtacgacgctcctcccaacatcctgaaacacgttgtaggccagttttccaaagtgctacctcatgacagtaaagcccgccgactgttcgttacctctgggggtctcaagaaggtacaggagattaaagccgaaccaggctcccttttacaggaatatatcaactcgatcaatagctgctaccccgaggagattgtacggtactactccccgggttattctgatacccttctgcagcgcgtcgactcttatcagcctttaaacaactag

SEQ ID NO: 135960 - DNA, 741 bp, synthetic construct
  misc_feature 1..741: note = Description of Artificial Sequence: Synthetic coding sequence
  source 1..741: mol_type = other DNA
atgtcacagcgccaggttctccaggtgttcgaacagtaccagaaagctagaactcagttcgtgcagatggtggccgaactcgcgaccagaccacagaacattgagactctccaaaacgccggtgaacctggagcccgcacacctgttgctccccgcgctctgagcccccgtcgcctgaggcctgccgccctacctgtggaactgttgggctctagaagtgtaggtactggagtgcgaaagtccattcactccttccagcgggtgtttggggggcaggcagaaagggtgaaactacccgacggatgtggccggtgtgccctgtctttgttcccttcctcactgcatacaggcgtgatgtccctgctccggacacttctcttggatgtcgtgccaaccatccagcagactgccgctctggccctggggcggctggccaactacaatgatgatctggcggaggcagtggtgaaatgtgacatccttccacagctggtctattccctggccgagcagaataggttttacaagaaggctgccgccttcgttctgcgggctgtaggcaaacactctccacaactggcccaggccattgtcgactgcggggccctcgatacactggtcatttgcctggaagacttcgaccctggtgtgaaagaggcagcagcttgggctctgagatatatcgctcgacacaatgccgaacttagccaggccgttgtggacgccggggccgttccatag

SEQ ID NO: 135961 - DNA, 576 bp, synthetic construct
  misc_feature 1..576: note = Description of Artificial Sequence: Synthetic coding sequence
  source 1..576: mol_type = other DNA
atgagccagcgacaggtcctccaagtgtttgagcagtaccagaaagcacgcactcaattcgtgcagatggtggctgagttggctactaggccgcaaaacattgaaactttacagaacgcgggcgtgatgtctcttctgaggaccttgctgctggacgtcgtaccaaccatccagcaaactgcggccctagccttaggacggctggccaattacaacgacgacttggcagaagccgtggtgaaatgtgacatattgcctcagttggtttattcactagcggaacagaacggcgtgcctcagctatccgtttgcctgtccgaagaacccgaggatcacataaaagcggctgcagcttgggccctcggccagattgggcggcacaccccggagcatgcaagggccgtcgctgtaaccaacacgttgcctgttcttctctccctgtacatgtctacggagagctctgaggacctgcaggtgaagagcaagaaagctatcaagaacatcctgcagaaatgcacttacctgcctgccttagagcccttcctgtatgatgcgcctccaaacattctgaaatag

SEQ ID NO: 135962 - DNA, 1455 bp, synthetic construct
  misc_feature 1..1455: note = Description of Artificial Sequence: Synthetic coding sequence
  source 1..1455: mol_type = other DNA
atgcacagtcttacaatggatctctggatccccaacgggcaagccggcgtgatgagtctgctgaggacactgttgttggacgtggtaccaactatacagcaaacagccgccttggccttaggacgcttagccaactataatgatgacctggccgaagccgtcgtcaagtgtgatatcctgcctcaactggtttatagcctcgcggagcagaatagattttataaaaaggcagccgcatttgtgctgagggctgtcggaaagcacagcccccagctggcgcaggcaattgtcgactgcggtgccctcgacacccttgtcatttgcttggaggattttgacccaggcgtcaaggaagcagctgcttgggccctgagatatatagctagacacaacgcagaactgagccaggcagttgtggacgcaggggccgtcccgctgttagtcttatgcatccaggagccagaaattgccttaaagcgaatagccgcttcagcgctgtccgatatcgcaaagcactcacctgaactggcccagacagtagtcgatgcaggcgccgtcgcgcatctggcccaaatgatcctgaatccagacgccaaattaaagcaccagatactgagcgctttatcgcaagtctccaagcatagcgtagatcttgccgaaatggtggtggaggctgagatatttcccgtcgtgcttacttgtctgaaggataaagacgagtatgtgaaaaagaacgctagtactctgattcgggagatcgctaagcatacacctgaactttcacagctggtcgtcaatgccggcggcgtggccgctgtgattgactgtatcggaagctgcaaaggtaacacccggctcccgggtattatgatgctgggctatgtggctgctcatagcgagaacttggccatggctgttatcatatccaaaggagtgcctcagcttagcgtctgcttgagcgaagagccagaggaccacattaaagctgccgctgcctgggccctgggacaaatagggcgacatacaccagagcatgcacgcgcagtggccgttactaacacactgcccgttctcctgtcactctatatgtcaactgagagttccgaggatcttcaggtaaaaagcaaaaaggccattaagaacatcctccagaaatgcacatatttgccagccctggagcccttcttatatgatgcgcccccaaacatactgaaacacgttgtaggccaattcagtaaggtgctcccacatgattcaaaggccagaaggttgtttgtgacgagcgggggactgaagaaggtgcaagaaatcaaggccgagcccggctctctgctgcaggagtacattaactcgatcaattcctgctatcccgaagaaatcgtgcggtactattcccctggctattctgatactctgttgcagcgtgttgactcgtatcagcctttgaataattag

SEQ ID NO: 135963 - DNA, 1506 bp, synthetic construct
  misc_feature 1..1506: note = Description of Artificial Sequence: Synthetic coding sequence
  source 1..1506: mol_type = other DNA
atggagacaaatgagagtacggagggctcccgttcacgtagcaggtctctcgacattcaaccctcttctgaaggcctcggcccgacctcagagccgttcccttcatcagatgattctccacgtagtgccctcgccgccgctacagccgcggctgcagccgcggcgtcagccgcagctgccacagccgcctttactaccgccaaagccgccgccctgtctacaaaaacacctgcaccgtgcagtgagttcatggagccctcttctgacccttcactattgggggagccgtgcgccgggccaggcttcacccataacatagcccacgggtccctgggctttgagcctgtttacgtaagctgcatcgctcaggatacctgtactaccactgatcactcttccaatcccgggcctgtgcctggttcttccagcggaccagtcctaggatccagcagcggcgcgggccacgggtctggcagcggcagtggtcccgggtgcggatcagtgcctggatctgggagtggccccggacctggctctggacccggcagtgggccaggtcacgggtctggctcccaccccggaccagcgtccggacccggccccgacaccggaccagactctgaactctccccttgtatccccccaggctttcggaatctggtggcagatcgcgtgcctaattacaccagctggtctcagcattgtccctgggagcctcagaagcagcccccatgggagtttctgcaagttctcgaaccaggggcgcgaggcctttggaaaccaccggatatcaaaggcaaactgatggtgtgctacgaaacgttgccccggggccagtgtctcctatacaattgggaggaagagagagcaacaaatcatctggaccaggtcccttctatgcaggacggatccgaatctttcttctttagacacggacaccgcggtcttctgacgatgcaattgaagtctcctatgccaagctccacgacccaaaaggattcatatcagcccccgggtaatgtttactggcccttacgcggaaagcgcgaagcgatgctggaaatgctgctacagcatcaaatctgtaaagaggtgcaggctgagcaggaacccactaggaagctgttcgaagtagagagcgtcacccaccacgactaccgcatggagcttgcccaggcggggactcctgccccaaccaagcctcacgactatagacaagaacagccagagaccttttggattcagcgcgccccacaactgcctacgtggtggccgctccccacacaggttccagcagcggaagactatttaacgtggaaggagtggggttttaccggtgtgcaagaggtgttaagtgccctgctccgggcaacgccaggagaatattccgtcaatatctgcggaatgaatgaacacccggtgtgctctcgtacatggacaaatcgcctatgccatcaggagatgggttctaagaagaccgtcacccaggaggatagaggttggtag

SEQ ID NO: 135964 - DNA, 1458 bp, synthetic construct
  misc_feature 1..1458: note = Description of Artificial Sequence: Synthetic coding sequence
  source 1..1458: mol_type = other DNA
atggaaaccaatgagtcaacggagggcagccggtcaagaagccgttcacttgacattcagccctcaagcgagggactgggacccacttctgagcccttcccaagctcggacgattcaccccgcagtgcgctggccgctgctactgccgctgccgccgccgccgcctctgccgccgccgccactgccgccttcacaacagctaaggctgctgcccttagtaccaagaccccagcaccatgcagcgagttcatggaaccgtcatcggacccatctttgcttggtgagccatgcgctgggcctggcttcacccacaacattgcacacggatcacttgggttcgagcccgtgtatgtgtcctgtatcgcccaggatacgtgtacaaccacagaccactcttcaaacccgggaccagtgcctggcagttcatcaggacctgtcctgggaagctcctcaggagctggccacggatcgggctcgggctcaggccccggctgcggttcagtgcccggctctggatctggacctggacctgggagcggtcctggctcaggaccaggccatggcagcggtagccatccaggaccggcttccggcccagggcctgataccgggcctgactcagaattgtccccatgcatccccccagggtttcggaacctagttgccgatcgagtgcctaattataccagttggtcacaacactgtccatgggagcctcaaaagcagccgccttgggagttccttcaagtcctggaacccggcgcccgaggcctttggaagccccctgacatcaaggggaaacttatggtgtgctacgagaccctaccacggggccaatgcctcctctataactgggaggaggagcgcgctaccaatcaccttgatcaggtgcctagcatgcaggacggctctgagtcttttttctttagacatggccatagaggactcctgaccatgcagttgaaatctccaatgcccagtagcacgacccagaaagactcataccagcctcccggcaatgtgtattggccacttcgcggtaagcgggaagccatgctcgaaatgttgctgcagcatcagatttgcaaagaagtgcaggccgaacaggagccgacaaggaagctgttcgaggtggaaagtgtgacccatcacgattacagaatggagctggcccaggctggaacccctgccccaaccaagccccacgactaccggcaggagcagcctgaaacgttctggatccagcgcgctcctcagcttcctggcgtgtcgaatatcaggactctcgacaccccatttagaaagaattgctcgttctcaacccctgtgcctctctccctggggaagctgctgccatacgagcctgaaaattatccctatcagctgggagagattagctccctgccatgtcccggaggccggctggggggtggaggtggcagaatgacccccttttag

SEQ ID NO: 135965 - DNA, 1281 bp, synthetic construct
  misc_feature 1..1281: note = Description of Artificial Sequence: Synthetic coding sequence
  source 1..1281: mol_type = other DNA
atggaaacaaatgagtccactgagggatccaggtcacgcagtcgaagccttgacatccagccaagctcagagggcctcggtcctacgtccgaaccctttccgtctagcgacgactcccctcgtagcgcgctggccgcagctaccgcagccgcagcagccgccgccagtgcagcagctgccactgccgcatttaccacggcaaaagcagccgccctgtctaccaagacccccgctccttgttcggaatttatggaacctagtagcgatcctagcctgctgggtgaaccgtgtgccggtcccggtttcacacacaatattgcccacggttctcttggatttgaaccggtgtatgtgagttgcatagctcaggatacatgcaccacaacagaccattcttcaaatcctggccctgtgcctgggagctcctcaggccccgtgttgggctcttcgagcggcgctgggcacggtagcggatctggttccggccctggatgcggatctgtgcccggttccgggtcgggacctggacccgggagtgggccgggctccggacctggacacgggtcaggcagccaccctggccccgcatccggccctgggcccgacaccggtcccgattccgaactgtcaccttgcatacctccaggattcagaaatttggtcgcagaccgggtgcccaattacacctcctggtcccagcattgcccttgggagcctcagaagcagccgccttgggagttcctccaagtgcttgaacctggtgcaagagggttgtggaaaccgccagatattaaggggaagctcatggtctgctacgagaccttgcctagaggtcagtgtctgctctataactgggaagaggaacgggcaaccaatcacctggaccaggtcccctccatgcaggacggttccgaatcattctttttcaggcacggccaccggggcctgttgaccatgcagttgaaatctcccatgccctcttcaacgacccaaaaggatagctaccaacctcccggaaacgtttattggcctcttaggggtaaacgtgaggcgatgctagaaatgcttctgcagcatcagatctgtaaggaggttcaggccgagcaggagccgaccagaaagcttttcgaggtcgagtccgtgacacaccacgactaccgcatggaactcgcccaggctgggacgcctgcgccgaccaaaccccatgactataggcaggagcaaccagagaccttctggattcagcgggctccgcagcttcctgtatgtgagggggattag

SEQ ID NO: 135966 - DNA, 3966 bp, synthetic construct
  misc_feature 1..3966: note = Description of Artificial Sequence: Synthetic coding sequence
  source 1..3966: mol_type = other DNA
atggaactggaagatggcgttgtgtaccaggaggagcctggcgggagtggggctgttatgagtgaaagagtgtcagggctagctggctcaatttatagagaattcgaacgactaattggccgttatgacgaggaagttgtgaaagaactgatgcccttggtggtggccgttctggaaaatctcgattccgtctttgctcaggaccaagagcaccaggtcgaattagaactattacgcgatgacaacgagcagctcattacccagtacgagagagagaaggcccttcggaaacacgctgaggagaagtttatcgaattcgaggactcacaggagcaggagaagaaggacttgcagacaagagtcgagtctctggagtctcaaacacggcagctggagctaaaagctaaaaactacgccgatcagatcagtagactcgaagagagagaggccgaactgaaaaaagaatacaatgcgctgcaccagcgccatacagaaatgattcacaactacatggagcacctcgagagaacaaaacttcaccagctaagtggctccgaccagttggaatccacagcccactccaggattcggaaagagagacccatttcgctcgggatcttccctttgcccgcaggggacgggcttctcacgcccgacgctcagaaaggcggggagacccctggttcagaacagtggaagtttcaggaattgtctcaaccgcgaagtcacacctccctcaaggtaagcaattcacctgagccacagaaagcagtggagcaggaagacgaactgtccgatgtttcccagggaggttctaaagccactaccccggccagcaccgccaactcagacgtcgccaccatcccaaccgatactccactgaaggaggagaatgagggattcgtgaaggtcacagacgcgccgaacaaaagcgaaatttcgaagcacatcgaggtgcaggttgctcaggaaacgagaaacgtgtccacaggcagcgccgaaaacgaagaaaagtcagaagttcaggctattatagagtctactccagagctggacatggataaagacttgagcggatataaaggatcaagcactcctaccaaggggattgagaataaggcctttgatcgaaataccgagagtctctttgaggaactgtcaagcgccgggagtggcttaataggcgacgttgatgaaggtgctgacctcttgggtatgggtcgtgaagtggaaaatctgatcctggagaatacccaactgttggaaactaaaaatgctctgaacatagtgaaaaacgatttgattgccaaagtggatgaattgacctgtgagaaggacgtgcttcagggtgaacttgaagccgttaagcaagccaaactgaagctggaagagaagaaccgagagctggaggaggaactgagaaaggcgagggccgaagcggaggatgcacgccagaaggccaaggatgatgatgatagtgatatccccaccgctcagcggaaacggttcaccagagttgagatggctcgagtcctgatggagagaaatcagtataaggagcggttgatggagttacaagaagccgtacgatggaccgagatgattcgggcctcgcgcgagaatccagccatgcaggagaagaaacgcagctccatctggcaattcttctcccgtctcttctcctcgtctagcaacacaacaaaaaaaccggaaccacctgtgaaccttaaatacaatgctcccacctcacacgtgaccccctcagtaaagaagcgctcaagtacgttatcgcagctccctggagacaagagcaaagccttcgacttcctttcagaggagaccgaagcctctctggcatctcgccgggagcagaagcgcgagcagtaccgtcaggtaaaggcccacgtgcagaaagaagacggccgtgttcaggctttcggctggtcactccctcagaaatataagcaggttacaaatggccagggcgagaacaagatgaagaatcttcctgtgccggtttacctgcggccacttgacgagaaagatacctctatgaagctctggtgcgccgtgggcgtcaatctgagcggtggaaagacccgcgacgggggctcggtggtgggcgccagcgtcttctataaggacgtggccggtcttgacacagagggatccaagcagagatcagcatctcagtctagccttgacaaactcgaccaagagttgaaggagcagcagaaggaactgaagaaccaggaagagctgtcttcactcgtctggatttgtacaagtacccacagcgctaccaaggttttgataattgatgctgtccaacccggtaatatcttagatagctttactgtgtgtaactcccatgtcctgtgtatcgcctccgtcccaggagcaagggaaactgactatcccgccggcgaggacctgtcagagagtggccaagttgacaaggcttccctgtgcgggtctatgacgtccaacagtagtgctgaaaccgattccttgctcggcggcattaccgttgtgggttgctccgccgagggtgtgaccggtgcggccacttcaccctcgacaaacggcgcgtcacctgttatggacaagccccccgagatggaagcggaaaacagcgaagtcgacgaaaacgtgccaactgctgaggaggccaccgaggccacagaggggaatgctgggtctgcggaggataccgttgatataagccagaccggcgtctacacggaacatgtctttaccgaccctctcggtgtgcagattcctgaggatctttcacctgtataccagtcatccaacgacagcgacgcatataaggaccagatttctgtgttgcccaacgaacaggatcttgttcgcgaggaggcccaaaaaatgtccagtctcctgccaacaatgtggctaggtgcacaaaacggttgcctctatgtccactccagtgtcgcccagtggcggaagtgtctacacagtattaagcttaaagattctattctctcgatagtgcacgtcaaggggattgtgcttgttgccttggctgatggaacactagcaatttttcaccgcggtgttgacggacagtgggacctgtcgaactaccacttactggatctcggacgtccccaccactccatcaggtgtatgactgtggtgcacgacaaggtgtggtgcggataccgcaataagatctacgttgtgcagcccaaggccatgaagattgaaaaatcctttgatgctcatcctcgcaaggagtctcaggtgcgacagctagcatgggtgggcgacggggtgtgggtttctattcggctcgactcaacactgcgtctctatcacgcacacacataccagcacctgcaggacgtagatattgaaccatatgtgagcaaaatgttgggcaccgggaagttaggattttctttcgtacgtatcacagccctgatggtctcgtgcaataggctgtgggtgggaactgggaatggtgtgatcatctccatcccgctgacagaaaccaacaaaacctcaggagtcccgggtaatcgtcccgggtctgtcatccgagtttacggcgatgaaaacagcgataaggtgacccccggtactttcatcccatactgttccatggctcatgcacaactttgttttcacgggcacagagacgctgttaaattcttcgtcgctgtaccaggacaagttatcagccctcagtccagcagctcggggaccgacctgaccggagataaggcggggccgtctgcccaggagccaggaagtcagacaccgctgaagtccatgctggtcatctccggtggcgagggctatattgacttcagaatgggtgatgaggggggtgagagcgagctcctcggagaggacctaccattagagccatccgtgacaaaagctgaacgatcccatttgattgtttggcaggtgatgtatggaaacgagtag

SEQ ID NO: 135967 - DNA, 3924 bp, synthetic construct
  misc_feature 1..3924: note = Description of Artificial Sequence: Synthetic coding sequence
  source 1..3924: mol_type = other DNA
atggagctcgaagacggcgtggtgtaccaagaagaacccggaggcagcggggccgtgatgagtgagagagtgagcggcctcgctgggtccatttaccgtgaattcgagaggctgatcggaagatacgatgaggaggtcgtcaaagagctgatgcctctggtcgttgcggtgctggaaaatctggacagtgtatttgcccaggatcaggaacatcaggtggagctggagctgctgagggatgataacgagcagttaatcactcagtatgagagggagaaggccctgagaaaacacgctgaggagaagtttattgaattcgaagactcccaagagcaggagaagaaggacctgcagactagggttgagagccttgaatcccagacaaggcagttagagctgaaagcgaaaaactacgccgatcagattagccgcctggaagagagagaagcagaattgaaaaaagagtacaacgctctacaccagcggcataccgaaatgatccacaactatatggagcacctcgaaaggaccaaactccaccagctcagcggcagtgatcagcttgagtccaccgcacactcacggatccgcaaggaacgcccgatttccctgggtatcttccctctgccagccggcgatggactgctcactcccgacgctcagaaaggcggcgagacccccggtagcgaacagtggaagttccaagaactaagtcagcctagaagccatactagcctcaaggatgagctgagcgatgtttcccagggtggctccaaagcaaccacccccgcgagcaccgcaaattccgatgtggccacaattccgacagatacccctctgaaagaggagaacgaggggtttgttaaagtgactgacgcccccaacaagtccgagatttctaaacatatagaggtgcaggtggctcaggaaacgcgcaacgtgagcacagggtccgcggaaaacgaggaaaagagtgaagtgcaggctatcattgagtctactccggagttggacatggacaaggatttgtctggctataagggttcttctactcccaccaagggtatcgagaacaaagcttttgaccggaatacagagagtctgtttgaagagctgtcctcagcaggatccggtctcataggagatgtcgacgagggggctgatctgctggggatgggcagggaagtcgagaacctcatcttggagaatacgcagcttctggagactaagaatgcccttaacatcgtgaaaaacgaccttattgcaaaggtagacgaattgacctgcgaaaaggacgtgcttcagggcgagctggaagcagtgaagcaagctaagctgaagctggaagaaaagaacagagagctggaggaggaacttcggaaagctcgtgcagaagccgaggacgccagacaaaaggccaaagatgacgacgatagcgatatacctaccgcccagaggaagagattcacgcgtgtcgagatggcaagagtactaatggagcgtaatcagtacaaggagagattaatggagctacaagaggcggtgaggtggaccgaaatgatccgcgcctcacgtgagaaccctgcaatgcaggagaaaaaacgttccagcatatggcagttctttagcagattattttccagctcctctaatactacgaaaaagcccgaaccaccagtgaacctgaaatacaatgctccgacgtcccacgtgacccctagcgtaaagaaaaggagctcgaccctgagccagttgcccggcgacaaaagcaaggcattcgacttcctgagcgaggaaaccgaggcctccctagcttcgcgccgggaacagaagagagaacaatatagacaagtgaaagcacacgtccagaaagaggatggccgcgttcaggccttcggatggagcttgccccagaaatacaagcaggttacgaatggccagggagaaaacaaaatgaagaacctcccggtaccagtatacctccgtccgctggatgagaaggatactagtatgaaattgtggtgtgccgtgggtgtgaacctctctgggggaaagaccagagatgggggcagcgtggtgggcgcatcagtgttctacaaagatgtggcaggattggataccgaaggaagcaagcagcgttctgcctcccagtcgtccctggataagctggaccaagagttgaaggaacagcagaaggagctgaagaatcaagaggagctatctagcctggtctggatatgtacctccacgcactcggcaacaaaagtcctcattattgacgcggtgcagcctggcaatattctggacagctttacagtgtgtaattctcatgttctttgcattgcaagcgtccccggagcaagagaaacggattacccggccggagaagatcttagcgagagcggacaagtagataaggccagcctatgcggatctatgactagcaactcgagcgcagagaccgactcactactggggggcatcactgtggtgggatgctccgccgagggagtgaccggggcggcaacctctccatccactaatggcgctagccctgtgatggataaaccaccggaaatggaagctgagaactctgaagtggatgagaacgtgcctaccgcagaagaggctacggaggcaaccgaggggaatgccgggtcagcggaagacacagtagacatatctcagacaggagtttataccgaacacgtattcaccgaccccctgggtgtgcagatcccagaagatctttcccctgtgtaccagagcagcaatgactcagatgcctataaagaccagattagtgttttgcctaacgagcaggacttagtgcgagaagaagcccagaaaatgagcagtttactgccgacgatgtggctgggtgctcagaacgggtgtttgtacgtgcactcaagtgtcgctcagtggagaaagtgtttacacagcatcaagctcaaggatagtattttgagtatcgtgcacgtcaaaggaatcgtgctggtggcattggctgacggcacactagccatctttcatagaggggtagatggccagtgggacctctctaattatcacttgctcgacttaggtcggcctcatcactcaattaggtgtatgacagtggtgcatgacaaagtgtggtgcgggtatcggaacaagatctacgttgtgcagccaaaagcgatgaaaattgagaaaagtttcgatgcacaccctaggaaggagagccaggtgagacagttggcctgggtcggcgatggggtgtgggtcagcattagactcgattctactctacgcttatatcacgcgcatacataccagcatctgcaggatgtcgatatcgagccttatgttagcaaaatgcttggaacaggcaagttgggattcagcttcgttcgaatcacagctcttatggtgagctgtaaccgcctatgggtgggaacgggcaacggcgtgattatctccatcccgctgacggaaaccaataagacctccggtgttcctggaaatcggcccggttcagtcatcagggtctacggggatgagaattccgataaagtcactcccggaacatttatcccgtattgctctatggctcacgctcaattgtgttttcatgggcatcgggacgccgttaaatttttcgtcgctgtgcctggacaggtgatctcgccgcagtccagttcaagcgggacagaccttaccggggacaaggctgggccgtctgctcaggaacccggatctcaaactccacttaagtctatgctggtgatcagtggcggcgagggatacatagacttccgaatgggcgacgaaggcggagagtctgagcttttgggtgaagacctaccattggaaccttcagtcacaaaggcagagcgctcacacctcatcgtgtggcaggtgatgtatggcaacgagtag

SEQ ID NO: 135968 - DNA, 1908 bp, synthetic construct
  misc_feature 1..1908: note = Description of Artificial Sequence: Synthetic coding sequence
  source 1..1908: mol_type = other DNA
agcttgaaggatgagttgagcgacgtgagtcagggggggtcaaaggcgaccacccccgcttctaccgccaattccgacgtagctacaatccccactgatacgccgttgaaggaagagaacgaaggtttcgtcaaggtgaccgacgccccgaacaaatcagagatttctaagcacattgaggtacaggtggcccaggagactaggaacgtgtccaccggatctgcagagaacgaggaaaaatctgaggtgcaggctataatagagtctacacccgagctagacatggataaggatctgtcagggtacaagggaagctcgaccccaaccaaggggatcgaaaacaaagctttcgatcggaatactgaatctttgtttgaaaaacgtagttctaccctcagtcagttacccggggacaaaagcaaggctttcgatttcttgtccgaagaaaccgaagcatccctcgcatcacggcgcgaacagaaacgggagcagtatcgccaggtgaaagctcacgtgcagaaggaggatggaagggtacaagcattcggctggtcactaccgcagaaatataagcaagtcactaatgggcaaggcgaaaataagatgaaaaacctgcctgtgcctgtctatttgagacccctggacgagaaagatacttccatgaaaaaactgtggtgtgccgtgggcgtgaatctttccggagggaaaactcgagatggcgggtctgtggtgggggctagcgtgttttacaaagacgtggcaggcttggacacagaaggatctaagcaacgatcagcgtctcagtcatcgctagataagctggaccaggagctaaaagagcaacagaaggaattaaagaatcaagaagaattgtcaagcttggtgtggatctgtacaagcactcatagtgcaaccaaagtattgatcatcgacgcggtacagccagggaatatcctagatagttttacagtttgtaactcccacgtactttgtatagcgagcgtgccgggcgcccgggagaccgactatccagcaggcgaagatctgtccgaatctggccaggtagacaaggccagtctctgcggttcaatgacaagcaactccagcgcagagacggatagcctcctgggcggtattaccgtggtaggatgtagtgctgagggcgtaaccggagcagccacatctccatcaaccaatggcgctagtcccgtcatggataaacctccagaaatggaagcagaaaatagcgaggtggacgagaatgttccaactgcagaagaagctactgaggctaccgaggggaacgccggatccgctgaggacactgtggatatttcccagaccggggtatacactgagcatgtttttaccgatcctcttggtgtccagataccagaggacctctcaccagtgtatcagagcagtaacgacagtgacgcttataaggatcagatcagcgtcctgccaaatgagcaggacctcgtacgcgaagaagcgcagaagatgagctcattgctcccaactatgtggctgggggctcagaatggctgtctctatgttcacagctccgtggctcagtggcggaagtgcctgcatagcatcaagctgaaggactccattttatctatcgttcacgtgaaaggaattgtacttgtggctctggctgatggcacattggcgattttccacagaggtgttgatgggcagtgggacctgtcgaattaccacctgctggatttagggcgtccacaccatagtattaggtgtatgaccgtggtccatgacaaagtgtggtgcggctacagaaataagatttatgtgctgcactcaagccttggcgacggggcccgaccatgcctaaaaaccgataaacaggccaaaaaccgtttgaagtctgggtttcattag

SEQ ID NO: 135969 - DNA, 3207 bp, synthetic construct
  misc_feature 1..3207: note = Description of Artificial Sequence: Synthetic coding sequence
  source 1..3207: mol_type = other DNA
tcactgaaagacgagctttcggatgtgtcccagggcggctctaaggccacaacgcctgcgtctacagctaacagcgacgtcgccacaattccaacggatacacctctcaaagaggagaatgaaggtttcgtgaaagttaccgacgccccgaataagtcagagatctccaaacacatcgaagtacaggtggctcaggaaacccggaatgtctctacaggcagcgctgaaaatgaggaaaaaagcgaagttcaggccatcattgaatccactccagagctggacatggataaagacctgtccggctacaaagggtctagtacccccacaaaggggattgaaaacaaggcgtttgatcgtaacaccgaaagtttgttcgaggaactctccagcgcaggcagcggactgattggcgacgtagatgagggcgctgacttgctcgggatggggagggaagtagagaacctgatattagagaatacacagctgttggagactaagaacgcactgaacattgtgaagaatgatctgattgccaaggtggacgagctaacttgtgagaaggacgtactacaaggggaacttgaggcggttaagcaggccaaactcaagcttgaggaaaaaaatcgggagctagaagaagaactccgcaaggcccgcgctgaagctgaggacgcccgccagaaagccaaggacgacgatgactcagatatccccacagctcaacggaagaggtttacacgggtggagatggctcgcgtgcttatggaacggaatcagtataaggaacgtctcatggagctacaggaggccgttagatggactgaaatgatcagggcctcgagggagaaccccgccatgcaggagaagaaacgaagcagtatctggcagttcgtccccacccgctttagtagactgttctcctcttctagcaataccactaagaaaccagagccccctgtgaacctgaaatataacgctcccaccagccacgtgaccccatcggtgaagaagcgcagtagtacgctatcgcagcttccaggcgacaagtctaaggccttcgatttcctgagcgaggagacagaggccagcttagcatctcgccgggagcaaaaacgcgagcaataccgacaggtgaaagctcacgtgcagaaggaagacgggcgcgtccaggcctttggttggtctttgcctcagaaatataaacaggtgacgaacggacaaggtgaaaataaaatgaaaaatttgcctgtgccagtatatcttcgccctttagacgagaaggacaccagtatgaaaaagctctggtgcgctgtaggcgttaacctctcaggaggaaagacccgtgacggagggtcagtggtcggcgctagtgtgttttacaaggatgttgccggccttgacactgaggggtctaaacagcgatctgcctctcaatcttctctagataaattggatcaggaactcaaggaacagcagaaggaattgaaaaaccaggaggagctcagcagcctggtgtggatctgtacatccacacacagtgcaacaaaagttctcatcattgacgccgtacagccaggtaacatccttgatagcttcaccgtgtgtaactcacatgtactgtgtatcgcaagcgtgccaggggctcgggagacggactatccagcaggggaagacctgtcagaaagcggacaagtagacaaggccagcctgtgtggcagtatgacaagcaactcctcggctgagacggattccctgcttggcggtatcacagttgtcggatgcagcgcagaaggagtcaccggagctgcgacaagccccagtaccaatggggcaagtcccgtgatggacaaaccccccgaaatggaggccgagaatagtgaggtggacgagaatgttcccacagctgaggaggccaccgaagccacagaaggcaatgccggcagcgccgaagacactgtagatattagccagacaggggtctatacagagcacgtattcactgatcctctgggggtccaaatccctgaagacctgagtcccgtgtatcaaagctctaacgacagcgatgcctacaaagatcagatttccgtgctgcctaacgagcaggatctagtgcgagaagaggctcagaaaatgagcagtctactgcctactatgtggttgggagcccagaacggctgtctttacgttcactcaagtgtcgcccagtggcgcaaatgtctacactcaattaagttgaaagatagcatcctgagtattgtgcacgttaaaggcatcgtactggtggcactggccgacggaaccctcgcgatctttcacaggggagtggacgggcagtgggatttgtcgaattaccacttactggatttggggcgcccacatcattcaatacgatgcatgaccgtggtgcatgataaggtgtggtgtggctacaggaataagatctacgttgtgcagcctaaggcaatgaagattgagaagagtttcgacgctcatcctcggaaggagtcacaagtgcgccaacttgcctgggtgggggacggcgtgtgggtgagcattcgactcgattcaacactgcgactgtaccacgcccacacctaccagcaccttcaggacgtggatattgagccttatgtttcaaaaatgctgggcacagggaaactcgggttctcttttgtccggataaccgcattaatggtgtcgtgcaacagactatgggtggggaccggtaatggcgtgatcatctcaataccgctgaccgaaactaataagacatctggggttccggggaaccgacccggatccgtcattcgcgtttatggagacgagaactctgataaagtaacacccgggactttcatcccctactgttctatggcacatgcccagttgtgcttccacggacatagggacgctgtcaaattctttgtcgccgtgcctggtcaggtcatatcaccccagagtagcagtagcggaacagacttgacgggggataaagcggggccttctgctcaggagcctggctcacagactcctctaaagtccatgttggtgatcagcggaggggaaggttatatagacttccgtatgggggatgaaggcggagaatccgagctattaggcgaggatttgccactcgagccatccgtgacgaaagcggagcgcagccatctgatcgtgtggcaggtgatgtacgggaatgagtag

SEQ ID NO: 135970 - DNA, 3237 bp, synthetic construct
  misc_feature 1..3237: note = Description of Artificial Sequence: Synthetic coding sequence
  source 1..3237: mol_type = other DNA
tctgtgaaagtgtctaacagcccggaacctcaaaaggccgtggaacaagaggatgagctttcagatgtctcacagggcggctccaaggctaccactccagcttccactgctaactctgatgttgccactattccaacagatacacctttgaaagaggaaaacgaagggtttgtgaaagttaccgacgccccaaataaatcagagatttcgaaacatatcgaggtacaagtggcccaggagactcgcaatgtctctaccgggtctgcagagaacgaggagaaatccgaagtacaggcaatcattgagtctacgccagaactcgacatggacaaggatctgagcggatacaaagggtcttcaacgccgaccaagggaattgagaataaagcattcgatcggaataccgaaagtctctttgaggagctgtcgtccgccggctccggccttattggggacgttgacgagggtgctgacctgctggggatgggaagggaagtggaaaatttgatcctggagaatactcagctgttggaaactaagaacgcactgaatattgttaagaatgatcttatagccaaagtggatgagttgacatgtgagaaggatgtcctacagggagagttagaggccgttaaacaggccaagctaaaactcgaggagaagaatcgggagttagaggaagagctgcggaaagctagagccgaggccgaggacgcacgccagaaagctaaggatgacgatgacagcgacatccctacagcccagaggaagcgtttcacccgagtagagatggcacgggttctcatggagagaaaccagtacaaggaaaggttgatggagctgcaggaagcggttaggtggacggaaatgatcagggcttcacgcgaaaatcccgccatgcaggagaagaagaggtcctccatctggcagttcttctctaggttgttctccagcagcagcaacacaaccaagaagccagagccacctgttaaccttaaatacaacgcccctaccagccatgtgacgccttcagtgaagaagcgctcttctactctaagtcagcttccaggagataaatcgaaggcatttgactttttgtccgaagagaccgaggccagtctggcgtccagacgcgaacagaagcgagagcagtaccgacaggtcaaagctcacgttcagaaagaagatggtagagtgcaggctttcggctggagtctccctcagaaatacaagcaagtcaccaatggacagggggaaaataaaatgaagaaccttcctgttcccgtgtatctcagaccacttgatgagaaggacacttccatgaagaagctgtggtgcgccgtaggcgtgaatctgtcgggggggaaaacccgcgatggaggatcagttgttggcgcctcggtgttctataaggacgttgcaggacttgacaccgaaggaagtaaacagagatctgcaagtcagagcagtctcgataagttggatcaagaactgaaagaacagcagaaggagcttaaaaatcaggaagaactctccagcctcgtctggatttgcaccagtacccatagtgcaactaaggtcttaattatcgacgccgtacaaccaggaaatatccttgatagtttcaccgtgtgtaattcccatgtgttatgtatagcctccgtccctggcgcgcgggaaaccgattacccagcaggagaagacctgtctgaatcagggcaggtcgataaggcctccctgtgcggttccatgacgtccaattcaagcgctgagactgactctttactcggcggaatcaccgtcgtcggatgcagcgcagaaggcgtcactggggccgccacttcccccagtacaaatggcgcatcccctgtgatggataagccacctgagatggaggctgagaactcagaggtagatgaaaacgtgccgactgctgaggaggccaccgaggctacagaaggcaacgctgggagcgccgaagatacagttgatatttctcagactggagtgtacaccgagcatgtgttcactgaccccctgggcgtacagatcccagaggatctgtccccggtgtaccaatcctccaatgattctgacgcatacaaagatcagatctctgtcttgcccaacgaacaagatctggtgagggaggaggctcaaaaaatgtcctctcttttgcctactatgtggttaggggcccagaacggctgtttgtacgtccatagcagcgtcgcacagtggcgaaagtgcttacactctataaagcttaaggattccatcctctcgattgttcacgtgaagggcatagtgttagtcgcgttggctgatggtacgttagctatatttcatcgtggtgtggacggccagtgggatctgtcaaattatcaccttctggacttgggtcgccctcaccatagcattaggtgcatgaccgtggtgcacgacaaggtatggtgcggctatcgaaacaaaatttacgtggtgcagcctaaagcgatgaagatcgagaagtcctttgatgcccatcccagaaaggaaagccaggtgcggcagctggcatgggtaggcgacggggtgtgggtctccatcagactcgattccaccctgcgcctgtaccacgcccacacctaccaacacctgcaggatgttgacattgaaccatacgtgagtaagatgttaggtactgggaagctcgggttctcttttgttcgaataaccgctctgatggtttcctgtaataggctttgggttggcaccggtaacggcgtcatcatcagcattcccttaacagagactaacaagacatccggggtcccaggaaatcgtcctggatcggtcattagggtgtacggtgacgagaactctgataaggttactccgggaactttcatcccatactgtagcatggcccatgcacagctgtgcttccacggccaccgtgatgctgtcaagttctttgtggccgtgcccggtcaagtcataagtccacagtcatcgtcttcgggtacagacctgacgggggacaaagctggtccaagtgcgcaggaacccgggtcccaaacccctctaaagtcaatgctcgtgatcagcggaggcgaggggtacattgatttccggatgggagatgaggggggtgaatccgagctgctgggtgaagatttacccctggagccctctgttactaaagcagagagaagccatcttattgtttggcaggtgatgtatggaaatgaatag

SEQ ID NO: 135971 - DNA, 3936 bp, synthetic construct
  misc_feature 1..3936: note = Description of Artificial Sequence: Synthetic coding sequence
  source 1..3936: mol_type = other DNA
atggagctggaagacggcgtcgtctatcaagaggagcccggaggatccggcgcggtaatgtccgagcgagtgtctgggcttgcaggctcaatctatcgggagtttgaacgactcattgggaggtatgacgaggaggtggtcaaagagctgatgcctctggttgtagcggtgctggagaacctggacagtgtcttcgcacaggaccaggagcatcaggttgagctcgaattgttacgtgacgataatgagcagctgattacccagtatgagcgagagaaggcgctcaggaagcacgctgaggagaagtttattgagtttgaggactctcaggaacaagaaaagaaggacctacagaccagagtagaaagtctggaatctcagactcgacagctagagttgaaggccaagaactatgcggatcagatctccaggttagaagagcgagaggccgagctcaaaaaagagtataacgccctccaccagagacacacagagatgatacacaattacatggagcatcttgaacgaacaaaactccaccagctcagcggtagcgatcagttggagagtaccgcacactcgagaattaggaaggaaaggcctatatcacttggtatttttccgcttcctgctggcgatgggttacttactcccgatgctcagaagggcggtgaaacccccgggtcggagcagtggaagtttcaggaactaagccagcctaggtcccataccagcctcaaggacgaactgtccgatgtcagccaagggggctcaaaggctaccacgcctgctagcacagctaactctgatgtggctactatcccgacggatactccactgaaggaagaaaacgaaggatttgtaaaggtaaccgacgcgccaaacaaatctgaaatatctaagcacatagaggttcaggtcgcgcaagagacacgtaatgtctccaccggatctgccgagaacgaagagaagtccgaagtccaggctatcatcgagtccacgccagaactggatatggataaggacttaagcggatacaaagggagtagcacacctaccaaagggatcgagaataaggcattcgaccgtaatacagagtcattgtttgaggaactctcatccgctggtagcgggttaatcggcgatgtggatgagggtgccgatctgttgggtatggggcgcgaagtcgaaaaccttatcttggaaaacactcaattattggaaacaaagaatgccctaaatatcgtcaagaacgatttaatcgccaaggtagacgagctgacctgtgaaaaagacgtgctgcagggagaactagaagcagtgaagcaggccaaacttaaactcgaggagaaaaaccgcgagctagaggaagaactgagaaaggcaagagctgaagctgaggatgcacgccagaaggctaaagatgacgatgacagtgacatcccaaccgcgcagagaaagagatttacacgggtcgagatggctagggtgctcatggagaggaaccagtataaagaaagattgatggagctgcaggaagccgtgaggtggactgagatgatacgggcgtctcgggaaaaccccgccatgcaggagaaaaagcggagctccatttggcaattcgttcctaccaggttttcccgcttgttctcttctagctctaatacgaccaagaagcctgaacctcccgtgaatttgaagtataatgctcctactagtcacgtgacccctagtgtgaagaagcgatcaagcacactgagccaactgcctggcgacaagagtaaggcattcgatttcctctcggaagaaacagaagccagtctagccagtagacgcgaacaaaagcgcgaacagtatcggcaggtgaaggcccatgtccagaaggaagatggtcgcgtgcaggccttcggctggagcctacctcaaaagtataagcaagtcacaaacggacaaggagagaacaagatgaaaaaccttcctgtgccagtctaccttagacctctggatgaaaaagatacttctatgaagttatggtgtgccgtcggtgtaaacctctcaggaggcaagactagggatggcggcagcgtggtgggggccagtgtgttctataaggacgtcgccggcctggatacagaaggaagtaagcaacgatccgcgtcccagtcaagtctcgataagttagaccaagaactcaaggagcagcagaaggagctgaagaaccaggaggagttgagcagcttagtatggatctgtacttccactcatagtgctaccaaagtgcttattatcgatgcggttcaaccaggaaacattctggatagctttactgtttgcaacagccacgtcctgtgcatagccagcgtgcccggggcacgtgaaacggactaccccgccggtgaagatctgtccgaatccgggcaggtcgataaggctagcttatgcggttctatgacaagcaattcgagcgcagagaccgattccctgctgggaggtatcacagtcgtcggttgtagcgccgagggcgtcaccggtgccgccacttctccttcaactaacggcgcctccccagtgatggacaagccaccagagatggaggctgagaattccgaggtcgatgaaaacgtgcctaccgcagaagaagcaacagaagctacagaaggtaacgctggctctgcagaagatacggtagacatatcccagacgggggtttacactgaacacgtctttacggatccgctcggggtccagatccccgaggatctctcacccgtctatcagagctccaacgattcagacgcttataaggaccagatatccgttctgcccaacgaacaggacttggtcagagaagaggctcagaaaatgagcagcctacttcctacgatgtggctgggtgctcagaacgggtgcctttacgttcactcctctgtggctcagtggaggaagtgcctgcattctattaagttgaaagattcaattctttctattgtgcacgtgaaaggcatcgtcctggttgctctcgcagacggcacgctcgccatttttcatcgaggagttgacggccagtgggatttgtcgaactaccacctccttgatctgggcagaccgcatcactccatcagatgcatgaccgtggtacatgacaaggtttggtgcgggtaccgcaacaagatctatgttgtgcagccaaaggcaatgaagattgaaaagtcatttgacgcacacccaagaaaggagagtcaagttagacaactcgcttgggtcggtgacggagtctgggtatctatcagacttgattcgacgctgcgtttgtaccacgcacatacgtaccaacacctacaagatgtggacatcgagccttacgtctcaaagatgctgggaaccggtaaactcggattcagctttgtgagaattaccgccctgatggtgtcctgcaaccgactgtgggttggcaccgggaacggggtgattatctcaatccccctgactgaaaccaacaaaacctcaggggtgccaggcaaccgaccgggttctgtgatccgggtgtacggggatgagaatagcgacaaggtcactcctggaacatttatcccctattgttctatggcccatgcccagctttgctttcatggccatcgagatgcagtgaagttcttcgtcgccgtaccaggccaggtgatttccccccagtcctcttccagcggtactgatctgactggagacaaagcaggtccaagtgcccaggagcccggatctcagaccccgctaaagagtatgctggttatctccggaggcgagggctacattgactttcgaatgggagacgagggaggtgaatccgagcttctgggcgaggatctcccgctagaaccatccgtgacgaaagccgagcgaagtcacctcatcgtttggcaagtgatgtatgggaacgaatag

SEQ ID NO: 135972 - DNA, 3534 bp, synthetic construct
  misc_feature 1..3534: note = Description of Artificial Sequence: Synthetic coding sequence
  source 1..3534: mol_type = other DNA
atgtcccccggctgcatgctcctgttcgtcttcggcttcgtggggggcgccgtggtcatcaactcagccattctagtgtcgctttctgtgctgctactggtccacttcagtatctccactggcgtgcctgccctgacccagaacttacctcgtattctcaggaaggagcggcctatctctttggggatatttcctctgccagcaggggacggactcttgactccggacgcacagaaggggggcgagacaccggggtcagagcaatggaagttccaggagctctctcagcctcgctctcacacgagcctgaaggatgagctgtctgacgtgtctcagggggggagtaaagcgaccacacccgcctccactgccaatagcgacgtggctactatcccaactgatacacccctgaaggaggagaacgagggattcgtgaaagtgactgacgcccccaataagtctgagatcagcaaacacattgaggtccaggtggctcaggaaactcgcaatgtcagtactggttcggccgagaacgaagaaaaatctgaggtgcaggctatcatcgagtccacacccgaactcgatatggacaaggatttgtcaggttacaaaggaagctcaactcctaccaagggtattgagaataaagcatttgaccggaatacagaaagtctctttgaagagctgtcgtccgctggatctggcttgattggggacgtggatgagggcgccgacctcctggggatggggcgtgaagtcgagaatctcatcctggaaaacacgcagctgcttgaaacaaagaacgcactcaacatcgtgaaaaatgacctcatcgccaaagttgacgagctgacatgtgaaaaagacgtcctccagggcgagctcgaggcagtaaagcaagctaagcttaagctggaagaaaagaacagggagctcgaagaggagctgaggaaagcaagagccgaggcagaggatgctagacagaaagctaaggatgacgacgatagtgatattcccacagcacagagaaagcggtttaccagagtcgagatggcacgcgtgctgatggaaagaaatcaatacaaggaacgcctgatggaactacaagaagccgtgagatggactgagatgatccgtgcttcccgtgagaaccctgccatgcaggaaaaaaagcgctcttctatctggcagttcttctctagactgttctcttccagctctaacaccaccaaaaaacctgaaccaccagtgaacctcaagtataacgcccccaccagtcatgtaacaccatctgtcaagaaaaggagcagcacgctcagtcaactacctggtgacaagtctaaagcatttgattttttgagtgaagagacggaagcctccttggcatcccgtagagaacaaaagagagagcagtatcggcaggtaaaggcgcacgtgcagaaagaggatgggcgcgtacaagcgttcggttggagcctcccgcagaagtacaaacaggtcacaaacggtcaaggcgagaacaagatgaagaacctccccgtcccggtctacctgcggcccctggatgaaaaggatacatcaatgaagttatggtgtgccgttggggtcaatctgagcggcggaaaaactagagacggaggttccgtagttggagccagtgttttctacaaggatgtggcaggcctggacactgaggggtcaaagcagaggtccgcatcccagtcctctctggacaaactggatcaagagttgaaggagcagcagaaggagcttaagaaccaagaggaactgtccagcttggtttggatttgcacttcaacccatagtgccaccaaggtcttgatcattgatgcagtccaacccggcaacatcttggatagcttcactgtgtgtaatagtcacgtgttgtgtattgccagtgtcccgggtgcacgggagacggattaccccgcaggggaggatctctctgaatctggccaagtcgacaaggcatctctttgcggcagcatgacttcaaatagttctgctgagacagactcgctgctcgggggtataacagtcgttggctgcagcgcagagggcgtcacaggagctgcaacatccccctccacgaacggagcaagtccagtgatggacaagccccccgaaatggaagctgagaacagcgaagttgatgagaatgtcccgacagccgaagaggctaccgaggcaacagagggcaacgctgggagtgccgaggacaccgtcgacatctctcaaactggcgtttacaccgagcatgtgttcaccgatcctctgggtgtgcagataccggaggatttaagccctgtctaccagtcaagtaatgacagcgacgcctacaaagaccagataagcgtgctgcccaacgagcaggatttggtgagggaagaggcacaaaagatgagctcgctcctgcctacaatgtggctcggtgctcagaatgggtgtttgtacgtacattcttcggttgcccagtggcgaaaatgtttgcattctattaagctgaaagactccatcctgtccatagtgcatgtcaaggggattgtgctcgtggctctggcagatggaactctggcaatatttcatcgtggtgtcgatggccagtgggacctctccaactatcacctgctggacctgggtagaccccaccacagcatcagatgtatgaccgtggtgcatgataaggtgtggtgtggctatcggaataagatttatgtcgtgcaacctaaggcaatgaaaattgagaaatctttcgacgctcatccccgaaaagaatcccaagtaagacagctggcatgggtcggggatggcgtgtgggtcagcatcaggctggattcaacgctgaggctgtaccatgcccatacttaccagcatctgcaggatgtcgacattgagccatacgtgagtaagatgctgggcaccggtaagctcggttttagcttcgtccgtataactgcactgatggtcagctgcaaccgactttgggttggcaccggcaatggcgtgattatttcgatccctcttaccgagactgtaatattgcaccagggccggctcctggggctgagggcaaacaagacttctggcgtacccggcaaccgcccgggatcagtaatcagggtgtatggggatgagaacagtgataaggtcacaccggggactttcattccttattgttcaatggcacacgcccagttatgcttccacgggcacagggacgctgtcaagttttttgtggcagtgccgggacaagttatctcccctcaaagctcgtctagtgggactgatctgactggtgataaagccgggccttccgcccaggagcccgggtcacagacaccactaaagtccatgctggtgataagtgggggagagggctatatcgactttagaatgggagacgagggtggggaaagtgaactcctgggtgaggacctccccctcgagccatcagtcaccaaggcagagagatcacatctcatcgtctggcaggtgatgtatggcaatgagtag

SEQ ID NO: 135973 - DNA, 2760 bp, synthetic construct
  misc_feature 1..2760: note = Description of Artificial Sequence: Synthetic coding sequence
  source 1..2760: mol_type = other DNA
atggtcatgagatggggcgagaggaatgatgtgatagcttgggagctgcttcaggatggtgtggagaatgcgctgaacatagtgaaaaatgatctgattgctaaagtggacgaactaacttgcgagaaggacgttcttcagggcgagctggaggctgttaagcaggccaagttgaagctggaagaaaaaaaccgagagctcgaggaagagttaagaaaagcccgagccgaggcagaagatgcccgacagaaagcaaaggacgacgacgactcagacatccccacagcacagcggaaacgctttacaagagttgaaatggccagggtactgatggagcgtaatcagtataaggagcggctcatggagctgcaagaggcagttaggtggaccgagatgatccgcgccagcagagagaaccctgccatgcaggaaaaaaaacgttcttctatctggcagtttttcagccgcctgttctcatcatcatccaacactacgaaaaagcctgagcctcccgttaacctgaagtataatgcccccacgtctcacgtgacccctagcgtgaagaagcgctcttctaccctttcccagctgcctggcgataagtccaaagcttttgatttcctgagtgaggagaccgaggcgtcactggcctccaggagagaacagaagagggaacaatatagacaggtaaaagcacacgtgcagaaggaagacggccgtgtccaggcatttggctggtcactgccacagaagtacaagcaggtcacaaatgggcaaggagagaataaaatgaaaaacctcccagtccccgtgtacctgcgcccacttgacgagaaggacactagtatgaagctctggtgtgctgtcggcgtgaatttgtctggcgggaaaacacgcgacggcggcagcgttgtcggagcctccgtcttttataaagacgtagccggtctggacactgagggctccaaacagaggagtgcctcacagtcttccctggacaagctcgatcaggagcttaaagaacagcaaaaggaactgaaaaatcaggaggagctctcatcgctcgtgtggatctgtacctcaacccattctgccacaaaggtgctaattatagatgcagtgcagcccggcaacatcttagatagttttaccgtgtgcaattcacatgtcttatgcattgcatcagtccctggagcccgcgaaactgattatcccgccggtgaggatctctctgagagcggccaggtggataaagccagtctctgtggctctatgacgagcaattcatctgcagaaaccgatagccttctcgggggcattaccgtggtgggctgcagtgctgagggcgtgaccggagcagccaccagcccttctacaaatggagcctcccccgtgatggataaacctcctgagatggaggccgaaaactcagaggttgacgaaaacgttcccaccgccgaagaggcaactgaggcaactgaggggaatgccggctcagcagaagataccgtggacatttcccagactggcgtgtatacagaacacgttttcacagatccgctaggcgtccaaatcccagaagatctgtcgccagtttaccagagcagcaacgacagcgatgcttataaggatcagatctcagttcttccgaacgagcaggacctagttagagaagaagcccagaagatgtccagtttgctgcccaccatgtggctgggagctcagaacggttgcctgtacgtgcacagttctgtcgcacagtggaggaaatgtctccattctattaaacttaaagactccattctgagcatagtgcacgtgaagggcatcgttctagtagcccttgccgatggtaccctggccatcttccaccggggcgtcgacggtcagtgggatctttcaaactatcatttgctggaccttggacgcccacaccacagtatcagatgcatgactgtcgttcatgacaaagtgtggtgtggttacagaaataagatatatgtggtccagcctaaagccatgaagatcgaaaagtccttcgacgcccatcctaggaaagaatctcaggtgcgccagctggcatgggtgggagatggggtgtgggtgtccattaggctggacagtacccttaggctgtatcatgcccacacctaccagcacttacaggacgtggacatagaaccatacgtcagcaagatgttagggaccgggaaactgggcttttctttcgttcgaatcacggcgttgatggtttcttgtaacagactgtgggtaggtacaggtaacggcgtaataatcagcatccccctgactgaaacaaataaaacaagtggggtgcctggcaataggcccggttctgtcatccgcgtgtatggcgacgagaactctgacaaagtgacacctggaacttttattccgtattgctctatggcccacgcccagttgtgtttccatggacacagggacgccgtgaagttcttcgttgccgttcctggccaagtgatatcccctcagtcaagcagttcaggcacggatctgactggagataaggccggcccctccgcacaagagcctggtagccagactccccttaagtccatgctcgtaatttccgggggcgaaggttacatagattttagaatgggcgacgagggcggcgagtcagagctgctcggcgaggatttgcctcttgagcccagcgtaacgaaggccgaaaggtcgcatttaatcgtgtggcaggtgatgtacggcaatgaatag

SEQ ID NO: 135974 - DNA, 825 bp, synthetic construct
  misc_feature 1..825: note = Description of Artificial Sequence: Synthetic coding sequence
  source 1..825: mol_type = other DNA
atggagctcgaagatggcgtggtttaccaggaggaaccaggcgggagcggagctgttatgagtgagcgggtttcagggctggccggatccatctaccgagaatttgaacgactcatcggtcgctatgacgaagaagtggtgaaggaactcatgccactcgtggttgccgtgctggagaacctggactccgtgtttgcgcaggaccaggagcaccaggtggagctcgagctgttgagggacgacaacgagcagctgatcacacagtacgaacgggagaaggcgctgcgcaagcatgcggaggaaaaattcatcgagttcgaagactcacaagagcaggaaaaaaaagacctgcagactcgcgttgagagcctggaatcccagacccggcagctggagttgaaagcaaagaactacgccgatcagtctgcaatgagccctggatgcatgctgctgttcgtttttgggttcgttgggggtgccgttgtgatcaactctgcaatcttggtatctctctcagtgctgctgctggtgcacttcagcatctctaccggcgtgcctgccttgacacagaacttaccgcgtatactgcgcaaagagcgtcctatttccttaggcatctttccgttgccggctggcgatggactgctaactcctgatgctcaaaaaggaggcgagacgcccggttccgaacagtggaaattccaagagctgagtcagcctcggtcccacacaagtctgaaggtgtctaattcacctgagcctcagaaagccgtggagcaggaggttcgcatggtgttgctaaatattctgcagaaggtgtactag

SEQ ID NO: 135975 - DNA, 1053 bp, synthetic construct
  misc_feature 1..1053: note = Description of Artificial Sequence: Synthetic coding sequence
  source 1..1053: mol_type = other DNA
atgaaaccgctggtgttgttagtcgcactgctgctttggccaagctctgtgccagcctacccatccatcacagtgaccccagacgaagaacagaatctcaatcattatatccaggtattagaaaacctggtcaggagcgtaccctctggcgagcctggtagagaaaagaaatccaactcccccaagcatgtttattcaattgccagcaagggatccaagttcaaagagttggtaacccacggggatgctagcaccgagaacgacgtgcttacaaaccccatatccgaagaaacaacaacattccctacaggcggatttacacccgagatagggaagaaaaagcacacagagtccacccctttttggagcattaagcctaataacgtgagcattgtccttcatgccgaagaaccatatatagagaatgaggaaccggagccagaacccgaacccgcagccaagcaaactgaggctcccaggatgctgcccgtggttacagagtctagcacgagcccgtacgtgacgtcatacaagtcaccggtgaccaccctggacaaatcgaccgggataggcatctctacggagtccgaggatgtacctcaactgtccggcgagactgctatcgagaaacctgaagagttcggcaagcatcctgaaagctggaacaatgacgacattctgaagaaaatcttggacattaactcccaggtacagcaggctctgctgtctgacacttctaatcctgcctatagggaggatatcgaggccagtaaggaccatttgaaacgatccctcgcgttagctgcagctgccgagcacaagctaaaaaccatgtacaagtcccaactgctaccggtagggcgcacctcaaacaaaatcgacgatattgaaaccgtgataaatatgttgtgtaattccagatctaaactgtatgaatatcttgatattaagtgcgtgcctcctgagatgagggagaaagcagcaacagtattcaacaccttgaagaatatgtgccggtcaagacgagttaccgccttgctgaaagtctattag

SEQ ID NO: 135976 - DNA, 711 bp, synthetic construct
  misc_feature 1..711: note = Description of Artificial Sequence: Synthetic coding sequence
  source 1..711: mol_type = other DNA
atggcatcttcagtggatgaagaggcgcttcaccagctctatttgtgggtagataacatcccactgagtcggcccaaacgcaacctgtcaagggatttcagtgacggcgtgctggttgcggaagtaatcaaattctacttccccaagatggtggagatgcacaactatgtgcccgccaatagcctccagcagaagttgtcaaattgggggcacttaaaccgcaaggtgctgaaacgcctcaacttcagtgtccctgatgatgttatgagaaaaattgcccagtgtgccccaggcgtagtagagctcgtgttgattcccttgaggcagcgcctcgaggagaggcagaggaggagaaagcaaggggccggctcccttcaggagctagccccgcaagacggcagcggctatatggacgttggagtgtcccagaaggcaaggggggagggtgttccagatcctcagggtggggggcagctgtcatgggatagaccacctgccccccgtcctccagcctacaacagagctctgcagggcgatccaagttttgtgttgcagatagctgagaaggagcaagagctgttggcttcacaggaaaccgttcaagtcctgcagatgaaggtccgcagactcgaacacctgctccagcttaaaaacgtccgtatcgaggatttgtcccggcggttacagcaggcagagcggaagcaacgctag

SEQ ID NO: 135977 - DNA, 351 bp, synthetic construct
  misc_feature 1..351: note = Description of Artificial Sequence: Synthetic coding sequence
  source 1..351: mol_type = other DNA
atgtgcgaccaaaccaaacattccaagtgctgtcccgccaaaggtaaccagtgttgcccaccccagcagaatcagtgttgtcagtcaaaagggaaccaatgctgccctccaaagcagaatcagtgttgtcagcccaaaggatctcagtgttgcccccctaaacacaaccactgctgccagcctaaaccaccatgttgcatacaggcgcgttgctgtggactggaaaccaagccggaagtgtctccccttaacatggaaagcgaacctaattcaccacaaacacaggacaagggatgccagacgcagcagcagccccacagtccccagaacgagtcacgcccatccaagtag

SEQ ID NO: 135978 - DNA, 294 bp, synthetic construct
  misc_feature 1..294: note = Description of Artificial Sequence: Synthetic coding sequence
  source 1..294: mol_type = other DNA
atggacaagcagtcctcggctggcggagtgaaacggtcggtgccttgcgatagcaacgaagccaatgagatgatgcccgagaccccaaccggcgactcagacccccaaccagcccccaagaagatgaagacgtcagaaagcagtaccatcctagtggtgcggtataggcggaacttcaagcgcacctcgccagaggaactgctgaacgaccacgctagggaaaaccggataaatcctttgcaaatggaggaggaagaattcatggagattatggtcgaaatcccagctaagtag

SEQ ID NO: 135979 - DNA, 2019 bp, synthetic construct
  misc_feature 1..2019: note = Description of Artificial Sequence: Synthetic coding sequence
  source 1..2019: mol_type = other DNA
atgagatccattagatctttcgctaacgacgatcggcacgttatggtgaagcattcaactatctatccttcccccgaggagcttgaggcagtccaaaatatggtctccaccgttgagtgcgcacttaagcatgtatcagattggttggacgaaacgaacaagggcacaaagaccgagggcgaaacagaagtcaagaaggatgaagctggtgagaattattcaaaggaccagggcgggcgaaccctgtgcggagtcatgcggataggattggtggcaaaaggtctgttaattaaggacgatatggacctcgaactggtgcttatgtgtaaggacaagcccactgagaccctgttaaacacggtgaaggacaatctgcccatacagatccagaagcttacagaagagaaatatcaagtcgagcagtgcgtgaacgaagctagcattattatcagaaacaccaaggaaccaacactcacactgaaagtgatacttacatcaccgctgatacgggatgagctggagaagaaagatggcgaaaatgtgagcatgaaggacccgcctgacctccttgatagacagaagtgcctcaatgctttagcaagcctgcgacacgccaaatggtttcaggcgagagccaacggattgaaatcctgtgtgattgtactacgtatactaagggatctctgcaacagggtccccacctgggctcctctgaaggggtggcctctcgagctcatttgcgagaaatctattggaacctgcaaccggcccctcggggcgggcgaggcattgagaagggtgatggagtgcctagccagcggaattctcctcccaggaggtcccggtctgcacgatccttgtgagcgcgatcctactgatgctcttagctacatgactattcaacagaaggaagacatcactcatagcgcacagcatgctctgagactaagcgcattcggccagatctataaggtgctggaaatggaccccctgccatcctctaagccattccagaagtactcctggtctgtgaccgacaaggaaggcgccggctccagcgcactgaagaggccctttgaagacgggctgggagatgataaagaccctaacaaaaaaatgaagaggaacctccgaaaaatactggacagcaaggcaattgatttgatgaatgctctgatgcggctcaaccagatacgcccaggcctgcaatataaactccttagtcagtcagggcccgtccacgcacccgtatttactatgtcagtggatgtcgacggtaccacctacgaggcctccggcccgagcaagaaaacagctaagctgcatgtagcggtgaaagttctgcaggcaatgggctacccaactggcttcgatgccgacatcgaatgtatgagcagcgatgaaaagagtgacaacgagtcgaagaacgagacggtttcttctaattcatctaacaacacaggcaacagcactaccgagacgtcctcaacactggaggttcggacccagggtcccatcctgaccgccagcggtaaaaatcccgtgatggaactcaacgagaaacgcagggggttaaagtacgaactgatttcagagactggggggtcacatgataagcgttttgtgatggaggtagaggtggatgggcagaagtttcgaggcgcagggccaaacaaaaaggtggccaaagcatccgcagccttggccgccctagagaagctgttctctggcccaaatgcagcgaataacaagaagaagaagattatcccccaggcaaagggggtcgtgaacactgccgtcagcgccgctgtgcaagccgtgaggggtcggggccggggcacgctcacaagaggggcttttgtcggtgccaccgcggcccccggatacatagcaccaggatatggaaccccctatggatactcgacagcggcaccagcctatggcttgccgaaacgcatggtcctactgccagtgatgaaatttcctacctatcctgtcccccactactcatttttttag

SEQ ID NO: 135980 - DNA, 1977 bp, synthetic construct
  misc_feature 1..1977: note = Description of Artificial Sequence: Synthetic coding sequence
  source 1..1977: mol_type = other DNA
atggtgaagcactcgacaatctacccttcccctgaagaattggaggccgtccagaacatggtatccaccgttgaatgcgcccttaagcacgtgagcgactggttagacgaaacgaataaaggaacaaaaaccgagggtgagaccgaagtgaaaaaagacgaggctggggagaattatagcaaagatcagggaggtagaaccctgtgcggggtaatgagaatcggcctcgtggccaagggtttgttgatcaaggatgacatggacctggaactggtgctaatgtgcaaggataagcctactgagaccctgctcaatactgtgaaggacaacctgccgatccaaattcagaagttgaccgaggagaaatatcaggttgagcagtgcgtgaacgaggcctccatcattatccggaacacaaaggagcccaccttgacactgaaggtaatcctgacgtcacctctcatccgtgacgagctggaaaagaaggatggcgagaacgtgagtatgaaggacccacccgacctcctggacaggcaaaagtgtcttaacgctctagcctcccttagacatgcaaagtggttccaggcacgtgcaaatggcctgaaaagctgcgtaattgtcctgcgcatcttgcgcgatctgtgcaaccgcgtcccgacctgggcaccattgaagggctggcccttagagctgatctgcgaaaagtccattggcacctgtaaccggccactgggtgcaggggaagcgttgcggagggttatggagtgcctggcctctggcatcttgttaccagggggacccggtttgcacgatccatgcgaaagggatccaacagatgcactgagctatatgacgatacagcaaaaggaagacattacccattccgctcagcatgctctgaggttaagtgccttcgggcagatctataaggttttagagatggacccactgcccagctcaaaaccgtttcagaagtatagttggtctgtgaccgacaaagaaggcgccgggtcatcagccctgaagaggccgtttgaagatgggctgggtgacgataaggatcctaacaagaagatgaagcggaacctgagaaagattctggatagtaaagctattgacctcatgaacgcactcatgcggttaaaccaaatcagaccgggcttgcagtacaaattactctcccagtcagggcccgtgcacgcaccagtgtttacgatgtcagtggacgtggacgggaccacatacgaagccagcgggccatccaaaaaaaccgcgaagctgcacgtggccgtcaaggtgcttcaagcaatgggctatccaacaggttttgatgccgacatagagtgtatgtcctcagatgaaaaaagcgataatgagtctaaaaatgagaccgtgagctctaatagtagcaataacaccggcaactctactaccgagacaagtagcaccctggaggttcgcacacagggtccgatcctgacagcgtctggtaaaaatcccgtgatggagctgaacgaaaaacgacggggtctgaaatatgagttgatatctgagacaggcggaagccacgacaagaggtttgtgatggaagtggaggtagacggacagaaattcaggggcgccggtcccaacaaaaaagtcgccaaagcttccgctgctttagccgccctggagaagctgttttcagggcccaacgccgctaacaacaaaaaaaaaaaaattatcccccaggctaaaggggtggtcaacactgccgtgagcgccgccgtacaagccgtgcggggtaggggcaggggaacactgactcgaggcgcgtttgttggcgcaacagctgcgcccggatacatcgcccctggatatggaactccttatggttattctaccgcggccccagcatacggactgcccaagcgcatggtattactaccagtcatgaaattccccacctaccctgttcctcactactcatttttttag

SEQ ID NO: 135981 - DNA, 285 bp, synthetic construct
  misc_feature 1..285: note = Description of Artificial Sequence: Synthetic coding sequence
  source 1..285: mol_type = other DNA
atgcgaagcattcgctcgtttgctaatgatgatagacacgtcatggtcaaacacagcaccatatatccctctcctgaggaactggaggccgttcagaacatggtgtcgaccgtggagtgcgcactgaagcacgtgtccgattggttagacgagacaaacaaaggaacaaagacagagggcgaaacagaggtgaagaaggacgaagcgggagaaaactacagtaagtggtctgacatcgtctggtgtaacgaagactggccaggctgcaagcgcctggccgattag

SEQ ID NO: 135982 - DNA, 2019 bp, synthetic construct
  misc_feature 1..2019: note = Description of Artificial Sequence: Synthetic coding sequence
  source 1..2019: mol_type = other DNA
atgaggagcatccgctcctttgcaaacgacgacagacatgtgatggtcaaacattccaccatctacccctctcccgaagaacttgaagctgtgcagaacatggtgtctaccgtcgaatgtgctctcaaacacgtgagtgattggcttgatgaaacgaacaaagggactaaaaccgagggagagaccgaggtgaagaaggatgaagctggagaaaactattccaaagaccaaggaggcagaacgctgtgtggggttatgagaataggcctggtggcaaagggactgcttataaaagacgatatggacttggagctcgtgctgatgtgtaaagacaagccaaccgagacgctcctgaacaccgtaaaggataacctgcctatccagattcagaagctgaccgaagagaagtatcaggtggagcagtgcgtcaatgaggcgagtatcatcatccggaacacaaaagaacccacactgacccttaaggtgatcctaacctcacctctgatacgggacgaactggagaaaaaggacggcgagaacgtctcaatgaaagacccccctgatctactggacaggcaaaagtgcctgaacgccctggctagcctccgccatgccaagtggtttcaggcccgtgctaatggtctgaagagttgtgtgatagttcttcgcatcctgcgggatctttgtaacagagtccctacatgggcccctttaaaggggtggccactggagcttatttgcgagaagtccattggcacatgtaatagaccactgggagccggtgaagctttgaggcgggtgatggagtgcctagcctccggcatccttttacctgggggacctgggttacacgacccttgcgaaagggatcctactgacgctctaagctatatgaccatacagcagaaggaagatatcacacatagtgcccagcacgcccttcggttatctgcattcggtcaaatttacaaggtgttagagatggaccctctcccttcttcaaagcccttccagaaatactcttggtccgtcacagacaaggagggcgccggtagctcggctctgaagaggccttttgaagatggcttaggggacgataaggatcctaataagaagatgaagaggaatttacgtaaaattcttgactcaaaagccatcgacctgatgaatgctttgatgcggttaaatcagatccgccctgggctgcagtacaaactgctgtctcagagcgggccggtgcacgcccctgttttcacgatgtccgtggatgtggatggcactacttacgaggcatcagggcctagcaagaaaacagcaaaactgcatgtggccgtgaaggtccttcaggccatgggctaccccaccggattcgatgccgacattgagtgcatgagttcagacgaaaagtctgacaacgagtccaaaaacgagacagtttcctccaatagcagcaacaacacaggaaactctacaaccgaaaccagtagcactctcgaggtacgcacgcagggccccatactcacggcctctgggaaaaaccccgttatggaactgaatgagaaacggcgaggcctgaagtacgagctgatcagtgaaacaggcggaagtcacgacaagagattcgtcatggaagtcgaggtcgacggacagaaattcagaggcgctggacctaacaagaaggtggctaaggcctccgctgctctcgcagcactggaaaaactgttttccgggcccaacgctgcaaataacaagaagaagaagattatccctcaggctaaaggcgtagtgaatacagccgtttccgctgcagtgcaggccgtgcgcgggcgtggccgtggcactctgacacgcggcgctttcgtaggtgccactgccgcaccaggctatatcgccccaggctatggcaccccttacgggtactccactgccgcccccgcatatggtcttcccaagcggatggtgctgctgccagttatgaaattccctacttacccagtgccccattattctttcttctag

SEQ ID NO: 135983 - DNA, 225 bp, synthetic construct
  misc_feature 1..225: note = Description of Artificial Sequence: Synthetic coding sequence
  source 1..225: mol_type = other DNA
atgagatccattagatcctttgccaatgacgatcggcatgtcatggtgaagcatagtaccatctatccgagtcctgaggaactagaggcagtgcagaatatggtgagtactgtagaatgcgccctaaagcatgtgtcagactggctggatgaaacgaacaaagggaccaaaactgagggggaaacagaggtgaaaaaagacgaagcaggggaaaactattcctag

SEQ ID NO: 135984 - DNA, 1776 bp, synthetic construct
  misc_feature 1..1776: note = Description of Artificial Sequence: Synthetic coding sequence
  source 1..1776: mol_type = other DNA
atgtcccttctcactaattatgaaggtttgcgacatcagatcgaaaggctagtgagagaaaatgaagagctcaaaaagctcgtaagattgatcagagagaatcacgaactgaagagcgccattaaaacgcaggctggaggtctgggcattagtggctttactagcgggctgggggaggcaacagccggcttgtcctcacgccagaataacggagtttttttgcctccatcccctgctgtggcaaacgaaagggtgctcgaggaagttggaattatggccctagcccctctcgcagaaatgttaacgtctctgcagcccagcgccaccccgggaagcctgatgtctccactaaccggaacgctatccaccctgctgtcagggccagctcctacttctcaatcaagccccttaacatcgttcctcacatcgcctatcgcggggccactcactggcaccctggctagttcattaggcctcccctctaccggcacccttactcccagcagcctggttgcgggacctgtggctatgtcccagagctctcctttaattgcaccggtgatggggaccgtagccgtttccctatcctcgcctttgctctcttcgacagccacaccccctggggttagccagaacttattagctaaccccatgagtaatctggtgctgcctgaggcgcctcggctgagactggcagagccccttcgcggaggcccaacaggtccacaaagccctgcttgcgtggttcctacggctaccactaaagttcccctatcgactgagcctccccagagcacgcaggatcctgagcccctgtccatggccttcgcaggggcccctttacagacatctacacccataggggctatggggactcctgctcccaaaacggctttcagctttaatacatcagatacacaggcccagccttctgccgctcaggaacaggtggtgccggcttctgttccaacgtctcctacgacaagtcccactgtgacagtcctggcctcagctcctgccctcgcaccgcaggtggccacgagctacaccccatcgtcaactacacatatagcccaaggggctccccacccaccatcacgtatgcataattccccaacccagaacctccctgtgcctcactgcccccctcataacgcccacagcccgccccgtacaagctccagcccagcatctgtgaacgacagcaggggcccccgaaccacagaaccgtctacaaagtccatgatggaagtagagcgcaagttagcccacagaaaaaccagcaaattcccggaaaatcctagagagagtaaacaattggcatgggaacggttggtgggagagatagcctttcagctggaccgcagaatcttgagcagtattttcccggaaagagtgcgcctctacggtttcaccgtcagcaacatcccagaaaagatcatccaggccagtcttaatccttctgatcataagcttgatgaaaagttgtgtcagcggctcacacaacggtacgtgtcagtgatgaacaggctccagtcccttggctataatgggcgggtgcatcccgcactaaccgagcagctggttaatgcctacggaattctccgcgaaaggcccgaacttgcagcctcagaggggggcccctacactgtggacttcctgcaaagagtagtggtggagacagtgcatccaggcatgctggcggatgcgctactgttactctcttgtcttagtcagctagctcatgacgacggcaagcctatgtttatctggtag

SEQ ID NO: 135985 - DNA, 1326 bp, synthetic construct
  misc_feature 1..1326: note = Description of Artificial Sequence: Synthetic coding sequence
  source 1..1326: mol_type = other DNA
atgagcctactaaccaactatgaggggttgcgtcatcagatcgaaagacttgtgagggaaaacgaagagttgaaaaagctggttcggctcatccgcgagaatcacgaactcaagagtgctatcaagacacaggccggcgggttagggatcagcgggttcacaagtggtctgggcgaggctacagccgggctgtccagtagacagaataatggggtatttctcccaccaagtccggctgtggctaacgaaagagtgttggaagaggtgggtatcatggcgctggcccctctcgctgagatgcttacaagcctgcagcccagcgctacaccggggtctttgatgagcccactgaccgggacactaagcaccctgctaagcggacctgcacctacgtcgcagtcatccccactcacgtcgttcctcacttcacccattgctgggcccctgactggaaccctggcaagctctctaggtctgccgagtacagggacactgaccccgtcaagcctggtggcaggaccggtggccatgtcccagagctcccctctgatcgcccctgtgatggggacagtggccgtgagcctctcttctcctctgctgagctcaacggcgactcctcctggagtgtcccagaaccttctggccaatcctatgtctaatctggttctgccagaagcgccacgcctgcgcctggctgagcccctacgcggaggacccaccgggccccagagccctgcttgtgtcgtgcccacggcgactacaaaggtcccactgtccactgaaccacctcagtcaacgcaggatccagaacccttgtccatggccttcgcaggcgccccacttcaaacatcaaccccaattggcgccatgggcacgccagctcctaagacagccttcagttttaatactagcgatacacaggctcagccatctgcagctcaggagcaggtagtccccgcctcagtccctactagtcctactacttcacctacggtgaccgtcttggcctctgcaccagccctcgcgcctcaggtggcaaccagctacacaccgagcagcactacccacattgcacagggcgccccacacccaccttccaggatgcataatagcccgacacagaacctgcctgtcccccattgcccacctcataatgcgcacagtccgccacggaccagcagctcccccgccagcgtgaacgattctaggggcccgcgcaccaccgaaccatctacaaagagtatgatggaggttgaacgaaagctggcccatcgaaaaactagcaagttccctgagaaccccagaggctttccggagccccagtag

SEQ ID NO: 135986 - DNA, 573 bp, synthetic construct
  misc_feature 1..573: note = Description of Artificial Sequence: Synthetic coding sequence
  source 1..573: mol_type = other DNA
atgtcttcttcagcattaacatgtggatcaactctagagaagtctggggatacctgggagatgaaggctttagacagttcaaggctggtcccttggcctcctcgaggattagggtcctcgacccagcacccaaacaagcctcattgcgccctcgcgtcttgccagggccctggagtgctacctggtgccgccagcgcactgcctgaacttacttttcagggtgatgtgtgtcagagtgaaacatgtcaacgctatctgcaagccgccatcagtctagacatcgccgtctcccagataaacctcctgggtagaccatcttctcctcctgctctgcttatccagcagggatcctgtgaacaagtcatccacaatagtacacctcagtttttgggaatggaggatggggataacgagcggacaactggctggctatggcggctatgcgaagacatcgacgcggagcccagctctactggctgtagccgatcaaaccagcttaccttcaccgaggggtgtttcgtcaggtccttatccacagtctactcaaacacccacattcacactcatctgtag

SEQ ID NO: 135987 - DNA, 1791 bp, synthetic construct
  misc_feature 1..1791: note = Description of Artificial Sequence: Synthetic coding sequence
  source 1..1791: mol_type = other DNA
atgggattcataattcatattcagcaggtgaagaaacagcgcaaaaagctggaccagggactgatcctcaagaaggagaagtatagaaaggagaagaaatgtgcctctctgtcctttgaagtatccagcgacgggggaactgaaccatcggccttagtggacgataatgggtcggaggaggacttttcctacgaagacctgtgtcaggcctctcctcgctatctgcagccgggaggcgagcaactggcaataaacgaacttataagcgacggcaacgtcgtgtgcgccgaggccctttgggatcatgtcactatggacgaccaggaactggggttcaaagctggggatgtgatccaagtgctggaggcttctaacaaggattggtggtggggccgatccgaagacaaggaggcatggttccccgcatctttcgttagactcagggtcaatcaggaagagctgtccgagaattcctcgagcacgccatccgaagaacaagacgaggaagcttcccaaagtagacaccgacattgcgaaaataagcaacagatgcggactaacgttattcgtgaaattatggatacggaaagggtatacataaaacacctgagggatatctgtgagggatacatccgtcagtgcaggaagcacactggaatgtttactgttgcccagcttgcaacaatctttggcaatattgaggatatttataaatttcagcggaaattcctgaaggacctcgagaagcagtacaacaaagaagaaccgcacctatcagaaatcggctcctgttttcttcaaaaccaggaaggctttgcaatatacagcgaatactgcaacaaccacccaggagcctgcctggagctcgctaaccttatgaagcagggcaaataccgacattttttcgaggcttgcagacttttgcagcagatgatcgatatcgccatcgacggcttccttctgacccccgtccagaaaatctgcaaatatcctctccagctagcagaactgctgaaatacactacccaggagcacggcgattactccaacatcaaagcagcctatgaagcaatgaagaatgtagcatgtctgattaacgagcggaaacgcaaactggaatctatcgacaaaattgccaggtggcaggttagcattgtgggttgggaggggttggatattttggaccggtcgtccgagctgattcacagcggcgagctgaccaagattaccaaacagggaaagtcacagcagcgcacttttttcctgtttgatcatcagctggtgagctgcaaaaaggaccttttgagaagagatatgctctattataaaggacggctggatatggatgagatggaactggtggatttaggagacggaagagacaaagattgcaacctgtctgtgaagaacgcattcaagcttgtgtcccggaccaccgatgaggtgtatctgttctgtgccaagaaacaggaggacaaagcgagatggttgcaggcttgtgccgatgagagacggcgggtacaggaggacaaggagatggggatggagatctcggagaatcaaaaaaagttggctatgctgaatgcgcagaaagctgggcatggaaaatccaagggctacaatcgctgccccgtcgctccgcctcaccaggggcttcaccccatccatcaacgccatataaccatgcctacttctgttccccagcagcaggtgttcggcctggctgaacccaagcgcaagagtagcctgttttggcatacattcaaccgactgacaccctttagaaagtag

SEQ ID NO: 135988 - DNA, 1959 bp, synthetic construct
  misc_feature 1..1959: note = Description of Artificial Sequence: Synthetic coding sequence
  source 1..1959: mol_type = other DNA
atgacttcagcctctccagaggaccagaacgcgccagtggggtgccccaaaggggcccggcgcaggcggcctatcagcgtaatcgggggcgtgagtctctacggtacaaatcagactgaagaactggacaatctgcttacccagccagcatctcgtccccccatgcctgctcaccaggtcccaccctacaaagccgttagcgctaggttccggccgttcactttctctcagagcacccctatagggctagaccgagtgggacgtcggcggcagatgcgtgcaagcaacgtgtcctcagatggtggcaccgaacctagcgctcttgtagatgacaacggctcagaggaagacttctcttatgaagacctgtgtcaggccagccctcgctatctgcagcccggtggggagcagctagctattaacgagctgatatctgacggcaacgtggtgtgcgccgaagccctctgggaccatgttacgatggacgaccaggagctcggatttaaggccggcgatgtcatccaggtactggaggctagtaacaaagattggtggtggggaagaagcgaggataaagaggcctggtttcccgcctcattcgtcaggcttagggtaaaccaggaggaactgagcgagaacagtagctccacccccagcgaagagcaggatgaagaggcgtcacaaagcagacacagacactgcgagaacaagcaacagatgaggacgaacgttattagggagatcatggacacagagcgggtgtatatcaagcacttgcgggatatctgcgaaggatatatccgccaatgtcggaaacataccggaatgttcacagtggcccagcttgcgacaatttttggtaacattgaggacatctacaagtttcagcggaagttcttgaaggatttggagaaacagtacaacaaggaagaaccccatctctctgagatcgggtcctgcttcctgcagaatcaggaaggattcgcaatatacagtgaatactgcaacaatcacccaggagcatgcctggaacttgcaaatttgatgaagcaggggaagtatcgccacttctttgaggcctgccgcctcttgcagcagatgatcgatatcgcaatcgacggcttcctgctgacacccgtgcaaaaaatatgtaagtaccccctccaattggcagagctcctcaagtacacgacacaggagcacggtgactactcgaacattaaagctgcgtatgaggcaatgaaaaacgtagcttgcttgataaatgagaggaaacggaaacttgagtctatcgacaagatcgctcgctggcaagtgagtattgtgggttgggagggcctggacatcttagaccgcagtagtgagctgattcactccggagagctgacaaagatcactaaacaggggaaatctcaacaaaggaccttctttttgttcgatcaccagctggtgtcttgtaagaaagacctgctccggagggatatgttgtactacaaggggagactggacatggatgaaatggagctcgtagatctgggcgacggacgggataaggactgtaacctttctgttaagaacgccttcaagctggtctcacgcacgacagatgaggtatatttgttctgcgcaaagaaacaggaggacaaggctcgttggttgcaggcatgcgctgacgagaggaggcgcgtgcaggaggataaagagatggggatggaaattagcgagaaccaaaaaaagttagccatgttgaacgcgcagaaagccggacatggaaagtccaagggctacaaccgctgccccgtcgcacctccccatcaaggacttcacccaatccaccaacgacacataaccatgccaacttctgtgccccagcagcaggtattcggactcgcggaacctaaaagaaagagctccttgttctggcacacctttaatagacttacaccctttaggaagtag

SEQ ID NO: 135989 - DNA, 3834 bp, synthetic construct
  misc_feature 1..3834: note = Description of Artificial Sequence: Synthetic coding sequence
  source 1..3834: mol_type = other DNA
atgacgcaagcagcggttcggccctgggcgccgtgtttggaaaacatgactacagcaccaaacggtcttggacccggaccagctgcaccatgtgccggctctgacctcaaggatgccaagatggtcaccagcctcgcatgcggcaacggcgtctgtggctgttcacccggaggagatactgacacccaggaagcaaaactctcaccggccaagctcgtgaggcttttttctaccagccggaaaagaactggagcccacccagagcggcctcatagtatggtgttggtcggcaactcgtctacatggaatacccttgcatcatttcgcaagatgggatcatttaagaagcttaagtctagtgtgctgaagggcatccagagtcgcgaaggttctaacgcctgctccaagggcgaggcatctgagcatgggctgggaaaaagcattccaaatggggctgtcccaggcgctcaggcctcacggggaagtcccctcgctccaggcccggcgtgtggcgcactgcgcccggcagagtggggaacacttgatggctccgatctggaggacacagatgatgcgttccagaggtcgacacaccgctcgagatctttgagacgggcttacggtctgggccgtatttgcctgcttgacgcgccacagaatcacgccacccccactatcgctactggccaagtccccgctgtctgtgaaattctggtgcgggacccagagaacaatagcatgggatataggaggagcaagagtacggataacttagcgttcctaaagaaatcttcttttaaaagaaaatctacgtccaacctcgcagatttgcgcactgctcatgacgcacgcgtgccacagagaaccctctcaagtagctcaactgacagtcagaaacttggcagtggccggaccaagcggtggcggtcacctatcagggcaaaggattttgaccgggtgttcaagctggtgagcaacgtgacggaggctgcttggcggagagagagcccaaggtctggtgcaccatcgccaggcgaggcatcactgaggctgcaggctcactctcggttgcacgacgactattccaggcgtgtgagccggagtaccgaacaagattctagacgtggcggtgccgtgatgcatggcaccacggctacctgcaccgtagcgcccggcttcgggtctgcaacaagcaaaggtccgcatctggacgccgatacggctgtgttccctttagagacaaagagttcatgggcagtggaaagcgattccagttgtacctgctcctcactgccaagtcccatcgtacaggatgtgctgtctaaagactcctgtgatccgaatgctggttctcagctgacctttgaccctgagcagccccccaccccgctacggccgaccactcccaaaccccagagccctcaatctcctcagagtcccggcgcgggctctgcatcatgtcattccaaccacagcgccctgtccgccaactcggaggagtccgaagggcgggccgaggagcccgcccaaagggagcccggacctgtgtctttacaagacccactagaggccacccacggagacgagggctctaaagaccttctcgtcaatatcggggttgctgccgggccagaggagaaggagaaggaggaagtcgttccggacggcccctggagacgcagctcttctcaggacgaagaacggaccgaagcacagcgcaccccgaagcgacgctggggctcaggaaggcgaccccgcccacgcccattttcagactatggacaacttgcgtctcggtccctctcaatacccgaggacagtgttgctgcagatcctcagaaggaggacagagttgatgaagacccccaggctagcatgaccagcgctagccctgaggaccagaacgccccagtgggctgtcctaagggggcaaggaggaggcggccaatcagtgtcatcggaggagtgagtctttacggtaccaatcagacagaggaactggacaatctgctgacgcagcccgcctcaagaccacctatgcccgctcaccaggttcctccttacaaggcagtttccgcccggttccgcccatttacattttctcagagtacgcccatagggcttgatagagtcgggaggcggcggcagatgcgtgccagcaatgtgtcctctgacggcggtacagaaccatcggccttagtggacgacaatggatctgaggaggacttctcatacgaggacctgtgccaagcaagcccaaggtatctgcagccaggaggtgaacagctcgccatcaatgagctgatatccgacggcaatgtcgtttgtgccgaggcgctgtgggatcacgtgaccatggacgatcaggaactcgggttcaaggctggggacgtgatccaagtactcgaagcctcgaacaaggattggtggtggggcagatccgaagataaagaagcttggtttcctgcttcttttgtcagactccgcgttaaccaagaggagctgagcgaaaactctagtagcactccctcagaagaacaagacgaagaggcgagccagagccggcaccggcactgtgagaacaagcagcagatgaggactaacgttatccgggagattatggatactgagcgggtgtatataaaacatctgagagacatctgcgagggatatatccgccagtgccggaagcataccggaatgtttacagtcgcgcaattggcgaccatcttcggcaacatagaggatatatataaattccaaagaaagttcctcaaagacctggaaaaacagtacaataaggaggaaccccatctgtccgagattggcagctgctttctgcagaatcaagaaggattcgctatctacagcgagtattgtaataatcaccccggcgcttgtttggaactcgccaatttgatgaagcagggaaagtatcgccacttcttcgaggcctgtcgtctactacagcaaatgattgatatcgctattgatggcttcctgcttacccccgtgcagaaaatttgcaaataccccttacaactggccgaattactgaagtatacaacacaggaacacggagactactctaacatcaaggccgcctatgaagcaatgaaaaatgtggcctgcctgatcaatgaaaggaagcgcaaactggagtccatcgataaaatcgcccgttggcaggtgagcatagttggttgggagggtctagatatcctggacagaagttccgaacttattcacagcggcgagcttaccaagatcacgaaacagggcaaaagtcaacagcggacgtttttcctatttgatcatcagctggtttcatgtaaaaaggacttgctccgtagggacatgctgtactataagggcagattagacatggatgaaatggaacttgtggatttaggtgatgggagggacaaggattgtaatctcagcgtcaaaaatgccttcaaactcgtcagcagaaccacagatgaggtttatctgttttgcgcaaaaaaacaggaagataaggcccgctggctgcaagcgtgcgctgatgaaagaaggcgcgtgcaagaggataaagaaatgggaatggaaattagtgagaaccagaagaaattggccatgcttaacgcgcagaaagccggacatgggaaatccaagggctacaaccggtgccctgtcgcgcctcctcaccagggactccatcctatacaccagcggcatattactatgcccacctccgtcccccagcagcaggtcttcggcttggccgaaccaaagcgaaagtcttcccttttctggcacacctttaaccggctcactccatttagaaagtag

SEQ ID NO: 135990 - DNA, 3948 bp, synthetic construct
  misc_feature 1..3948: note = Description of Artificial Sequence: Synthetic coding sequence
  source 1..3948: mol_type = other DNA
tgacccgtggcaactcaggaacccgatgtacaggggaggtgtgagtgtcaagacgggatcccaggcgatgaaggcctggagctcaggagcgcagattccgcagtcccggtagccatgacacaagcagccgttaggccttgggccccatgtctggagaacatgacaactgctcccaatggactgggccccgggcctgcagctccatgcgctgggtctgatctgaaggatgctaaaatggtgacctccttagcgtgtggcaacggggtatgcggctgttcccccggcggagacaccgacacacaggaagctaaattgtcgcctgctaaattagtgcggttgttctcaacctcgagaaagcgaacgggagcccaccccgaaaggcctcacagcatggtgttagttgggaacagtagcacatggaatactttggctagttttagaaaaatgggatcctttaaaaagctgaagagctccgttctgaaaggcattcaatccagggagggaagtaacgcttgttccaagggggaggcgagcgaacacggactcggcaagtccattcctaacggcgccgtccccggggcacaggcttcaagaggaagcccgctcgctcccggtccagcctgcggtgccctgcggcccgctgagtggggtacactggatggctctgacctcgaggatacggatgacgcttttcagcggtccacccaccgcagccgatcacttaggcgggcatacggcctgggaaggatctgtttattagatgctccccagaaccacgccacgccaaccatcgccactgggcaagtgcccgctgtgtgtgaaatactcgtacgagacccagagaacaattctatgggctataggaggtccaaaagcacggacaatctggcattcttaaaaaagtcatcgtttaagagaaagtctacttccaatctggctgatcttcgcacagcccacgacgcgagggtgccccaaagaactctgagctcctcaagtactgatagccaaaagctgggatccggtcggaccaagaggtggaggtctccaatccgcgctaaggactttgacagggttttcaagcttgtatccaatgtgacggaagcggcctggagacgagagtccccaagatccggtgccccttcaccaggcgaagcaagcctgagattgcaagcacattcccggctccacgatgactactctcgccgcgtaagcagatcaacagaacaggacagccggagggggggtgcggtaatgcacggtaccacagccacctgtactgtcgccccggggttcggatcagccactagcaaggggccccacctcgacgccgatactgcagtctttcctctggaaaccaagagtagttgggctgttgagtccgatagtagctgcacttgctcttcattgccctcccctattgttcaggacgttctgtccaaagattcatgcgacccaaacgccggcagtcagctgacctttgaccctgagcaacccccaacgcccctgcggccaacgacgccaaaaccgcaaagcccccagtcccctcagtcacctggagcaggaagtgcctcatgtcactccaaccacagcgccctgtccgccaatagcgaagagagcgagggtcgggctgaggaacccgcgcaacgtgaaccgggccccgtgagcctccaagacccgttggaggccacacacggagatgagggatccaaggacctactcgtgaatatcggcgtggcggcagggcctgaggagaaagagaaggaggaggtggtcccagacgggccatggcgacgctcttcaagccaggatgaggagcgaactgaagcgcagaggacccctaaacgccggtgggggagtgggcgtagacccaggcctcggcccttttcagattacggtcaactggccagccgttcgttatccattccggaagacagcgttgccgccgaccctcagaaggaggatagagtggatgaggacccacaggcgtccatgaccagtgcctcccccgaagatcaaaatgctcctgtcggctgtccaaagggagcgcggcgaagacggcccatttctgtgatcggaggagtgtcattgtacgggaccaaccagactgaagagctggataatctgttgacgcagcccgcaagtagaccacccatgcccgctcatcaggtgcccccttacaaagcggttagcgcacgatttcgtccttttactttcagtcaatcaacacccatcgggctggaccgagtcggccggagaagacagatgagagcgtcaaacgtgtcctctgatggtggtacagagcctagcgcactcgtcgatgataatggatccgaggaagactttagctacgaggatctttgccaggctagccccaggtacctccagcctggtggggaacagttggcaatcaatgagctcatcagcgacgggaatgtcgtctgtgcggaggccttatgggatcatgtcaccatggatgatcaggagctaggcttcaaagccggagacgtgatacaggtgctggaggcatctaataaagattggtggtggggcaggagtgaggacaaagaagcctggtttcctgcatcctttgttcgattacgggtaaaccaggaggaactgtccgagaactcttccagcaccccatccgaggagcaggatgaggaagcctcgcaatctcgccaccgccattgcgagaacaagcagcagatgcgcaccaacgtcatccgggaaattatggacaccgagagagtttacataaaacacctaagggatatctgcgaaggatatattaggcagtgccggaaacatacagggatgtttaccgtcgcacagctagccactatcttcgggaatattgaagacatctataagtttcaacgcaaatttcttaaagacttagaaaaacagtataacaaggaggagccgcatctaagcgaaatcggaagctgcttcctgcaaaaccaggaaggatttgcgatctacagcgagtattgcaacaaccaccctggggcatgcctggagttggcgaacctgatgaaacagggcaaatacaggcatttctttgaggcttgccgtctgctacagcagatgatcgatattgcaatcgatggtttcctgcttactcctgtgcaaaaaatctgcaagtaccccctccagctcgcagagctgcttaaatatacgacacaggagcacggtgactattctaacattaaagcggcatatgaggccatgaagaatgtggcctgtttgataaacgagcggaaacggaagctggagtcaatcgataagatcgctcggtggcaggtttctattgtggggtgggaagggctggacattctggatcgttctagtgagttgatccatagcggtgaattaaccaagattactaagcagggtaagtcgcagcaaaggacttttttcctgttcgatcatcagctggtgtcgtgcaagaaggatttgctgcggagggatatgctgtactataaagggagactagacatggatgagatggagctggttgacctcggagatgggcgagacaaagactgtaacttatccgttaagaacgcctttaaactggtaagtaggacaactgacgaagtgtatttattttgtgccaagaaacaggaggataaggctaggtggctgcaggcctgtgcagatgagagacgccgcgtacaggaggacaaagagatgggcatggagatcagcgagaatcagaagaagctcgctatgctgaatgcgcagaaggcgggtcatggcaagagtaaaggatacaaccgatgtccggtggcccccccacatcaaggtctgcacccaatacaccaaaggcatattacaatgcctacttctgtgccacagcagcaggtttttggtcttgcagaaccaaaacgcaaatctagccttttctggcatactttcaacagactcaccccttttcgcaaatag

SEQ ID NO: 135991 - DNA, 1851 bp, synthetic construct
  misc_feature 1..1851: note = Description of Artificial Sequence: Synthetic coding sequence
  source 1..1851: mol_type = other DNA
atgcctgctcatcaggtcccaccctataaagccgtgagcgcccggtttagaccctttacgttcagtcagagcacccccataggtctggatagggtgggaaggcgtcgccagatgagggcctctaatgtctcatcagatgggggaactgaaccttctgcacttgtggacgataacggatccgaggaggacttcagctacgaagacctgtgccaagcgagtccccgctatctgcaacccggaggagagcaactggcgattaacgagcttatatctgatggcaacgtcgtctgcgcagaggcgttgtgggaccacgtgaccatggatgatcaggaattagggttcaaggccggggatgtcatccaggtgctggaggcctccaataaggactggtggtgggggcggtctgaggacaaggaagcatggtttccagcaagctttgtccgcttgcgggtgaaccaggaggagctgagcgagaatagttcaagcaccccctccgaagagcaggatgaggaagccagtcagtcccgtcaccgtcactgtgagaataagcaacaaatgaggactaacgtcatacgggagattatggacacagaaagggtttatattaagcacctgagggatatttgtgaaggatacattcggcaatgcagaaaacacacaggaatgtttacagtagctcagcttgcgaccatattcggcaatatcgaggatatctataagtttcaacgcaagttcctcaaagacttggagaaacagtacaacaaggaagaaccgcacctctcggagatcggcagttgcttccttcagaatcaggagggtttcgccatctattcagaatattgcaataaccatcctggcgcttgtctcgaactggccaacctaatgaagcagggcaaatacagacatttctttgaggcttgccgcctactacagcagatgattgacattgcaatagacgggtttctactgactcccgtgcagaagatctgtaaatatcccctccagctagcagagttgttgaagtacactacacaggagcatggtgactattcaaatattaaggcggcctacgaggccatgaagaatgtcgcgtgtctcatcaatgagaggaagcggaagctggaatctattgacaagattgcccggtggcaggtgtctatcgtggggtgggaagggctcgacatactggatcggtcctccgaactaatccattcaggtgagttgactaagatcacaaagcaggggaagtctcagcagcgcactttcttcctgtttgatcatcagctcgtctcctgtaaaaaggacctgttgcgtcgcgatatgctgtattataagggtagactggatatggacgagatggagttggttgacctcggggatggcagagacaaagactgtaatctgagcgtgaaaaatgccttcaagctcgtgagtaggaccaccgacgaagtctatctcttttgtgccaagaagcaagaagacaaggccaggtggctccaagcctgcgcagatgagagaaggcgcgtccaagaagacaaagaaatgggaatggaaattagcgagaatcagaagaaacttgccatgttgaacgcacagaaggccggtcatggtaaatcaaaggtgaggttacagcaagttccatgtgggcccacagccccgggccccgccccccatccgcccgccccgcatcactacgctcacaagcgcccccctgccgccgggctatggccaggcggcacccaggaagaagtgcttgccctactcgcgcatttgcaacaggcccacccactgccagagatgaagaccggcgggtgtgccagcatggaactcggggtcaagaggcggaactag

SEQ ID NO: 135992 - DNA, 1710 bp, synthetic construct
  misc_feature 1..1710: note = Description of Artificial Sequence: Synthetic coding sequence
  source 1..1710: mol_type = other DNA
atggatgcaggcagctcgcgtagtctggaaaatgcagtgaacagaatctaccatgaccagctagtgcccaaaatcaacacgtcaaagaagatgagcacactggctcatccgcctaacattcttgagatgagccaggaaatcaaaaagaattgcggaggaaagcaagttgaaattactttggagaggaccaaaatgacgaagggcatcaaagagaaacagtccaatgatttggaaaaagccgctttcaaaagaaaggcagaaggagaagaaaaacctaccagaaagaagcaagcaaagatcaccgagctcgacaaccagctcattaccatgcccctgcctcatattcctctcaagaacatcatggatgtggagatgaagctagtgtatatcgacgaaatgggcgtacgatacgagttcgtagagtccttcatgagcacaggaagccagcctacttgccaggctgctgagatcgtggatccactgtccgtacataacttcagttttctccctcaaattgacaaatggttacaggtcgcactgaaagacgccagttcttgctaccggcagaaaaaatacgccttggctgcaggccagtttaggaccgcactcgaactgtgttctaaaggcgctgtgctaggcgagccctttgacgcccctgccgaggatattgcttcggtggcaagctttatcgagaccaaactcgttacatgttacctccgcatgcgtaagccggatcttgctttgaatcacgcacacagaagtattgttctgaacccggcttacttccgtaatcaccttaggcaggctaccgtttttcgttgcctagaacggtactctgaagctgcaaggtccgccatgatagctgactatatgttttggctcggaggcggtcgagaggaaagtatttcgaaactcatcaaattatattggcaggctatgattgaagaggccattaccagagccgagtctttttccgtaatgtacacccctttcgcaaccaaaattcgcgcggataagatcgagaaagtcaaagatgccttcactaaaacccaccctgcctacgccgaatacatgtatactgacctgcaggctctgcatatgttaccacagacagtggattggtcctccttcccacctcaacagtatctgctgacgctgggcttcaaaaataaagatgacgggaagtttttggagaagatatcgagtcgaaagttgcctatctttaccgaacataaaacaccctttgggctgacccgtgaggacactgttagacagatggaaacgatggggaagagaatcctccctatcctggactttatcaggagcactcagttaaacggctccttccccgcctcctcaggcgtgatggagaagctgcaatatgccagcttgctttcacagttgcagcgagttaaggagcaaagtcaggtgatcaaccaagccatggctgagctggctaccataccatacctgcaggacatctcccagcaggaggctgaattactacaatccctcatggctgacgctatggatacactggagggccgaaggaataataatgagcgtgtatggaatatgattcagaaagtgggacagatcgaggacttcctttatcagttagaggatagctttctgaagacaaaaaaactgaggaccgctcggcggcaaaaaactaagatgaaaaggttgcagacagtgcaacaaagatag

SEQ ID NO: 135993 - DNA, 1086 bp, synthetic construct
  misc_feature 1..1086: note = Description of Artificial Sequence: Synthetic coding sequence
  source 1..1086: mol_type = other DNA
atggctaccttggcgcgactgcaggcgaggtctagcaccgtgggtaaccagtactactttcgcaacagcgtggttgaccccttccgcaagaaagagaacgacgcagccgtaaaaatccagtcatggtttcgaggttgccaagtccgggcatatataagacaccttaaccgcatcgtgaccattatccaaaagtggtggcgaagttttctgggtagaaagcagtaccagctcaccgtgcaggtggcatactacacgatgatgatgaatctttacaacgccatggcggtgcggatccaaagacgctggcggggctacagggtgcgaaaatacctcttcaattactactatctgaaggagtatttgaaggtagtaagtgagacgaatgatgccatcagaaaggcattagaagaatttgctgagatgaaagagagagaggagaaaaaagcaaatttagagagggaggagaaaaagagggactatcaggcacgcaagatgcattacctgctgagcaccaagcaaatccctggcatatacaacagccccttccgcaaagagccagacccctgggaacttcagctccagaaggccaagcctctcacacacaggcggcccaaggtcaagcagaaagactccacctccttaactgactggttggcgtgtacctctgctaggtccttcccacgctccgagatcctgcctccaatcaacagaaaacagtgccagggccccttcagagatatcaccgaagtgttggagcagcgctaccgccccttggagcctacactccgggtcgccgaacctatcgatgaactaaagttggctagggaagagttacgcagggaagagtggcttcagaatgttaatgacaatatgttcctgcccttttcctcgtatcacaaaaacgaaaagtatattccgtcaatgcatctttcgagtaaatatgggcctataagctacaaagagcaattccggagtgagaaccctaagaaatggatctgcgacaaggatttccaaactgtcctgcctagtttcgaattattttctaagtacggaaagctctactcaaaggccggccagattgtatag

SEQ ID NO: 135994 - DNA, 1617 bp, synthetic construct
  misc_feature 1..1617: note = Description of Artificial Sequence: Synthetic coding sequence
  source 1..1617: mol_type = other DNA
atggcagagaatctgaagcgactcgtatcaaatgagacattgagaaccctgcaggaaaagctagacttttggttgaaagagtataatacaaatacttgcgaccaaaatctcaaccactgcctcgaactgattgaacaggtcgccaaggttcagggacagcttttcggaatccttactgccgcggcacaggaaggcggtagaaacgacggggtggaaacaattaagagtcgactgctgccctggcttgaggcatccttcaccgccgcttccctgggcaagtcggtggactcaaaagtgccttcactgcaggacacctttgatcgggaacgtcacaaagatcctagcccaagggatcgagacatgcagcagcttgactctaacttgaattcaacccgatcacagtgcaatcaggtccaggacgatctcgtggaaacagaaaaaaacctcgaggaatcgaaaaatcgtagcgcaattagcttgctggccgccgaggaagaaattaatcagcttaagaagcaactcaaaagcctgcaggcacaggaggatgcacggcaccggaacactgaccaacgctctagcgagaacagacgctctgagccttggagccttgaggagcgtaagcgcgagcaatggaactctctcaaacagaacgccgaccagcaagatactgaggcaatgtcggactataaaaagcaacttagaaatcttaaagaagagattgctgtgctttcagccgaaaagagcgcgcttcaaggtcggtcatctcgcagccgcagtccaagccctgcacccagatctaggagttgcagccgttctagatctgcgtccccttctaccgctgtgaaggttagacgtccgagccccaaccggtccaaactgtccaatgtggcccgcaaagccgcccttctaagccggttctctgattcctattcccaggccaggctcgacgcccaatgcttactgcgcaggtgcatcgacaaagccgaaaccgtgcagcggatcatctacattgccactgtggaagcgtttcacgtcgccaagatggcattccggcacttcaagatccatgtcagaaagtctctgacacctagctacgtgggtagcaacgacttcgagaacgccgtcctggactacgttatatgccatctcgatctttacgactcacagtcttctgtcaacgacgtgatccgtgcaatgaatgtcaatccgaagatctcatttccgcctgtggttgatttttgcttactatccgacttcatccaagaaatctgttgtatagctttcgccatgcaggctctggaaccgccactggacatcgcctacggagccgatggagaggtattcaacgactgtaaatatcgtcggtcatacgactccgacttcacagcgcccctcgttttgtatcacgtctggcccgcactgatggaaaacgactgcgttattatgaaaggcgaggctgtgacaaggagaggagccttctggaattctgtccggtccgtgtctaggtgtcgatctcgatctctgtcccctatatgcccgagatcacagatcggactgaacacaatgtcccgctcacgaagccccagtcccattagatgcgggttgcctcgcttttag

SEQ ID NO: 135995 - DNA, 504 bp, synthetic construct
  misc_feature 1..504: note = Description of Artificial Sequence: Synthetic coding sequence
  source 1..504: mol_type = other DNA
atgataattacgacttggatcgtgtatatcctggcacgcaagggggttggtctgcccttcctccctattacttcctctgatattgacgtggtagagtctgaagctgtatctgttcttcatcactggctgaaaaagactgaggaagaggcctcccgaggtatcaaggaaaaacttagcattaatcacccctctcaaggtgtgagggaaaaaatgtccacagatagcccccccacgcacggtcaggacattcatgtgacacgtgatgtcgtgaaacaccatttgagtaagagcgatctgttggccaatcaatcgcaggaagtcctagaggaacggactcgtatccagttcatccggtggtctcatacaagaatttttcaggtgccctccgagatgactgaagatatcatgcgagaccggatagaacaagtgcgtcggtctatttcccgcttgaccgacgtaagcgctcaggacttctcaatgaggccttcttccagtgattgttag

SEQ ID NO: 135996 - DNA, 504 bp, synthetic construct
  misc_feature 1..504: note = Description of Artificial Sequence: Synthetic coding sequence
  source 1..504: mol_type = other DNA
atgatcattactacatggattgtttacattttggcccggaagggagtgggtctgccctttctgcctattacttcatccgatattgacgtggtagagtccgaagccgtgtcagtcctgcatcactggctcaagaaaactgaggaagaagcaagtagaggtattaaggaaaagctgagcataaatcatccgtcacagggcgtaagagaaaaaatgtctaccgacagcccccccacccacggccaggacatccatgttactagggatgtagtgaagcaccacttatcaaagtccgatctactggccaatcagtcacaagaagtcctggaggaacgcaccaggattcagtttatcagatggagccacaccaggatattccaggtgccctccgagatgacggaggacatcatgcgagatagaatcgagcaggtgcggagatcaataagccggctgaccgacgtgtccgctcaagacttctcaatgcggccctcaagtagcgactgttag

SEQ ID NO: 135997 - DNA, 1563 bp, synthetic construct
  misc_feature 1..1563: note = Description of Artificial Sequence: Synthetic coding sequence
  source 1..1563: mol_type = other DNA
atgggcaagccatctagtatggatacgaagtttaaggacgacctattccgaaagtatgtgcagttccatgagtcaaaggttgacacaactacctctaggcagcggccaggaagcgacgagtgcttgagagtcgcagcttccactctattgtctctccataaggtagatcccttttacaggtttagactaatccagttctacgaggtggtcgagtcctcgttgcgctctcttagtagctcatccttgagggcgttacatggtgcgttttcgatgctcgagaccgttgggatcaatctgttcctgtacccttggaaaaaagaattcaggtctatcaaaacgtatacaggtccgtttgtgtattacgtgaagagtacactgcttgaggaagatatcagagccattttgtcgtgcatgggatacacccccgagctcggcaccgcctataaactaagagaactggtggagactttgcaggtgaaaatggtcagttttgaactgtttctcgctaaagttgagtgcgaacaaatgctcgagatccatagccaggtgaaagacaaggggtacagcgagttggacatagtgtctgagcggaagagtagtgcagaggatgttcggggttgcagtgatgccctccggcgtcgcgccgagggccgagagcatttgaccgctagcatgagtagagtcgccttgcagaagtcagcctccgagagggccgccaaggactactacaaacctcgtgtcacgaagccctcaaggtctgttgacgcttacgacagctattgggagtctcgtaagccgccgctcaaagcatcactgtcgctgcgcaaggagccagtcgcgacagacgttggtgacgatcttaaggatgaaatcatcaggccttcccccagcttgttgacgatggcctcatcccctcacggcagtcctgacgtactgcctcctgcttcccccagcaatggcccagctctgctgcggggcacctacttcagtactcaagacgatgtggatctctataccgattcagagccccgagccacataccgaaggcaggacgccctcaggcccgatgtatggctgttgcgcaatgatgcgcattccctgtatcataaacgctctcctcccgcgaaagagagtgccttaagtaaatgccaaagctgtggcctatcatgcagttccagcctgtgtcaaagatgtgattccctgttaacttgcccccccgcctccaaaccatctgccttcccaagtaaggcgagtacacatgattccctggcccacggagcatcattgcgggaaaaataccctggccaaacacaaggcctggatcgcctgccacacctccactccaaatccaagccttcgacaacccccactagcaggtgcggattctgcaacagacctggcgcgacaaatacttgcacccagtgctctaaggtgtcctgtgatgcatgcttatcagcctaccattatgacccctgttataagaaaagtgagctacacaagtttatgccaaataatcagttaaactataagtcaactcaactttcacatcttgtttaccgctag

SEQ ID NO: 135998 - DNA, 1563 bp, synthetic construct
  misc_feature 1..1563: note = Description of Artificial Sequence: Synthetic coding sequence
  source 1..1563: mol_type = other DNA
atgggcaagcctagctccatggacacgaaattcaaagacgatctgttccggaagtatgtgcagttccacgaatcaaaggtggataccaccacaagtcgccagaggccaggaagcgatgaatgtcttagagtggctgcaagtacccttctctctctgcataaggtggatccgttctatcgttttcgactcatccagttttatgaagtcgtggagagttccctgcggagcctgtcctcaagcagtctgcgcgctctccacggcgccttctccatgttggagacagtgggcatcaacttattcctatacccctggaaaaaggagttcagatccataaaaacctacaccgggcccttcgtgtactacgtgaagagcacgcttctcgaggaagatatcagggccatactgagctgtatgggatacacccccgagctgggcaccgcttataagttacgcgagctggtggaaacacttcaggtgaaaatggtgagcttcgaactcttcctggcgaaggtggagtgtgaacagatgcttgagattcacagccaggtcaaggacaaaggatatagcgagctcgacatcgtctcagaacgtaagtcgagtgctgaggatgtcagagggtgttctgatgctctcaggcggcgagccgaggggagggaacacctcactgccagtatgagtcgagtggctctccagaagagcgcatccgagcgcgctgccaaagattattacaagcccagagtgaccaagcccagcagatcagttgatgcatacgattcctactgggaaagtcgtaaaccacctttgaaagcctcattgagcctgcgaaaagagccggtggctaccgatgtcggagatgacctgaaggatgaaatcatcagaccctccccctctcttttaaccatggcctctagcccacacggctcgcctgatgtccttccacccgcatccccctccaacggcccagccctgctgaggggtacctacttcagcacacaagatgacgtagacctgtacaccgactcggagccaagagctacctaccggagacaggatgctctgcggccagatgtgtggctgctgaggaacgacgcccacagcctctaccataaaagatcccctcctgctaaagagtcagctcttagcaagtgccagagttgcgggctatcttgcagttcatctttgtgccaacgatgcgacagcctgctgacctgtccacctgcttcaaaaccgagcgccttccctagcaaggcctcaactcatgacagcttggcccatggcgcctccctacgagagaaatatccgggacagactcagggtctggatcgcctgccgcacctccactctaaatcaaagccttctacaactcctacttctagatgcggtttctgcaatcgtccaggggcgaccaacacatgtactcaatgttccaaagtgagttgcgacgcgtgtctgtctgcctaccactacgatccatgttataaaaagagcgagcttcacaaatttatgccgaataatcagctgaattataaatcgactcagttaagtcaccttgtttatcggtag

SEQ ID NO: 135999 - DNA, 1152 bp, synthetic construct
  misc_feature 1..1152: note = Description of Artificial Sequence: Synthetic coding sequence
  source 1..1152: mol_type = other DNA
atggggtatacacccgaattagggactgcctataagctgagagagctggtggagacattgcaggtcaaaatggtctcttttgagttattcctcgccaaggtcgagtgcgaacagatgctcgagattcatagccaggtgaaggacaaagggtactccgaattagatatagtctcagaaaggaagtccagtgccgaggatgttcgggggtgtagcgatgcgctcaggcgtagagctgagggccgagagcatctcaccgctagcatgtcaagagtagctctccaaaaatcggcatcagagcgcgcggcaaaagattactacaagccacgggtgacgaagccttcccggtcagttgacgcttacgacagctactgggaatctcggaaaccaccgttgaaggccagcttatccttaagaaaggagcccgtcgcaaccgacgtgggcgacgacctcaaagacgaaatcatacggcccagtccaagtctgcttaccatggccagtagcccccacgggtcgcccgatgtgctgccaccagcctccccgtccaatggcccagccctacttcgcggaacctatttctcgacacaggacgatgttgatctttatacagacagcgaacccagggcaacctataggaggcaggatgctctaagaccagacgtgtggttattgcgaaacgatgcccacagtctctatcacaagagaagtccgccagccaaagagtccgcgttaagcaaatgtcagagctgtgggctctcatgttcaagctccttgtgccagcgctgcgactcattactgacctgtcctcccgcaagcaaaccttcagccttcccctctaaagcatccacccacgattcgctcgcccacggcgcttctttgagggaaaaataccccggtcagacccaaggcctggaccggctacctcatctccactcgaagagcaaacccagtacgacgcccactagccgttgcggcttttgcaatcggcccggcgccactaacacgtgcacccaatgctcaaaggtgtcctgtgatgcttgcctgtccgcctaccattatgatccttgctacaaaaagagtgaattgcacaaattcatgcctaataatcagttgaattataagtcaacccagctgtctcacctggtctacaggtag

SEQ ID NO: 136000 - DNA, 2409 bp, synthetic construct
  misc_feature 1..2409: note = Description of Artificial Sequence: Synthetic coding sequence
  source 1..2409: mol_type = other DNA
atgttaggagctcgtgcatggctggggagagtactattgctgccacgagctggagctggtctagccgccagcaggagatgtccgggagtgtggccacggacctggcctcatcgtagcccgagtagagggagcagtagtagggacaaggatcgctccgccacagtgtccagtagtgtgccgatgccagccgggggaaagggttcccacccttcttctaccccccaaagggtgccaaaccggttgatccatgagaagtccccatatcttctccagcatgcttacaaccctgtggactggtacccatggggtcaggaggcttttgataaagcacggaaggaaaataagcctatattcctgtccgttggctattcaacgtgtcattggtgccacatgatggaggaggaaagcttccagaatgaagagattgggcggctgctgtctgaggacttcgtgagtgtcaaggttgaccgggaggagcgccccgatgtggacaaggtttatatgacattcgtccaggcaacaagtagcgggggcggctggcctatgaatgtttggctaacccctaacctccagccttttgttggggggacctatttcccgcctgaagacggactgactagggtcggctttcgcactgtgcttttgcggatacgagagcaatggaaacagaataagaatacacttttggaaaatagccagcgtgtcaccacagcactgctggcccgttccgagatctcagtgggagaccgtcagcttcctcctagcgcggccaccgtcaacaaccgatgtttccaacagttagacgagggatacgatgaagaatatgggggcttcgcagaagcacccaagttcccgacgcccgtcatcctctctttcttattttcttactggctgagccataggttgactcaagacggcagcagagcccagcagatggccctgcatacactgaagatgatggctaatggaggaatcagggaccatgtcgggcagggttttcacagatacagcaccgatcgtcagtggcacgtgcctcacttcgagaaaatgctgtacgaccaagctcagttggccgtggcctatagtcaggcctttcagctgagtggggatgaattctacagcgacgtagctaaagggatcctccagtatgtggccaggagcctgtcgcatcgctccggcggtttctattctgctgaggatgcagacagcccacccgaacgggggcaaagacctaaggagggtgcatactatgtgtggacggtgaaggaggtgcagcagcttttgccagagccagtccttggcgctacagagccactgacatcaggacagctgcttatgaaacactatggcctcacagaagcagggaatatctctccttcacaggatccgaagggagagttacaaggccagaatgtcctgaccgtgcgatactctctggagcttaccgccgcgcgttttggactcgacgtcgaagcggtacggaccctcctcaacagcggactcgaaaagctattccaggctaggaagcatagaccgaagccccacctcgatagtaagatgcttgccgcctggaatgggctgatggtcagcggttatgctgtcacaggcgccgtcctggggcaggaccgcctaattaattacgccacaaatggggctaagttcctaaaacgtcacatgttcgatgttgctagtggtaggttaatgcggacctgttacactgggcctggcgggaccgtggaacacagcaaccctccatgttggggcttcctcgaagattatgcattcgtagtacgtggactgttagacctctacgaagcctcgcaggagtcggcctggctagaatgggcgctccgcctgcaggacactcaggataagcttttctgggacagccagggaggcggttacttctgctctgaggctgagttgggggctgggctgccgttacgtctcaaggatgatcaggatggtgctgaaccttctgcaaacagcgtgtcagcgcataatttgttgcgtttacacggattcactggccacaaggactggatggacaagtgtgtgtgtctgttaacagccttctcagagaggatgcgccgagtgcctgtggctctcccagaaatggtcagggccctcagcgcccagcagcagaccctcaagcagatagtgatatgtggcgacagacaggcaaaggacaccaaggcgctagtgcagtgtgtccactctgtgtacattcctaacaaagtgttgatactggccgacggggaccctagcagctttctgagcaggcaattgccttttttgagcacactccggcggttagaggaccaagcgacagcctacgtgtgtgagaatcaggcctgctccgttcccatcactgacccgtgtgaactcagaaagcttctgcacccatag

SEQ ID NO: 136001 - DNA, 2361 bp, synthetic construct
  misc_feature 1..2361: note = Description of Artificial Sequence: Synthetic coding sequence
  source 1..2361: mol_type = other DNA
atgctcggggccagggcatggttagggagagtcctgttgttgcctagggctggagccgggctggccgcttctcggcggggctcttcttctcgggacaaagaccgctccgcgacggtctcaagctccgtgcccatgcctgcaggaggaaagggcagccatccctcttctaccccgcagagagttcccaatcgactgatccacgagaagtccccttacttactgcagcacgcatacaacccagttgactggtatccatgggggcaggaagctttcgacaaagctaggaaggaaaataaacctatttttctgtccgtaggctactccacttgtcactggtgtcacatgatggaggaggagtcctttcaaaacgaggaaattggccgactgctgtctgaggacttcgtcagcgtcaaggtcgacagggaagagagacccgacgtggacaaggtgtatatgacctttgtacaggcaacgtcctcgggtggcggctggcccatgaatgtgtggcttacaccaaacttacagcccttcgtgggaggaacatactttcctcctgaggatggcttgacccgggtcggcttccggactgtgctgctcaggattcgcgaacagtggaagcagaataagaatactttactcgagaattcccaaagggtcacaaccgccctgcttgcacgatcagagatttctgtgggggataggcaattgcccccatctgccgccacggttaacaaccgctgttttcagcagctggacgaaggttatgacgaggagtatggaggattcgcggaggcgcccaaattcccaactcccgtgattctgtcctttctcttttcctattggctgtcccatcgattaacacaggatggttctcgggcgcagcaaatggccctacatacactcaagatgatggcaaacggaggcatcagggaccacgtcgggcaggggttccaccgttactcaacagaccggcagtggcacgtcccacactttgaaaagatgctgtacgaccaggcacagctcgccgttgcctactctcaggccttccaactgagcggggacgagttctatagcgacgtggcaaagggcatactgcagtatgtggcgcgtagtttgagtcaccgatcaggaggattttactcagctgaggacgcagattcgcccccggagcgagggcagcggcccaaggagggagcctattatgtgtggacagttaaggaagttcagcaattgctgccagagccggtattaggagccacggagcctctcacttctggtcagctgctaatgaaacactacggactaacagaggctggaaatattagcccatcgcaagatcctaagggagaattacagggacagaacgtccttactgttcgatattcccttgagctgacagctgccagattcgggctggatgtcgaggccgtgcgcacactgctgaattcaggacttgaaaagctcttccaggccaggaaacatcgacctaaacctcacctcgattccaagatgctcgccgcttggaacggactgatggtctccggctatgccgttaccggtgcagtgctcggccaggacaggctcatcaattacgcaaccaatggcgccaagtttctcaagaggcacatgtttgatgtcgcgagtggtaggctgatgcgtacctgctatacaggaccaggcggtactgtggaacatagcaatcctccatgctggggcttcctggaagactacgcatttgtagtccgcggtctgttagatctttacgaagccagtcaggaatccgcctggctggaatgggccctgcgtctccaggacacacaggataagttattttgggatagtcagggcggcgggtatttctgtagcgaagcagaactgggggccggcctgccattgcgcttgaaggatgatcaagatggcgcagagccaagcgctaattccgtatcagctcacaaccttctgcggttacacggtttcacaggccataaggattggatggacaaatgtgtgtgtctgctgactgctttcagtgaaagaatgagaagggtccctgtggcccttcccgagatggtgcgggctctgtctgcccagcagcaaacactaaaacaaatcgtgatctgcggcgatcgccaggctaaggataccaaggctctggtccagtgcgtgcattcagtgtacattccgaacaaggtgctcatactcgccgatggtgatccaagctcattcctgtctcgacagttaccattcctgtccaccttgagacgtctcgaagaccaggccaccgcgtatgtgtgcgagaaccaggcctgcagcgtcccgattaccgatccctgcgagctgaggaagttgttacacccatag

SEQ ID NO: 136002 - DNA, 2229 bp, synthetic construct
  misc_feature 1..2229: note = Description of Artificial Sequence: Synthetic coding sequence
  source 1..2229: mol_type = other DNA
atgccggccggcgggaagggcagtcacccctccagtaccccgcagagagttcctaatcgtctaatccacgagaaatccccttacctgttgcagcatgcttataatcctgtcgactggtacccctggggacaggaggccttcgataaggctcgcaaggaaaacaagcctatcttcctctctgtgggctattcaacatgccattggtgccacatgatggaggaggagtcttttcaaaacgaagaaatcggcagactattgtcagaagacttcgttagtgtgaaggtggatcgagaggagaggcccgacgtggataaggtctacatgacgtttgtacaggctactagttctggcggcgggtggccgatgaacgtgtggctgacaccgaacctccagccctttgtgggcggaacttatttcccacccgaagatgggttgaccagagtgggcttcagaacagttctattgcggatcagagagcagtggaagcagaacaagaatacactgcttgaaaattcgcagcgagtgacaactgctcttcttgccaggagcgagataagtgtgggagatcgacagttacccccctcagctgccacagtgaacaatcggtgcttccagcagctggacgaaggctacgatgaagagtacggtggctttgctgaggccccaaagtttccaacgccggtgattctgagctttctcttctcgtactggttgtcacatcgcttaactcaggacggctctagggcccagcagatggccctacacacccttaagatgatggccaacgggggaattcgggatcatgtcggacaggggtttcataggtactcaactgacagacaatggcatgtaccccatttcgagaaaatgttatacgatcaggcacaacttgctgtcgcttactcccaagcctttcagctgtctggcgatgaattttactccgatgttgccaaaggaattctgcagtatgtggcccgttccctgtcacacagatcaggggggttctatagcgccgaggatgcggactcacccccggaacggggtcagcgaccaaaagagggagcctattacgtttggaccgttaaggaggttcagcaattgctcccagaaccagtgctgggcgccactgaaccgttgacatccggccagctactgatgaaacactatgggctgacggaagcggggaatatttccccatcacaggatccaaagggggagcttcagggacagaacgttctaacagtacggtactcgttagaattgaccgctgcacggttcgggctcgatgtggaggcagtccgcaccctattgaattctggcctggaaaagctcttccaggctcgaaagcaccgacccaaacctcatctggacagtaagatgctggcagcatggaacggactcatggtgtcgggttacgccgtgaccggggcagtgttgggtcaggatcgactcatcaactatgccaccaatggcgctaaattcctcaagcgacatatgttcgacgtagcttccgggagactgatgagaacatgctatacgggacctggagggacagttgagcactcaaacccaccctgctggggcttcctggaagattatgcctttgtagtccgagggctgctagacctgtatgaggcctcacaggaaagcgcgtggctggagtgggctctccgcctgcaggatacacaggataagttgttctgggatagccagggtgggggctatttctgcagtgaagcggagctgggtgcgggcctgcccttgaggcttaaagacgaccaggacggagcagagccctctgcaaactctgtcagtgcccacaaccttctcagactccacggctttaccggccacaaggattggatggacaaatgcgtttgcctattgacagctttcagtgagcggatgaggagagtacccgttgccctgccagagatggttagagcgctgtctgcacaacagcagaccctaaagcaaatcgtgatctgcggcgacaggcaggcaaaggacaccaaggccctggttcagtgtgtccactctgtgtacatccccaataaggtgctgatcctagccgatggggacccaagtagttttctgtctcgtcagctgcccttcctgtctacactgcggagactcgaagaccaggccactgcttatgtgtgcgaaaaccaggcttgctctgtcccgataacagacccttgcgagcttcgaaaattgcttcatccctag

SEQ ID NO: 136003 - DNA, 228 bp, synthetic construct
  misc_feature 1..228: note = Description of Artificial Sequence: Synthetic coding sequence
  source 1..228: mol_type = other DNA
gggcagggacaccagggtcccgggcagtgcgttcactctgtctacatcccaaacaaagtgctgatcctggctgatggagaccccagctcttttctgagtcgccagctaccatttctaagtacactgaggcggctggaagaccaggcgactgcttatgtttgtgaaaatcaggcatgttccgtgcccatcacagacccttgcgagttgcgtaaactgttgcatccatag

SEQ ID NO: 136004 - DNA, 132 bp, synthetic construct
  misc_feature 1..132: note = Description of Artificial Sequence: Synthetic coding sequence
  source 1..132: mol_type = other DNA
atgctgggcgccagagcctggctgggtagggtgctgcttctgcctcgggctggcgcgggcttagctgccagccgcaggtctgcatgttcccctactagcaggcttaacagcctccgctcactgattccttag

SEQ ID NO: 136005 - DNA, 918 bp, synthetic construct
  misc_feature 1..918: note = Description of Artificial Sequence: Synthetic coding sequence
  source 1..918: mol_type = other DNA
atggcagccgccgggcaggagaagggttatctcacacagaccgctgccgccctggacaagtctccgtctctgtccccacagctcgcagccccgatacgagggagacctaagaagtgccttgtgtaccctcatgctcctaaatccagtcgactgtcgcgttctgtgctgcgttggttgcagggtctcgacctttcattttttccacgtaacattaatcgcgatttttcaaatggcttcctgatcgccgagatattctgtatctactacccctgggaactggagctgtcttcctttgaaaacggcacaagtcttaaagtgaagctcgacaactgggcacagctcgagaaattcctggcacggaagaaatttaaactgccaaaggagctcatccatggtactatccattgcaaggctggcgtgcccgaaattctgattgaggaggtatacacgttgcttacacaccgcgagattaagagtattcaggatgatttcgtaaacttcacagactatagctaccaaatgcggttaccgcttgtttcgcgctcaacagtgtcaaaatccatcaaagacaacataaggctgtccgagctcttgtcaaaccctaatatgcttaccaacgagttgaaggccgagttcttgattctgctgcatatgctccaaagaaaacttgggaggaagctgaatcctgagtggttcgacgtcaaacctacggtgggcgaagttaccttgaaccaccttcccgctcaggctagcggtagacgctacaatttgaaagttaagcgtggtagggtagtgcccgtgctgcctaatatcggatcaggtggttcaagtcacagggaaatccacgtgaaacaggcaggccagcactcttactactccgcaatgaagcccatccggaacatggataaaaagccatag

SEQ ID NO: 136006 - DNA, 2682 bp, synthetic construct
  misc_feature 1..2682: note = Description of Artificial Sequence: Synthetic coding sequence
  source 1..2682: mol_type = other DNA
atgtcctccaaaaagaaccgcaaacgcttaaatcagtctgccgagaacggatcatccttgccgtcagcagcatcctcctgtgctgaagcgagagcaccctccgcgggctccgacttcgctgccacctccggtacccttacggtgacaaacctgctcgagaaggtggatgacaagatcccaaaaacttttcagaattctctcattcatctggggttgaataccatgaagtctgccaacatctgtataggccggccggtacttttgacatcattaaacggcaaacaggaggtttataccgcatggccgatggccgggttccccgggggaaaggtcggcttgagtgaaatggcacagaaaaacgtgggagtgcgccctggtgacgccatccaggtgcagcctcttgtaggggcagttttacaagccgaggagatggatgtggctctgagtgataaagatatggagattaacgaggaagagctcactggatgtatcctgcgcaaactggatgggaagatcgtgttacctggaaacttcctctattgcactttctacggacggccttacaagctgcaggtcctgcgcgtcaaaggcgctgatggcatgattcttgggggccctcagagtgattccgacaccgatgcccagcggatggcttttgagcagtcttccatggaaacctccagcctcgaactctccctgcagctgagccagctggatctggaagatacacaaattcccacctctaggagcactccgtataaaccgattgatgacagaattactaacaaggccagcgatgtcttgctcgatgttacacagagcccaggggatggctccggtcttatgcttgaggaagtgacaggcctcaaatgcaactttgagtccgccagagaggggaatgagcagctgacagaggaggagagacttctgaagttcagtattggggccaaatgcaacacagacacattctacttcatcagctcaactacacgggtcaattttacagaaatagacaagaatagcaaggaacaggacaatcagtttaaggtcacctatgatatgattgggggcctgagtagccagctcaaagcaatacgcgagattatcgaactgcccctgaagcagcccgagctttttaaatcctatggcatccccgctcccaggggcgtgcttctctatgggccgcccggaactggaaaaaccatgattgcccgagcagtcgccaatgaagtaggagcctacgtgtctgttatcaatggtcccgagattatctccaagttctacggagagacggaagccaagttaaggcagatctttgcagaggccaccttacgccacccatcaatcattttcattgacgagctcgatgccctctgccccaagagggagggcgcccagaacgaggtcgagaagagggtcgttgcctctttgctcacactgatggatggcatcggctctgaggtctctgaaggacaggtactagtgcttggcgcaaccaacaggccccacgctcttgatgcagcacttagacggccagggagatttgacaaggagatagaaatcggtgtgccaaacgctcaggaccgcttggatattcttcagaagttactgaggagagtgccccacctgcttaccgaagctgagctgcttcagctggcaaactctgcgcacggctacgtgggcgccgatctgaaagtgctctgtaatgaggctggcctctgtgccctcagacggattctgaaaaaacaaccgaatctacccgatgtgaaagtcgccggcttggtcaagatcaccttaaaggatttcttacaggcaatgaacgatatcagacctagtgcaatgagggagatcgccatcgatgtccctaacgtctcctggagcgacatcggaggactggaatccattaaactcaaactggaacaagctgtcgagtggcccctgaaacacccagaatcatttatacgcatgggcatacagcccccgaagggggttctgttatatggcccccccggatgctccaagactatgatcgccaaggccctggctaatgaatccggactgaatttccttgctatcaaagggccagagctgatgaataaatacgtgggagaatctgaacgcgccgtcagggagacgtttaggaaggcccgtgctgtggccccttcaatcattttctttgatgaactggatgcgttagccgtggaacgcggcagttctctcggggccgggaatgtggccgaccgggtcctggcccaacttctgacagaaatggatggcatcgaacagctcaaagacgtgacaatccttgccgctaccaatcgacctgataggatagacaaggcgctcatgcggcccggaagaattgaccgcattatttacgtaccactgcctgacgccgccacccggcgggagatcttcaaactccaattccactctatgccagtctccaacgaggtcgacttggacgagttaattctccagaccgacgcctattctggggcagagatagtggcagtttgccgggaggcagcactgctggctctggaagaagatatccaggccaaccttattatgaagaggcattttactcaggccttgtccacagttacacctcggatcccggaaagtctccgtcgtttttacgaggattaccaggaaaagtccggcttgcacaccctgtag

SEQ ID NO: 136007 - DNA, 750 bp, synthetic construct
  misc_feature 1..750: note = Description of Artificial Sequence: Synthetic coding sequence
  source 1..750: mol_type = other DNA
atgcagctggacaagttcatctatcatctggcaccggtcgaaaagtctcatgggagactccagaaccgtacgagccgatcgcagaaaaagaaatccaaaagcccggagcggagcaagtactgtatcaacgccaaaaactacgagcagcctactatttcctcaaagagtcactctccatctccttacacaaaacggcgaatgtgtgagttgagcgaggatacccggcgaaggctggcgcacctgaacctaggaccctacgagtttaagaaagagaccgacaagcctcctttcgtgatccggcacgtggatcctccttcgcctcgggcagatactctgttgggctcctcaggcagggattgcgaaagggacggctggagcagggtacacaacgaccacagtcatcttggctgctgccgtccaaaggactataaagttataaggacaccccacggcagagactttgatgactctcttgagaaatgcgaggaatatctgtctccgaggagctgtagcaagcctcgccactcggcccgtacacttctcgtccactctgcccctagcacaatgcccaaacacagcccctctccagtgcttaaccgagcctcgctgcgagagcggtttcattcagactggtgttcgccaagcaactgtgatgaaatacacgacagagatgagagggatttggaaaaggacgatgagttagaacttaagcgctccttgctgtgcagagactcggcctatgactcatag

SEQ ID NO: 136008 - DNA, 1419 bp, synthetic construct
  misc_feature 1..1419: note = Description of Artificial Sequence: Synthetic coding sequence
  source 1..1419: mol_type = other DNA
atgcccaaagtgaaggcactgcagtgcgctctggccttagagatctcatccgtgacttgtccgggagtggtgttgaaagacaaggaggacatttacttaagcatttgtgtctttggccagtacaagaagacccaatgtgttcctgcaacatttccccttgtgtttaacgccaggatggtcttcgagaaagtgttccctgacgcagttgatccgggtgatgtggttacccaactcgagtatgatacagctgtgttcgaactgatccaactggtcccccccgttggcgagacccttagtacatatgacgaaaacactcgcgacttcatgtttcccggcccaaaccagatgagcgggcatcacgattcaaacagacaggtgaccatgcggagaataagtggcctgcgcggtaacgcccctagacttgaattcagcacaaccagcgtgatcactgagtgtctcatcagctcccggaagtgccacacccaagacaagtttatatatcaccttgcgcccgtggagaaaagccatggacgactgcagaaccggacatcacgcagccagaagaagaaaagtaagagcccggagagatctaaatactgcattaacgccaagaactacgagcaacccaccatttcgagcaagtcccactcacccagtccgtacaccaagagacgaatgtgcgaattgtcagaggatactagacggcggcttgcccatctgaatctgggaccctatgagtttaagaaagagacggacaagcccccctttgtgattcgacacgtagacccgccctccccaagagcagatacactcctgggctcaagtgggagggactgcgaaagagacggatggtctagagtccataacgatcactcccacctagggtgctgtaggcccaaggattacaaggttattagaaccccacacggaagagactttgatgacagcctggagaagtgcgaggaataccttagtcctcggtcttgctcaaaaccccggcactcggccaggacactactggtgcacagcgcacccagcaccatgccaaagcactcccctagtcccgttctgaatcgggcgtccctaagggaaagatttcatagcgactggtgcagcccatctaactgcgatgagatccatgaccgtgatgagagagacctggaaaaggacgatgagctagaattaaagaggtctttgctttgtcgagattctgcatatgatagcgatccggaatattcgtcttgtcaacaaccacgtggaaccttccatctggacgacggcgaatactggtcaaaccgtgccgcaagctataagggcaaaagccaccggcccatcttcgaaaatagtatggacaaaatgtaccggaatctctataagaaggcatgtagttcggcttcccacacacaggagtccttttag

SEQ ID NO: 136009 - DNA, 1467 bp, synthetic construct
  misc_feature 1..1467: note = Description of Artificial Sequence: Synthetic coding sequence
  source 1..1467: mol_type = other DNA
atgcccaaagtcaaggccctacagtgcgcattagctctggagatatcatccgtgacgtgccccggtgtcgttttgaaggataaggaggacatttatctcagcatctgcgtcttcggacaatacaaaaaaacccaatgtgtcccggccacatttcccctagtattcaatgcacgcatggttttcgagaaggtgtttcctgatgcagttgatccgggagacgttgttactcaacttgaatacgacacggcagtttttgagctgatccagctggtcccgcctgtgggcgagaccctcagtacctatgacgagaatacaagggatttcatgttccctgggccaaatcaaatgtctggtcatcacgactcgaatcggcaagtaactatgagacgaattagcggactgcgcgggaatgctccaaggctagaattcagcacgacctcagttatcacggaatgcctgatatcaagtaggaaatgtcacacacaggacaaattcatataccatcttgctcctgtggagaaaagccatggcaggctccagaaccggacatcacgcagtcagaaaaaaaagtccaagagccctgagagaagtaagtactgcattaatgccaagaattacgagcagccaacaatctcctccaaaagccattccccctctccatacaccaagagacgtatgtgcgagctgtcggaggacacacgaagaaggctggctcacctaaatctcggtccttatgaattcaaaaaggaaactgataaacccccctttgttattagacacgtggacccgcctagcccccgcgccgataccctacttggatcttccgggcgcgattgcgaaagggacggctggtctagggttcataatgatcacagccaccttggatgctgcaggcccaaagactataaagtgatcaggactccacatggacgggactttgatgatagtctcgaaaaatgcgaggaatatctctctcccaggagctgttccaagccacgccactccgcacgaactctgctcgtacattccgcgcctagcaccatgcctaagcactccccctcccctgttttgaaccgcgctagcctgagagagcgtttccactctgattggtgttcaccaagtaactgcgatgagatccacgacagagtgaagaacgtgcttaaatctcatcaggcacaccagagacatctatatgatgagcgggatctcgaaaaagacgacgagctagagttgaaaaggtctttactgtgccgtgattcagcatatgacagcgatcctgaatacagcagttgtcagcagcctagaggcactttccatctggatgatggtgagtattggtctaatagagccgctagctataagggcaaatctcatcgaccaatcttcgaaaatagcatggataagatgtatagaaatctatataagaaagcctgttcttcagctagccatactcaggagtccttctag

SEQ ID NO: 136010 - DNA, 1251 bp, synthetic construct
  misc_feature 1..1251: note = Description of Artificial Sequence: Synthetic coding sequence
  source 1..1251: mol_type = other DNA
atggtgttcgagaaggttttccctgatgcagtcgaccctggcgacgttgtgacccagctcgagcttggcgaaacactttctacgtatgatgagaacactcgagatttcatgttccctgggccaaaccagatgagtgggcatcacgactccaacagacaggtgaccatgcgcagaatttcaggcctcaggggcaatgctcctaggctcgagtttagtacaactagcgttattacagagtgcctgatctcaagtcgcaagtgccatacccaggacaaattcatctaccacctcgccccagtggaaaagagccacggccggctgcagaacaggactagccggtctcagaagaagaagagcaaatctcctgaacgatcaaagtactgcattaacgccaagaattacgagcagcccaccatcagtagtaaaagccattctcccagcccttacactaaacgccgcatgtgtgaactgagcgaagacactcgcagacgactggcacatctgaaccttggaccttatgaatttaagaaggagacagataagcctccttttgtcatccgccatgtggacccgccctctccgcgagctgacacactcttgggttccagtggacgggattgcgaaagagatggctggagcagggtgcacaatgaccactcccacctgggctgctgtcgccccaaggattacaaggtgataagaaccccgcatggtagagattttgatgactccctggaaaagtgcgaggagtacctgtcacctcggagttgctcgaagcctagacacagcgccagaactctgctagtgcattctgcaccgtctaccatgcccaagcatagtccatcacccgtcctcaatcgggcctccctccgtgagcgcttccacagtgactggtgctccccatcaaactgtgatgagatacatgatagagtaaagaacgtgctgaagagtcatcaggcacaccagaggcacctgtacgatgaacgcgacctggagaaggacgacgaactggaactcaaacggtcgttactgtgtcgagattctgcgtacgatagtgaccctgagtatagcagttgccaacagccgcgcggaacatttcacctggacgacggagaatattggtcaaaccgcgccgcatcctataagggtaagagccaccggccaatattcgagaactctatggataagatgtacaggaacttgtataagaaggcctgtagcagcgctagccacacgcaggagagcttctag

SEQ ID NO: 136011 - DNA, 1377 bp, synthetic construct
  misc_feature 1..1377: note = Description of Artificial Sequence: Synthetic coding sequence
  source 1..1377: mol_type = other DNA
atggatggcagtagacgggtgcgggcaacctctgtcctcccacggtacggaccaccatgtctgttcaaggggcacttgtcgacgaaaagtaacgccttttgcacagatagttcttctctgcgattgtcaaccctgcagctagtgaagaatcatatggctgtgcactacaacaagatcctgagcgccaaagcagccgtggactgttcagtgcccgtttctgtgagcacgagcattaaatatgcagatcaacaacggcgcgagaaactgaaaaaggaactggcccagtgcgagaaggagttcaaattgaccaagactgccatgcgggccaattataaaaacaatagcaaatccctgtttaatacgttacagaaacctagcggcgaaccccagattgaagacgatatgctgaaagaagagatgaacggtttctccagttttgcacgaagcctcgtccctagcagcgagcgactgcaccttagcctccacaagtcatctaaggtcatcactaacggccctgagaagaacagctcgtcctctccgagttctgtcgactatgctgcgtcgggtcccaggaaactgagcagcggagccctctatggcaggcgtcccagatctaccttccccaactctcacagattccagttagtgattagtaaggccccatccggcgacctgttggataagcattctgaactgtttagcaataagcagctgccctttacaccacgaacattaaagactgaagccaaatctttcctgagtcagtacaggtactatacccccgccaagcgcaaaaaggacttcacagaccaaaggattgaggcagagacccagaccgaattgtcattcaagtctgagttgggcacagctgagaccaagaatatgaccgacagtgagatgaacattaagcaggcatctaattgcgtgacctatgacgccaaagaaaagatcgcccccttaccactggaggggcatgactctacctgggacgagatcaaagatgacgccctccagcactcttctccgcgagccatgtgccagtactctctaaagccgcccagcacccgcaagatctacagcgacgaggaggagctcttgtatctgtccttcatagaggacgtgacggacgagattttaaaattgggacttttttctaatcgtttcttagagcgcctttttgaaagacatataaagcagaacaagcacctcgaagaggagaaaatgcgccacctgctgcatgttctcaaggtggatttagggtgcaccagtgaagagaactcattttcttcagttaagggcgataacaatcatgacatggagctgtccacactgaagatcatggagatgagtatcgaggactgcccgctcgacgtctag

SEQ ID NO: 136012 - DNA, 1704 bp, synthetic construct
  misc_feature 1..1704: note = Description of Artificial Sequence: Synthetic coding sequence
  source 1..1704: mol_type = other DNA
atggacggctcaaggagagtgagagcaacgtctgttctacccaggtacggccccccctgtttatttaagggccatttgtctacaaaatctaacgcagctgtggactgtagtgtgccagtatccgtcagcacgagtatcaagtatgcagaccagcaacggagggagaagctgaaaaaggagctcgctcagtgtgagaaggagtttaagttgacaaagactgcaatgcgagccaactacaagaacaactcgaaaagcctgttcaacactcttcagaagccttctggagaaccccaaattgaagatgacatgctcaaggaagaaatgaacggcttctcaagttttgcccgatcattagtcccaagttctgaacgcctgcacctgtcactccacaagtctagcaaggtcatcacaaacgggcccgagaaaaactcctcttcttctcccagcagcgtcgattatgctgcgagcgggcccagaaaactgtccagcggtgccttatacgggcgacggcctcgttccacattccccaattcccatcggtttcaacttgtgatctcaaaagctccctcaggagacctgctggacaagcacagcgagctgttttcaaataaacaactgccatttacaccgcgtactctgaagacggaggccaagtcattccttagccagtaccgctattatacgcctgccaagcggaagaaagactttacagaccagaggatagaggccgaaacacaaaccgagttgtcattcaaaagcgaacttggaactgctgagactaaaaatatgaccgattcggagatgaatataaaacaagccagcaattgtgtcacctacgacgctaaagagaagatcgccccacttccactggaagggcatgactcaacgtgggatgagataaaagacgatgccctccagcatagttctcctcgggctatgtgccagtattcccttaagccaccttctacccgcaaaatttactccgacgaggaagagctcctgtacctatcttttattgaggacgtgactgatgagatcctgaaactgggacttttctctaatcgctttctggagagactcttcgagagacacatcaagcagaacaagcatttagaggaagagaagatgaggcacttgctccatgtgctcaaggtggacctcgggtgcaccagcgaggagaactccgtaaagcaaaatgatgtcgatatgctgaatgtattcgacttcgaaaaggcaggcaactctgaacctaacgagctgaagaatgagtctgaggtcaccatccagcaagaaagacagcagtaccagaaggccctggacatgctactgagcgccccaaaagatgagaacgaaatatttccgagtccaacggagttcttcatgcccatatacaagtcaaaacacagtgagggtgttataatccagcaagtcaatgacgagacaaatcttgagacttcaactttggacgagaaccatccatctatctcggacagtctcaccgatcgcgagaccagcgtgaatgtgatcgagggtgactcggatcctgagaaggttgagatttcaaatggcctctgcgggctaaatacctcgccaagccaaagtgtgcagttctcatccgtcaaaggagacaataatcacgacatggagctttctacactcaaaataatggagatgtccattgaggactgccctttggatgtttag

SEQ ID NO: 136013 - DNA, 1800 bp, synthetic construct
  misc_feature 1..1800: note = Description of Artificial Sequence: Synthetic coding sequence
  source 1..1800: mol_type = other DNA
atggacggttcaagacgggtgagagccactagtgttctccccaggtatggacccccctgtttgtttaaaggtcacctgtccaccaaaagcaatgccttttgcacggattcttcttcattgagactctccacgctccagctggtcaagaaccatatggccgttcactacaataagatactgagcgcaaaagcggccgttgattgcagcgtccccgtctctgtgagcacctcaatcaaatatgctgaccagcagcgtagagaaaagctcaaaaaggagctggcccagtgcgagaaggaatttaaactgacaaagaccgcaatgagagccaactataaaaacaattccaagtctctgtttaacacgctccagaagccatctggcgaaccacagatcgaggacgacatgctcaaggaggaaatgaatggcttttcctcattcgcccggagcctggtgcccagctcagagcggctgcacctttccctgcataaatcatccaaggtgattactaacgggcccgaaaaaaattcaagctcctctccttcatcagtggattacgcagctagtggcccgagaaagttgtcgagcggagctctgtacgggcggaggccgcgctcaacgttccctaatagccaccggttccagctcgtgatctccaaggcgccgagcggtgaccttctggacaaacattctgaactcttcagcaataagcagcttccattcactcccagaacccttaaaacagaggctaagtcattcctttctcagtatcgatactatacaccagctaaacggaaaaaggatttcacagaccagcggattgaagccgagacgcaaaccgagctgagctttaagtccgaactcgggaccgcagagactaaaaacatgactgacagtgaaatgaatattaaacaggcttctaactgcgtgacttacgatgccaaagagaaaatcgctccattaccactggagggacatgattctacgtgggacgaaattaaggacgatgccctccagcattccagccctcgcgcaatgtgtcagtattccttaaagcctccatcaacaagaaagatctactcggatgaggaggagctgctgtacctgtcctttatcgaagatgtcaccgacgagatcctgaaactcggtctcttcagcaaccggtttttggagagactatttgagcgccatattaaacagaacaaacacctcgaggaggaaaaaatgcgacatctgttgcacgttttgaaagtggatcttggctgcacatcagaagagaatagtgttaaacagaatgacgtcgacatgctcaacgtgtttgacttcgagaaggcagggaactccgaacctaatgagctcaagaatgagagtgaggtaactatccagcaggagcggcaacagtatcagaaggctttggacatgctgctttctgctccaaaagacgagaatgaaattttcccgagcccaactgagtttttcatgcccatatacaagagtaagcacagtgaaggagttatcatccagcaggtgaacgatgagactaatctggaaacgagtacactggacgagaaccacccaagtatctcagactctctaactgacagggaaacatctgttaacgtgattgagggggactctgatcccgagaaggtggaaatttctaatggtttgtgtgggctcaacactagcccttcccagtccgttcagttttcgtctgtgaagggtgacaataatcatgatatggaactctctactctcaaaatcatggaaatgtccattgaagactgccctcttgatgtttag

SEQ ID NO: 136014 - DNA, 1704 bp, synthetic construct
  misc_feature 1..1704: note = Description of Artificial Sequence: Synthetic coding sequence
  source 1..1704: mol_type = other DNA
atggacggcagtcgaagggtgagggcaaccagtgtgttaccgcgctacgggcctccttgtctgtttaaaggccacctttccaccaagtcaaatgcggctgtggactgctctgtgcctgtcagcgtctctacaagtattaaatatgcagaccagcagcgtcgagagaagctgaagaaagagctcgcgcagtgcgagaaagagttcaagctgactaaaacagcgatgcgcgcaaattataaaaataactccaaatcacttttcaatacactgcaaaaaccttccggagaaccacaaatcgaggacgatatgctcaaggaagaaatgaacggatttagctcattcgctcgcagtctggtgccgtcttcagagaggttacacctgtcactccataagtcctcaaaagtgataaccaacggtcccgaaaagaattccagttcctccccctcatctgtggattatgcggccagcggtccacgaaaactgtcatctggggccttgtatggccgcagaccacggtctaccttcccaaacagccatcgatttcagttggtaattagtaaggccccttcaggcgacctgctcgacaagcactctgagttattttcaaacaaacagctgccattcacccctcggaccctaaagaccgaggctaaatcctttctgtcacagtaccgctactacacccctgctaagaggaaaaaggactttaccgaccagagaatcgaggccgaaacacagaccgagctgtcttttaagtcagagcttggaaccgccgagacgaagaatatgaccgattccgaaatgaacataaagcaggcctccaactgtgtcacctacgatgcgaaggagaagatcgccccgctgcctctcgaaggccacgacagcacctgggacgaaatcaaagacgacgccctccaacacagctcccctagggctatgtgccaatatagtctgaagccgccatctacgaggaagatctactccgacgaagaggagctgttgtacctctcttttatagaggatgtcacagacgagatattgaaactagggctgtttagtaacagattcttggaaagactcttcgagcggcacatcaaacagaacaaacacctcgaagaggagaaaatgcgacatctgttgcacgtgttaaaggtggatctggggtgcactagcgaggagaacagcgtgaaacagaacgatgtggatatgctgaatgtgtttgacttcgaaaaggcaggcaatagcgaaccgaacgagctgaaaaacgaaagtgaggtgaccatccagcaggagaggcagcagtaccaaaaagctctggatatgcttctgtctgctccgaaggacgaaaatgaaatattcccaagtcccaccgagttttttatgccaatctacaagtcaaaacactccgagggtgtaatcatccagcaggtaaacgacgagacaaatcttgagactagcactttggatgagaaccacccctctatctccgattccctaactgaccgtgagacgtcagttaatgtcattgagggtgactctgaccctgagaaggttgagatttccaatggattatgcggtctgaatacctctcctagtcagtccgtgcaattttctagcgtcaaaggcgacaacaaccatgatatggagctctccacccttaaaataatggagatgagtatcgaagactgtccactggacgtgtag

SEQ ID NO: 136015 - DNA, 318 bp, synthetic construct
  misc_feature 1..318: note = Description of Artificial Sequence: Synthetic coding sequence
  source 1..318: mol_type = other DNA
atggcaccagcaggcatgtccggtgcccaagataactcctgtttataccaggagatcgctccatcttttcagagactcccatgccctcggacatcctctagacatttttcagaggccatgacatgcccctgcgggtggcgcccgtttaagggggggcccggtggcctgaagggtcccgtttggccagcgaaggaggagaactcttgcagccacgggcgaatccagcgtgtgcagaggagacgcgttccatccgcaagtccgcttatacagaaaatcaatcggcgttctgttctatttcatccatactgctggagttag

SEQ ID NO: 136016 - DNA, 1638 bp, synthetic construct
  misc_feature 1..1638: note = Description of Artificial Sequence: Synthetic coding sequence
  source 1..1638: mol_type = other DNA
atgtcccgcaagcagaaccagaaagattccagcgggttcatttttgacctgcagtctaacactgttctggcacaaggtggggccttcgaaaatatgaaagaaaagattaatgccgtgagggccattgttcccaataagagcaacaacgaaatcatcttggtcctccagcactttgacaattgcgttgacaagaccgtccaggcttttatggaaggtagcgcctcagaggttctgaaggaatggacagtcacaggaaagaaaaagaataaaaagaagaaaaacaaacctaagccggccgccgaacccagtaatggcattcctgattcatctaagtcagtttctatccaggaggaacagtccgctccaagctctgaaaaggggggtatgaacggctaccacgtgaacggggccatcaatgatactgaaagcgtggactctttaagtgagggtctcgaaacgttatccattgatgccagagaactggaagatcctgaatcagcaatgcttgatacgctcgatcggacaggatctatgctccagaacggcgtctccgatttcgaaacaaagagcctcactatgcacagtatccataacagccagcagcctcggaacgctgcaaagagcctgagccggccaaccacagaaacccagttcagtaatatgggcatggaagacgtcccactcgccacatccaaaaaactttcgtctaatatagaaaaatctgttaaagatcttcagaggtgcactgtctccctggcgagatatagggtggtggtcaaagaggaaatggacgcatcaatcaaaaagatgaaacaagcctttgcagagctggagagctgcctgatggatcgcgaagtcgcactcctagctgagatggacaaggtgaaagccgaggctatggaaatactactaagccgccagaagaaggccgagctcctgaagaaaatgacacatgtggccgtgcagatgtcagagcaacagctggtggaactgcgggctgacatcaagcactttgtttcggagcggaagtatgatgaggacctggggagagtcgcgaggtttacatgtgacgtggaaactctcaagaagtctattgatagcttcggtcaggttagccatcctaagaatagttatagtactcgatcaaggtgcagttccgtcacctctgtatctctgtcaagccctagtgacgcctccgcagcatcctccagtacttgcgcctcacctccttctcttacctccgctaataagaagaatttcgcccctggcgagaccccggcagcgatcgccaactcgtctgggcagccgtaccaaccgctgagagaggtcctccccgggaaccgaaggggtgggcagggttacaggccccagggacagaagtcaaacgaccctatgaaccaaggaaggcatgactccatgggcagatatagaaactcgtcctggtattcatcaggatcccggtaccaatctgcaccaagccaggcaccagggaacacaatcgaacgaggtcagacacactctgccgggacaaacggcaccggagtgagcatggagccatctccccctacccccagcttcaagaaaggactgccacagcggaaaccccgcacaagccaaactgaagccgtgaattcgtag

SEQ ID NO: 136017 - DNA, 1638 bp, synthetic construct
  misc_feature 1..1638: note = Description of Artificial Sequence: Synthetic coding sequence
  source 1..1638: mol_type = other DNA
gtaagcaaaaagaaaaaaaagaaggactccagcgggttcatcttcgatctacaatctaacacagttctggcccaggggggtgcattcgagaatatgaaagagaaaatcaacgccgtgcgcgccattgtgcccaataaaagcaacaacgagattatcctggttctgcaacacttcgacaactgcgtcgacaagaccgtgcaggcctttatggagggctctgcttccgaagtcctcaaagaatggacagtgacaggaaaaaaaaagaacaagaagaaaaagaacaagcccaagcctgctgccgagccaagtaacggaattcccgacagctcaaaaagtgtgagcattcaggaagaacaaagcgccccatctagcgagaaaggaggtatgaatggctaccacgtcaatggcgccattaacgacaccgaatcagtggacagtttgtccgaaggactcgaaactctgtcgattgatgcgcgggaactcgaagatcccgaatccgccatgctggacacacttgatcgcacgggttcaatgctgcagaatggcgtgagtgacttcgagaccaaatcattgacgatgcatagtatacataattctcagcagccgcggaacgccgccaagagcttgtctagacctacgaccgaaacacagttttccaatatgggaatggaagacgtccccttggctacttctaagaagctgtcctcaaacattgaaaagtctgtcaaagacttacaacgctgtactgtttccttggccaggtacagggtcgtggtcaaagaggaaatggatgcctcgatcaagaaaatgaagcaggcgtttgctgaactggaatcatgcctgatggaccgtgaggtagccctcctagcagagatggacaaggtcaaagctgaggccatggaaatcctactttcccgccagaagaaagcagaactacttaaaaaaatgacccacgtcgcagttcagatgtccgagcaacagctggttgaacttcgcgccgacattaagcattttgtgtccgaaaggaagtatgatgaagatctggggcgggtggccagattcacctgcgatgtggaaacactcaagaagtccattgattccttcggccaggtgagccaccctaaaaacagctactccactcggagcaggtgctcctccgttacaagcgttagtctaagctccccgagcgacgcctccgccgcaagtagtagcacttgtgccagcccccccagcttgacaagcgccaacaaaaagaactttgctcccggcgagacccccgctgctatagcaaattctagtggccagccttaccagcccctgagggaagttctaccaggaaatcgcaggggcggccaaggctatcgcccacagggccaaaaaagtaatgacccgatgaatcagggacgccacgattcaatgggaaggtatcgcaacagttcttggtactctagtggctcacggtaccagagtgccccctcacaggcccccggcaatacaatcgagaggggccaaacacacagtgccggcaccaacgggacaggagtatctatggagcccagcccacctactcccagtttcaagaaaggcctcccacagcggaagccccgcacatcccagaccgaggccgttaactcttag

SEQ ID NO: 136018 - DNA, 27 bp, synthetic construct
  misc_feature 1..27: note = Description of Artificial Sequence: Synthetic coding sequence
  source 1..27: mol_type = other DNA
atgtcccgcaagcagaaccaaaaatag

SEQ ID NO: 136019 - DNA, 27 bp, synthetic construct
  misc_feature 1..27: note = Description of Artificial Sequence: Synthetic coding sequence
  source 1..27: mol_type = other DNA
atgtctcgcaagcaaaaccagaaatag

SEQ ID NO: 136020 - DNA, 204 bp, synthetic construct
  misc_feature 1..204: note = Description of Artificial Sequence: Synthetic coding sequence
  source 1..204: mol_type = other DNA
atgtcgaggaagcagaaccagaaggattcctccgggttcatctttgatttgcagtctaataccgtgttagcacagggtggcgcattcgagaacatgaaggagaaaatcaacgccgtgagagcaatagtgcctaataaatctaataatgaaattattttggtcctgcagcacttcgacaattgtgtcgataaaaccgtgcagtag

SEQ ID NO: 136021 - DNA, 102 bp, synthetic construct
  misc_feature 1..102: note = Description of Artificial Sequence: Synthetic coding sequence
  source 1..102: mol_type = other DNA
atgtccaggaagcaaaaccagaaggactcaagtgggttcattttcgatttacagtctaataccgtcctggcacagggcggcgcttttgagaatatgaagtag

SEQ ID NO: 136022 - DNA, 18 bp, synthetic construct
  misc_feature 1..18: note = Description of Artificial Sequence: Synthetic coding sequence
  source 1..18: mol_type = other DNA
atgagtagaaagcaatag

SEQ ID NO: 136023 - DNA, 111 bp, synthetic construct
  misc_feature 1..111: note = Description of Artificial Sequence: Synthetic coding sequence
  source 1..111: mol_type = other DNA
atgtcccggaagcagaatcaaaaagattcatccggtttcatttttgatttgcagtcaaataccgtgctcgctcaggggggcgctttcgagaatatgaaagagaaggtttag

SEQ ID NO: 136024 - DNA, 201 bp, synthetic construct
  misc_feature 1..201: note = Description of Artificial Sequence: Synthetic coding sequence
  source 1..201: mol_type = other DNA
atgtcaaggaagcagaaccaaaaagatagctcagggttcatcttcgatcttcagagcaataccgtgttagcccagggcggcgccttcgaaaatatgaaagaaaagataaacgccgtgagagctatcgtccctaacaaaagtaacaacgaaattatcttggttctgcagcactttgacaattgcgtggacaaaactgtgtag

SEQ ID NO: 136025 - DNA, 105 bp, synthetic construct
  misc_feature 1..105: note = Description of Artificial Sequence: Synthetic coding sequence
  source 1..105: mol_type = other DNA
atgtcaaggaagcaaaatcaaaaggatagcagcggtttcatcttcgacctgcagagcaacaccgtgttggcccagggcggtgcctttgagaacatgaaggagtag

SEQ ID NO: 136026 - DNA, 297 bp, synthetic construct
  misc_feature 1..297: note = Description of Artificial Sequence: Synthetic coding sequence
  source 1..297: mol_type = other DNA
atgagtcgaaaacagaatcagaaagactcaagtggatttatattcgatctgcagtctaacaccgttctggcccaggggggggcattcgagaacatgaaagagaagatcaacgcagttcgggctatcgttccaaataagtccaataacgaaattattctcgtgctgcagcacttcgataattgcgtggacaagactgtgcaggctttcatggagggcagtgcttccgaagttctcaaagaatggaccgtcaccgggaagaaaaaaaataagaaaaaaaagaacaagcccaaaccctag

SEQ ID NO: 136027 - DNA, 225 bp, synthetic construct
  misc_feature 1..225: note = Description of Artificial Sequence: Synthetic coding sequence
  source 1..225: mol_type = other DNA
atgagtagaaaacaaaaccaaaaggacagctccggattcatattcgacctgcagtcgaatacggtgctggcacaaggcggggcttttgagaatatgaaagagaagataaacgcagtgagagccatcgtgcctaacaaatctaataacgagataattctggttctccaacattttgacaattgcgtagataagacagtacaggctttcatggaagggagcgcttag

SEQ ID NO: 136028 - DNA, 33 bp, synthetic construct
  misc_feature 1..33: note = Description of Artificial Sequence: Synthetic coding sequence
  source 1..33: mol_type = other DNA
atgagccgaaagcagaatcagaaagactcctag

SEQ ID NO: 136029 - DNA, 1638 bp, synthetic construct
  misc_feature 1..1638: note = Description of Artificial Sequence: Synthetic coding sequence
  source 1..1638: mol_type = other DNA
atgagcaggaagcagaaccaaaaggatagctcaggtttcatattcgaccttcaaagtaacactgttctcgctcagggtggagctttcgaaaacatgaaggagaaaataaatgccgttagagcgattgtgccaaataagtcaaacaacgagattatacttgtcttacagcacttcgataattgcgtcgataagactgtacaggcctttatggaggggtctgcctccgaggttcttaaggaatggacagtgactgggaaaaagaagaataagaagaagaaaaacaagccgaagcccgcagcagagcccagcaatggcataccggattcatccaagtcagtgagtattcaggaagagcagtctgcgccaagctccgaaaaaggggggatgaacggctatcacgtgaacggggccatcaatgacacagaatccgtagatagtctttcagagggtcttgagacactctcaatcgatgctcgcgagcttgaggatcccgagagcgcgatgctggacaccctcgatagaactggctcaatgctgcagaacggggtcagtgatttcgagacaaagtctctaacaatgcattcaatccataattctcagcagcccaggaacgctgccaaatccctgtccagacctactacggaaactcagttctctaacatgggaatggaagatgtgcccctggctacttcaaagaaactgagcagtaatatcgagaagtctgtgaaagatctgcagaggtgcactgtcagcctagcacggtatcgcgtggtcgttaaggaggaaatggacgctagcataaagaaaatgaaacaagccttcgcggaactggagtcctgtttaatggaccgcgaggtcgccctccttgctgagatggacaaagtcaaggccgaggcgatggagattttgcttagtcggcagaagaaggcagagttactgaagaaaatgacccacgttgccgttcagatgagcgagcaacagctcgttgaactgcgggctgacataaaacacttcgtctctgaaaggaagtacgacgaagatctgggaagggttgcccggtttacatgcgatgttgagacattgaaaaaatccatcgattcctttggtcaggtgtcacatcccaaaaattcttacagcactcgaagcaggtgtagctctgtgacatccgttagcttatcaagtccgtctgatgcctccgcggcctcttcctccacctgtgccagccccccttctctgacatccgccaacaaaaagaatttcgcgcctggtgagacaccagctgcaattgcaaactcctcgggccagccatatcaacccctgagggaggttctcccagggaatcggaggggcgggcagggatataggcctcaaggtcagaaatcgaacgaccccatgaatcagggcaggcatgactcaatgggtaggtacaggaattcttcttggtatagctctggcagtcgatatcagtcggccccctcccaggctccaggtaatacaatcgaacgggggcagactcactctgcgggtaccaatgggacgggggtgagcatggaaccttctcctcctaccccctctttcaaaaagggactcccacagaggaaaccccggacgtcacagacggaagccgtcaattcctag

SEQ ID NO: 136030 - DNA, 1638 bp, synthetic construct
  misc_feature 1..1638: note = Description of Artificial Sequence: Synthetic coding sequence
  source 1..1638: mol_type = other DNA
atgtccagaaaacagaatcaaaaggactcctccggcttcattttcgatctgcagtccaatactgtgctcgcccaaggtggagcctttgagaatatgaaggagaagatcaatgcagtgcgggcaattgtgcctaataaatccaacaacgaaataatccttgtcctacagcacttcgataactgcgtcgataaaactgtgcaggcttttatggaaggaagcgccagtgaggtgctcaaagaatggaccgtgacaggtaagaaaaagaataaaaagaagaagaataaaccaaaacccgctgctgaacctagcaatggaattccagatagtagcaagtccgttagcattcaggaggagcagtccgcgccatctagcgaaaagggtggcatgaatggctatcatgtgaacggtgctatcaacgacacagagagtgtcgactctctcagtgaggggcttgaaacactgtccatcgatgcccgcgagcttgaagatccggagtctgctatgttggatactctggataggacggggtcgatgctgcagaatggggtgtccgactttgaaacaaaaagtctcacgatgcatagcatccacaactcccagcagcccaggaacgccgctaagtctctttcacgccccaccacagagacacagttctctaacatgggaatggaagacgtgccccttgcaacctcaaagaagctgtctagcaacatagagaaatcagtcaaggatctgcaacgatgcaccgtgagcctggccaggtatcgggtggtggtgaaggaagagatggacgcaagcatcaaaaagatgaagcaggcattcgctgagctagaatcttgtcttatggacagggaagtggctctgctggctgagatggataaagtcaaggctgaagccatggagattctcctgtcccgacagaaaaaggccgaacttctcaagaagatgacgcacgtcgccgtgcagatgtcagagcagcaactggtggagttgagggccgacatcaaacattttgtgtccgagcgcaagtatgatgaggacctaggccgggtggccaggttcacctgtgatgttgagacactaaagaagtcaattgactctttcgggcaagtttcccacccaaagaatagctatagcaccagatccagatgttcctcagtcactagcgtcagcctcagtagcccgtcagacgccagcgcggctagcagctccacttgcgccagtccaccgtccctgactagcgctaacaaaaaaaactttgctccgggagaaacaccggcggccatcgccaatagcagtgggcagccttaccagccccttagagaggtgctgccaggaaataggaggggggggcagggatatcggccccaaggacagaagtcaaacgatccaatgaaccagggccgccacgatagtatgggccgttaccgcaacagcagttggtacagctccggatcgaggtaccagtctgcccctagccaggcgcccgggaatactattgagagaggtcagacacattctgccggaacaaatggcactggcgtgagcatggaaccttctccgccaacccccagcttcaaaaaaggattgcctcagagaaaaccaagaacatcacagaccgaggctgtgaactcatag

SEQ ID NO: 136031 - DNA, 1677 bp, synthetic construct
  misc_feature 1..1677: note = Description of Artificial Sequence: Synthetic coding sequence
  source 1..1677: mol_type = other DNA
atggctgaactgaacacccacgtcaacgtgaaggagaagatctatgccgtccgctccgtcgtgccaaataagagcaacaatgaaatcgtgttggtactccagcagttcgatttcaatgtggacaaggctgtacaggcctttgtggatggttctgctatccaagtgctcaaggagtggaacatgactggtaaaaagaagaacaacaaacggaaacggtctaaaagcaagcagcaccaggggaacaaagacgcaaaggacaaggtggaacgccctgaggcaggtcccctccagccgcaacctccccaaattcagaatggccctatgaacgggtgcgagaaagattcatcaagtaccgacagtgccaatgaaaagcctgctctaataccccgggaaaagaagatctccattctagaagagccgtctaaggcccttagaggagtgactgaagggaatagactgttacaacagaaactaagtctcgacggtaatcctaaaccaatccacggtaccactgaacgctccgacgggttgcagtggtcagccgaacagccctgtaatccttccaagcctaaggccaaaaccagcccggtcaagtccaacacccctgctgcccacctggagataaaacccgacgagctggcaaagaagcgcggacccaatattgagaagtccgttaaggacctacagaggtgcactgtctctttgacaaggtacagggtaatgataaaggaggaggtcgacagttcggtgaagaaaatcaaggcggctttcgcagagttgcataattgtatcatagataaggaggtgtccctcatggccgagatggacaaggtgaaagaggaagccatggaaattctgaccgcaaggcagaagaaggccgaagagttgaagcggctcactgacttggctagccagatggcggagatgcagttagctgagcttagagccgagattaagcacttcgtcagcgaaagaaaatacgacgaagagctcggcaaagcagctcgattttcttgcgacattgaacagctcaaagcccagatcatgctttgcggggagattactcatcccaagaacaactattcctcccggactccttgttcatcacttctccctcttttaaatgcacacgctgccaccagcggaaaacagtcaaatttctcacgcaagagctctactcacaacaagccctccgaaggcaaggcagccaatcctaaaatggttagctccctgccctcaacagcagatccctcccatcaaaccatgcctgccaacaagcagaacggaagctccaaccagcgacgacgttttaatccacagtatcataataatcgtctcaacggacccgccaaatctcaggggtccggaaacgaagcagaacctctcggcaaagggaatagccgccatgagcatcgacggcagccacacaacggcttccgacctaaaaacaagggcggggctaaaaaccaggaagcttctctcggcatgaagaccccggaagcccccgctcattcggagaaaccgcgcaggcgccagcacgctgcggacaccagtgaggctcgcccattcaggggtagtgttggacgcgtttcccagtgcaacttgtgcccgaccaggatagaggtgagtactgatgccgccgttctgtcagtccccgcagtcacactcgtagcttag

SEQ ID NO: 136032 - DNA, 1470 bp, synthetic construct
  misc_feature 1..1470: note = Description of Artificial Sequence: Synthetic coding sequence
  source 1..1470: mol_type = other DNA
atggccgaactcaacactcacgtcaatgtaaaagagaaaatttatgcagtgcgatctgttgtccctaacaagtcaaataatgaaattgtactggttctgcaacaattcgactttaacgttgacaaggccgtgcaggctttcgtggacgggtccgcaatccaagtgctgaaagaatggaacatgacaggcaagaagaagaataacaaaaggaagcgaagcaaatctaaacagcatcaggggaacaaagacgcaaaggataaagtggaacggcctgaggcagggccactgcagccacagccaccacagattcagaatgggcccatgaacggatgtgagaaagacagttcatctacagactcagccaatgagaagcccgcactgattccacgagagaagaagatctctatactggaggagccgagcaaagcgctgcgaggcgtgactggacctaacatcgaaaagagtgttaaggatctgcaacgttgcactgtgtctcttacaaggtacagagtgatgattaaggaggaagtggattctagcgtcaagaagataaaagctgctttcgctgaactgcataattgcattatcgataaggaggtatccctaatggccgagatggacaaggtcaaggaggaggccatggagattttgactgcacgtcaaaagaaggctgaagagttgaagaggctgacagatctcgcctcacaaatggccgagatgcagttagctgagctgcgagctgagataaaacatttcgtgtccgaaagaaagtacgatgaggaattaggcaaggcagcaaggtttagttgtgatatcgaacagctgaaggctcagataatgttgtgtggagagatcacccatcctaaaaataactactcctctcggactccatgttccagcttgctccccttgctgaatgctcacgcggccactagtggcaaacaatcgaacttcagccgcaagtcctccacacacaacaagccatcggaagggaaagcagcaaatcccaagatggtctccagccttcctagcactgcagacccctcccatcagactatgcccgccaacaagcaaaatggctcctccaaccagaggcgaaggttcaatcctcaatatcacaataacagactgaacggtccagccaaatctcagggctctgggaacgaggccgagccactggggaaggggaatagccggcatgagcacagaagacagccacacaatgggttccggcctaagaacaaaggtggagccaagaaccaagaagccagcctcggcatgaagaccccagaagccccagcccactcggagaaacccagaagaaggcaacatgcggccgatactagcgaggctaggccattccggggatccgtcggtagagtgtcccagtgtaatctatgtccaacacgcatagaagtgtccaccgatgctgctgtcctcagcgtcccagcagtaaccttggtggcgtag

SEQ ID NO: 136033 - DNA, 1677 bp, synthetic construct
  misc_feature 1..1677: note = Description of Artificial Sequence: Synthetic coding sequence
  source 1..1677: mol_type = other DNA
atggcggaactaaatacacatgttaacgtgaaagagaagatatatgcagttcggagcgttgttccgaataagagtaacaacgagatcgttctcgtgttgcagcagttcgatttcaatgtcgacaaggccgtccaagcttttgtggatgggagcgccattcaggtgttgaaggaatggaatatgacggggaagaaaaaaaataataaaaggaagagatccaagtccaaacagcaccaaggaaataaagatgccaaagataaggttgagcgacctgaggcaggtccactacagccacagcctccgcagatccagaacggacccatgaatgggtgtgagaaagattcaagctcaaccgattcagctaatgaaaagccagctcttattcccagggagaagaagatctcaatactggaagagccctcaaaggccctacggggagtgacggaaggcaatcgcttgcttcaacagaagctctccctggatggaaatcccaagcccatccacggcactacagaaagatccgacggtcttcaatggagcgcagagcagccgtgtaatcccagtaagccaaaggccaaaacttcgcccgttaagtcaaacaccccagcagcccacttggaaatcaaacccgacgaactcgccaagaagcgcgggccaaacatagagaaatccgtcaaagatttgcagcggtgtacagtcagccttactcgctacagagttatgatcaaggaagaagtggacagttccgtaaaaaaaatcaaggccgctttcgccgagctgcacaactgcataattgacaaagaggtatctttgatggccgagatggacaaagttaaagaagaagcaatggaaatcctgactgccaggcagaaaaaggctgaggaacttaagagactgacagatcttgccagtcagatggccgaaatgcagctcgccgagctgagggccgagattaaacactttgtgtcggagagaaaatatgacgaagagctcggtaaagctgcccggttcagctgcgacatcgaacagcttaaggcacagattatgctctgcggtgagatcactcatcccaagaacaattatagtagccgcaccccatgcagctcactcctgccactgctaaacgctcatgccgccacatccgggaaacagtccaacttcagccgcaagtccagcacgcataacaaaccctctgagggaaaagctgccaaccctaagatggtaagcagcttgcctagcacagccgatccctcccatcaaactatgcccgcaaacaaacagaatgggtcctcaaaccagcgacgaagattcaacccccagtatcacaacaaccggctcaatggtccagccaagagccaggggtccgggaatgaggctgagccgctgggcaaagggaattccaggcacgaacacaggcgacaaccgcacaacgggtttcggcccaagaataaggggggagcgaaaaaccaggaggcatcactcgggatgaagaccccagaagctcctgctcactccgagaaaccaaggcggcggcagcatgccgccgacacctctgaggcacggcccttccgtgggtctgtcggtcgtgtatcccagtgtaacctgtgtcccacacggatcgaggtctctaccgacgcagccgtcctctctgttcccgccgtcacgttagtcgcttag

SEQ ID NO: 136034 - DNA, 1701 bp, synthetic construct
  misc_feature 1..1701: note = Description of Artificial Sequence: Synthetic coding sequence
  source 1..1701: mol_type = other DNA
atggcttatagtactcggtcgaaaatggccgagctcaatactcatgtgaacgtgaaagagaagatttacgcagtgcgctcagtggtgccaaataagagcaataacgagatagtgctggtgctgcagcagtttgatttcaatgtagacaaagccgtccaggctttcgtagatggcagcgctattcaagtcctcaaggagtggaacatgaccggaaagaagaaaaacaacaaacggaaacgctctaagtcgaaacaacatcagggcaataaggacgctaaggataaagtggagcgccctgaggccggaccacttcaaccgcagcccccccagatccagaacggcccaatgaacgggtgtgaaaaggacagtagtagcacagatagcgccaacgagaagcccgctttgattcctcgggaaaagaaaatttctatcctggaagagcccagcaaggccctgagaggcgttacagagggaaatagactgttacagcagaaactgtccctggatggtaacccaaaacctattcacggtacaacagagcgcagtgatggactgcagtggagcgccgagcaaccctgtaacccctcaaagcctaaggccaaaacctcacccgtaaaaagcaacacgccagcagcccatctggagataaaacctgacgagcttgctaaaaaacggggacctaatattgagaagagcgtgaaggacctccaacgatgtacagtgagcctgacacgataccgcgttatgattaaagaagaggtagattcatcagtgaagaaaattaaagcagcgtttgcggagttgcacaactgcattatcgataaggaggtcagcctgatggccgagatggacaaagtgaaggaagaggccatggagatcttgacagctcgccagaagaaggcagaggaattaaagcgcctgacagaccttgcgtcccagatggccgagatgcagctcgccgaactgagagctgaaataaagcactttgtgtccgaaaggaagtacgatgaggagcttggaaaggctgccaggttctcttgcgacatcgagcagctgaaggctcagatcatgctatgcggggagataactcatcctaaaaataactacagctcaagaactccatgctcatccctgctgccactcctgaacgcgcacgctgccacgagcggaaaacagtccaacttttccagaaaaagttccacccataataagccatctgaagggaaggccgccaatccgaaaatggtctccagtctgccttccaccgcagatcctagtcatcaaactatgcctgcaaataaacaaaatggtagcagtaatcagcggagacggtttaacccacagtatcacaacaacaggttaaatggtcctgccaaaagccaggggagcggtaatgaagccgagcctttgggaaaaggaaattcacggcacgagcatagaaggcagccccataacggcttccgacccaaaaacaagggcggggcaaaaaaccaagaggccagtcttgggatgaagacaccagaggcgccagcccattcagagaagcctcggcgccgtcagcacgccgccgatacaagcgaggcgcgccccttcaggggctcagtgggcagagtcagtcagtgcaatctttgtccaacacgcatcgaagtctccactgacgcggccgtgcttagcgttccagccgtgacactagtggcatag

SEQ ID NO: 136035 - DNA, 801 bp, synthetic construct
  misc_feature 1..801: note = Description of Artificial Sequence: Synthetic coding sequence
  source 1..801: mol_type = other DNA
atggcagagctcaacacccatgttaatgtgaaagagaaaatctacgcggttagaagtgtggtgcccaacaaatcaaacaatgaaatagtgctcgttctgcagcagttcgattttaacgtggacaaggcggtgcaggccttcgtggatgggtccgcaatccaagtgcttaaagagtggaacatgacagggaaaaaaaagaataacaaacggaaacgatccaagagtaagcagcatcaggggaataaagacgcaaaagacaaagtggaacgccccgaggctggccctttgcagccacagccgccacagattcagaacggccctatgaatggatgtgaaaaggactctagttcaaccgacagtgctaacgaaaaacctgctctgatcccgagagagaagaaaatctccattctggaggagccaagcaaagctcttcggggtgtcacaggtcccaatatagagaaaagtgtgaaagatctccaacgctgcacggtgagcctgactcgctatcgagtgatgatcaaagaagaagtggacagctctgttaagaagataaaagcagcttttgctgagttgcacaactgcattattgacaaagaagtttcactgatggccgaaatggacaaagtgaaggaggaggccatggaaattctgacggctagacagaagaaagccgaggagttgaaacgcttgaccgacttggcctcccagatggcagagatgcagttggccgagctgcgagccgaaattaaacactttgtgtctgagagaaaatacgatgaggagctggggaaagctgcttag

SEQ ID NO: 136036 - DNA, 1677 bp, synthetic construct
  misc_feature 1..1677: note = Description of Artificial Sequence: Synthetic coding sequence
  source 1..1677: mol_type = other DNA
atggctgagcttaatactcacgtgaacgtgaaagagaaaatatacgcagtgcgttcggttgtgccaaacaaatccaacaacgaaatcgtgctcgtgttgcaacaattcgattttaacgttgacaaggcggtccaggcattcgttgatggctctgccatccaagtactgaaggagtggaatatgaccggcaaaaagaagaataataagcggaaaaggtccaaaagcaaacaacaccaggggaataaggacgcaaaggacaaggtcgagcgaccagaggccgggccgctgcagccgcagcccccccagattcaaaacggtccaatgaacggctgcgaaaaggattcttcttccaccgactccgccaacgagaaacccgcattgatacctcgcgagaagaagatttccatcctcgaggaaccctcaaaggcattaaggggggtgaccgaagggaatcggctactacaacaaaaactctctttggacggcaacccaaagcccattcacggaaccaccgagcgttcagacggactgcaatggtctgcggaacaaccatgcaacccaagcaagcctaaggccaaaacttctcccgtcaagtctaatactcccgctgctcacttagaaattaaaccagatgagctggccaaaaagcgcgggccaaacatagagaaaagcgtcaaagacctgcaacggtgcactgtgtctttaacccgctatagggttatgatcaaggaggaagtggacagctctgtgaagaagatcaaagctgcatttgctgaactccacaattgtataatcgacaaagaggttagcctgatggccgaaatggacaaagtgaaggaagaggccatggaaattctgacggcgagacaaaagaaggccgaggagcttaagagactgactgatctggcgtctcaaatggccgagatgcagctggccgagctgcgcgccgagataaaacacttcgtgtctgagaggaaatatgatgaggagctagggaaggcagcccgcttttcctgtgatatcgaacagctgaaggcccagattatgctgtgcggggagatcacccacccaaaaaacaactatagcagccgaaccccttgctccagcctgctcccattgttgaacgctcatgctgctacttcgggcaagcaatccaacttttctaggaagtcatccacacacaacaagccatcagaaggtaaggctgcaaatccgaaaatggtgtcatccctgccctcaacagcagacccttctcaccaaacaatgccggctaacaaacaaaatggctctagcaaccagcggcgccgatttaatcctcagtatcataataaccgactgaatggcccagcaaagagtcaggggtcaggcaatgaagctgagcccttgggtaagggcaactctcgacacgaacatcggcgacagccccacaacgggtttagaccaaagaataaaggcggggcaaagaatcaggaggcttcactggggatgaaaactcccgaggctcccgcccactctgagaaaccacgccggagacaacacgcagctgacaccagcgaagcgaggccctttcgaggaagtgttggtcgggtctctcaatgcaacctgtgcccaaccagaatcgaagttagcaccgatgcagccgtgctcagcgttccagccgtcaccctggttgcctag

SEQ ID NO: 136037 - DNA, 1767 bp, synthetic construct
  misc_feature 1..1767: note = Description of Artificial Sequence: Synthetic coding sequence
  source 1..1767: mol_type = other DNA
atggacccgttttgccactcatcctccgagacaaggctgctatcgggcaccctgctgtggatcccacgggcatatagtacaaggagcaaaatggccgagttgaacactcacgttaatgtgaaagagaaaatttatgctgtacgtagcgtggtcccaaacaaatcgaacaatgaaattgtacttgtgttgcaacagtttgacttcaacgtcgataaggcagttcaggcttttgtggacgggagtgccattcaggtcttgaaggagtggaatatgaccgggaagaagaaaaataacaaaagaaaacggtctaagtctaaacagcaccaggggaataaagatgccaaagataaggtggaacgccccgaagcgggacctttgcaacctcagcccccgcagatccagaatgggcctatgaatggctgtgaaaaagacagtagtagcacagactctgcgaatgagaaaccggcccttatccccagggagaagaaaattagtatcctagaggaaccttccaaagcactcaggggggttaccgaaggcaacagactcctccaacagaagctgagtctcgatggcaatcccaaacccattcatggtactaccgaaaggtcagacggattgcaatggtcggccgaacagccatgtaatccctcgaagcccaaagctaagacctctcccgtcaagtcgaacacacccgctgctcacttggagatcaagcctgacgaactagctaaaaaacgaggccccaatatagagaagagcgtgaaggatctgcaacggtgcaccgtgtccttaacgcggtatcgggtgatgatcaaagaggaggtggactcctctgtgaagaaaatcaaggccgccttcgcggagctccacaattgcatcattgataaggaggtctcactgatggccgagatggacaaggtgaaagaggaagctatggagatcctaaccgcacggcaaaaaaaagcagaagaactgaaacgcctgacggacttggctagccaaatggcagaaatgcagctggcggagcttcgggctgaaataaaacatttcgtctcagaaagaaaatacgatgaagagttggggaaagccgccagattctcttgtgacatcgaacagttaaaggcccagattatgctttgtggcgagattacccatcctaaaaacaattacagcagccggaccccctgcagttccctgctgcccctattgaacgcacatgcagcaaccagcggcaaacagagcaacttctccaggaagagctctacacacaacaagccttccgaaggaaaggctgcaaaccctaagatggtgagcagtctgccgagcactgccgatccaagccatcaaacgatgccagcgaataaacaaaatggcagctccaatcagcggcgccgattcaacccgcagtaccataacaaccgtttgaatgggcctgctaaatcccagggctccggcaatgaggccgaaccattggggaagggtaacagcaggcacgagcatcgcagacagcctcacaatggcttccgtccaaaaaacaaggggggcgccaaaaaccaggaagcctccctgggcatgaagactcccgaagctccagcccacagtgaaaagccaaggaggaggcagcatgccgctgatacatccgaagcacgcccattcagggggagcgtggggagagtttcacagtgcaatctgtgtccaaccaggatcgaggtgtctacagatgcagcagtgctgtctgtaccggctgtcacgctagtggcgtag

SEQ ID NO: 136038 - DNA, 1677 bp, synthetic construct
  misc_feature 1..1677: note = Description of Artificial Sequence: Synthetic coding sequence
  source 1..1677: mol_type = other DNA
atggcagagctcaacacccatgtgaatgtaaaagagaaaatttacgctgtgcgttctgtggttcccaacaagtcaaataacgaaatcgtcctcgtccttcaacagtttgacttcaatgttgataaggcagtgcaggccttcgtagatggaagcgctatacaggtcctgaaggagtggaacatgaccgggaagaaaaaaaataacaagagaaaacggagcaaatctaagcagcaccaaggcaacaaagatgctaaggataaagtggagagacccgaggccggccccttgcagcctcaacctcctcagatccagaacggtccaatgaatggctgtgaaaaggattctagcagcactgattccgcaaatgagaaacccgctctgattcccagggagaagaaaataagcattctggaagaaccttcaaaggcccttcgaggtgtgaccgaggggaacagactcttgcaacagaagctgtccctggacggcaacccgaagccgattcatggcacaactgagcgctccgacgggctgcagtggagtgctgaacagccctgcaacccttccaaacctaaggcgaaaactagtcccgtgaagtccaacactccagccgctcacctggaaatcaagccagacgaactggccaaaaagaggggcccaaacatagaaaagtcagtcaaggatttacagagatgcactgtatcactcaccaggtatcgggtgatgatcaaggaagaggtggactcatctgtgaagaagattaaagcagcgtttgccgagttacacaactgcatcatcgataaggaggtcagcctgatggccgagatggacaaagtcaaggaggaagcaatggagatcctcaccgccagacagaaaaaggctgaggagctcaagaggctgacggacctcgccagccagatggccgaaatgcagctcgcagagcttagggccgagattaagcattttgtgtcggagcggaagtacgacgaggaactggggaaagctgcacgtttctcctgtgacattgaacaacttaaggctcagatcatgctatgtggggaaatcacccatccaaaaaacaactacagcagtagaactccttgttcttctttgctgcctttgctgaacgcccacgctgctactagtggaaaacagagtaacttctcccgcaaatcatcaacgcataataaaccatcagaaggtaaagctgccaatccaaagatggtgtcctccctgccatctacagctgacccttcacaccagactatgcctgctaataagcagaacggtagcagtaatcaaagaagacggttcaacccccagtatcataacaacaggttaaatggtcccgctaagagccaggggtcaggcaatgaggccgagccactggggaaaggcaattccagacatgaacaccgtcgtcagcctcacaacggctttaggccgaaaaataagggcggcgcaaaaaaccaggaagcatctctgggcatgaagacacctgaggcaccagcccattcagagaagcctcggaggcggcagcacgctgccgatacatcggaggcacgtccgttccgcggttcggttggaagagtgtcccagtgcaacctgtgccccacacgcatcgaagttagtactgatgcggcggtgctgagcgttccagctgtcaccttggtggcgtag

SEQ ID NO: 136039 - DNA, 465 bp, synthetic construct
  misc_feature 1..465: note = Description of Artificial Sequence: Synthetic coding sequence
  source 1..465: mol_type = other DNA
atggccgagctaaacacgcacgttaacgtgaaagagaagatttatgcagtgagaagtgtggtgcctaataagagtaacaatgaaatcgttctggtgctccaacaatttgatttcaatgtggacaaagctgtccaggcttttgtcgacgggtccgccattcaggtgctaaaagaatggaacatgacaggcaagaagaaaaacaacaagaggaagcgctccaaatctaaacagcaccaaggcaataaggacgcaaaggacaaggtggaacggcccgaagcagggcccctgcagccccagccaccacaaatacagaacggaccaatgaatggttgcgagaaggatagctcgagtaccgattcagccaacgaaaagccggcgttgattcctcgagaaaagaaaatctctattctcgaggagccctctaaggctttgcgaggcgtcactgaagggaatcgacttctctag

SEQ ID NO: 136040 - DNA, 423 bp, synthetic construct
  misc_feature 1..423: note = Description of Artificial Sequence: Synthetic coding sequence
  source 1..423: mol_type = other DNA
atggctgagctaaatacacacgtgaacgtcaaggagaagatttacgcggtcagatctgttgtaccgaataagtctaacaatgaaatcgtccttgtgttacagcaattcgattttaacgtcgacaaagcagttcaggcttttgtagatggttccgcaatccaggtgctgaaggaatggaatatgactggtaagaaaaaaaataacaaacgcaagcgcagcaagtccaagcagcaccaagggaataaagacgcaaaagataaagtggagcgacctgaggcaggacctctgcagccccagcctcctcaaattcaaaacggcccaatgaacggatgcgaaaaggattcatcatctactgactcagctaacgagaaaccagctttaattccccgggaaaaaaagatttcaatcctggaggagccctag

SEQ ID NO: 136041 - DNA, 42 bp, synthetic construct
  misc_feature 1..42: note = Description of Artificial Sequence: Synthetic coding sequence
  source 1..42: mol_type = other DNA
atggctgagctcaacactcacgtgaatgtcaaggagaagtag

SEQ ID NO: 136042 - DNA, 285 bp, synthetic construct
  misc_feature 1..285: note = Description of Artificial Sequence: Synthetic coding sequence
  source 1..285: mol_type = other DNA
atggccgaactaaatacacatgtaaacgtgaaagaaaagatttacgccgtgaggtcagtcgtgccaaataagagtaataatgaaatcgtgctcgtgctgcagcagtttgacttcaatgttgataaggctgtacaagctttcgtcgatggatccgctattcaggtgcttaaggagtggaatatgactggcaagaaaaagaacaataaacgcaagcgctccaaatcaaaacagcatcagggaaacaaagatgcgaaagacaaggtggaaagaccggaagctggatag

SEQ ID NO: 136043 - DNA, 348 bp, synthetic construct
  misc_feature 1..348: note = Description of Artificial Sequence: Synthetic coding sequence
  source 1..348: mol_type = other DNA
atggcggagctgaatacccacgttaacgtgaaggaaaagatatacgcggtgcgctcagtcgttcctaacaaaagtaataacgagatcgttctcgtgctccagcagttcgacttcaatgtggacaaagccgtgcaggccttcgtggatgggtccgccatacaggttttgaaagaatggaacatgacaggaaagaagaaaaacaacaagcgcaaaagatccaagagtaagcaacaccagggcaataaagatgctaaggacaaggtcgagcgacccgaagccggtcctcttcagccgcagcctccacaaatacagaatgggccaatgaatggctgtgagaaggatagttag

SEQ ID NO: 136044 - DNA, 72 bp, synthetic construct
  misc_feature 1..72: note = Description of Artificial Sequence: Synthetic coding sequence
  source 1..72: mol_type = other DNA
atggcggaactcaatacacacgtcaacgtgaaagagaagatctacgccgtcagatctgtcgttcccaactag

SEQ ID NO: 136045 - DNA, 522 bp, synthetic construct
  misc_feature 1..522: note = Description of Artificial Sequence: Synthetic coding sequence
  source 1..522: mol_type = other DNA
atggccgagctaaatacccatgtaaacgttaaagagaaaatctacgcggtcagaagtgtcgtcccaaataagagtaacaacgagattgtgctagtcctacagcagttcgatttcaacgtcgataaggccgtgcaggcctttgtcgacgggagcgctattcaagtcctgaaggagtggaacatgaccggtaaaaaaaagaacaacaagaggaaacgcagtaaatccaaacagcaccaaggaaacaaagacgctaaagacaaagtggaacgcccggaagccggcccattgcagcctcagcctcctcagatccagaacggacctatgaacgggtgcgaaaaggatagcagcagcacagatagcgcaaacgagaagccagctttaatcccacgggagaagaagatcagtattctagaagagcctagcaaggccctgcgcggagtgaccggcccaaacattgaaaaaagtgtcaaagacttgcagcgctgcactgtgtcgctcacccgctatagggttatgatctag

SEQ ID NO: 136046 - DNA, 1677 bp, synthetic construct
  misc_feature 1..1677: note = Description of Artificial Sequence: Synthetic coding sequence
  source 1..1677: mol_type = other DNA
atggcggaactcaatacccacgtgaacgtgaaggagaaaatctatgctgtacgtagcgtcgtgcccaataagtccaacaatgagattgtcttggtccttcagcagtttgatttcaacgtggataaggctgtccaggctttcgtggatggcagcgcaatacaggtgctcaaggagtggaacatgacgggaaaaaagaagaataataagcggaaacgaagtaaaagtaagcaacatcagggaaacaaggatgcaaaagacaaagtggagcggccagaggcaggtccactccaaccccaaccacctcagatacagaacggcccgatgaatggatgtgagaaggactcttccagtactgactcggctaatgagaagcccgctctgattccccgcgagaaaaagatttctattctcgaggaaccatctaaagcattaagaggtgtgaccgaaggtaataggcttctgcagcagaagctgtcactagatggaaacccaaaacctatccacgggacaacagagaggtcagacggccttcagtggagcgccgagcagccttgtaacccatccaagcctaaggccaaaaccagccccgttaagtctaatactcccgcggcccacctggagatcaaaccggatgagctcgcaaagaagaggggccccaacattgagaagtctgtgaaggatttacaaagatgcactgtctctctcacaagatatagagtcatgataaaagaggaggtggactcgtccgttaaaaagataaaagccgcttttgccgagttacacaactgtattatcgataaagaggtctcgctgatggcggagatggacaaggtcaaggaagaggctatggaaattttgacagctagacaaaagaaggcagaagagctcaagcggttgactgacctggcttcccagatggctgagatgcagctggcagagctgcgggccgagatcaaacatttcgtgtctgaaagaaaatacgatgaggaacttggtaaagcggctcggttctcttgcgacatcgaacagctaaaggcccagataatgctatgtggagaaatcacccacccaaagaataactactcctcccggaccccttgctcatctctccttcctttgctgaatgcccatgccgctaccagtgggaagcagagtaacttttcccgcaagtcatctacccacaataagcccagtgaaggcaaagccgccaaccccaagatggtgagttcactcccctcgactgccgatccgtctcatcagaccatgccagccaacaaacagaacggtagctccaaccaacggcgtcgctttaacccgcagtaccacaataatagactgaatggtcctgccaaaagccagggctctggcaatgaagctgaacctttaggcaaagggaactctcgacatgagcatcggagacagccccataatggttttagaccgaagaacaaggggggagctaagaaccaggaggcaagcttgggcatgaagactcctgaggctcccgcccactccgaaaaacccaggcgaagacaacatgcagcagacacctcagaggctcgaccatttaggggctccgtcgggagagtgtcccagtgcaatctgtgtccaacccggatagaagtaagcaccgacgcagcagtcctgtccgtgccagctgtgaccctggtggcctag

SEQ ID NO: 136047 - DNA, 567 bp, synthetic construct
  misc_feature 1..567: note = Description of Artificial Sequence: Synthetic coding sequence
  source 1..567: mol_type = other DNA
atggccgagctcaatactcacgttaatgtgaaggagaaaatttacgccgtccgatcagtggtgcccaacaagtctaacaatgaaatcgtgctggtgctgcaacaattcgattttaacgtggataaagcggtccaggcttttgtcgatggcagcgcaatacaagttctcaaggaatggaacatgacaggaaagaagaagaacaacaagaggaagagatcaaagtccaaacaacatcaaggaaataaagacgcgaaggacaaggtcgagcgcccagaggcagggccactgcaaccccagccaccccagatccaaaatggacctatgaatggttgcgagaaagactcctcatcaacagattctgcaaacgagaaaccagccttgatccctagggagaaaaagatctccatcttagaggaaccctcgaaggccttacggggcgttaccgaggggaacagactgctgcagcagaaactttcccttgatggaaatcctaagcccatccacggcactacagagcggtcagatggcctccagtggagtgcagaacagccctgcaatccctcatag

SEQ ID NO: 136048 - DNA, 909 bp, synthetic construct
  misc_feature 1..909: note = Description of Artificial Sequence: Synthetic coding sequence
  source 1..909: mol_type = other DNA
atggaaccgggcccagacggacccgctgccagcgggccagctgcaataagggaaggctggttccgcgagacatgtagtctgtggccagggcaggctctttcactgcaggtggagcagctgctccaccaccgcaggtcccggtaccaggacattctggtgtttcgaagcaagacctacggaaatgtcctcgtgctagacggggtgatccagtgtactgagcgggatgaattctcctatcaggaaatgattgctaacttgcccctgtgctctcaccccaaccctaggaaggtactgattattggcggcggagacggcggggtacttagggaagtggtgaagcacccgtccgtggaatccgtagtccagtgtgaaatcgatgaagatgtaatccaggtctctaaaaaattccttcctggaatggcaataggctactccagctctaaacttactctgcacgtgggtgacggcttcgaattcatgaagcagaatcaggatgcgttcgacgtcattatcacagactcatccgaccctatggggcccgctgagagcctatttaaagagtcatactaccaattaatgaaaactgccctgaaggaggatggggtgctgtgttgtcagggcgaatgtcaatggcttcaccttgacctgatcaaggagatgcggcagttctgccagtctctgttccctgttgtcgcatacgcgtattgtactatccctacataccccagcggacaaattggctttatgctatgtagtaaaaacccgtctacaaacttccaggaaccagtgcagccactgacccagcaacaggtcgcccagatgcaacttaagtactataattccgacgttcacagagctgcctttgtcctgccagagtttgcccgtaaggcacttaatgacgtctcatag

SEQ ID NO: 136049 - DNA, 600 bp, synthetic construct
  misc_feature 1..600: note = Description of Artificial Sequence: Synthetic coding sequence
  source 1..600: mol_type = other DNA
gaggagcccccgcccccaacagtccaagttcagggccccggccctcaacgggaggagaaacagaaaacaaagatggccaagttcgttattagacccgctaccgcagcagactgctccgacatccttagacttatcaaagaacttgccaaatacgaatatatggaagagcaggtgatactcacagaaaaggacttactcgaggacgggttcggggagcatcctttctatcattgcctggtggctgaggtgcccaaagagcactggacgcctgagggcaatccctcccccttccccgaggcccgcgaaaccaaatgctattattttacttatgacccctggataggcaagctgctgtatctcgaagacttcttcgtcatgtctgattacagaggtctttggcaccgcattagaaatagcgaggagagcaagcctgggtgtaatgaggtttccctcgcagcctgcactagttgggctgagtggaatgagccgtccattaatttttataaacggcgcggcgcaagcgacctaagtagcgaggaaggatggcgtctgtttaaaatagacaaagagtacctgttaaaaatggccactgaagagtag

SEQ ID NO: 136050 - DNA, 453 bp, synthetic construct
  misc_feature 1..453: note = Description of Artificial Sequence: Synthetic coding sequence
  source 1..453: mol_type = other DNA
atggctaaatttgtgattcggcccgccaccgccgcggattgttctgacattctacgtcttatcaaagagctggcaaagtatgagtatatggaggaacaagtcatactgactgagaaaggcaattctactgttgctggccgaggaacttcagttagatgtctatcacccagtccccgcccgctgcccccactgctcccactgctcgctgacttgctggaggatgggtttggtgagcatcctttctaccactgtttggtcgccgaagttccaaaggaacactggactccagaggggaatccttccccctttccagaggcccgcgaaactaagtgctacgtgaggagctcagtcgggtgcgtggaacccctgactacacaggcagaggttactgaaaaccttgaccggaagaactcacagcaggtgtttaagctcttaagaaaaaagaagaactag

SEQ ID NO: 136051 - DNA, 363 bp, synthetic construct
  misc_feature 1..363: note = Description of Artificial Sequence: Synthetic coding sequence
  source 1..363: mol_type = other DNA
atggcaaagttcgtgatacgccccgccacagccgccgactgttcagatatcctcaggctcattaaggaactggctaaatatgagtacatggaggaacaagtgattctcaccgaaaaagacctgctcgaagatgggttcggcgaacatccattttatcactgcctagtcgccgaagtgcccaaagagcactggacccccgagggaaatccctccccttttcccgaggcccgcgagaccaagtgctatgttcgcagcagtgtgggctgtgtagagcctcttaccactcaggcagaagtgaccgaaaatctggataggaagaattcccagcaggtgttcaagctgctccgcaagaaaaagaactag

SEQ ID NO: 136052 - DNA, 432 bp, synthetic construct
  misc_feature 1..432: note = Description of Artificial Sequence: Synthetic coding sequence
  source 1..432: mol_type = other DNA
atggctaagtttgtcattcgtccagcaaccgccgccgattgttcagacattttgaggcttatcaaagaacttgccaaatacgaatatatggaggagcaggtgatattgactgagaaaggacactctattgtgggattcgccatgtactattttacctatgatccgtggatcggtaagcttttatatctagaggattttttcgtaatgagcgattaccgaggcttcggtattgggagcgaaatcttgaagaatctaagccaagtggccatgagatgcaggtgctcgtcaatgcatttcctcgtggccgaatggaacgagccctctattaacttctataagagaaggggagccagcgatctgtctagtgaggagggctggcgcttgttcaagatcgataaagaatacctgctgaagatggcaactgaggagtag

SEQ ID NO: 136053 - DNA, 516 bp, synthetic construct
  misc_feature 1..516: note = Description of Artificial Sequence: Synthetic coding sequence
  source 1..516: mol_type = other DNA
atggcaaagtttgtcataaggcccgcaaccgctgctgactgcagcgacatccttcgtcttatcaaggagctggctaagtatgaatatatggaagaacaggtaattttgacagaaaaagacttgctggaggacgggtttggcgagcatcccttctatcactgtcttgtcgccgaggtgcctaaggagcattggacacccgagggccattccattgtggggttcgccatgtactatttcacatatgatccatggataggcaaactgctctacttggaggactttttcgtgatgagtgactatagagggttcggcatcggttccgaaattctgaaaaacctatctcaggtggcaatgagatgccgctgctcctcaatgcattttctggtggcagagtggaacgagccttctattaacttctataagaggcgcggagccagcgatctcagtagcgaggagggctggcgactattcaagatcgacaaggaatatctcttgaagatggccactgaagaatag

SEQ ID NO: 136054 - DNA, 513 bp, synthetic construct
  misc_feature 1..513: note = Description of Artificial Sequence: Synthetic coding sequence
  source 1..513: mol_type = other DNA
atggccagcgtgcgaattagggaggctaaagagggggattgcggggacatccttcggctcatccgtgagttggctgagttcgagaagttaagcgaccaagtgaagatttccgaggaagctctcagagccgacgggttcggggacaatcccttttaccactgtcttgtcgcagaaatactgcccgcaccgggaaagcttctcggtccatgcgtggtggggtatgggatctattactttatttacagcacttggaagggaaggaccatctaccttgaggatatctacgttatgcctgaatatcgagggcaagggattgggagtaagattatcaaaaaagtggccgaagtcgcactcgacaaaggatgctcacagttccgactggcggtgctggactggaaccaacgcgccatggacttatataaagccctcggagctcaagacctgaccgaagccgaaggctggcattttttttgctttcagggtgaggccacaagaaaactagcgggtaaatag

SEQ ID NO: 136055 - DNA, 750 bp, synthetic construct
  misc_feature 1..750: note = Description of Artificial Sequence: Synthetic coding sequence
  source 1..750: mol_type = other DNA
atgcccgggcagagaatcgccagtttagcttattccttactgccttacggagctggcattcccgcaccccttacgcggccgcgcttgccgaggcgcccgccccggctgcccccgcctcgaagcctccgactctttagaattcaggtgaggagaccattcaaagggagttcctgtaggctccgcgggccagggactttagtgcctgattccggagaccccgatggctttagagccgatccccgtggccagggcggtagattatggcgttacccagaggccgactccggcgaagattgccgtcctgaacttgctgaattcgagaaactgagcgaccaggtcaaaattagcgaggaagcactgcgcgccgacgggtttggagataatcctttttatcactgccttgttgccgagatcctgcctgcaccgggaaaactcttgggtccgtgtgtggtggggtacggaatttattatttcatctacagcacctggaaagggcgcaccatctacctggaagacatctacgttatgcccgagtaccggggtcaagggatcggatcaaagattatcaagaaggttgcagaggtggctctggacaagggttgttcacagtttaggctggcagtgttagattggaaccagcgggccatggatctgtataaagccctgggagcccaggacctaacggaagccgaagggtggcatttcttttgctttcagggcgaagcaactcggaaattggctgggaagtag

SEQ ID NO: 136056 - DNA, 942 bp, synthetic construct
  misc_feature 1..942: note = Description of Artificial Sequence: Synthetic coding sequence
  source 1..942: mol_type = other DNA
atggccgctgctcggcatagtacactggatttcatgttgggagccaaggccgacggcgaaaccattctgaaaggcctacaatctatctttcaggagcaagggatggctgaaagtgtgcacacatggcaggaccacggttatctcgcaacctataccaacaagaacgggcggcttccacccatcgtacgaggtggagctattgacagatattggccaacagccgatggcaggctagtagagtatgatattgatgaagttgtttacgatgaggattcaccctatcaaaatattaaaattttacatagcaagcaattcggcaatatactgattttgtctggggacgtgaatcttgcagagagcgatcttgcatacaccagagcaattatgggatccggcaaggaggattacacaggaaaggacgtgctaatcttggggggaggagacggcggaatcctttgtgaaatagtgaagctgaagcctaagatggtgacaatggtcgaaatcgaccagatggtgattgatggctgtaagaagtatatgaggaaaacctgtggtgacgtgctggacaatttaaagggggactgttatcaggtgctgatagaagattgtatccccgtgctgaaacggtacgcgaaggaggggcgggaattcgactacgtcatcaacgacctgaccgccgtgcccataagcacaagcccagaggaggactctacctgggagtttcttaggctgattctagacctatcaatgaaggtgctgaagcaggacgggaaatacttcacgcagggaaactgcgtgaacctaaccgaggccctgagtctgtacgaggagcagttgggtcgactgtactgtccggtggaattctcgaaagagatagtgtgcgtgccttcatatctggaactctgggtgttctatactgtgtggaaaaaagcaaagccatag

SEQ ID NO: 136057 - DNA, 1101 bp, synthetic construct
  misc_feature 1..1101: note = Description of Artificial Sequence: Synthetic coding sequence
  source 1..1101: mol_type = other DNA
atggcagccgcccggcacagtacgctggattttatgctgggggccaaggctgacggcgaaacaattctcaagggactgcagagtattttccaagaacaaggcatggccgagagtgtccatacctggcaagaccacggatacctggcaacgtatactaataagaacggctcctttgcaaatctgaggatataccctcatggacttgttcttctggatctacagtcctatgacggcgatgcccagggaaaggaggaaatagactcgatcttgaataaagttgaggagagaatgaaagaattaagccaggactcgactggccgagtgaagcgcctcccccctattgttcggggaggagccatcgataggtattggcctacggccgacggaaggctcgttgaatacgacattgacgaggttgtctatgatgaggattccccttaccagaacataaagatattacacagtaagcaatttggaaacattctcattcttagcggggatgtcaatctggcagagtccgacctggcctatacgagggctattatgggctcaggtaaggaagactacaccggaaaggacgtgttgattttgggcggaggtgacggcggcatactctgtgagattgtgaagctaaagccaaagatggttacgatggtcgagattgatcagatggttattgacggttgcaaaaagtatatgagaaaaacatgtggcgacgttctagacaatttgaagggggattgctatcaggtcctgatcgaagactgtatcccagtcctgaagcgatacgcgaaggaaggccgggagtttgattacgttataaacgatctcaccgctgtccccatctcaacctctccagaagaggactcgacgtgggagttccttcgtctcatcctggacttatctatgaaagtgctgaagcaggacggtaagtacttcacccaaggcaattgtgtaaatctgaccgaagccttaagtctatatgaagagcagctgggtagactgtattgccccgtggagtttagcaaagaaatcgtctgtgtgccttcatatctcgagctgtgggtattttataccgtgtggaaaaaggcgaagccctag

SEQ ID NO: 136058 - DNA, 828 bp, synthetic construct
  misc_feature 1..828: note = Description of Artificial Sequence: Synthetic coding sequence
  source 1..828: mol_type = other DNA
atgaaagaactgtctcaggattccactggccgggtaaaaagattacctcctatagtcagaggtggggccatagacagatactggcccactgcagatggtagactcgtggagtatgacatagatgaggtcgtgtacgacgaggactcaccataccagaacataaagatcctgcactcaaaacagttcggtaatatccttatcctttccggggatgtgaatctcgcagagagcgacctggcgtatacccgagccataatgggcagtgggaaagaggactacaccggcaaggatgttctgattctcggaggaggagatggcgggattctgtgtgaaatcgtgaagctgaagcctaaaatggtcacaatggtcgagatagaccagatggtaattgacggttgcaaaaagtatatgaggaaaacatgcggcgatgtcctagacaacctgaaaggcgactgttatcaagtgcttatcgaggactgcattcccgttctgaaacgttatgccaaagaggggcgcgaatttgactatgttataaatgatctcaccgctgttcccattagcaccagcccagaagaagacagtacatgggaattcctccgtctcattttggatttgtccatgaaggtgctgaagcaggatgggaaatacttcacacagggcaactgcgttaatctgacagaagccctgtccctctacgaggagcagctaggtagactctactgccctgtagaattctcaaaggaaattgtctgcgttccaagctatctcgagctgtttctgctccagttttggcgcgtgagaagcagtaagtgtgcactggaaggttag

SEQ ID NO: 136059 - DNA, 936 bp, synthetic construct
  misc_feature 1..936: note = Description of Artificial Sequence: Synthetic coding sequence
  source 1..936: mol_type = other DNA
tgaggcggtagggcagaggccgcactgcttctggccccgaggtccgtgcccgcagcagcccgtggtctgcagggacagagccgggttcctgccgggagagccgctcttccaggcccaggaagacctcccgctcttccgaggggacttgccgccttcgctcttcccctcggcgagtccccgggttgccgggcccgcgccgacccaccttgggatgaagggtgtagggattgcgggggcgcccgtcgcgacccccgaggagaacccggcctcggcgcctgcgcagagcggggttgcccccgagatctgtttctttttctccaggccgcggacggcgaaactattctgaaaggactccagagcattttccaggaacagggcatggccgagtccgttcatacttggcaggaccatggatacctcgccacctataccaacaagaacgggagcttcgctaatctgaggatttatcctcacggcttggtgttattggatcttcaatcatacgatggcgatgcccaaggaaaggaagagatcgacagcatcctcaataaagtggaggaaaggatgaaggagctgagccaggactcgacgggcagagttaaacgcctccccccaatcgttagggggggcgctatcgacaggtactggcccactgctgatggcagactagtggagtatgatatagacgaagtggtgtacgatgaggacagcccataccaaaacattaaaatactacattctaaacagtttgggaacatacttattctgtccggggacgttaacctggccgagtccgacttagcttacacacgcgcgatcatgggctctggcaaggaagactacacgggcaaagacgtcttgattctcggagggggtgatggcggcatcttgtgcgagatcgtcaagctgaaacctaagatggtgaccatggtgtag

SEQ ID NO: 136060 - DNA, 3801 bp, synthetic construct
  misc_feature 1..3801: note = Description of Artificial Sequence: Synthetic coding sequence
  source 1..3801: mol_type = other DNA
cgtgaggctacccccccactgcgggggctgccagcgcccccgcggcatgcccccttccccgctggacggtttgagccacctagaacgaaacagggaggacgaggatcccacaccccgtgggtgtacgtcattaacgacttgggtatcgaggagaacctgaagaacgacggaaaaccgaagtgccagacagggggaaaatcgaaacgaactatccaaggtactcataagacaactaagcagcagagcaccgctgttgattgcaagattacctcttctaccacaggagacaagcattttgacaagagccctactaagactaggcacccaagaaagattgatctacgggctaggtactgggcctttttattcgacaacctcaggagggcagtggacgaaatctatgtgacgtgcgagtctgaccagtccgtagttgaatgtaaggaagttctgatgatgctggacaactatgtgagggattttaaggccctgatagactggatccagctccaggaaaagctggaaaagacagacgcacagagccggccaacatctctggcttgggaggttaaaaagatgagcccgggccgacacgtcatccccagcccatccactgaccgaattaatgtgaccagtaacgccaggaggtccctaaatttcgggggtagcacagggactgtgccagcaccccgcttagcaccaaccggcgttagctgggcagacaaggttaaggcccaccataccggctccacagcgagttcagagatcacgccagcccagtcgtgcccacctatgactgtgcagaaagcttctaggaaaaacgagcgcaaggacgctgagggttgggaaaccgtgcagcggggcaggcctatcaggagcagatctactgcggttatgcccaaggtgagtctggctactgaggccacccgcagtaaagatgactcagacaaagaaaatgtgtgtctgttgcctgatgagagcattcagaaaggacagttcgtaggtgatggcacatccaacaccattgagtcacaccctaaagacagcctccactcctgcgaccatccactggcggagaagacacagttcactgtttctaccctggatgatgtaaagaacagcggctctatccgggataactacgtgaggacaagcgagatttcagcggtgcatatcgacaccgagtgtgtgtctgttatgctgcaggcagggacccctcctcttcaagtgaatgaagagaagttccccgctgagaaggcaaggattgaaaacgagatggacccttctgacatctccaacgtgtccgcagcaaacctttctatggccgaggttctcgctaagaaggaggagcttgctgaccggttggagaaagccaatgaggaggccatcgcctccgccattgcggaagaagagcagctcacgcgggaaatagaagccgaggagaacaacgacattaacatcgaaaccgacaacgatagcgacttctctgcttcaatgggatccggatctgtttccttttgtggaatgagcatggattggaacgatgtcctcgccgattacgaggctcgtgaaagctggcgccaaaatacatcctggggagatatcgttgaggaggagcctgcccggccccccggccacggcattcatatgcatgaaaagctgagcagtccctcccgcaagcgtactattgcagaaagcaagaaaaaacacgaagagaaacagatgaaagcccagcagctgagggagaagcttagggaggagaagaccttgaagcttcagaaattgctagaacgggaaaaggatgtcagaaagtggaaggaagaactcttggaccagagacgtcgaatgatggaggagaaactcctacacgctgaattcaagcgcgaggtacaactgcaggccattgttaaaaaagctcaagaggaggaggctaaggttaatgaaatcgcctttatcaacacacttgaggcccagaataaaagacatgatgtactgtccaaacttaaagagtatgaacaacgcctcaacgagttgcaggaagagcgacagagacgtcaggaagagaagcaagccagagatgaagcggtgcaggagcggaaacgcgcattagaggctgagcggcaggcccgtgtagaagagcttctaatgaaaaggaaagaacaggaggcccggatagagcagcagcgacaggaaaaggagaaggcccgcgaggacgccgctcgagagcgggcccgtgatagagaagagcgccttgccgcactgaccgccgcccaacaagaagcaatggaggaactgcaaaagaaaattcagctgaagcacgatgagagcattcgcaggcacatggaacaaatcgaacagaggaaggagaaagccgctgagttgagctcaggccgtcacgctaacaccgattatgcacctaagctcacaccgtatgaaagaaaaaaacagtgcagtttatgcaacgtcctgatctcaagcgaggtgtacctgttttctcatgtaaagggacgtaagcatcagcaggcggtgcgcgagaacactagtatccagggaagagaactatctgatgaagaagtggagcatttgagcctgaaaaagtacatcatcgatatagtggtcgagtccaccgctcccgcggaggccttaaaggatggagaagagcgtcagaaaaataaaaagaaggcaaaaaaaatcaaagccagaatgaacttccgggctaaggagtacgagagccttatggaaaccaagaatagtggatcagactctccctataaggcaaaattgcagaggttggccaaggacctcctgaaacaggtgcaagtgcaggactctggaagctgggctaataacaaggtgtccgccctggacaggacactcggcgagatcacacggatcctggagaaggagaacgttgctgaccagattgcgtttcaggcagccgggggcctaacggctctagaacatatcttgcaggccgtcgtcccagcgacaaatgtcaacactgtgctgaggatcccccccaagagcttgtgtaacgccataaatgtctataatctcacttgtaacaattgctcagagaactgcagcgacgtgctgttctctaataaaatcacgtttctgatggatcttctgatccatcagttaaccgtgtacgtaccagacgagaacaacactatactcgggcgcaacacaaataagcaggtgttcgagggccttacaactggtctgttgaaggtcagtgctgtggtgcttggctgtctgattgcaaatcggcccgatggaaattgtcagcctgcaactccaaagatccccacccaggagatgaaaaacaagcctagccagggtgatccattcaacaaccgcgttcaagacctaattagttacgtggtgaatatgggactcattgacaagttatgcgcctgctttctctctgtgcagggacctgtggatgagaacccaaagatggctattttcctgcagcacgctgccggcctgcttcacgcaatgtgtaccctctgttttgcggtgacgggccgcagttattcaatattcgataataacaggcaggatcctactggacttacagcagccctacaggctacagatctcgccggtgtcttacacatgctctattgcgtcctgtttcatggcaccattctggatccgagcacagcctcgcccaaggagaactatacccagaatacaattcaagtggcaatacagtcacttcgattttttaacagctttgcggcccttcatctgcccgcgtttcaggtgccctctatcgggctgtaccgatgttag

SEQ ID NO: 136061 - DNA, 4203 bp, synthetic construct
  misc_feature 1..4203: note = Description of Artificial Sequence: Synthetic coding sequence
  source 1..4203: mol_type = other DNA
atgatggcatcatttcagagatcaaactctcacgataaggtccggaggatcgtcgccgaggaaggtagaacagcccgcaatttgatagcatggtccgtcccattagaatctaaagacgatgacggcaaacccaagtgccagacgggtggaaagtcaaagcgaaccatccagggaacacacaagacgaccaagcagtccacagctgttgattgcaagatcacctccagtaccactggggacaaacattttgacaaaagccccacaaagacccggcatccacggaaaatcgacctgagggccagatattgggcgttcctctttgacaatctacgaagggcagtggatgagatctatgtgacgtgcgagtcagaccagtccgtggtcgaatgtaaagaagtccttatgatgctcgataattacgtgcgggattttaaagccctgatagattggattcagctccaggaaaagttagaaaaaaccgatgctcagagccgcccaacaagccttgcctgggaggttaaaaaaatgtccccaggccggcacgttatcccatcaccctcaacagatagaattaacgtgacctccaacgctagacgttcactcaatttcggcgggtctacaggcacagtgcccgcacctcgactcgcgcccaccggtgtgtcgtgggctgacaaggtaaaagctcaccacaccggtagcactgcctcttctgagatcacccctgcgcagagctgtcccccaatgactgttcagaaggccagtcggaagaacgaaaggaaggatgcggaggggtgggagactgtgcaacgcgggcgccctattagatcccgttcaaccgctgtgatgcccaaggtctcactggcgacagaggctactcgcagtaaggatgatagtgataaggaaaacgtgtgcctgctgcccgacgaaagtatccagaaggggcagtttgtcggagacggcacgagcaataccattgaaagccatccaaaagattccctccatagctgtgaccacccgctggcggagaaaacgcaattcactgtctctaccctggacgacgtaaaaaattctggctctatccgcgacaattatgtccgcaccagtgaaatttccgccgtgcacattgacaccgaatgtgtgagcgtgatgctccaggctgggaccccacccctgcaggtgaacgaagagaagtttccagccgagaaagcccgcatcgagaacgagatggaccctagtgatatcagcaatagtatggctgaagtgctcgctaaaaaggaagaattagctgaccgattagagaaagccaatgaggaggcgatcgcttcggcaatagccgaggaggagcaactgacgagagaaatcgaagccgaagagaacaatgatatcaacatcgaaaccgacaacgattccgatttctctgccagtatggggtctggcagcgtgtccttctgcgggatgtctatggactggaacgacgtgctggctgactacgaggcccgagagtcctggcgacagaacacttcctggggtgacattgttgaagaggaacccgcgagacccccagggcacggcattcacatgcatgagaagctgtcatcaccatcccggaagcgaaccatagccgaaagtaagaaaaaacacgaggaaaaacagatgaaagctcagcagttaagggaaaagctgcgtgaggagaagaccctgaaactgcagaagctgctcgaaagagaaaaagatgtgcgaaaatggaaggaagagttactcgatcaacgaagaagaatgatggaggaaaagcttctgcatgcggagtttaaaagagaagtgcagttacaagctattgttaagaaggcccaagaagaggaagcaaaagtgaatgaaattgcctttatcaatacactcgaagcccagaacaaaaggcatgacgtgctaagtaagcttaaagaatacgaacagaggctcaatgagctacaggaagaaaggcaacgccgtcaagaagagaaacaggcccgcgacgaagccgtccaggagagaaaacgcgcactagaggctgagcgacaggcaagggttgaagagctgctgatgaagcggaaagaacaagaggctcgtatagaacagcaaaggcaggagaaggaaaaggctcgggaggacgctgccagggaaagggcccgggatagggaagagaggctagcggccctgaccgcagcccagcaggaagcgatggaagaactgcaaaaaaaaatccagctgaagcacgatgagagtattagacggcatatggagcagatcgagcaacggaaggagaaggcagccgagctcagtagcggaagacacgccaacactgactatgcccccaagttaacaccatacgagaggaaaaaacaatgttctttgtgtaatgtattaatttccagcgaggtctatcttttcagccacgtaaagggtcggaagcatcagcaggccgtgcgggaaaatacttcaattcaaggaagggagctctccgacgaagaagttgaacatctgtcactgaagaagtacattattgatattgtggtggaatccacagctccagcagaggccctgaaggatggggaagagcggcaaaaaaacaaaaagaaagctaagaagatcaaggcccggatgaacttccgggcgaaggagtatgaaagcctgatggagactaagaattctggctctgactccccctataaagccaagctgcaaagactggccaaagacctgctcaagcaagtgcaggtgcaggatagtggatcttgggctaataacaaagtctctgccctcgacagaaccctcggggagattacaagaatattagaaaaggaaaatgtcgcagatcagattgccttccaagcagccggggggcttacagcactcgagcacatcctccaggcggtagtgcctgccacgaacgtcaataccgtccttcggataccgcccaaatcactatgcaacgcaatcaacgtgtataatctgacatgcaataactgttcagaaaattgcagcgacgtgctcttttccaataaaatcacttttttgatggatctgttaattcaccagctcaccgtttacgtgcccgatgagaacaacacaatattgggcaggaacaccaataagcaggtgtttgaaggccttactaccggtctactgaaggtgtcggccgtggtgctgggctgtctgattgccaaccgccccgacggcaactgccagcctgctactcctaagatcccaacccaagaaatgaagaacaaaccttcccaaggggatccctttaacaaccgggtgcaagacctgattagttatgtggtcaacatggggttgattgacaagctgtgtgcctgttttcttagcgtgcaaggaccagtcgacgagaacccgaagatggccatctttcttcagcacgctgccggtctgttgcatgccatgtgcactctatgttttgcggtcacaggacgctcctattctatcttcgataacaacaggcaagacccaactggcctgacagccgctttacaagccactgacctggccggggtcttgcatatgctgtactgtgtgttattccacggcactattttggacccctcaacagccagtcccaaagagaactacacgcagaacacaatccaggtggcgatccaaagcctccgcttctttaactctttcgctgctttgcatctgccggcttttcagtcaatcgttggagccgaggggctgagcctggcgttccggcatatggcctcttctctgttaggccattgttcccaagtgtcctgcgagagtctcttgcacgaggtcatcgtctgtgtgggctacttcacagtgaaccaccctgataatcaggtgatcgtgcagtccggcaggcatcccacggtcctccagaaactttgccagttgccttttcaatacttctctgatccccggctgatcaaggtgctgtttccaagtctcattgccgcctgctacaacaaccatcagaataagattattctcgagcaggaaatgtcctgcgtcctgttggccaccttcattcaagatctggcccagacacccggacaggccgagaatcagccctatcaaccaaagggaaagtgtctgggcagccaggactatctggaacttgccaaccgctttccacagcaagcatgggaagaggccaggcaatttttcctgaagaaagaaaagaaatag

SEQ ID NO: 136062 - DNA, 3465 bp, synthetic construct
  misc_feature 1..3465: note = Description of Artificial Sequence: Synthetic coding sequence
  source 1..3465: mol_type = other DNA
atgaagactaagtacattttctgcaacattaccgaaaggaaggatgccgaaggctgggagaccgtccagcgtgggcgcccaattcggtctcgctccaccgcagtcatgccgaaggtttctctcgccaccgaggctacccgatctaaagacgattccgataaagaaaatgtgtgcctcctgcctgacgagtctattcagaaagggcaattcgttggcgacggcacgtctaataccatcgagtctcacccaaaggattcgctgcattcatgtgatcatccactggccgagaagacccagttcaccgtatccaccctggacgatgtaaaaaacagtgggtctattcgcgacaattatgtcaggacaagtgaaatcagcgccgtgcacatcgacacagagtgtgtttccgtgatgctccaagcgggaacacctccgctacaggtgaatgaggaaaagttccccgcggaaaaagccaggatagagaacgaaatggatccctctgatatctcgaactcaatggctgaggtgctggccaaaaaggaagaactggccgatcgactggagaaagccaatgaggaggccatcgccagcgctattgccgaggaggaacagttgacgagagagatcgaggcagaagaaaataacgatatcaatatcgaaacagacaatgacagtgatttttcggcctcaatgggttccggatctgtgtcgttttgcggtatgagcatggactggaacgacgtcctagccgattatgaagcgagagagtcctggcggcagaataccagttggggggacattgtggaagaagagcccgcgaggccacccggacatggcatccacatgcacgaaaaactttcttcccccagtcgaaagcgcacaatcgccgagagcaagaagaaacatgaagaaaaacagatgaaggcccagcaactgagggagaagctgcgggaggaaaagacgctgaaactgcagaaactgctggaacgcgaaaaagatgtccgcaagtggaaggaggaactcctggatcagagacgcagaatgatggaggagaaactgcttcacgctgaattcaaaagagaggtccaacttcaggctatcgtgaagaaggcccaggaggaggaagcgaaagtgaacgagatagcgttcatcaacaccctcgaggcccagaataaacgccatgatgtgctgtccaaactgaaagaatacgagcaaaggcttaacgaactgcaggaggaacgccagcggaggcaggaagagaagcaggcacgggacgaggccgtccaggaacggaagcgggccctggaagccgagcgacaggccagggtagaggaactgctgatgaagcgcaaggagcaggaggccagaatcgagcagcaaaggcaggaaaaggagaaagccagggaggatgccgcaagggaacgtgcaagggaccgggaagagaggcttgccgccctgacagctgcacagcaggaggcaatggaagagctgcaaaagaaaattcagcttaagcatgatgaatccattagacgccacatggaacagatcgagcagagaaaggaaaaagccgccgagttgagcagcggcaggcacgccaatactgactacgcaccaaaactaactccctacgaaagaaagaaacagtgctccttgtgtaatgttctgatcagctccgaagtgtacctgtttagtcatgttaaaggtagaaagcaccagcaggcagtgcgcgagaacacatccatccagggaagggaactaagtgacgaggaagtggaacatctctcgctgaaaaagtacatcatcgatatagttgttgagtccacagcaccagccgaagctttgaaagatggcgaagagcgccagaagaacaaaaaaaaagctaagaaaatcaaggctagaatgaactttcgggccaaagagtacgaaagcctcatggagacgaagaatagtggttcagattcaccttataaagccaaactacaacggctcgccaaggacttgctgaagcaggtgcaggttcaagattccggttcatgggctaataacaaggttagcgctcttgaccgcaccttgggagaaataacccggatcctggagaaggaaaacgttgccgaccagatcgcgtttcaagcagcaggaggtctcaccgctctggagcatatccttcaagctgtcgtgccagctacaaatgttaatactgtgttacgcattcctcctaagtcactgtgtaacgccataaatgtatacaatctgacatgcaacaattgctctgagaactgtagcgatgtactgtttagcaacaagataacatttctgatggacctgctcattcaccaattgactgtgtatgtacctgacgagaataataccatcctcggcagaaacaccaataagcaggtgttcgaagggttgactaccggactgttgaaggttagtgcagttgtgcttggttgcctaatcgccaatcggccggacggcaattgccagccagctacgccaaaaatccccacacaggagatgaaaaacaaaccctcccagggggacccattcaacaacagagtacaggacctgattagctacgttgtgaatatgggtctcatcgacaagctttgcgcatgtttcctgagtgtccagggtcccgtcgacgagaaccccaaaatggccatctttcttcagcacgcagcaggcttgctgcatgccatgtgcactctgtgctttgcggttaccgggaggagctattctatcttcgacaacaaccggcaagaccccactggacttactgccgctctgcaagcgactgatttagccggcgttctgcacatgctctattgcgtgctgtttcatgggaccatcctcgatcccagtactgcatctccaaaagagaactacacacagaataccattcaggtggctatacaatctctgaggttcttcaattcatttgccgccttacacctgccagccttccagagcattgtgggcgccgagggcttaagcctcgcttttcgccacatggcgtcctctctccttggacactgtagccaggtgagctgcgaatcccttctgcatgaggttatcgtgtgcgtgggctacttcactgtcaatcaccccgacaatcaagtcattgtacagagtggtcgccatcccaccgtcctgcaaaaactttgccaattacccttccaatacttctctgacccccggttaattaaggttcttttccccagtctgatcgccgcatgctacaataaccatcagaacaaaattattctagaacaggagatgtcttgcgtccttctggcaacctttattcaggatctggctcagacgccgggtcaagctgaaaaccaaccttaccaaccaaaaggcaaatgtctaggcagccaagattacttagagctggcaaatcggtttcctcagcaggcctgggaagaggctcgacagttttttctgaagaaagaaaagaagtag

SEQ ID NO: 136063 - DNA, 4203 bp, synthetic construct
  misc_feature 1..4203: note = Description of Artificial Sequence: Synthetic coding sequence
  source 1..4203: mol_type = other DNA
atgatggcctccttccagaggtcaaactcccatgacaaagtccgtcggattgtcgcagaggagggtcggacagcccggaacttaattgcttggtctgtcccacttgagagtaaagacgacgatgggaagcctaaatgccagacaggtggaaaatccaagagaactatccagggcactcataagaccaccaagcagtccacggccgtggactgtaagattacaagctcaactacaggggataaacattttgacaagagccctaccaagacccgacacccacggaaaattgatttgagagcgcgctactgggccttcctgttcgacaatctccgtcgcgctgttgacgagatatatgtgacatgtgagagcgaccagtccgttgtagaatgtaaggaagtgctcatgatgctcgacaattatgtgcgtgactttaaggctctaatcgactggatccagttgcaagaaaagctggagaagactgacgcacagtcaagacccacatctttggcatgggaggtcaagaaaatgagcccgggacgtcacgtgattccatctccctccaccgatcgcatcaacgtgacaagcaatgccagacggagcttgaatttcggcggttccaccggcactgtccccgccccacggttagctccaaccggagtcagttgggctgataaggtgaaagctcaccatacaggatcgactgccagctcggagattacaccagcgcaatcttgcccccctatgaccgtccaaaaagcttccagaaaaaatgaaaggaaagacgctgaggggtgggagacagttcagcgaggcaggcccatccgaagccggagtaccgccgtcatgcctaaggtgagccttgctacagaggccacgaggtctaaagacgactctgataaggaaaacgtgtgtttactgccggatgaaagtatacaaaaggggcagtttgtgggggacggaacatcaaataccatcgagtcccatcccaaagactccctccattcttgcgaccaccccctggccgaaaaaacccaattcactgtgtccaccctcgatgacgtcaagaattcggggagcatccgcgacaactacgttcggaccagcgaaatcagcgcagtccatatcgacacggagtgcgtcagtgtgatgctccaggccggtaccccaccgttgcaagtgaatgaagaaaaattccctgccgaaaaggccagaattgagaatgagatggatccgagtgatatctcgaattctatggccgaagtcttagcaaaaaaagaagaacttgctgacaggctggaaaaagccaacgaggaagctatcgccagtgcaatcgcagaagaagagcagctcacccgcgaaatcgaggccgaagaaaacaacgacatcaatatcgagacggacaatgattctgatttttctgcttcaatgggatcaggatcagtctctttttgtgggatgagcatggactggaatgacgtgctggccgactacgaggccagagaatcgtggcggcagaacacaagctggggcgacattgtggaggaagaacccgcgcgaccacccggccatggaatccatatgcacgaaaagctgtccagtccttcgcgtaaaaggacgatcgccgagtctaaaaagaagcatgaggaaaaacagatgaaggctcagcaacttcgtgaaaaactccgagaggagaagaccctgaaacttcagaagctcctggagcgagagaaggatgtgcgcaagtggaaagaagagttgctcgaccaaagacgtcggatgatggaagagaagctgctgcacgcggagtttaagagggaagtccagttgcaggccattgttaaaaaggcccaagaggaagaggcaaaagtaaatgaaatagcctttatcaacactcttgaagcccagaataaacggcacgacgtgctgtccaagctgaaagagtacgagcaaagattgaacgagctgcaggaggagcggcagcggcgccaggaagagaaacaagctcgggatgaagccgtgcaggaaaggaagcgtgctttagaagcagagcgacaagctcgggtcgaggaactccttatgaagaggaaagaacaagaggccagaatcgaacagcaaagacaggagaaggaaaaggccagagaggatgctgcacgggagagagctagagatcgggaagagaggctggccgctctgactgccgctcagcaagaggcgatggaggagctacaaaaaaagattcagctgaagcatgatgagagcattcggcggcacatggagcagattgagcagaggaaagaaaaagcagccgagctgtccagcgggcggcacgccaataccgattacgctccaaaactgactccctacgaaaggaagaagcagtgcagtctttgcaacgtgcttatctcttctgaggtgtatctattctctcatgttaaaggcagaaaacaccagcaagcggtacgggaaaacacatccatccagggccgggaactttcggacgaagaggttgaacacctgtcacttaagaagtatatcattgacattgtggtggagtccactgcccctgcggaagctctgaaggacggagaggagcgacagaaaaacaaaaaaaaggctaagaagatcaaagcccgaatgaatttcagggccaaggaatacgaaagcctgatggagacaaaaaattcaggaagcgattcgccatacaaagcaaaactgcagcgcctcgccaaagatctgctgaagcaagtccaggtccaggattctggatcatgggctaacaacaaggtgagcgccctggatagaacactgggagagattaccaggatacttgaaaaggagaacgtggcggatcagatcgcctttcaagctgctggtggcctgaccgccctagagcatatattacaagctgtagtgcctgcaacaaatgtaaataccgtattgcgcattccacccaaatccttatgtaatgcaattaatgtgtataacctgacctgcaataactgtagtgagaattgttccgacgtgttgttttccaataaaataacattcctgatggatctgttgattcatcaacttaccgtttacgtgccagacgaaaacaacacaatcttaggacggaacaccaataagcaggtctttgagggcctcactaccgggcttttgaaggtgtctgcagtagtgctcggctgcctgatcgcgaaccggcctgacggcaactgtcaaccagcaacgcccaagattcccacgcaggaaatgaagaacaagccatcccagggcgaccccttcaataaccgagtccaggacctcatctcatacgtggtgaatatgggattgatcgacaaactttgcgcatgcttcctgagcgtccagggccctgtggatgagaatccaaaaatggcaatcttcctccagcatgccgcgggattgcttcatgccatgtgcactttgtgtttcgctgtaacaggacggtcttatagtatattcgataacaaccgtcaggatcccacaggattgactgctgcattgcaggccacggacttagccggcgtactacacatgctgtactgcgtccttttccatgggaccattctagatcctagtaccgccagtcccaaagaaaactacacccaaaatacgatacaggtggctatccagagcctcagattttttaactcgtttgccgcattgcacctgccggcctttcagtcaattgtcggcgccgaggggctctcactcgcattccgacacatggcctcctctttactgggccattgctctcaggtctcctgcgagtccctgctgcacgaagtaatcgtctgcgtgggatattttactgtcaaccaccctgacaaccaagtcatcgtgcagtctggacggcaccccaccgtgttgcagaagttgtgtcaactgccattccagtatttctcagatccccgacttattaaggttttatttcctagcctcatagccgcatgctacaacaatcatcaaaacaagatcatcctggaacaggagatgagctgtgtgctactggcgacctttattcaagatctggctcagaccccagggcaggccgagaaccagccttaccaaccaaagggcaagtgcctcggctcccaggattatctggaactggcaaatagattccctcagcaagcctgggaggaagctagacagttcttcctcaaaaaagaaaaaaaatag

SEQ ID NO: 136064 - DNA, 1233 bp, synthetic construct
  misc_feature 1..1233: note = Description of Artificial Sequence: Synthetic coding sequence
  source 1..1233: mol_type = other DNA
atgcatagaaagcacctccaggagattccagatctgtcctcgaacgttgccacgtcatttacttggggttgggactcgtcaaaaacttccgagctcctgagcggaatgggcgtgtctgcactggaaaaggaggaacccgacagcgaaaacattccccaggagctgctgagcaacctgggacatcccgaatccccaccaagaaaacgcctcaagagcaaaggctcagacaaggatttcgtgattgtccggcggcctaagctgaaccgggaaaactttcccggtgtttcgtgggattcactgcctgacgagttactgcttggcatattttcctgtttatgcctccctgagctgttgaaggtaagtggagtgtgcaaacgctggtatcggctggcatctgacgaatcactctggcagaccctcgacctgacaggcaaaaaccttcatcctgatgtgactggtcggctcctatctcagggggtgatcgcattccggtgcccacgtagttttatggaccagcccctggcggagcacttctcgccattcagggtacagcatatggatctctcaaactctgtgattgaggtttccactctccacggtatcttatcccagtgttcaaagctgcagaatctctctctggaagggttgcgtctgagcgaccccatcgtgaacaccctggcgaagaattcaaatctggtccgcctgaacctcagtgggtgttccgggtttagcgagtttgccctccagactctcctgtccagctgttccagactcgatgagctgaatctgagctggtgcttcgacttcaccgagaagcatgtgcaggtagccgtggctcacgtcagcgaaaccataacccagctgaatctcagtggctatcgcaagaatctgcaaaaatccgatctctccacactagtgagacgctgtcccaaccttgtacacctggatctgagtgacagcgtgatgttgaagaacgattgtttccaggaatttttccaactgaattatctgcagcatctgtctctttcgcgctgctacgatattatacctgagactctgctgctagtaactcgggcgggagtacgcatccgccttgactctgatatcgggtgtccacagacatatagaacttctaaactcaaatcaagtcataagttattttgccaacatgttcgggttatttgcatttttgtatgcgacttttacttctaccggttggtgttaaagcagtag

SEQ ID NO: 136065 - DNA, 1275 bp, synthetic construct
  misc_feature 1..1275: note = Description of Artificial Sequence: Synthetic coding sequence
  source 1..1275: mol_type = other DNA
atgcaccggaagcacctgcaagagatccctgacctatcaagcaacgtggccacgtcattcacatgggggtgggatagttcaaagacaagtgagctgcttagcggcatgggggtctctgctttggagaaggaggaaccagattctgagaacattccccaagaattgttgtccaacctgggccaccctgaatcccctccaaggaaacgattgaagagcaagggctctgacaaggacttcgtgatcgttcgtaggcccaagctgaaccgggagaactttcccggcgtaagctgggactctctcccggatgagttgctcctaggcatcttttcctgcttatgtctccctgaactgttgaaagtgagcggggtgtgcaagcggtggtaccggctcgcctcagacgagagcctctggcagacgctcgatctgactggcaaaaacctgcatcctgacgtgacagggagactgttaagccaaggcgtcatcgctttccgttgtccaagatccttcatggaccagcccttggctgaacattttagcccatttcgcgttcagcatatggatctgtccaacagtgttattgaggtaagcaccctccacggaattctgtcccagtgttccaagttgcaaaatctgtccttagaaggcctgaggctgagtgatccaatcgtcaataccctggccaagaactcgaatctggtaagactcaacctgtctgggtgctccgggttctcagagtttgccctgcagaccttactgtcaagctgttccagacttgacgaacttaatctcagttggtgcttcgattttacagagaagcacgtccaagtggcggtagcccacgtctctgaaactattacccagcttaatctgtccggctacagaaagaatttgcagaaaagcgacctttctacccttgtcagacgctgtcccaatctggtgcatttggacctgtcagactcagtgatgctgaagaatgattgctttcaggaattcttccagctaaattacctccagcatctgagcctgagccggtgttatgacattatccccgagacactgctcgagctgggggaaattccgacgctgaaaactctgcaggtcttcggaattgtaccagacggcactctccagctcctgaaggaagctttgccccatctacaaatcaattgcagccacttcactacaattgcccggccgaccatcgggaacaagaaaaaccaggagatttgggggataaagtgcagattaaccctccagaagcccagctgtctgtag

SEQ ID NO: 136066 - DNA, 1173 bp, synthetic construct
  misc_feature 1..1173: note = Description of Artificial Sequence: Synthetic coding sequence
  source 1..1173: mol_type = other DNA
atgcatcggaagcacctgcaggagaaggaagaaccggatagcgaaaatattccccaggaactgttgagcaatttgggtcacccagagtcgcctccgcgaaagcggcttaaatcaaagggtagtgacaaggacttcgtcatcgttagaaggccgaagctaaacagagaaaattttccaggagtgtcttgggacagtttgcccgacgaattgctgttggggattttctcctgtctgtgcctcccagaactgctgaaagtctccggcgtgtgcaagagatggtacaggctagcctcggatgagtctttatggcagactcttgatctcactgggaaaaatctgcaccccgacgtgacgggacgacttctgagccagggcgtcatcgctttccgatgcccgcggtcttttatggatcagccactcgcggagcactttagccccttcagagtacagcatatggacctgagcaactccgtgatagaggtgtccaccctccatggcattctcagccagtgctcaaagctgcagaatctttctcttgaaggcctgcgcctgtcggaccccatcgttaatactctcgccaaaaatagcaatttggtaaggttgaatctctccgggtgcagtggcttttctgaattcgccctccagactctgctctcttcatgctcaagactcgatgagctgaatctaagctggtgtttcgattttaccgaaaagcatgtccaggtggccgtggcacacgtgagcgagaccattacacagctcaatctttccggctaccgaaaaaacttgcagaaatcagatctcagtacactggtgagacgctgtccaaatctggttcacctggatctgagtgacagcgttatgctgaaaaatgattgcttccaggagttttttcaactgaattatctgcagcatttatcgcttagcaggtgttatgacataatccccgaaacgcttttggaactcggcgagataccaaccctgaagaccctccaggtgttcggaatcgtacccgatggaacgctccagcttctcaaagaagctttgcctcacctgcaaattaactgttcacactttacgacaatagcccgaccaacaattggcaacaagaaaaaccaagagatttggggtatcaaatgtcggctgacactgcaaaaaccctcctgtctgtag

SEQ ID NO: 136067 - DNA, 633 bp, synthetic construct
  misc_feature 1..633: note = Description of Artificial Sequence: Synthetic coding sequence
  source 1..633: mol_type = other DNA
atggaccagcccctcgcggaacatttctctaccctggccaaaaactccaatttggtgcgccttaacctgagtggctgctccggattctctgagttcgccctgcagacacttcttagttcatgcagccgactggacgaattaaacttgtcttggtgttttgacttcaccgaaaagcacgtgcaggtagccgtcgcgcatgtgtccgagactatcacacagttgaatctctctggataccgcaaaaatttacaaaaaagtgatttgtccaccctggtgcggagatgtcctaacctcgttcacctcgacttgtctgacagcgtcatgttgaaaaacgactgctttcaggagttcttccagctcaattaccttcagcacctgtccctgagcagatgctacgatatcatccctgaaacactgctggaacttggcgaaatcccaaccctgaaaaccctgcaggttttcgggattgttccagacggaaccctgcaacttctaaaggaagctttaccgcacctgcagatcaactgctctcacttcaccaccatagccagaccgaccattggtaacaaaaagaaccaggagatctggggaattaagtgccggctgactttacagaaaccctcctgtctttag

SEQ ID NO: 136068 - DNA, 1362 bp, synthetic construct
  misc_feature 1..1362: note = Description of Artificial Sequence: Synthetic coding sequence
  source 1..1362: mol_type = other DNA
atggccctcgtccgcgcccttgtgtgttgcttactgaccgcctggcattgcaggagtggactggggctgcctgtcgcccctgctggtggtcgcaatccccccccagctatcggacagttttggcatgtcacagatcttcacctcgacccaacttatcatatcacagatgatcacactaaagtgtgtgctagcagtaaaggtgctaatgcaagtaatcctgggccctttggagacgtgttgtgtgactctccataccagcttattctctcggctttcgattttataaagaactctggccaggaggcatcattcatgatatggactggcgactctcctccccatgtgccagtgccagaactgagtaccgacaccgtcatcaatgtgatcaccaatatgaccacaacgatccaaagcctgtttcccaacctgcaggttttccctgcccttgggaatcacgactattggccacaggatcagctgcctgtagtgacttcgaaagtctacaacgcggttgccaacctttggaagccctggcttgatgaagaggcaatctcgacattgcgaaaaggcggcttttatagtcagaaggtgaccaccaaccctaacctgagaattatcagccttaatacaaatctttactatgggcccaacatcatgacattgaataagacagacccggcaaaccagttcgagtggctcgagtctacactcaacaattcccagcagaacaaggagaaagtctacattattgctcacgtgccagtcggatacttaccatcctcacagaatataacagccatgagagagtattataatgaaaagctaatcgacatattccaaaagtattccgacgtaatcgccgggcagttttatggccacactcacagagacagcatcatggtattgagtgacaagaagggatccccggttaattccttattcgtcgctcccgccgtgacacctgtgaaatctgttctcgagaaacagactaacaaccccggtatccgcttattccagtacgatcccagggattataagctgctcgacatgctacagtactatttgaacttgacggaggccaatcttaagggggaatctatttggaaattagagtacatactgacgcagacatacgatatcgaagatcttcagccagagagcctctatggactggccaagcaattcacaatactcgactctaaacagtttatcaagtactacaattactttttcgtgtcttacgacagttccgtcacatgtgacaaaacgtgcaaagcgtttcaaatatgcgcaattatgaatctagacaatattagctatgctgattgcttgaaacagctctatattaaacataactactag

SEQ ID NO: 136069 - DNA, 969 bp, synthetic construct
  misc_feature 1..969: note = Description of Artificial Sequence: Synthetic coding sequence
  source 1..969: mol_type = other DNA
atgacaacaacgatccagtctttgttccccaatctgcaagtgtttcccgccctggggaaccacgattactggccacaggaccagctgcctgtggtcacctccaaggtgtacaatgctgtggcaaatctgtggaaaccttggctggacgaggaagcgatatccactctgaggaaagggggtttttacagccagaaggttacaaccaatccaaatttacggattatctcacttaacactaacttatattacggacccaatattatgactttgaacaaaaccgatccagccaaccagtttgagtggctcgagtcaacactaaataacagccagcagaacaaggagaaggtttacatcatcgcacacgttcccgtaggctatctcccttcatcacagaatattaccgcaatgagggagtattacaatgagaaactcatcgatatctttcagaagtattcagatgtgatagccgggcagttctacggacatacacaccgggactcaattatggtcctcagtgacaaaaaaggaagcccagtgaactctttattcgtcgctccagcagtcactcccgtgaagtcagttcttgaaaagcagactaataaccccggcatccggctgtttcagtacgacccacgagactataaactcctcgatatgctccagtactacctgaatctgacagaggcaaacctgaaaggagagtcaatatggaaattggaatatatcctgactcagacttatgatatcgaagaccttcagccagagtcactatatggcctggctaaacagttcacgattttagactctaaacagtttattaaatattataactatttcttcgtgagctatgacagctctgtgacctgtgacaaaacatgcaaggcgttccagatctgcgccatcatgaacttggacaatattagttatgcggactgcctgaaacagctctacattaagcacaactattag

SEQ ID NO: 136070 - DNA, 726 bp, synthetic construct
  misc_feature 1..726: note = Description of Artificial Sequence: Synthetic coding sequence
  source 1..726: mol_type = other DNA
atgaaggaggtcgtctactggtcccctaaaaaagtggctgactggttgcttgaaaacgccatgccagaatactgtgaacctctcgagcatttcacgggccaggacctaataaacctgacgcaggaagactttaagaaacctcccctgtgccgcgtgtcgagcgacaacggccagaggttgctggacatgattgagacactaaaaatggagcaccaccttgaagcccataagaatggccatgccaacggccatctcaacataggagtggacatcccgactcccgatgggagcttcagtatcaagattaaacctaatggcatgccaaatggctatcggaaagagatgattaaaatccccatgcccgagctggaaaggagtcagtacccaatggagtgggggaaaacctttcttgcctttctgtatgccctcagctgtttcgtcctgacaactgtgatgatttctgtcgtccacgagcgggttcccccgaaagaggtgcaacctcccctcccggacacattcttcgatcacttcaatcgagtgcaatgggcctttagcatatgtgagatcaatgggatgatccttgtgggactatggcttatacaatggttgctgctgaaatataaagacgtggggaatgagagccgagttgttatgatctttctctccatcgtccatccggttttgctgttgggctccattgccggctttctctctctgagtttgtag

SEQ ID NO: 136071 - DNA, 1242 bp, synthetic construct
  misc_feature 1..1242: note = Description of Artificial Sequence: Synthetic coding sequence
  source 1..1242: mol_type = other DNA
atgaaggaggtggtgtactggtctcctaagaaagtggccgactggcttctggagaatgccatgcctgaatactgcgagcccctggaacatttcaccggtcaggacctaatcaacctgacccaggaagatttcaaaaaaccaccactctgtagagttagtagcgacaacggccaacgactcctggacatgattgagaccctaaagatggagcaccatctcgaggcgcacaagaacggccacgccaatggccatctcaatatcggagtggatatcccaacacctgacggaagtttctccataaaaatcaagcccaacggtatgcccaatgggtaccgcaaggagatgatcaaaattccaatgcccgaactcgagcgctcgcagtaccctatggagtgggggaaaacctttctcgcctttctctatgctctgtcttgtttcgtgctaaccaccgtaatgattagcgtcgttcatgaacgggtaccacccaaagaagtgcagcctcctctgcctgacaccttcttcgaccattttaacagggttcaatgggctttctcaatttgtgagatcaatggcatgatcctggtcggattatggctcatacagtggttgctgttaaaatataagtcgatcatttccaggcggttcttctgtatcgtcggtacactgtacctctaccgatgtataactatgtatgtgacaacattgcccgtacccggcatgcacttcaactgttcccctaagctattcggcgattgggaagcacaactgcggcggattatgaagctcatcgccggtggcggcctctcaatcactggctcacacaatatgtgcggggattacctgtactcaggtcatactgtcatgctgaccctgacctacctcttcataaaggagtactctcctagacggctctggtggtaccactggatctgttggttactgtcagtggtgggaatcttttgcatcctcctggcccatgatcactatactgtggacgtggtggttgcctactatataacaacacgcctgttttggtggtatcacacaatggcaaaccaacaggtgttaaaagaggcctcccagatgaaccttctcgcacgagtgtggtggtaccgcccttttcagtacttcgagaaaaacgtgcaggggatcgtacctagatcataccattggccattcccatggccagttgtccatctctctcgacaggtgaaatactcgcgcctcgtaaacgacacatag

SEQ ID NO: 136072 - DNA, 642 bp, synthetic construct
  misc_feature 1..642: note = Description of Artificial Sequence: Synthetic coding sequence
  source 1..642: mol_type = other DNA
acttatatgtatatctcaaataagagtatcattagtcgaaggtttttctgcattgttggaacattgtatctgtaccgctgcataacgatgtatgttactacgcttcccgtgccaggaatgcactttaattgctctcccaaattgttcggagactgggaggcacagctccgcagaatcatgaagctgatcgctggcgggggcttgagtatcaccggtagccacaatatgtgtggagattacctctattccgggcacactgtcatgctgacacttacctatttgttcattaaagaatattctcctaggaggctttggtggtaccactggatctgctggcttttgtccgtggtcggaattttctgcatcctgctcgctcacgaccattatacagtcgatgtcgtggttgcctactacatcaccacgcgactgttctggtggtaccatactatggcaaaccaacaagtgttgaaggaggcaagccagatgaacttgctcgctcgagtctggtggtataggcctttccagtactttgaaaaaaatgtgcagggaatcgtgccccgtagctaccactggccatttccctggccagtggtgcacctgagtaggcaggtgaaatattcacgcctggttaatgatacctag

SEQ ID NO: 136073 - DNA, 735 bp, synthetic construct
  misc_feature 1..735: note = Description of Artificial Sequence: Synthetic coding sequence
  source 1..735: mol_type = other DNA
atgggcggtagagggggggggggccgctcccgccagttgcctgggcgctttagagctcctgcagcccggtggccaggaggccggtggctaccaggagctccacgtactgttacttggtcaataatttccagacggttcttttgcatagtcggtacactgtacctctatcgttgcatcactatgtatgtaacgacactccctgtccctggaatgcactttaactgctccccaaaattatttggcgactgggaagcacagctgcggagaattatgaagctcatagcaggcggaggtttgtcaatcacagggtcacacaacatgtgcggcgattacctgtattccggtcacaccgtaatgttgacccttacttacctctttattaaagagtattctccccgacgactgtggtggtatcattggatatgctggctcctgagtgtcgttgggattttctgcattttgctggcccatgaccactatactgtggatgtggtggttgcatactatataacaacccgtctgttctggtggtaccatacgatggcgaatcagcaggtgctgaaggaagcgtcacagatgaatttgctggcccgcgtgtggtggtatcggccctttcagtattttgagaaaaatgtccaggggatagttcctaggagttatcattggccgtttccctggcccgttgtgcacctttcgagacaggtgaaatattcgaggctagtaaacgacacctag

SEQ ID NO: 136074 - DNA, 1098 bp, synthetic construct
  misc_feature 1..1098: note = Description of Artificial Sequence: Synthetic coding sequence
  source 1..1098: mol_type = other DNA
atggatatcatagaaaccgcaaagctcgaggaacatctcgagaaccaaccgtccgacccgacaaatacatatgcgagacccgccgaacccgtggaggaagagaacaagaacggaaatggaaaacctaaatccctgtcttctggcttaaggaagggaaccaagaaatatcctgactacatacagatcgccatgccaactgagagtaggaataaatttcctctggagtggtggaaaactggtatagcatttatatatgcagtgtttaatctcgtgctgacaactgtgatgattaccgtggtgcatgaaagggtaccacccaaagagctgtctccacctctgcctgacaagttcttcgattatattgatcgcgtcaagtgggcctttagcgtgtccgaaatcaacgggatcattctggtgggactgtggatcacacaatggttatttcttagatacaagtccatcgtaggaagaaggttctgctttattatagggacactctacctataccggtgcattacaatgtacgtgaccaccctgcccgtccctggtatgcacttccagtgcgcccctaagctgaatggagattcgcaagccaaggttcaaagaatattacgactgatttcaggcggtggcttgtccattaccggctcacacattctctgtggcgacttcctcttctctgggcacaccgtgacgctcaccctgacatatctcttcattaaggaatattctccaagacatttctggtggtaccacctgatttgctggctgctgagtgctgctggaattatctgcattttggttgcccacgagcattacaccatcgacgtgatcatagcttattacatcactacacgtctgttttggtggtaccatagtatggccaacgagaagaaccttaaggtgagctctcagaccaacttccttagcagagcctggtggttccctattttctatttttttgagaaaaacgtccagggctcgatcccttgctgttttagctggcccctgagttggcccccagggtgcttcaagagctcatgcaagaaatatagcagagtccagaagatcggcgaggacaatgagaaatccacatag

SEQ ID NO: 136075 - DNA, 1098 bp, synthetic construct
  misc_feature 1..1098: note = Description of Artificial Sequence: Synthetic coding sequence
  source 1..1098: mol_type = other DNA
atggacattatcgagaccgcaaagctcgaagaacatttggagaatcaacctagtgatcccaccaacacttacgccagaccggccgagccagtggaagaggagaacaaaaacggaaatgggaagcctaagtccctaagtagcgggctccgcaaggggactaaaaaatatcctgactatatacagatcgccatgcctacagaatcaaggaacaaatttcccctcgagtggtggaagacggggattgcattcatttacgctgtgtttaatttagtgctgaccacggtcatgatcaccgtggtgcatgagagggttccccctaaagaactgtctccacccttgcctgacaagttcttcgactacattgatcgagttaaatgggccttctctgtgtccgagattaacggtattattctcgttggactctggatcacccagtggctcttcctgagatacaaaagcatcgtcggtaggagattctgttttatcatcggtacactgtatttgtaccggtgtatcacaatgtatgtcactaccctgccagttcctggtatgcatttccagtgtgcccccaagctgaacggggactcacaggccaaagttcagcggattttgagactgatctcaggaggcgggctaagtatcactggatcgcatatcctatgtggcgacttcctgttctctggccacacggttaccctcactctgacatatcttttcattaaagaatacagcccacgccatttctggtggtaccacctgatctgttggttactatctgctgcggggataatctgcatcttggtggcccacgaacattataccattgacgtaataattgcttactacattaccacaaggttgttctggtggtaccacagcatggccaacgagaagaacttgaaggtaagttctcagacaaactttctgtcccgggcctggtggtttcccattttctactttttcgagaaaaatgtgcagggatccattccctgttgcttcagctggccccttagctggcctcctggatgctttaagtctagttgcaagaagtactcacgtgtgcaaaagatcggggaagataatgagaaaagtacatag

SEQ ID NO: 136076 - DNA, 1098 bp, synthetic construct
  misc_feature 1..1098: note = Description of Artificial Sequence: Synthetic coding sequence
  source 1..1098: mol_type = other DNA
atggacatcatagaaacggccaagctggaggagcaccttgagaaccagccaagtgaccccaccaatacctacgcccggcctgcagagccggtggaggaagaaaataagaacggtaacggaaaacctaaatccctttcttcaggactcaggaagggcaccaaaaagtaccctgattatatccaaattgccatgcctaccgaaagccgcaacaagtttccacttgaatggtggaaaactgggatcgcctttatttatgcagtgtttaacctagtcctgactactgtgatgatcaccgtcgtacacgagagggtcccgcctaaagaacttagtccgccgcttccagataaattctttgactacatagatcgggtgaaatgggcattctccgtgtctgaaattaacgggattatcctggtcggcctgtggatcacccaatggctgttcttgcgctataagagcatagtagggcgaaggttctgttttatcattggaactctctacctataccgatgtatcaccatgtatgtaactacactacctgtgccagggatgcattttcagtgtgctcctaagctcaatggtgacagccaggctaaggtgcagcggatcctgcggcttatttctggaggcggtctgtcaattaccgggagccacatcctctgcggcgatttcctgtttagcgggcataccgttactttaacactgacctatctgttcattaaagaatacagcccgagacacttctggtggtatcacctgatttgttggctgctctctgccgccggcattatctgcattttagtagcccatgaacactacacgatcgatgtgatcatcgcttattacatcaccactaggctgttctggtggtaccactccatggctaacgagaagaatttgaaggtctcatctcagaccaattttttatcaagagcctggtggttcccaattttctattttttcgaaaaaaatgtccaaggaagtattccttgttgcttctcgtggccgctatcctggcccccaggttgttttaaaagtagttgcaaaaagtacagtcgagtgcaaaaaattggcgaagataacgagaaaagcacctag

SEQ ID NO: 136077 - DNA, 135 bp, synthetic construct
  misc_feature 1..135: note = Description of Artificial Sequence: Synthetic coding sequence
  source 1..135: mol_type = other DNA
atggacattattgagactgccaaactggaggaacacctggaaaaccagccgtcagacccaacaaacacatacgctaggcccgcagaaccagtcgaagaagagaacaagaatggcaacggcaagccaaagagctag

SEQ ID NO: 136078 - DNA, 105 bp, synthetic construct
  misc_feature 1..105: note = Description of Artificial Sequence: Synthetic coding sequence
  source 1..105: mol_type = other DNA
atggatatcattgaaacagcaaagctagaggagcatctcgagaaccagcccagcgaccctaccaacacatacgcgagacctgctgagccggtggaggaggaatag

SEQ ID NO: 136079 - DNA, 1326 bp, synthetic construct
  misc_feature 1..1326: note = Description of Artificial Sequence: Synthetic coding sequence
  source 1..1326: mol_type = other DNA
atgtctcttcgtcagcggctagcacagctggtgggcaggctgcaggatccccagaaggtagcccgttttcaacggctgtgcggtgtcgaggctccccctaggcgatccgctgataggcgcgaagacgaaaaagcggaagcccctcttgccggtgacccaagactgcggggaagacaacctggtgctcctggcggtccccaaccacctgggagcgaccgcaaccagtgccccgcaaaacccgatgggggcggcgctccgaacggcgtcaggaatgggctcgctgcagagcttggtccagcctcacccagacgagcaggagctctcagaagaaactcacttacgggcgaagaaggccagttggcgagagtttcaaattggcccctgtattgtcttttttgtttcggaacagagctaggcaacgagctgttttatattttgttcttccctttttggatttggaatctggatccgctcgtgggcaggagactggtggtaatttgggttttagtgatgtatctgggacaatgcaccaaggatatcatacggtggcctaggccagcttctcctcctgtggtaaagctggaagttttttataacagtgaatactcgatgccctcaacacatgcaatgagcggtactgccatcccaatatccatggtattgcttacctacggacggtggcaatacccgcttatttacggcctcatcttaatcccatgctggtgttccctcgtctgtctgtctaggatttacatggggatgcattcaattcttgacatcattgcagggtttctgtacacgatccttattctggcggtgttctaccctttcgttgatctcatagacaacttcaaccagactcacaaatatgccccgttcatcatcattggactccacctagccctggggatcttttctttcactctggatacctggtctacctctaggggcgatacagccgagatcctcggctcgggagctggtattgcatgcggcagtcatgtcacatataatatgggcttggtgctggacccatccctagacactctgccgcttgcgggccctcctataaccgtcactctgttcggaaaagcgattcttcggatcctgattggcatggtttttgtgctgatcatacgcgatgtgatgaagaagattaccatccctctcgcatgcaaaatatttaacattccttgtgatgatattagaaaagctcgacagcatatggaagtcgaactcccataccgctatattacctacggaatggtgggattttcaatcaccttcttcgtgccatacatattctttttcattggcatctcctag

SEQ ID NO: 136080 - DNA, 1200 bp, synthetic construct
  misc_feature 1..1200: note = Description of Artificial Sequence: Synthetic coding sequence
  source 1..1200: mol_type = other DNA
atggccgagctgctacgcagccttcaggacagccaacttgtggcccggtttcagcggaggtgcggactctttccagcacccgacgaaggtccaagagagaatggggctgacccaactgaacgtgccgccagggtgcccggcgttgagcaccttccagcagccaacgggaagggcggcgaggcgccagctaacggcctgagacgggcagctgctcccgaggcctatgtccagaagtacgtagtgaagaattatttctactattatttatttcagttctctgcagccctggggcaagaggtattttacatcacgttcctgcccttcacccattggaacatcgacccctatctgtcgcggaggctgatcatcatatgggttctcgtgatgtatatcggtcaggtggcgaaagacgtgctcaagtggccaagaccctccagccccccagtggtgaaattagagaagagactgatcgccgaatacgggatgccgagtactcacgccatggcagctaccgccattgcgtttaccctactcatctccacaatggataggtaccaatacccttttgtgctcggactggtcatggcagtggtattttctacactggtgtgtttgagcagactgtacaccggcatgcacaccgtactggatgtgctcgggggggtgctgatcactgccttgttgattgtcctgacctatccagcctggacctttattgattgtctcgacagcgcctcacctctcttccccgtgtgtgtcattgtggttccgttcttcctctgctacaactatcccgtctcagattattactccccaacaagagcagataccactactatcctggcagccggtgcaggcgtcaccattggcttctggatcaaccacttctttcagcttgtgtccaagcctgctgagtctctccctgttatacagaatattcctcccttaaccacctatatgttagttcttggcctgaccaagtttgctgtggggatcgtgctgatcctgctcgtcaggcaactggtgcagaacctgtcgctgcaagtactctacagctggtttaaggtggtaacccgaaacaaagaagcacgtcggagactagagattgaggtcccatacaaattcgttacgtatacatcggtgggcatttgtgctacaacctttgtcccaatgcttcatcgctttctgggcctaccctag

SEQ ID NO: 136081 - DNA, 1062 bp, synthetic construct
  misc_feature 1..1062: note = Description of Artificial Sequence: Synthetic coding sequence
  source 1..1062: mol_type = other DNA
atgggcagcctctattccgaatacttgaaccccaataaagtgcaggaacattataactacactaaagagactctggaaacccaagagactacatccagacaggtggcttcagcgtttatcgtgatcctgtgttgcgccatcgtggttgaaaatctgcttgtgctgatagctgtggcaagaaactcaaagttccattctgcgatgtatctctttctaggtaatctggcagctagtgatctcttggcaggcgtggcctttgtggccaacactctgctctcaggaagcgtcactctacgtctaacgccagttcagtggtttgcgcgggaaggtagcgcctttatcacccttagtgcctccgtgtttagccttctggctattgcaatcgagagacacgtggccatcgcaaaggttaaactatatggatcagataagagttgcagaatgctgctgctgatcggcgcatcgtggttaatatccctagtgctgggggggctccccatcttgggttggaactgcctgggccacttagaggcatgcagtaccgtgctccctctgtacgcaaaacactacgtcctgtgtgttgtcactatattcagtatcatattactggctatcgtggccctatacgtgaggatctactgcgtcgtgaggtcctcacatgccgatatggccgctcctcagactcttgccctgctcaaaacagtgacgatcgtactgggagtgtttatcgtatgctggttacctgcgttttccatcctgctgctagattacgcctgtcccgtgcatagttgtccgatactctataaagcccattactttttcgccgtctcaacactgaactccctcctgaatcctgtgatctacacctggcgcagcagagacctgagaagagaagttctgagaccgctgcagtgctggagaccaggtgtgggcgtgcaagggcggcgccggggaggaacaccaggccatcatctgctgcccctccgatccagctcatctctcgaacgcggaatgcacatgccaacttctccaacctttctggaaggtaatactgtcgtatag

SEQ ID NO: 136082 - DNA, 1137 bp, synthetic construct
  misc_feature 1..1137: note = Description of Artificial Sequence: Synthetic coding sequence
  source 1..1137: mol_type = other DNA
atggcaactgccctgcctcctcgtcttcagccggtcagggggaacgagacactgagggagcattaccaatatgtgggcaaactggcaggtcgtttaaaggaagcatcagaggggagcactctcactaccgtgctgtttttagtgatctgctctttcatagtgttggagaatctcatggtactgatcgccatctggaaaaataacaagttccacaacaggatgtacttttttatcgggaacctggccctatgcgacttgctggctggtatagcatacaaggttaacatcctgatgtccgggaagaaaactttctccctgagcccaactgtgtggttcttgagggagggcagtatgtttgtcgcgctgggcgcttcaacttgtagtctcctggccattgcgatcgaaagacacctcactatgataaagatgcggccttatgacgccaataaacgccatcgcgtgtttctgctgattgggatgtgttggctcattgccttcacattaggcgctcttcctatcctgggctggaattgtcttcataacttgcccgattgctctactattttacctctgtatagcaagaaatacattgccttttgcatttcaatatttactgcgatactggtcactattgtgatcctatatgctaggatatacttcttagttaagagctcgagcagaaaagtggccaaccataataactccgagcgctcgatggctttgttaagaacggtggtgatagtggtttctgtgtttattgcgtgctggtcccccctctttatcctgtttctcattgacgtggcctgccgtgtgcaggcttgcccaatactcttcaaggctcagtggtttatcgtcttagcagtccttaactctgctatgaacccagtgatctatacattagccagcaaagaaatgagaagagcattctttaggctggtttgtaactgtttggtcaggggcaggggggcccgagccagccccatccaacccgcactggatccatcaagaagcaagagcagctcatctaataattccagtcattcccctaaagtgaaagaggacttacctcacactgctccttcttcctgcatcatggataaaaatgctgcactccaaaacggcattttttgcaattag

SEQ ID NO: 136083 - DNA, 1137 bp, synthetic construct
  misc_feature 1..1137: note = Description of Artificial Sequence: Synthetic coding sequence
  source 1..1137: mol_type = other DNA
atggccacagcccttcctccccgactccagccagttcggggcaatgagacattgagagagcactaccagtatgtaggtaagctcgcaggaaggctaaaggaggcaagcgaaggtagcacactgacaactgtcctgtttctggtgatttgctcttttatagtgcttgagaacttgatggttttgattgctatttggaagaataataaatttcataaccgcatgtacttcttcataggcaatttggccctgtgcgatctgttggcaggaatcgcctacaaagttaacatcttaatgtcaggcaaaaagactttcagcctgtcaccgaccgtgtggtttctgcgtgaagggagtatgtttgtagcactcggagcatctacatgttccctcctggccattgctattgaacggcacctgactatgattaaaatgcgcccttacgatgctaacaagagacatagagtgtttctcctcataggcatgtgttggcttattgctttcactctgggcgctctgcctattcttggttggaactgcctgcataacctgcctgattgcagcaccatcctcccactgtatagtaagaagtacatcgccttttgcatttccatatttacggccatcttggtcacaattgtcattctctacgcgcgcatttacttccttgtgaaaagttcctcacgtaaggtggccaaccataataatagcgaaagatcaatggctctcctgaggaccgttgtgatcgtcgtctccgtcttcatcgcctgctggtctcctctgtttatcctgttcctgattgatgtcgcttgccgcgtgcaagcgtgccccattcttttcaaggctcagtggttcattgtgttggcggtgctgaattcagccatgaatcccgtgatctacacactggcaagcaaggaaatgagaagagcattctttaggttagtgtgtaattgcctcgttagagggaggggcgcacgcgcgtcccccattcagcccgcattagatccatcaagatcaaagagttcaagctccaataatagcagccactctcccaaagtaaaggaggaccttcctcacaccgcaccctccagttgtatcatggataaaaatgcggcactgcaaaatggaattttctgtaactag

SEQ ID NO: 136084 - DNA, 1155 bp, synthetic construct
  misc_feature 1..1155: note = Description of Artificial Sequence: Synthetic coding sequence
  source 1..1155: mol_type = other DNA
atgaatgctacaggcaccccagtagcaccagaaagttgtcagcaactagccgccggcggtcattcaagattaattgtgctgcactataatcactccggccgactggccggccgcggaggtcctgaagatggcgggctgggcgcactgagggggctgagcgtggccgcctcatgcttagtggttctcgagaatctgctagttctggccgccatcacttctcacatgcggtcccgtagatgggtttattattgcctggtgaatattaccttgtcggatctgttgaccggggctgcatatcttgctaacgtcctcttaagcggcgcccgcactttccgcctcgcgcccgctcagtggttcctccgcgagggcctcctctttacagctctggccgccagcacattctcattgctattcacagctggggaaagatttgccaccatggtgaggccggttgccgaaagcggcgctaccaaaaccagtcgcgtctacggttttataggtctatgttggctgttggccgccctgcttggtatgttgccgctgctgggatggaactgcctgtgtgcctttgatcggtgtagctccctgctcccactgtacagcaaaagatacattttgttctgcctcgtgatatttgctggtgttttggccactattatgggactctatggcgcgattttccgccttgtgcaggctagtggtcaaaaggccccccggcctgcagcccgtcggaaagcgcgtcgccttctgaaaactgtgttgatgatcctccttgcgtttctcgtctgttggggacctctcttcgggctgcttctggcagacgtttttggctctaacctgtgggctcaggagtatctgcgcgggatggattggatcctagcgctggcggtactcaacagtgcagttaacccaattatctattctttccggagccgggaggtttgtagggcagtcttgtcttttttatgttgcgggtgtctgcgtctggggatgagaggccctggcgactgcctggcccgcgctgtcgaagcacactccggtgccagcaccaccgactcctcactgaggccacgcgactccttccggggttcccgatcattgagcttccgaatgcgagagccgctgagttctattagtagcgttagatcaatctag

SEQ ID NO: 136085 - DNA, 1197 bp, synthetic construct
  misc_feature 1..1197: note = Description of Artificial Sequence: Synthetic coding sequence
  source 1..1197: mol_type = other DNA
atggaatccggccttcttcgacctgcgcctgtgagcgaagtcatagtgctgcactacaattatactgggaaattacggggcgcccgataccaacctggagccggtctcagggccgacgccgtcgtctgcctggcagtctgcgcattcattgtgctagagaaccttgcagttctcctggtgctgggtagacaccctcgttttcacgcccccatgttcttgttattgggcagcttaaccctatctgacctgcttgccggcgctgcttatgcggccaatatcttgctctccggcccactgactctaaagttatcccccgctctctggtttgctcgcgaagggggggtttttgtggctcttactgcctcggtgctttccctcttggcaattgccctcgaacgatctctgaccatggcccgacgcgggcccgcccccgtgtcctctcggggtcgaaccttggccatggccgctgctgcctggggggtgagcctgctactaggccttctgcccgctttaggatggaattgcctggggcgcctcgacgcgtgctctacagtgctccctctttatgctaaagcctatgtcttgttctgtgtgttggccttcgtgggtatcctggccgcaatctgtgcactgtacgcaagaatctactgccaggtgcgagccaacgcacggagactgcctgctagacccggcactgctggaacaacctccaccagagccaggcgtaagcctagatcccttgctctcctgcggacactgagtgtcgtccttctggcattcgttgcttgctgggggcccctttttcttctgttactcctggatgtggcctgtcctgcaaggacatgtccagtactgcttcaggcggaccctttccttggactcgcaatggccaacagtctcctcaacccaatcatttataccctgacaaacagagacctcaggcatgcgctcctccgactcgtgtgctgtggcaggcattcatgtgggcgggatcccagtggatctcagcagagcgccagcgcggccgaggcctcaggcggtctgagaaggtgtctgcctccaggacttgacgggagtttctccggcagcgaaagatcttccccacagcgcgatggcctggacacatctggctcaaccggcagtcccggcgctcccacggccgcccggactttagtctctgagccggctgcagactag

SEQ ID NO: 136086 - DNA, 933 bp, synthetic construct
  misc_feature 1..933: note = Description of Artificial Sequence: Synthetic coding sequence
  source 1..933: mol_type = other DNA
atggaatcagggcttctgcggccagccccagtatcagaggtgatagttctgcattataactacaccgggaagcttcgtggagcaaggtaccaaccaggcgctggattacgcgccgatgcggtggtatgtctggccgtctgcgctttcattgtcctcgagaacctcgctgtgcttttagtgttggggcgacatccacggttccatgctcccatgtttttgctgctgggaagcctcacgctcagtgatctgctcgccggagccgcctacgctgctaacatcctcttgtccggacccctcaccttaaagctatctcccgccctctggttcgcgcgtgaagggggagtatttgtcgctctgacagctagcgtattaagcctgctcgctatagctctggaacgctccctgacaatggcaaggcgcggtcccgcaccggtatctagccgtgggagaacgctcgctatggccgcagcagcatggggtgtgtcgctcctgctcggacttctccccgctttggggtggaactgcttggggaggctagacgcttgttctaccgtactccccctttacgctaaggcgtacgttctcttctgcgtgctggcctttgtcggaatactggcagctatctgcgcactctacgccctggccggtctagccgcccatgctcaacgtggtgcccccgggctgtgtggtatgctgggacccccactgcccgccgcagtggctcggagaggggttccaggtgcacacctgagctgtaccccagccgggcggagcctccccggaaccggacacggtcaactcacaagcgaaccgcaccacctgcacgctcaccagcccaggcccgcaccccgtgctccggcacccgggttgctacggacacccttactcagacagcgcccagagtggctcccagccgtgggagaacggggttag

SEQ ID NO: 136087 - DNA, 1197 bp, synthetic construct
  misc_feature 1..1197: note = Description of Artificial Sequence: Synthetic coding sequence
  source 1..1197: mol_type = other DNA
atggaaagcgggctcctaaggcctgcgccagtgagtgaagtcatcgtgctgcactacaactacacaggcaaattacgaggcgcaagataccagccaggtgcgggcctgagagcggatgccgtggtttgcctggctgtttgcgcttttattgtgcttgaaaatcttgcggtcttgcttgtattgggacgtcacccaagatttcatgccccgatgtttctcctcttgggttctttgacactgagcgacctgctcgctggggccgcctatgccgctaacatactgctgagcggtcccctgactcttaaattgtccccagccctctggttcgctcgcgagggaggcgtgtttgtggctctaaccgcttccgtgctgagcctgctggcaatcgctctcgaaagatccctcacaatggccaggcgcggccccgcccctgtctcctctcggggacggaccttagcgatggctgctgctgcatggggagtgagcctgcttctcggactcttgccagcccttggctggaactgcttggggcgcctggatgcttgttctacagtcctcccgctttatgccaaagcctatgtattattttgcgtacttgctttcgtcgggatcctggcagccatttgtgctctttacgccagaatatattgccaggtaagagccaatgcccggcggctaccggctcgcccaggcactgccgggacaacttctaccagagctaggcgtaagccccgctccctggccctactaagaacactcagcgtggtgttattggcgttcgtggcttgctggggacccctgttcctgctcctcctcctggacgtcgcctgccctgctagaacttgcccagtgctcttgcaagctgacccttttctaggattagcaatggctaacagcttgctgaaccccattatctacacccttacaaaccgcgaccttcgccacgctctgctgcgtctcgtctgttgtggccggcattcatgcggtcgtgacccgtctggctcccagcagtccgcaagtgctgccgaagcttccggtggacttcgcaggtgcctccccccgggactcgacgggagcttttcaggctcagaaagatctagcccacagcgcgatgggcttgacacctcaggaagcacaggttccccaggcgctccaactgcagcacgaactcttgtttcagagcccgccgcagattag

SEQ ID NO: 136088 - DNA, 5016 bp, synthetic construct
  misc_feature 1..5016: note = Description of Artificial Sequence: Synthetic coding sequence
  source 1..5016: mol_type = other DNA
atggacggcaactctctgctgagcgtgccatcaaatctggagtcttccagaatgtacgatgtgctggagcctcagcaaggtcgcggctgtggctccagcggcagtggcccaggcaactcgattacggcctgcaagaaggtgttgcgcagcaactccttactcgagagtacagactactggcttcaaaaccagcggatgccctgccagatcggattcgtcgaggacaaaagcgaaaattgtgctagtgtctgcttcgtgaaccttgatgtgaataaggacgaatgcagcacagaacacctgcagcagaagctggtgaatgtgtcccccgatcttcccaagttgatcagctcaatgaacgtgcagcagcctaaggagaatgagatcgttgtgttaagtggcctggcgagcggaaatcttcaggctgatttcgaggtgagccagtgtccctggctgcccgacatatgtctggtgcagtgcgccagggggaatagacctaacagcacaaactgcatcattttcgagattaataaattcctgatcggcctcgagctggttcaggaacgacagctgcatttagagacaaatatactgaagctcgaagacgacacaaattgttctctgagttccatcgaggaggattttttaaccgcttctgagcatttagaagaagagagcgaggtagatgaatcccgcaacgattatgagaacatcaacgtgtccgccaatgtactcgaaagtaaacagctaaagggagctactcaagtggaatggaattgcaataaagagaagtggctttatgctcttgaagataagtacatcaataaatatcccacacctctaataaaaactgaaaggtctcctgagaacctgactaagaacaccgccctgcaatcactcgatccatccgcaaagccctctcaatggaagcgggaggcagtgggtaacggaaggcaggcaacccactattaccactccgaagccttcaaaggacagatggaaaagtcccaggccctctatattcccaaagatgcatacttttccatgatggataaggacgtcccttccgcgtgtgcagtggctgaacagaggagcaaccttaatcctggcgatcatgaggatacaagaaatgccttacctcctagacaggacggagaagtcaccaccgggaagtacgccactaacctggccgagagcgtgttgcaagatgcttttatccgactgtctcagtcccagtctacgctgccccaggaaagcgctgtttcagtgtcggtcggctcctcactgttgccaagctgttatagcaccaaagatactgttgtatcgcgttcttggaatgagctcccaaagatcgtcgtggtgcaaagcccagatggttcagatgctgccccccagcccggaatctcatcctggcccgaaatggaggtttcagtggagacgtccagcattctcagcggagagaactctagtagacaaccacaatccgccctagaggtggccctcgcatgcgctgcaaccgtgatcggaacgatcagtagccctcaggctacagaacgcctcaaaatggagcaggtggtctcaaactttcctcccggatcgtccggcgctctgcaaactcaggccccacagggattgaaggagccttctattaacgaatattccttcccatctgcactttgcgggatgacacaagtcgcttccgccgtggcggtatgcggcctcggcgagcgcgaagaagtcacgtgctctgtcgctccatcaggcagtctgcccccggccgccgaagcgagcgaggctatgccacctttgtgtggcctggctagcatggaattagggaaggaggccatcgccaagggcttgttgaaggaggctgcacttgttctgaccagaccaaatacgtattcttccataggggatttccttgactccatgaatcggcggattatggaaacggcctcaaagtcccaaaccctgtgctcagaaaacgtggttaggaatgagctggctcacactctgagcaatgttattctgcgacactcgatcgatgaagttcatcacaagaatatgatcatcgacccaaacgataatcgccacagttccgaaatcctcgacaccctgatggaatctactaaccagctgttgctggacgtcatctgttttacatttaaaaaaatgtctcacatcgttcgcctcggggagtgccccgctgtgctatctaaggaaacaatccgtagacgcgagaccgagcctagctgtcagcctagcgacccaggtgccagccaggcttggaccaaggccaccgagagctcttcctctagccctctgtctaatagtcacaataccagcctcgtgatcaacaatttagtggacggaatgtatagcaaacaagacaaggggggggtccgcccaggcctctttaagaaccctactctgcaatcccagttatccaggagtcatagggtgccggacagcagcacagccaccacctcaagcaaagaaatctatttgaaagggatcgccggagaggatacaaagagtcctcaccactccgagaacgagtgtcgcgctagttctgaaggacagcgcagccccaccgtctcacagtctaggagcggatcccaagaagccgaagagtccatccacccaaatactcaagaaaaatacaactgcgcaacctccaggatcaacgaggtccaggtgaacctgtctcttctaggcgacgatctgctattgccagcacagtccacgctgcaaaccaaacaccctgacatctattgcatcaccgatttcgcagaagagctcgcagatacagtggtgtccatggctacagagatcgcagctatttgtctggacaattcttctggcaagcaaccctggttctgtgcctggaagagaggctcagaatttcttatgacaccaaacgtcccatgtcggtcattgaagaggaagaaggagtcccagggatctgggactgccgttcggaaacacaaacctccccgactgagcgagattaagaggaaaactgacgaacaccccgaactgaaggaaaagctaatgaatcgagtagtcgacgaaagtatgaatctggaggacgtgccagactcagttaacctttttgctaatgaagtggcggccaagatcatgaaccttacagagttctcaatggttgatggcatgtggcaagcccaggggtatccgaggaatcgcctccttagcggggataggtggtcacgactgaaggcctcatcttgcgagagcatccctgaagaggattccgaggcacgtgcctacgtgaacagtctcgggttgatgtctacgctgtctcagccggtctcccgtgcatcctcagtgagtaagcagagctcctgcgaatctattacggacgagttctccaggttcatggtgaaccagatggagaacgaggggcgtgggttcgagctgcttctagactactacgccggtaagaacgcttcttcgatcctcaattccgcgatgcagcaggcttgtagaaaatctgaccacctcagcgtccgccctagttgcccctcaaaacaaagtagcaccgagtcaattacagaagagttctacaggtatatgctaagagatattgagcgcgatagcagggagagtgcctccagccgaaggtcaagtcaggattggaccgctgggttgttgagtccatccctgagatcaccagtctgtcatcggcagtccagtatgcctgactcccgctctccatgtagccgtctgactgtgaacgttcccataaaagccaactcattagacgggttcgcacagaattgtccacaggatttcctctctgtgcagcctgttagttctgctagcagctctggactttgcaaatctgatagctgtctgtacagaagggggggcactgatcacattactaacatgttgatccacgagacatgggcttcatctatagaagcactgatgagaaagaataaaataatagttgacgacgccgaggaagccgacactgagccagtgtctggaggctcccccagccaggcagagaagtgcgctaaccgactggcagcctctaggatgtgtagcggcccaactctgcttgttcaagaaagcctcgactgtcctcggaaagactcagtcaccgagtgcaaacagcctccggtgtcatccctaagtaaaactgcttctcttacaaaccactcccccctggacagtaagaaggaaacatcttcatgtcaggaccctgtgcccattaatcacaaacggagatccctgtgtagtcgggaggtgcccttgatacagatagagacggaccaaagagaagcctgcgcaggtgaaccagaaccctttctgtcgaaaagctcactgctggaggaagccgaaggtcatagtaacgataagaacatcccagacgtggttcgaggcggcgacacagctgtgagtgcctgccagattcatagcgattcactggacactagagatgtcccagaagccgaggccagcactgaggccagggcccctgacgaagcaccaaaccctccatcctcatcagaggaaagcacaggcagttggacgcagttggcaaatgaggaggataaccccgatgatacctcttcattcctccaattgtccgaacgatccatgtccgagcttgtagaagagaagaaaatcctgaagggccaaagcgaatctacagaagctcctgcctcgggtcctccgacagggacggccagtcctcagcgttctcttttagttatcaattttgatctggagcctgagtgccccgatgcggagcttcgagccactttgcagtggatagccgcatccgaactgggtattccaacaatttactttaagaaatctcaggagaatcgaatcgagaagtttttggatgtggtgcagctagtgcaccggaagagctggaaggtgggcgacatcttccacgcagtcgtgcagtattgcaagatgcacgaagagcagaaggatggccgcctgtctcttttcgactggctgctcgagctcgggtag

SEQ ID NO: 136089 - DNA, 5103 bp, synthetic construct
  misc_feature 1..5103: note = Description of Artificial Sequence: Synthetic coding sequence
  source 1..5103: mol_type = other DNA
atggatggcaacagtctgctgagtgtgcccagcaatctggaaagttctcgcatgtatgacgtcctagaaccccaacagggcaggggctgcggctcctccgggtctggcccaggaaactctatcactgcttgtaaaaaggtgctcagaagcaactctctgctggaatcgaccgattattggttgcagaatcagcggatgccttgtcagatcgggttcgtggaagataagtccgagaattgtgcgagtgtgtgctttgtcaatttggatgtgaacaaagatgagtgcagcactgaacacttacagcagaagctggttaatgtaagccccgacctacccaaacttatctccagtatgaacgtgcagcaacccaaggagaacgagatagttgtcctctccggcctggccagtgggaacctgcaagcagattttgaggtgtcacagtgcccgtggctccctgacatttgtctcgtgcagtgcgctcggggcaatcgaccaaacagcactaattgtataattttcgagattaacaaattcttgattgggctggagttagttcaggaaaggcagctgcatctggaaactaacatactaaagctggaggatgataccaattgtagtttatcgtcaatcgaagaggattttctaaccgctagtgaacacttggaagaggaatcagaggtggatgagtcaaggaacgattacgagaacatcaacgtgagcgccaatgtcctggaatccaaacagttaaaaggtgcaacccaggtggaatggaattgcaacaaagaaaagtggctgtatgctctagaagacaaatacattaacaagtaccctacacccttgatcaagaccgagcgcagccccgagaacctgaccaaaaacacagcattacaaagcctcgatccctctgccaagccttctcagtggaagcgggaggccgtgggtaacgggaggcaagccacccattattaccactccgaagctttcaaaggccaaatggagaagtcccaggcgctgtacatccccaaggatgcctatttctctatgatggacaaggatgtgcccagcgcttgcgctgtggcggaacaacggtctaatctcaaccctggagatcacgaggatacgcgcaacgctctcccacccaggcaagacggtgaggtgactacgggaaaatacgccacaaacctggcagaaagcgtgctgcaggacgccttcatccgtctgtcgcagtcccagagcactctgcctcaggagtccgcggtcagcgtctcagttggctcgtcactgctgccttcctgctattcaactaaagacaccgtggtcagtcggtcatggaacgaactccctaagatcgtggtggtccagtcccctgacggatctgatgctgcaccccagcccggtatcagtagttggcccgagatggaggtgtcagtggagacgtcctcgatcctgagcggagagaacagcagccgccaacctcagtctgcactagaggtggcgctggcgtgcgctgcaaccgtgataggcacaatttcatccccacaggcgacagaacggctgaagatggaacaggtggtctctaacttcccacctggctcctccggcgcgcttcaaacacaggctcctcagggccttaaagagccaagcatcaatgagtattcttttccttctgctctgtgtggtatgacacaggtggcttcggccgttgccgtatgtggcctgggcgaacgagaggaggtgacatgctcagtcgccccgtccgggtctcttccccctgcggccgaggctagcgaggctatgcctcccctctgcggcctcgccagtatggaactgggtaaggaggccatcgcaaagggtctgctgaaggaggccgccctggtgctgacccgcccgaacacttacagctcaatcggagacttccttgactctatgaataggaggatcatggaaactgcttcgaaatctcagacactctgcagcgaaaatgtcgtgcgcaacgaacttgcccatactttgtccaatgtcatcctgaggcactcaatcgacgaggtacaccacaagaacatgattattgatcctaatgataaccggcactccagcgaaattctcgataccttgatggaaagcacgaatcagctgctgctcgacgtcatatgcttcactttcaagaagatgtcccacattgtccggctcggcgaatgccccgcagtcctgtctaaagagacgatccgacgacgcgagacagagcctagttgccagccctctgatcccggagccagccaggcctggacaaaggcaaccgagtcctctagctctagccctctgagtaattcacataacacgtccctcgtgattaataatctggtcgacggcatgtactccaagcaggacaaagggggcgtacgccctggcctgtttaagaacccaaccttacagtctcagttgagcaggtcccatagagttcctgattccagtactgccaccacttcctctaaggagatttacctcaagggcatagcaggggaagacacaaaatctccacaccacagcgagaatgaatgcagagcatcatccgaagggcagagaagtccaaccgtcagccaatctcggtctgggtcccaggaagctgaagagagcatacaccctaatactcaagagaagtataattgcgcgactagcaggattaatgaagtccaggtaaacctaagtctgctcggcgacgatttgcttctacctgcccaatccacactgcaaacaaaacacccagacatctattgcatcactgacttcgctgaggaactggctgatactgtggtcagcatggctaccgagatagccgctatttgtctcgataatagcagcggcaagcagccttggttctgtgcctggaagcgcgggtctgagtttctgatgacccccaatgtcccatgtcggagcctgaagagaaaaaaggagtcacagggttcaggaacagctgttaggaagcacaagccccctagactttcagagattaaaagaaaaactgatgagcaccctgagctcaaagaaaaattgatgaatcgggtcgtagatgagtcaatgaacctggaggacgtaccagatagcgttaacttgtttgccaacgaagtcgctgcaaaaatcatgaaccttacagagttttcaatggtggacggcatgtggcaggctcaggggtacccaagaaataggttgctcagcggggacaggtggagccggctcaaggcctcaagttgcgaaagtatccctgaggaagactcagaggctcgagcttatgtgaattctctgggccttatgagcacgctctcccaacccgtcagccgtgccagctcggtgtccaaacagagctcatgtgaatcgatcaccgacgagttctctcgattcatggtgaaccaaatggaaaatgagggtcgagggtttgagctcctgctcgattattatgctgggaagaacgcatcttcaatcctgaatagtgctatgcagcaggcgtgccggaaaagcgatcacctgtctgtgaggccaagctgcccctcgaaacagtccagcacagaatccattactgaagagttctaccggtacatgcttcgggatatcgagcgagactcccgagagtctgcctcaagcagacgctctagccaggattggaccgctggcctgctgtccccctctcttcgcagtccagtgtgccaccggcagtcctccatgcccgactctcgatctccctgtagcagactcaccgtgaatgtgccaatcaaagctaattcactcgatggcttcgcccagaactgtccccaggacttcctgtcagtccaacccgtgtccagtgcgagctctagcggcctgtgcaaatccgactcttgcctgtataggcgtgggggtactgaccatattacgaatatgcttatccatgagacgtgggccagcagtatcgaggccctcatgcgtaagaacaagattattgtggacgacgcggaggaggcagacaccgaacctgtatctggcggaagcccgagtcaagctgagaaatgtgccaatcggttagccgctagtcgcatgtgctccggaccaacactgctggttcaggagtccttggactgcccaagaaaagacagcgtgaccgaatgcaaacaaccgccagtctcctctttgtctaaaaccgccagcctgacgaaccacagccccttagatagtaagaaggaaacatcgagctgccaggatcccgtgcctataaaccacaaaaggcgatctctgtgtagtagggaggtgcccttgatccagattgagaccgatcagagggaggcctgcgccggggaacccgaaccatttttgtcaaagtcctctttactcgaggaggctgagggacacagcaacgataaaaatatccctgatgtggttcgggggggtgatacagccgtcagcgcctgccagatccatagtgatagcctggatacccgcgatgtccctgaggcagaagccagtactgaggcaagagcccccgatgaggcaccaaacccgcccagctcttccgaggagagtacagggagctggacacagctggcaaacgaagaggacaatccggatgacaccagctcatttttgcagttgtcagaacgatcaatgtccaacggcaacagtagcgctacttcctctttgggaatcatggatcttgacatctaccaggaatctatgccatcttctcccatgatcaacgaacttgtggaggagaagaaaatcctgaaaggacaaagtgaaagcacggaggcacccgcatcagggccaccgaccggaaccgcgagccctcaaagatctttacttgtgattaatttcgatcttgagcctgaatgccctgacgcagagctcagagccaccctgcagtggatagcagcctcagaactggggattccaaccatatacttcaaaaagtctcaggaaaatcgtattgaaaagtttctggatgtggtccagcttgtgcacagaaagtcttggaaggtgggcgatatatttcacgcagtggtgcagtattgtaaaatgcatgaggaacagaaagatgggcgcctgagcctttttgactggttactggagctcggctag

SEQ ID NO: 136090 - DNA, 789 bp, synthetic construct
  misc_feature 1..789: note = Description of Artificial Sequence: Synthetic coding sequence
  source 1..789: mol_type = other DNA
atgctggcactcgaggccgctcagcttgacggtcctcacttttcgtgcctctatcccgacggggtcttctacgacctggatagttgtaaacactcctcttaccctgactctgagggggctccggacagcctttgggattggactgtggcccctccagtgcccgcaacaccttacgaggcatttgatcctgctgctgcagccttctcccaccctcaggccgcccagctttgctatgagccgcctacttactccccagccggaaacttagagctcgccccttctctggaggccccaggcccagggttaccggcctatcccaccgagaattttgcatctcaaaccctggtgcctccagcttacgctccctacccttcacctgtactctccgaggaggaagacttgccactcgatagtcccgctctggaggttagcgattctgagagcgacgaggctctggtcgctggccctgagggtaagggctccgaagcaggtaccaggaaaaaactgcggctgtaccagttcctgctcggattgctgacgaggggagacatgcgagaatgtgtctggtgggtcgagccaggagccggggtgttccagtttagctcaaagcacaaagaacttctggcaaggcgctggggtcagcaaaaggggaaccgcaaacgaatgacttaccagaagcttgcacgagccctccgcaactatgcaaagaccggggagattaggaaagtaaaacgaaagctcacttaccagttcgattctgctctgttacccgccgtgcgcagagcctag

SEQ ID NO: 136091 - DNA, 516 bp, synthetic construct
  misc_feature 1..516: note = Description of Artificial Sequence: Synthetic coding sequence
  source 1..516: mol_type = other DNA
atggcctctagtatgacatggacggccgccagcatacctgcaacgctcattcagagaggcctcctgaccctggtcccacctgcctatgccccatatccatcaccggtcctttcggaagaggaagacctccccctggatagccccgccctggaggtgtcagattccgagtctgacgaagcactggtggccggtcccgaaggaaaggggagcgaagccgggacgagaaagaaattaagactttaccagtttcttttgggattattaacgaggggggacatgcgtgagtgcgtctggtgggtcgagccaggggccggggtgttccagttctccagcaaacacaaagaactcctcgctagacgatgggggcagcagaaaggcaatcgcaagagaatgacatatcagaagcttgcacgggctttaagaaattacgccaaaacgggcgagatacggaaagtgaaaagaaagctgacataccagttcgactccgcactgcttcccgccgttcggagggcgtag

SEQ ID NO: 136092 - DNA, 747 bp, synthetic construct
  misc_feature 1..747: note = Description of Artificial Sequence: Synthetic coding sequence
  source 1..747: mol_type = other DNA
atgacctgtgtcgagcaggataaactgggacaggcatttgaggacgcattcgaagttctgcgacagcatagcacaggggatctccaatatagtcctgactaccgaaattatctggcactgatcaatcaccggcctcatgtgaaaggtaatagctcctgctacggcgtcctgccaacggaggaacccgtttataattggagaaccgtgattaacagcgcagcagacttttacttcgaggggaacattcatcagtcgctgcagaatatcactgaaaatcagcttgtgcaaccgacactactacaacagaaggggggcaagggtcggaaaaagcttcgattattcgagtatctgcacgaatccctatacaaccccgagatggcttcttgtattcagtgggtggataagactaagggaatcttccagtttgtgagcaaaaacaaagagaagctggcagaactgtggggcaaacggaagggaaatcgcaagacaatgacataccagaaaatggcaagagcacttagaaattatgggcgtagcggagagatcacaaagatccgacgcaaactgacgtaccagttctcggaggctatactgcagagactgtcaccgtcatacttcctggggaaggagatattttattcccagtgcgtgcagccggaccaggagtacctgagcctgaacaattggaacgccaactataattatacttatgccaactaccacgaactcaatcatcatgactgctag

SEQ ID NO: 136093 - DNA, 747 bp, synthetic construct
  misc_feature 1..747: note = Description of Artificial Sequence: Synthetic coding sequence
  source 1..747: mol_type = other DNA
atgacgtgtgtcgagcaagacaagctaggccaggccttcgaggatgctttcgaagtgctcaggcagcactccacgggagacctgcagtatagccccgattataggaattatcttgcgctcattaaccaccgcccccacgtaaagggcaattcaagctgctatggcgttctgcccactgaggagcctgtgtataactggaggacagtcattaattctgccgctgatttctatttcgagggtaatatccatcagagccttcagaatattacagaaaaccagttggttcagcccacgttattacagcaaaagggtggaaaggggcgcaaaaagctgcgcctgtttgagtaccttcacgaaagcctttataatcccgagatggcgtcttgcatccagtgggtcgacaagaccaaggggatttttcagtttgtgagcaagaacaaagagaaactggctgaactctggggcaagcgcaagggtaacagaaagaccatgacttaccagaagatggctcgcgccttgcgcaattatggccgatccggggaaattaccaaaatacggcgtaagctcacataccagttctctgaagccatcctccaacggctgtcccccagttattttctgggaaaggagatcttttactcccagtgtgtgcaaccagatcaggagtacctaagtttgaataactggaatgccaattacaactacacatatgccaattatcatgaactgaatcaccacgactgctag

SEQ ID NO: 136094 - DNA, 2568 bp, synthetic construct
  misc_feature 1..2568: note = Description of Artificial Sequence: Synthetic coding sequence
  source 1..2568: mol_type = other DNA
atgagcttcgtccgcgtgaacagatgcggaccacgcgtaggagttaggaagacaccaaaggttaagaagaagaaaacctctgtgaagcaggaatgggataatacggtcacagatttaacagtgcaccgagccactccagaggatcttgtgagaagacatgagatccacaaatccaagaaccgggcgctagtgcactgggagctccaagagaaagccctgaagagaaagtggcggaaacagaagcccgagacacttaatctcgagaagcgccgcctgagtatcatgaaggaaatcctgtcagatcaataccagatgcaggacgtgctcgagaagagtgatcacctcatagccgcagcgaaggagctgtttcctcggaggcgaactgggtttccaaatgtaaccgtcgcccccgatagcagtcagggccccatagtggtgaaccaggatccaatcacccagtcaatcttcaacgagtctgtcattgaacctcaggctcttaacgacgtcgacggggaagaggagggaacagttaattctcagagcggggagagcgaaaacgaaaacgagctggacaatagcctgaatagccagtcaaacaccaatactgatcgctttctgcagcaattaactgaagagaatttcgaattgatctccaagctgtggaccgatatccagcagaagattgctacccagtcccagatcacaccgcccggcacaccctcatctgcactatctagtggcgagcagcgagccgctcttaacgctactaacgcagtcaagaggttgcagacgagactgcagcctgaggagtctaccgagacactcgattccagctacgttgtgggccacgttctgaatagccgcaagcaaaaacagctccttaacaaggtgaagcgcaaacccaacctgcacgccctgtccaagcctaagaagaacatctccagtggcagcacaacttcagccgacctgccgaatcggacaaacagcaacctggacgtgctgaagcatatgatacacgaggtggaacatgagatggaagagtatgagcgatggaccggaagagaagttaaagggcttcagtcaagccagggattgacaggattcaccctgtccctggttagttccctttgtcgtctggtgcgctatctcaaggagagcgagatccaactgagaaaggaagtggagacaagacagcagctggagcaggtgctgggggatcacagagaacttatagatgccctgactgcagagatactcaggctgcgagaggaaaatgccgccactcaggctaggctgcagcagtacatggtcactacagatgagcagctgattagtttgacacatgccattaagaattgccccgtcataaataaccgacaggaaattcaagcttctgagtcaggtgctaccggccgcagagtgatggactctcccgagaggccggtagtaaacgccaatgtatcagtgcccttaatgtttagggaggaagttgctgagttcccccaagaggaattgccggtcaaactgagtcaggtgcctgatccacctgacaacatgaaccttgccaagaactttccagctcatatttttgaacccgccgtcttactgacccccccccggcagaaatccaatttgaagttctcccccctacaagacgtccttcgtcgtacagtccaaacaagacccgccccgcgcctcccacccaccgtggaaatcatagagaaggaacagaactgggaagaaaagacgcttccgatcgacactgacatccagaatagttcagaggagaatcggctgttcactcagcggtggagagtgtcgcacatgggggaggacctggagaacaagacacaagcaccttttgtgaacctgagtcagcctctatgcaactcacattccaacacgcagcagtccaggagtcctacattctcagaggaactccctgtcttgggggacgggcagcagctccgcacgaatgagtctctgattcagcgtaaagatattatgacacgaattgctgacctaacattgcagaactccgctattaaggcacatatgaacaacatcatcgaaccccggggcgagcagggcgacgggctgagagaactcaataagcaggaatctgcctctgacatgacttcgactttcccagttgcccagagtctgactccagggtcgatggaagaaaggattgccgagcttaacagacagtctatggaagcccgaggaaagttgttgcagctcatagagcagcagaaactcgtgggccttaacctgtcaccacctatgtcgccagtgcagttacccctgcgcgcttggactgagggcgcaaagcgcactatagaggtttccatacccggagcagaagcgcctgaatcctcgaaatgctccaccgtttccccagtctcaggaattaatacgaggcgctcctccggcgctacaggcaactcttgtagccctcttaatgctaccagcggaagtggaagattcaccccgctaaacccccgggctaagatcgagaagcagaatgaggaagggtggtttgctcttagtacccacgtctcttag

SEQ ID NO: 136095 - DNA, 483 bp, synthetic construct
  misc_feature 1..483: note = Description of Artificial Sequence: Synthetic coding sequence
  source 1..483: mol_type = other DNA
atgtcattcgtgcgtgtaaatcgatgcggcccgcgcgtgggagtgcggaagacccctaaggtgaaaaaaaagaaaacgtccgtcaaacaagagtgggataatacggtcaccgacctcaccgtacacagggcaacacccgaggacctggttagacggcatgagatccataagagcaagaacagggcccttgtgcactgggagctgcaggagaaagcgttaaaacggaaatggcggaagcaaaagcccgagaccctcaatctcgaaaagcggaggctttctattatgaaagaaatcctgtccgatcagtatcaaatgcaggatgtattagagaaatcagaccatctcatcgctgcagccaaagaattattcccccgcaggcgtacaggatttccaaacgtgaccgtggccccggatagctcccaaggcccaatcgtcgtgaaccaggatcccattactcaaagtatttttaatgaaagcgtgtag

SEQ ID NO: 136096 - DNA, 522 bp, synthetic construct
  misc_feature 1..522: note = Description of Artificial Sequence: Synthetic coding sequence
  source 1..522: mol_type = other DNA
atgagtttcgtccgggtcaaccgatgtggacccagggtcggagtcagaaaaacacctaaagtgaagaaaaagaaaacctcagtcaaacaggagtgggataacaccgtaactgatcttacagttcaccgcgccaccccggaagacttagtcagaagacatgaaatccataaaagcaagaatagagctttggtgcattgggaattgcaggagaaggctctaaaaaggaagtggagaaaacagaaacctgagacattgaacctggagaaacggaggctgtccatcatgaaagagatattatccgatcagtaccaaatgcaggacgttctcgagaaatctgaccacttaatagcagccgcaaaggagttgtttcctaggcgaagaactgggtttccaaacgtaactgttgcacccgactcatctcaggggcctattgttgtgaaccaggatcctatcacccagagtatctttaacgagtctgtgattgaaccgcaggccctgaacgatgtggacggcgaagaatag

SEQ ID NO: 136097 - DNA, 60 bp, synthetic construct
  misc_feature 1..60: note = Description of Artificial Sequence: Synthetic coding sequence
  source 1..60: mol_type = other DNA
atgagtttcgtccgcgtgaatagatgtggaccccgggtcggtgtccggaaaactccatag

SEQ ID NO: 136098 - DNA, 789 bp, synthetic construct
  misc_feature 1..789: note = Description of Artificial Sequence: Synthetic coding sequence
  source 1..789: mol_type = other DNA
atgaaaactccctttgggaaaactcccggccagcgcagccgggcagacgctgggcatgccggagtgagcgccaatatgatgaagaagcgaacctcacataaaaaacacagatcttccgtgggtccatccaaacccgtgtcccaacctaggcggaatattgtgggctgtagaattcagcatgggtggaaggaggggaatggaccagtgactcagtggaagggcacagtgctggatcaggtaccagtcaatcccagcctatacctgataaagtatgatggctttgattgtgtctatggcttagagctgaacaaagacgagcgagtttccgctctcgaagtcctccctgatagagtggccaccagcagaatatctgacgcccacctagcggataccatgattggaaaggctgtagagcatatgtttgagaccgaggacggcagcaaagacgagtggcggggaatggtgttggcccgggcccccgttatgaacacttggttctatatcacttacgaaaaggacccagtgctctacatgtaccaacttcttgacgattataaagagggtgacctccgaattatgcctgacagcaacgacagcccacccgccgaacgggagcctggggaggtggtcgactcactggttggtaaacaggtggagtacgctaaggaagacggttcgaaacggacaggaatggtgatacaccaagttgaggcaaaaccctccgtgtattttatcaagttcgacgatgacttccacatctacgtttacgacctggtgaagacctcttag

SEQ ID NO: 136099 - DNA, 789 bp, synthetic construct
  misc_feature 1..789: note = Description of Artificial Sequence: Synthetic coding sequence
  source 1..789: mol_type = other DNA
atgaaaaccccttttggtaaaacgccagggcagcgcagtcgggccgatgccggacacgctggcgtgtcggctaacatgatgaaaaaaagaacgtcccataaaaagcaccgatcttccgttggcccatcaaagcccgtttctcaacccaggagaaacatagttggctgtagaatccaacatggatggaaggaaggcaatgggccagtcacacagtggaagggtactgtgctggaccaggtgcctgtgaatccatctctatacctgatcaaatacgatggatttgactgcgtgtatggattggagctcaataaggatgagagggtgtccgctctggaagtgctgccagatcgggtcgccaccagcagaatcagtgacgctcatctggcagataccatgataggcaaggccgtcgagcacatgttcgaaacagaagacggttcgaaggacgagtggcgcggtatggtcctggcacgggcccccgtaatgaatacatggttctatattacatatgaaaaggaccccgtgctgtatatgtatcagctgttggatgattacaaagaaggtgacctgaggataatgcccgatagtaacgacagtcctcccgcggaaagagaaccgggcgaggtagtcgactccctggttgggaaacaagtggaatatgcaaaagaggacggttccaagcggactggcatggtcattcaccaggtggaagctaagccatcagtatactttattaaattcgacgacgacttccacatctatgtttacgacctcgtgaaaacttcttag

SEQ ID NO: 136100 - DNA, 1587 bp, synthetic construct
  misc_feature 1..1587: note = Description of Artificial Sequence: Synthetic coding sequence
  source 1..1587: mol_type = other DNA
atggctggctcagatactgctcccttcctaagccaggctgacgatcctgacgacgggccggtgccaggtacgcccggcctccctgggtcgaccggcaaccctaagtctgaggagccggaggtgccagaccaggaaggcctgcagcggatcacaggcctttcccctggtcgctctgccctgattgttgcagttctttgctacattaatctactgaactatatggatagattcacggtggccggggtgctgcctgacatagaacagtttttcaacattggcgactcatcttcggggctcatccagactgtcttcataagcagctatatggttctggctcccgtgttcggatacctcggcgaccgatataatcgcaagtacctgatgtgtggagggatcgctttctggtccctagtcacattagggtcctcttttattcccggggaacacttctggctcttgttgctaacccgcggtctggtgggtgtgggcgaggcctcctattctaccattgcccctaccctcattgccgatctctttgttgcagaccaaaggtcccgcatgcttagtattttctacttcgcaattccagtgggatctggactcggttatatcgccggcagtaaggttaaagacatggccggagactggcactgggcactacgagtcacaccaggcctaggtgtagtggcggtgctgctgttgttcctggtggtaagagagccccctcgcggcgcagttgagaggcatagtgatctgcctccattgaatcctacttcatggtgggccgacctgcgggctctggcccgcaacccttcctttgtccttagtagcttaggatttacagccgtagcatttgtgaccggcagtttagccctttgggccccggcgtttctcctgcggtcgcgcgtggtgctgggtgaaacacctccttgtctccctggagattcgtgctccagtagcgacagtctgatcttcggactcatcacctgcttgaccggggtgttgggggtggggctgggggtcgaaatcagtcggaggctgaggcacagcaacccacgagcagaccctctcgtctgcgctaccggactgctggggtcagccccttttctgttcttgtctcttgcttgcgcacgagggtcaattgtggctacatacatcttcatatttatcggagagacgctgttgtccatgaattgggccattgtcgcggacatactgctctacgtggtgattccaaccagaagatccaccgcggaggcgttccaaattgtactgtcccacctgctgggcgatgccggcagtccgtatttaatcgggctcattagcgacagactgagacggaattggccgccttcctttctctccgagttccgggccctccagttcagccttatgttatgtgcatttgtgggagcgctgggcggcgcagcttttctcggcaccgccatatttattgaggcagaccggcggcgggcgcaattgcacgtgcaagggcttctgcacgaggccggaagtacagacgatcgaatcgtagtaccccaaagaggccggtcgacaagagtgcccgtggccagtgtgctgatctag

SEQ ID NO: 136101 - DNA, 1368 bp, synthetic construct
  misc_feature 1..1368: note = Description of Artificial Sequence: Synthetic coding sequence
  source 1..1368: mol_type = other DNA
atggatcggtttacagtagccggagtattacccgacattgagcagttcttcaacattggggactcttcttcagggttgatccagaccgtgttcataagcagctatatggtcctggctcctgtgtttggctatcttggcgataggtacaaccggaaatatctcatgtgcgggggaatcgcattctggtctctcgtcaccctagggtctagttttatacctggcgagcatttctggttacttttactgactcgtggtctggtgggagtgggagaggcttcctacagcaccattgctcccacactgatcgcggacctcttcgtggccgaccagcggtcaaggatgctttcgattttttacttcgcgattcctgtgggctccgggttaggctatatcgccggctccaaagtaaaggacatggccggcgactggcactgggcactgcgggtcacacctggccttggagtagtcgcagtgctgctgctctttctagtggtgcgagaacctccacggggcgcggtcgagcgacacagtgacctgcctcccctgaaccctacctcatggtgggctgatcttcgcgcgcttgcacgaaatccctcttttgtgctgtcttctttgggcttcacagcggttgctttcgtgactggaagcctcgctctgtgggctcctgcatttttgttgaggagtcgagttgttcttggagagacaccaccttgcctgcccggcgactcatgcagttcttcagatagcttgattttcgggctgatcacgtgcctgacaggcgttctgggagtgggtctgggggtggagatttcccgcaggttacggcacagcaacccaagggcggatcccctcgtgtgtgccaccggtctgctgggttcagccccatttctcttcctgtcgttagcttgtgcccgcggtagcatcgtagctacgtatatatttatctttattggagagacgcttctgagcatgaattgggcgatcgtcgccgacattctgctgtacgttgtcattccaacgcggcggtcgacggcagaagcctttcagatagtgctcagccacctccttggcgacgctggaagtccatacctgataggcctgatttccgatcgcctcaggcgcaactggccacccagttttttgtctgagttcagagccctccaatttagtctaatgctgtgtgcctttgtcggcgccctcggcggcgcagccttccttggcactgcgatctttatagaggccgataggcgaagagcccagctgcatgttcagggattattacacgaggctgggtccacggatgataggatagtcgtgccccaaagaggaaggtccacacgggttcctgtggccagtgtgcttatctag

SEQ ID NO: 136102 - DNA, 1431 bp, synthetic construct
  misc_feature 1..1431: note = Description of Artificial Sequence: Synthetic coding sequence
  source 1..1431: mol_type = other DNA
atggccggcagcgatactgcgccgtttctgagtcaggctgatgatcccgacgatgggccagtccccgggaccccagggctgcccgggtccaccggaaatcccaaaagtgaagaacccgaggtgcctgatcaggaggggctgcaacgaatcaccggcctgtctcccggacgctctgccctcatcgttgcggttttatgctatatcaatctcctcaattatatggacagattcaccgtggctggagtgcttcctgacatcgaacagtttttcaatataggcgactcctctagcgggcttatccagacagtgtttatctctagctatatggtcttagcccctgtttttggctacctgggcgatcgttacaatagaaagtatctaatgtgtgggggtatcgcgttctggtcgctggttacacttggaagctccttcattcctggggagcatttttggctgctactcctgactaggggccttgtgggggtcggagaggcgagttattctacaatagccccaacactgattgccgacctgttcgtagcagaccagagaagccgtatgttatcaattttttacttcgccatccccgttggatccggtcttgggtacatcgctggttctaaggtgaaggacatggcaggtgactggcactgggccctcagggtcacccccggtctcggcgtcgttgcggtgcttcttttatttctcgttgtcagagaaccaccacggggggccgtggagcgacacagcgatttgcccccgttgaacccgacttcctggtgggctgatctgcgtgccctcgccagaaatctgatctttggtctcatcacttgtctgactggggtactgggtgtgggcttgggggtggagatcagccggagactgcgccactccaatccccgagctgacccattagtgtgcgcaactggcctacttggctcagccccattcctcttcctgtcgcttgcctgtgcgagagggagcatcgtagccacctacattttcattttcataggtgagacacttctgagtatgaattgggcaatagtcgcggatatcctcctctatgttgtgataccgactaggagatctactgccgaggcctttcagattgtcttaagtcatctgttgggggatgcaggttcgccttatctgataggcttgattagtgacaggctgaggcggaattggcctccgtcctttcttagcgagttcagagcattgcaattcagtctgatgttgtgcgccttcgtgggggctctaggaggcgccgcttttttaggcactgcgattttcattgaggctgaccgccgcagagctcagctgcacgtgcagggactgctgcacgaggcagggtccactgatgatagaatcgttgtcccccaaaggggtcggtctacacgggtacccgtggccagcgtgcttatttag

SEQ ID NO: 136103 - DNA, 1365 bp, synthetic construct
  misc_feature 1..1365: note = Description of Artificial Sequence: Synthetic coding sequence
  source 1..1365: mol_type = other DNA
atggccggtagcgataccgctccttttctgtctcaggccgacgatccagacgacggtccagtgcctggcacccctgggctgcccggcagtaccggaaatcctaagtccgaagagccagaggtgcctgatcaggaaggactccagaggattacaggactgagtcctggccgcagcgctctgattgtggccgtcctatgctacatcaatctgcttaactacatggaccgtttcacggtggcggtgttcatctcatcatacatggtgttagctcccgtattcggctacttgggcgaccgctataataggaaatatttaatgtgtggtggaatcgccttttggagcttagtgacattaggttctagtttcattcccggtgagcacttctggctcctgctgctgaccaggggcctcgtgggagttggagaggcctcttacagtacaatcgccccaactctgatagccgatttattcgtcgccgatcagaggagtagaatgctcagcatcttctacttcgccatacccgtgggctccggcttgggctacattgccggttccaaagtgaaggacatggccggagactggcattgggccctgcgggtgacacccgggctgggtgtcgtggctgtgctcctgttgttcttggtggtgcgtgagccaccccgcggcgctgtggaaaggcattctgacctgccgccacttaacccaacgtcttggtgggctgatcttcgagccttagccagaaatcttatctttggccttatcacctgcctaaccggagtgctcggtgtgggtctgggggtggagattagtcggcgacttcgtcacagcaatccccgcgccgacccgctcgtttgcgcaactggtctactcgggagcgcacccttcctgtttctgtcacttgcctgtgcgaggggatctatcgtcgccacctatatattcatctttataggcgaaaccctgctgagcatgaactgggcaatcgtcgctgacatcttgttgtacgtggtcatccccaccagacggtctactgcggaggctttccagatagtcctgtctcaccttctgggagatgcaggatcgccatatcttatagggctgatcagcgatcggctccggcggaattggcctcccagtttcctgtctgagttcagagctctgcagttcagcttgatgctgtgtgcctttgtcggcgcactggggggagccgctttcttgggaaccgccatcttcatagaggcagaccgaagaagggcgcagctccacgtgcaaggtctgctccacgaagccggcagcacagatgatagaatcgtagtgccccagcgcggacgaagtacacgcgttcctgttgcatctgtgcttatctag

SEQ ID NO: 136104 - DNA, 1650 bp, synthetic construct
  misc_feature 1..1650: note = Description of Artificial Sequence: Synthetic coding sequence
  source 1..1650: mol_type = other DNA
atgatgtgcctggagtgcgccagtgccgcagccgggggggcagaagaagaggaggcggatgctgagcgacggcggcgaagacgaggagcccagcgaggcgcaggaggctcaggctgttgcggtgccaggggcgccggcggggccggagtaagcgcggccggcgacgaagtgcagactctttccggctccgtccgtcgcgctccaaccgggcctccaggcacgccagggacaccagggtgtgccgcaaccgctaaaggaccaggagctcaacagcctaagcccgcctcactaggtcgtgggcgcggcgccgccgccgccatattgtcactggggaacgtcctcaattatttagacaggtataccgtcgcaggggtgcttttggatatccaacaacactttggagtcaaagaccggggggcaggccttctccaatctgtgttcatctgtagttttatggtggcagcacccatttttggctacctgggggacagattcaatcgaaaggtgatccttagttgcggtatctttttttggagcgcagtcaccttctctagttccttcattccacagcagtacttctggctgctggttctgagccgaggcctggtgggtatcggcgaggcttcatactcaacaatcgctccaaccataataggcgatctgtttaccaaaaacacgcgaaccctgatgctttctgtgttctattttgctataccactcggctccgggttggggtacataacaggttccagtgtgaaacaagccgccggcgattggcactgggccttgcgcgtgagtcccgtactgggcatgattactgggactttaatattgattcttgtcccagccacaaaacgggggcacgctgatcagttaggcgaccagttaaaagcccgtactagttggcttagagacatgaaagctctgattcgaaatagatcatatgtcttctcttctcttgccacaagcgctgtatcttttgccacgggtgccctgggaatgtggatacccttatatttgcaccgcgcacaggttgtgcagaaaaccgcagaaacttgcaactcccccccatgtggggcaaaagactccctgatctttggcgcaataacctgcttcacaggattcctcggggttgttacaggcgctggcgcaactaggtggtgccgcctcaaaacacagcgggcagatcctctggtgtgcgctgtgggcatgttgggaagcgcaatcttcatatgcctcattttcgtagcagccaagagctctatcgtgggtgcctacatatgcatttttgtgggtgagacactgttgtttagcaattgggccataacagctgacattctgatgtacgtcgtcattccaacacgtcgtgccactgcagtcgcgctccagagcttcacttctcacctgctcggagatgcggggtccccctatttgatcggttttattagtgacttaatcagacagtccactaaggattctcctctgtgggaattcctatcccttggttacgccctgatgctatgtccattcgtggtcgtgctcgggggcatgttctttcttgccacggcactgttttttgtgagcgacagggccagagccgaacagcaggtgaatcagttggcaatgcccccggcttcagttaaagtatag

SEQ ID NO: 136105 - DNA, 1158 bp, synthetic construct
  misc_feature 1..1158: note = Description of Artificial Sequence: Synthetic coding sequence
  source 1..1158: mol_type = other DNA
atgttagtgtgctttcgtctctattcctggctgttcttcctcagtaggggtattgtgggcaccggctctgcctcttactcgaccattgcaccaacagtacttggagacctcttcgtccgggaccagcgtacccgagttctcgcggtattttatatctttatccctgtggggagcgggctgggttatgtgctggggagtgccgtgactatgctcactggaaactggcgatgggccctaagagtgatgccatgccttgaggcagttgccctgattttgctgattctgcttgtgccagacccacctagaggggctgccgagacccaaggcgagggggcagttgggggcttccgttctagctggtgcgaggacgtgagatacctgggaaaaaattggtcattcgtgtggagcacgctcggtgtgacagcaatggcgtttgtgaccggagccctgggattttgggcgcctaagttcctgctggaggctcgggtggtccatggccttcagccgccttgtttccaggaaccgtgctcaaatccggattcattgatcttcggcgcgctgactatcatgacgggggtcataggcgtaatactgggggcagaagccgcccggcgatacaagaaggtgatccccggtgctgagcctctgatttgcgcctccagcctcctagcaaccgcgccatgcttatatctcgctcttgtcctagctccaaccacgttgttagcttcttatgtgtttttaggactgggagagctgctgttgtcttgtaattgggctgtggttgccgatattcttctttccgtagtggtgcctaggtgccgaggcacggctgaagccctgcaaatcactgtcggccacattcttggagatgccgggtccccttacctcacaggcctcatctcttccgtgctgcgggcgagaagaccagacagctatctgcagaggttcaggtcgctccagcagagcttcttatgctgcgcatttgtcattgctctgggggggggctgtttcctgctgacagccctgtacctggagcgcgacgaaacccgagcatggcagccagtaacggggacacctgactcgaatgacgttgactccaacgatctggagagacagggtctactttctggagcaggcgcatccaccgaggaaccgtag

SEQ ID NO: 136106 - DNA, 1539 bp, synthetic construct
  misc_feature 1..1539: note = Description of Artificial Sequence: Synthetic coding sequence
  source 1..1539: mol_type = other DNA
atggctggcgggatgtccgccgagtgtcccgaaccaggtccaggcggcctccagggtcagtcgccaggccccggacgccaatgcccccctcccattacacctacctcttggtccctgcctccatggagggcctacgtggcagcggccgtgctgtgctatatcaatctgctgaattacatgaactggtttattatcgcaggcgttttactcgatatccaggaagtgttccagatatctgataaccacgcggggctgctccagaccgttttcgtttcctgcctgttacttagcgcccccgtgttcggatacctgggtgataggcactcacgaaaagcaacgatgtcattcggaattctgctgtggtctggcgccggacttagcagcagcttcatctctccacggtatagctggttattctttctctcaagaggcattgtgggcacgggatctgccagctacagcacaattgcgccaactgtgctgggagatttatttgtgcgggatcagcgaacccgagtcctggctgtgttctacatcttcatcccggtcggctcggggttggggtatgtgctcggtagcgctgtgacaatgctaactggcaactggcgctgggctttgcgtgttatgccttgcctggaggcagtggcacttatcctgctgatactgctcgttcccgatccacctagaggagctgcggaaacccaaggtgagggggctgtcgggggttttcggtctagttggtgtgaagacgtcaggtatctgggtaaaaattggtctttcgtgtggtctaccctgggcgtaaccgctatggctttcgtgacaggagctcttggtttttgggctcccaaattcctgctcgaagctcgagtggtgcacggcctccagcctccgtgctttcaggaaccgtgttcgaacccggatagcctcatatttggcgcccttactattatgacaggagtgataggcgtgattctcggtgccgaggccgcgcgcaggtacaaaaaagttattcccggtgccgaaccccttatatgtgccagcagccttctggctacagccccttgcctgtatctcgccttagtgcttgctccaacaactctactggctagctatgtctttctcggactgggagaactgttgttaagctgcaactgggccgtggtcgctgatattctcttgagcgtggtggttccaagatgtagaggcaccgctgaggcacttcagatcaccgtgggtcatatcctaggggatgctggctctccctacttgactgggctgatctccagcgttctaagagccagaagacccgacagctacctgcaacggttcagatcacttcagcagtcttttctctgttgcgcatttgtgattgcactgggcggtggatgttttctgttgacggctctgtacctggagagagacgaaacccgggcttggcagcctgtcacaggaacccctgacagcaacgatgtagacagtaacgacctcgagaggcaagggcttctgtccggggccggtgctagcaccgaagaaccatag

SEQ ID NO: 136107 - DNA, 249 bp, synthetic construct
  misc_feature 1..249: note = Description of Artificial Sequence: Synthetic coding sequence
  source 1..249: mol_type = other DNA
atggggcagactgctctggccggggggtcctcttcaaccccaactccgcaagccctgtacccggatctgagctgccccgaagggctggaagagctgcttagcgccccacccccggatcttggcgcacagaggcgccacggctggaacccaaaggattgcagcgagaatattgaagtaaaagaaggtggcctctactttgagcggcgaccagtagcacagtccacggacggggcccgcggaaaacgctag

SEQ ID NO: 136108 - DNA, 792 bp, synthetic construct
  misc_feature 1..792: note = Description of Artificial Sequence: Synthetic coding sequence
  source 1..792: mol_type = other DNA
atgggccagaccgccctcgccggcggtagttctagtacgccaactccgcaagccctgtaccccgacctgtcctgcccggaaggactggaggagctgctttccgcccccccacctgatctcggagctcagcggaggcacgggtggaatcccaaggattgctcggagaatattgaggtgaaagagggcggcctatattttgagagaaggcccgtagcccagtcaacagatggtgccagggggaagcgggggtactcccggggtcttcacgcgtgggaaattagctggccacttgagcagaggggcacacatgctgtcgtcggcgtcgctacagccttagctcccctgcagaccgatcactatgcggccctcctaggttccaattccgaatcttggggatgggacatcggaagaggcaagttataccaccaaagtaaaggacccggagcgccccaataccccgccggcactcaaggtgaacagcttgaggtccctgaacggttgttagtggtgctggacatggaagaggggactctgggctatgcaattgggggaacatacttggggcctgccttcagagggctgaagggtagaacgctctaccccgccgtcagcgccgtctggggtcagtgccaggttcggattcgctatctaggggagcgcagagccgagccacacagcctgcttcatctcagccgtctttgtgtgcgccacaatctgggagacacacggctcgggcaggtgtcagcattgcctctccccccggccatgaaacgatacctcctatatcaatag

SEQ ID NO: 136109 - DNA, 792 bp, synthetic construct
  misc_feature 1..792: note = Description of Artificial Sequence: Synthetic coding sequence
  source 1..792: mol_type = other DNA
atggggcagactgcactggccggaggtagtagcagcacgccgactccgcaggcgctctatccagatctgtcatgtcctgaggggctggaagaactgttatcggcaccaccaccagatctcggcgcccagaggcggcacgggtggaatccaaaggattgtagcgaaaacatagaggtcaaagagggtggactgtactttgagcgccgccccgtggctcagtcaaccgacggcgcgaggggaaaaaggggttacagtagaggcctccacgcttgggagatcagctggccacttgaacagcgcggcacgcacgccgtggtaggtgtggctacagcgctcgctcctctgcagaccgaccattacgccgctctgctcggctctaattctgagtcctggggctgggatattggaaggggtaaactttaccatcagtctaagggcccaggcgcaccacagtatcccgcagggacgcagggagaacagctggaggtgccggaacgattactagtggtgttagacatggaggaagggacgctgggttacgcaattggggggacttatctgggaccagcatttaggggcttaaaaggaaggaccctgtatccggccgtgtctgccgtgtggggtcaatgccaggtgcgaatccgctaccttggagagaggagagcagagcctcacagtctgttgcatctctcccggctgtgcgtgcggcacaatttaggcgatacgcgtctcggccaggtaagtgccctgcctctgccccccgccatgaaacgatatctgttataccagtag

SEQ ID NO: 136110 - DNA, 1068 bp, synthetic construct
  misc_feature 1..1068: note = Description of Artificial Sequence: Synthetic coding sequence
  source 1..1068: mol_type = other DNA
atggctaggcgcccacgaaactctagggcatggcactttgtactcagtgctgcaagacgcgatgccgacgccagggccgtggctttggcggggtcaactaactggggctatgactccgatggccagcactccgacagcgatagcgaccctgagtacagcactctcccgccttctattccaagcgccgttccagtaaccggagaatcattttgcgactgtgccggacagtccgaagctagtttctgttccagcctgcacagcgcccaccgcgggcgagattgcagatgtggagaggaagacgagtactttgattgggtatgggacgacctaaataaatccagtgcgaccctcctctcctgcgataaccggaaagtcagttttcatatggagtacagctgcggtacagcagcaatccgcgggaccaaagagctcggagaaggccagcatttttgggaaattaagatgacaagcccagtatacgggacagacatgatggtggggatcggcaccagcgatgtggatttggataagtaccggcacacgttctgctctttactgggacgagacgaggactcttggggactaagctacacaggattactgcaccacaaaggcgacaagactagcttctccagccgttttggccaggggagtataatcggtgtgcacctcgatacctggcacggcacactcactttttttaaaaataggaagtgcatcggcgtggcagcaaccaaattgcaaaataaaagattttacccaatggtgtgctcgacagctgctcggtcatctatgaaggtcactcggtcatgcgcaagcgcgaccagtctccaatatttatgctgtcacaggctcaggcagcttcggccggattcaggcgatactctggaaggactccctctgccacctggcctgaagcaggtgcttcataacaaactgggatgggtgctgtctatgagctgttctaggagaaaagcaccagtgtccgatccgcaggccgccacctctgcccacccctcatcgcgtgaacctcggccctgtcagaggaaaaggtgcaggcgcacctag

SEQ ID NO: 136111 - DNA, 480 bp, synthetic construct
  misc_feature 1..480: note = Description of Artificial Sequence: Synthetic coding sequence
  source 1..480: mol_type = other DNA
atggaatattcatgtggtactgccgccattcgagggacgaaggaactcggagaagggcagcacttctgggaaatcaagatgaccagccccgtgtatggcacactgactttttttaagaatcgtaaatgcatcggggtggctgctacaaaattacagaataaacggttctaccccatggtctgctcgacagccgctcgctccagcatgaaggtcactcggtcttgcgcctcagccacatcgttacaatacctgtgttgccaccgactgcgccagctgaggccagacagcggggatacactggagggcctccctcttcctcccggactcaaacaagtgctgcacaacaagctgggctgggtcctctcgatgagctgtagccgacggaaagccccagtgtctgatccccaagctgctaccagcgctcatccctccagtcgcgaaccccgcccatgccaaaggaagcgctgtcgcagaacatag

SEQ ID NO: 136112 - DNA, 1068 bp, synthetic construct
  misc_feature 1..1068: note = Description of Artificial Sequence: Synthetic coding sequence
  source 1..1068: mol_type = other DNA
atggccaggcggccaagaaatagccgggcctggcactttgtgctcagcgctgctcggcgtgatgctgacgctcgtgccgtcgcattggccggcagtacaaattggggatacgactctgatggacaacactctgactctgattccgatcctgaatacagcactttgccaccttccataccttcagctgtgcctgttaccggggaaagcttctgcgactgtgcaggccagtctgaggcatcattctgctcctctctacactcagctcataggggcagggactgcaggtgtggtgaggaagatgagtacttcgactgggtctgggacgacttgaataagtcgtctgccaccctacttagctgtgataaccggaaagttagttttcatatggagtactcatgcggcacggccgcaatccgcggaaccaaggagctcggggagggacaacacttttgggaaataaagatgacctctcccgtctacgggaccgatatgatggtggggattgggacttctgatgttgatctggataaatataggcacactttctgttccctgttggggcgcgacgaggactcctgggggctgtcatacaccgggctgctccaccataagggtgacaaaacatcttttagttcaagattcggccagggtagtattataggtgttcacctggatacatggcatgggacgctgaccttctttaagaacaggaaatgcatcggcgttgccgccactaagttacagaataaaaggttctatccaatggtgtgttctaccgccgcaagaagtagtatgaaggtgacacggtcctgcgcctctgccacctctctacagtatctctgctgtcatagactcaggcagctcaggcctgactctggcgatactcttgagggcttgccgttacctcccggtctgaagcaggtgctccacaataagctggggtgggtactcagcatgagttgtagtcggaggaaggctcctgtgagcgacccgcaggccgccacctccgcccatccctcctctagagaacctcgcccgtgccagagaaagcggtgtcgccggacctag

SEQ ID NO: 136113 - DNA, 822 bp, synthetic construct
  misc_feature 1..822: note = Description of Artificial Sequence: Synthetic coding sequence
  source 1..822: mol_type = other DNA
atgggtcaaaagttgtctggctccctgaaaagcgtggaagtgcgggagcctgcactccggcctgccaaacgggaactgaggggagcggagcccggccggcctgcacgccttgatcagctgctggacatgccagccgctgggctcgccgtacaacttaggcacgcctggaacccggaggacagaagcctcaatgttttcgtgaaggatgatgatcggctcacattccaccgccacccggtcgctcagtccaccgacggcatccgaggaaaggtaggacacgctcgaggcctacacgcctggcagatcaactggcctgctcgacagaggggcacccacgctgttgtgggggtagcgacggcccgggctcccctgcactcagtgggatacacagcattggtcgggtccgacgcagagagctggggatgggatctgggccggtcacggctctatcacgacggcaagaatcagcccggggtagcttatcccgctttcctcgggcccgatgaggctttcgccctgccggacagtctattggtggtgctggatatggacgaaggcacattatcatttatagtcgatggccagtatttgggtgttgcattcagagggctcaaaggcaaaaagctgtatcccgttgtttctgccgtctgggggcactgtgaggtcactatgagatatatcaatgggctcgacccggaacctctgcccctaatggacttgtgccgccggtctattaggtcggcacttgggagacagcggttacaagatatctcgtctttgcccctgccgcagtcactcaagaactacctgcagtatcaatag

SEQ ID NO: 136114 - DNA, 1908 bp, synthetic construct
  misc_feature 1..1908: note = Description of Artificial Sequence: Synthetic coding sequence
  source 1..1908: mol_type = other DNA
atggctagctctggaatggcagactctgctaatcacctccctttctttttcggcaacatcaccagagaggaggcggaggattatctagtacagggcggaatgtccgatggactttacctgttacggcagtctcgcaattaccttggcggattcgcgctctccgtggcgcatggacggaaggcccaccattacacgatcgagagggagcttaatgggacctacgccatcgccggtggccggacccacgctagccccgctgatctttgccattaccacagccaagagagtgacggactagtctgtctcctcaaaaaacctttcaacaggccacaaggcgttcagcccaaaactggaccattcgaagaccttaaggaaaacctcataagagaatacgttaagcagacctggaatttgcagggacaagccctcgagcaggcaataatttctcaaaagccacaactggagaagttgattgccactaccgcacacgagaagatgccttggttccatggcaagatttcacgggaggagagtgagcaaatagttttgatcggatccaagacaaatggtaaattcctgatacgggccagggacaataacggatcctacgcactgtgcttattgcacgagggcaaggtgctccactatcgcattgacaaggataaaacaggcaagctttctattcccgagggaaagaagtttgataccctgtggcaactcgtggagcattactcctacaaagcagacggtctcttgcgggtgctgaccgtgccatgccagaaaattggtacacaggggaatgtgaattttggcggaagacctcaactgcctggtagtcaccccgccacttggtccgcaggtggtattattagtcggataaagagctatagcttccctaagcccggccatcgaaagtcctctccagctcagggcaacaggcaggagagtacggtgtctttcaatccctacgaaccagaacttgcaccctgggccgcggacaagggccctcagcgagaggctctcccaatggacaccgaggtgtacgagagcccgtatgcagatcctgaggagatcaggcccaaggaggtctatcttgaccgcaagcttttgactctggaagacaaagagctaggatctggtaacttcggcaccgtaaagaagggctactatcagatgaagaaggttgttaagaccgtggccgtcaagatcctgaaaaacgaagccaatgatcccgctttgaaggacgaactcttagccgaggccaacgtcatgcagcagcttgataacccatacattgttcgcatgattggtatctgcgaggcagaatcttggatgctggtgatggaaatggctgagctggggccattaaataaatacctgcagcaaaatcggcatgtgaaggataagaacatcatcgagctggtccatcaggtgtcaatgggtatgaaatatctggaagaatccaactttgtacaccgggacctggcggcccggaacgtgcttctggtgacacagcattacgccaagatctccgattttggtttaagtaaagctctgcgcgccgatgagaattattacaaagctcaaacccatggaaagtggcccgtgaagtggtacgccccagaatgtataaattattacaagttctcatccaagagcgacgtatggtcattcggagtgctgatgtgggaagccttctcttacgggcaaaagccataccgtggaatgaaaggctccgaggtcaccgccatgctcgaaaaaggcgaacgtatgggctgccccgcgggatgcccacgggaaatgtatgacctgatgaatctgtgctggacatatgatgtggaaaacaggcccggtttcgctgctgtggagctccgccttagaaactactactacgatgttgtgaactag

SEQ ID NO: 136115 - DNA, 1839 bp, synthetic construct
  misc_feature 1..1839: note = Description of Artificial Sequence: Synthetic coding sequence
  source 1..1839: mol_type = other DNA
atggccagctccggcatggccgattccgccaatcacctcccatttttcttcggcaacatcacacgggaggaggccgaggattacctagtgcaagggggcatgtccgatgggctgtatttgctgcgacaaagccgcaattacctgggtgggtttgctcttagcgtggctcacggaagaaaagcacaccattatactatagagcgcgagctgaatggcacctatgccatagccgggggccggacacacgcttctccagctgatctctgccattaccacagtcaggagagtgatggacttgtatgtttactgaagaaaccatttaatagaccccagggagtgcagcctaagacagggcccttcgaagacctcaaagagaacctgatacgggaatatgtgaagcagacatggaacctgcaagggcaggcgttggaacaggctattatctcccagaaaccacagcttgaaaaactaattgccacaactgcgcacgagaagatgccttggttccacggaaagatatctcgcgaggaatccgagcaaatagttctaataggcagcaagaccaatggaaaatttcttataagagcccgcgataacaatggctcctacgccctatgtttattacacgaaggtaaagtgctgcactacagaatcgacaaggataagactggcaaactgagtatcccagaaggcaaaaaatttgacactctttggcagcttgtagaacactacagctacaaggcagacgggctgctgcgtgtgctgaccgtaccatgtcagaagatcggaacccagggaaacgtcaactttggaggaaggccgcagctgcccggtagtcacccagcgtcctcccctgcgcaaggcaaccggcaggagagcaccgtgtcattcaatccatatgagcccgaattggccccttgggccgccgataagggtcctcagcgggaggcactgccaatggatacagaggtgtacgagtcaccatacgccgatccagaggaaatcaggcccaaggaggtgtatttagatcgcaagctcctaactttggaagataaagaactaggttctggaaattttggaaccgtgaaaaagggatattaccagatgaaaaaggtggtaaagaccgtggcggtgaagatccttaagaatgaggccaatgacccggccttgaaggatgaactgttggccgaggctaatgtgatgcagcagctggacaacccatatatcgtgagaatgatcgggatctgcgaagctgagtcttggatgttagtcatggagatggcagaattggggccactgaataagtacctgcagcagaataggcatgtcaaggataagaacattattgagctcgtgcatcaggtgagcatgggtatgaagtatttggaggaatcaaactttgtccatcgagatcttgctgccagaaacgtcctgctggttacccagcactacgccaagatctcagacttcggcttgtctaaggctcttagagctgacgaaaactactacaaagcacagacacacggtaaatggcctgtgaagtggtacgcccctgagtgtatcaattattacaagttttcctctaagagtgatgtctggtctttcggcgtccttatgtgggaagcctttagctacggccagaaaccatacaggggaatgaagggcagcgaagtcacagcgatgcttgaaaagggcgagcggatgggatgtcccgccggttgcccacgggagatgtacgatctgatgaacttgtgctggacgtatgacgtggagaacagaccaggctttgccgccgtggagttaagactgcgcaactactactatgatgtagtgaattag

SEQ ID NO: 136116 - DNA, 1839 bp, synthetic construct
  misc_feature 1..1839: note = Description of Artificial Sequence: Synthetic coding sequence
  source 1..1839: mol_type = other DNA
atggctagttcgggtatggctgacagtgctaaccacctgccttttttctttggcaatatcactcgcgaggaagccgaggattacctggtgcaggggggaatgtctgatggtctgtacctcctccgacagtctagaaattaccttgggggattcgccctcagcgtagctcacggtaggaaggcccaccactacaccatcgaaagagagctaaatggtacctacgccattgctggcggtagaacacacgcgtccccagccgatctgtgccattatcacagtcaggaatctgatggcctggtctgcttgctcaagaaaccatttaatcgcccacagggagtgcagccaaaaacaggaccgttcgaagatttaaaagagaatctgatccgggaatacgttaaacagacatggaacctgcagggccaggccctggaacaggccattatctcccagaagccgcagctggagaagttaatagctacgacagcccatgaaaagatgccctggttccatggaaaaataagcagggaagaatccgagcaaatcgtgcttatcggctcaaaaaccaatggcaagttcctaattagggcaagggacaacaacggcagttatgcactatgtctccttcatgaggggaaggtgctccactatcggattgataaagataaaactggtaaactgtctatccctgagggtaagaaattcgataccctgtggcagcttgtcgagcattacagctataaggccgatgggttgctaagggtgctgaccgtgccctgccagaaaatcggcactcagggcaacgtgaacttcggagggcggccccagctccccggcagtcaccctgcctccagtccagcacagggcaatagacaggaaagtacagtgagttttaatccctatgagcctgaattggctccatgggctgccgataagggccctcagcgagaagcactccccatggataccgaagtttacgagagcccttatgcagatccagaggagattaggcctaaggaggtttacctcgaccggaaacttttaaccctggaggacaaagagctaggcagcggaaactttggaacagtgaaaaaaggctattatcaaatgaaaaaggtggttaagacagtcgctgtcaagattctgaaaaacgaagcaaatgatcccgcactgaaggacgaattgttagccgaggctaacgtgatgcaacagctggacaacccatatatcgtgagaatgatcggtatttgcgaagctgagagttggatgttggtgatggagatggcagagcttggtcccctgaataagtatctccagcagaacagacatgtaaaagacaagaacatcattgagcttgtccatcaagtcagcatgggtatgaaatacctggaggagtccaatttcgtccaccgagatttagctgcgaggaatgtgcttctggtaacacaacattatgcaaaaatatccgactttggtctgagcaaagccttacgcgcagatgagaactactacaaggcccagacccacggcaaatggcccgtaaagtggtacgcccctgagtgtatcaattattacaaattctcatccaagtccgatgtctggagctttggagtgttaatgtgggaagcctttagctatggacagaagccgtatcgtggaatgaaaggttcagaagtaactgctatgcttgagaagggcgaaagaatggggtgccctgccggatgtccgcgagagatgtatgacctaatgaatctgtgctggacatatgatgtggagaacagaccaggcttcgccgccgtcgagctgcgcttgagaaattattactacgatgtggtgaattag

SEQ ID NO: 136117 - DNA, 1908 bp, synthetic construct
  misc_feature 1..1908: note = Description of Artificial Sequence: Synthetic coding sequence
  source 1..1908: mol_type = other DNA
atggctagctcggggatggccgactcagccaaccacttgcctttcttcttcggaaatatcacacgtgaggaagcggaggattaccttgtgcagggcgggatgtcagacggactttacttgctgagacaatcacggaactacttaggcggcttcgcactctccgtggctcacggaaggaaagcacaccattacactatagagcgggaattgaacggtacatacgcaatcgccggcggcaggactcatgctagcccagctgatctgtgtcattatcatagccaagagtctgatggcctagtgtgcctactcaagaaacccttcaatcgtccacagggagtgcagcctaaaactggcccgtttgaggacctgaaggagaatctgattcgagaatatgttaaacagacatggaatctgcaggggcaggcgcttgagcaggcgatcataagtcagaagccccagctcgagaaactcatagcgaccaccgcgcacgaaaaaatgccctggtttcatggaaaaatcagtagagaggaatctgaacagattgtactgattggcagtaaaacaaacggaaaatttttgatcagagcaagggataataacgggtcctacgccttatgtttgttgcatgagggcaaagtcctgcactatcggatcgacaaagataagactggcaaactcagtatcccagagggtaagaaattcgacaccctgtggcagctagtggagcactattcctacaaggcagacggactactccgtgtcctgaccgtgccatgccagaagataggtacacagggcaacgtcaatttcggcggacgcccacagctacccggctctcacccggccacctggtccgctggaggtatcatctccaggattaagagctactcattccccaaacccggccaccggaagtcaagtcctgcgcagggaaatcgccaagaatccactgtgtcctttaatccttacgaaccagagctggcaccttgggccgcggacaagggacctcaacgtgaggcactgccaatggatacggaagtatacgaatctccctacgcggacccagaagagatccgcccgaaagaagtctacctcgatcgtaagctcctgacactggaagataaagaacttggcagtggaaacttcggcacagtcaaaaaggggtactatcagatgaagaaggtggtgaagactgtggccgtgaaaattctcaagaacgaggcgaatgaccccgccctgaaagatgagctgctggccgaagccaacgtaatgcaacagctggacaacccctatatagtacgcatgatcggaatttgcgaggccgaaagttggatgctcgttatggagatggccgaactggggcctttgaataagtacttgcagcaaaataggcacgtcaaagacaagaatatcattgagcttgttcatcaggtgtcaatgggtatgaaatatttggaagaatctaattttgttcatcgggatctagctgctcgaaatgtacttttagtgactcagcactacgctaagatcagcgattttgggctgagtaaggccctcagggccgacgaaaactattacaaggcgcagacacatggtaagtggcctgtgaagtggtacgcacctgaatgtatcaattattacaaattctcatctaagtcggatgtgtggagcttcggtgtgctgatgtgggaagctttctcgtacggccaaaagccataccgcggaatgaaggggtccgaagtaacggccatgctcgagaaaggagaaaggatgggctgtcctgccggttgccccagggagatgtacgatcttatgaatctatgctggacgtacgacgtggagaatcgccctggcttcgccgccgtcgaattaaggctgaggaactattactacgacgttgtcaattag

SEQ ID NO: 136118 - DNA, 990 bp, synthetic construct
  misc_feature 1..990: note = Description of Artificial Sequence: Synthetic coding sequence
  source 1..990: mol_type = other DNA
atggtgtcaaagtcccgctggaagttgctcgcaatgcttgctctagttctggtggtgatggtgtggtactccattagtcgggaagattccttttactttccaatccctgagaaaaaggaaccctgcttacaaggtgaggccgagtctaaagcctcaaaactcttcggcaactattccagggaccagccaattttcctccggctggaagattacttctgggtcaaaacacccagtgcctatgagctaccctacggtacaaagggtagcgaggacctgctgctgagagtgctcgcaatcaccagttcttcaatccccaaaaacatccagtcactgcggtgtcgtcgctgcgttgtggtggggaacgggcatcggctgcggaattcttccctaggcgacgcaatcaataagtacgatgtcgtcattagactcaataatgcaccagtggctggctatgagggggacgtcggatcaaagacaacaatgaggctgttctacccggaatccgcccatttcgatcctaaggtagagaataaccctgacacactgctcgttttggtggcctttaaggcaatggactttcattggatagagaccatcctttcagataaaaagagggtcaggaagggattttggaagcagccccctctgatttgggacgtgaaccccaaacagattaggatactgaaccctttctttatggagatcgcagccgacaaactcctgtcccttccgatgcagcagccaagaaagataaaacaaaaaccaacaacaggactgctggcaataacattagctttacatctctgtgatctggtccacatcgcggggtttggatacccagatgcctataataagaagcaaaccatacattactacgagcagattactttgaagagcatggctggaagcgggcacaacgtctcccaggaagccttagccatcaaaagaatgttggaaatgggcgcaataaaaaacctcacctcattctag

SEQ ID NO: 136119 - DNA, 1917 bp, synthetic construct
  misc_feature 1..1917: note = Description of Artificial Sequence: Synthetic coding sequence
  source 1..1917: mol_type = other DNA
atggcaacaggcgccaatgcaacacccctggattttccatcaaaaaagcgcaaaagaagtcggtggaatcaggatacgatggagcagaaaactgtgatccctggaatgccgaccgtcatccctcctggcctgactcgggagcaggaacgcgcctacatagtgcagcttcagattgaggatctcacacgcaaactcaggaccggtgatctgggaattccaccaaaccccgaggacaggtccccgtcccctgagcctatttacaactcagaaggcaaaaggctgaatacaagagagttccgcacccgcaagaaactcgaagaagaacgacataacttgattaccgagatggtggctctgaatccagattttaagccgcctgccgactataagccacccgcaactcgcgtttccgacaaggttatgataccacaggacgagtatcccgagatcaacttcgtggggttactgatcggtccccgcggcaacaccttgaagaatatcgagaaggaatgcaacgcaaagattatgatccgggggaaaggctccgtcaaagagggcaaagtagggagaaaagatgggcagatgcttccgggtgaagacgagcccttacacgctttagtgaccgccaacactatggagaacgtgaagaaagccgtcgagcagattagaaatattctcaaacagggtatcgagactcctgaagaccagaatgacctgcgcaaaatgcagctccgcgagttggcccgcttaaatggaactctgagagaagacgataatcggattctgcgaccatggcagagctccgaaactcgaagcattactaacacaactgtgtgcacaaagtgcggaggcgccggacacatagcatctgattgtaaattccagcgacctggcgatccccaatccgcacaggataaggctagaatggacaaagagtacctgagtttaatggctgagctgggggaggcacccgtgcctgcctctgtcggtagcacctccggccctgctacaacaccactcgctagtgcccctaggccggctgcccccgcgaacaacccaccccccccatcgttgatgtctacaacacagtctcgcccaccatggatgaattcggggccaagtgaatctcgcccgtatcatggcatgcacggcggagggccaggtggtcccggcgggggcccgcatagctttcctcacccattacccagcctgacaggaggccacggaggccaccccatgcagcacaatccaaacggcccaccacccccatggatgcaaccacccccaccacctatgaatcagggtcctcatccaccgggccaccacggcccaccgcccatggatcagtatttggggagtactcccgtcggtagcggcgtatatcgcctccaccagggaaagggcatgatgccccccccaccaatgggcatgatgccaccgccgcctccccctccctcaggacaacccccccctcccccaagtggtccccttccaccttggcagcaacagcagcagcagcctccacccccccctccgcccagcagtagcatggccagcagtacacccttaccatggcaacaaaacacaactacaactacgacatctgctggtaccggctcaatcccaccctggcagcagcaacaggcagcggccgcggctagccctggtgccccccagatgcagggcaatcctaccatggtgcccctgcccccgggcgtccagcccccgctaccaccgggagctccacctcccccaccccccccgccaccagggtccgccgggatgatgatcccaccacgagggggagatggaccctctcacgagtccgaggactttccccgacctctagtcactctgcccggacgccaacctcagcagcgcccttggtggactgggtggttcggtaaggctgcatag

SEQ ID NO: 136120 - DNA, 1920 bp, synthetic construct
  misc_feature 1..1920: note = Description of Artificial Sequence: Synthetic coding sequence
  source 1..1920: mol_type = other DNA
atggcgacaggtgccaatgccacaccactcgacttcccatctaaaaaaaggaaacggtcccggtggaatcaagatacgatggagcagaaaacagtgatccccggcatgcccactgtgatcccaccaggcctcaccagggaacaggaaagggcctacatcgtccagctgcagatcgaagatctaaccagaaaactcagaacaggcgacctgggcatcccgcccaatccagaggatcgcagcccgagtccagaacctatctataatagcgagggtaaacggcttaacacccgggagttcagaacgaggaagaaattggaggaggaaagacataatttgatcacggaaatggtagcgttgaatcccgacttcaagccacctgctgactataaaccaccagcgaccagggtttcagacaaagtgatgatcccccaggacgaatatcctgaaattaatttcgtgggtctgttaatcggaccacgcggcaataccctgaagaacattgagaaggagtgcaatgccaagattatgattaggggaaagggaagtgtcaaggagggaaaggtgggacggaaagatggacagatgctgcccggcgaagacgagccgttacatgcactggtaaccgccaataccatggagaatgtcaagaaagctgtggaacagatacgcaatatcctgaagcagggaatcgagacccccgaagatcagaacgaccttagaaaaatgcagcttcgagaactggctagactgaacggaacactgagagaggacgataaccgaatcttgagaccatggcagagctccgagacccggtcgatcacaaatacaaccgtatgcacgaagtgtggtggcgccggccacatagcgagtgactgcaaatttcagcgacctggagacccacaaagtgctcaggacaaggcaaggatggacaaagaatacctctctctgatggcagagctcggcgaagcacctgtccccgcgtctgtggggagtacaagtggaccggcaacaacaccccttgcttccgctccccgccccgctgccccagcaaataatcctccgccaccttcactgatgtctacaacgcaatcgcgaccgccctggatgaacagcggacctagcgagagccgaccataccacggaatgcatggcggtggaccaggtggccctggaggggggccacatagctttccccatcctcttccatctcttaccggcggtcacggaggccaccccatgcagcataaccccaacgggccacctccaccttggatgcaaccacccccccccccgatgaaccagggcccccatcccccaggacaccacggacctccacctatggaccagtatcttggcagtacacctgttggttccggtgtttatagattgcatcagggcaaggggatgatgccaccccccccgatgggaatgatgccgccccctcctcctcctccttcaggccagcctccacctcctccaagcggacccctaccaccgtggcagcaacagcagcaacagcccccccccccaccgccaccttcatcctcaatggcctcctcgacaccccttccatggcagcaaaacacaacaacaaccacaacaagcgctggcacaggctctatccccccatggcagcagcaacaggctgctgcagctgcctcccctggcgcaccccagatgcaaggtaatcctaccatggtgccactcccccctggggttcagccacccctgcctccaggtgcgcctccccctcctcccccacctcctcctggctccgcgggaatgatgtatgcacctccccccccgccaccacctccaatggatccctccaactttgtgactatgatgggtatgggcgtagctggaatgccaccctttggaatgccgcctgctcccccccctccaccaccacagaactag

SEQ ID NO: 136121 - DNA, 1716 bp, synthetic construct
  misc_feature 1..1716: note = Description of Artificial Sequence: Synthetic coding sequence
  source 1..1716: mol_type = other DNA
atggccactggcgcaaatgcaacgccactggattttccttcaaaaaaaaggaaaagatcccggtggaaccaggacacaatggaacagaagaccgtcattccaggaatgccgaccgtcattccgcctggactgactagagaacaagagagggcatatatcgtgcagctgcagatcgaggatctgactcgcaagctcagaaccggagatctgggcattccccctaatcccgaggatcgaagcccaagtcccgagcccatctacaactctgagggcaaacggttgaatacacgcgagtttaggaccaggaagaagctggaggaagaacgccataatctcattactgaaatggtggcactgaatcctgattttaagccaccagccgattataagccaccagcgacccgggtgtctgataaggtgatgatcccccaggatgagtatcccgaaatcaacttcgtcggcctgctgatcggccccaggggaaacaccttgaaaaatatcgaaaaagaatgtaacgccaagattatgatcagggggaaaggatccgttaaggaaggcaaggtgggaagaaaggatggacagatgcttcccggagaggacgagccccttcacgcacttgtgacagccaataccatggagaacgtaaagaaagcagtggaacagattcgcaatatattaaagcaaggaatcgaaaccccagaggaccaaaatgacttacgcaagatgcaactgcgggagctagccaggctcaatggcaccctgcgggaggacgacaacagaatcctgcggccttggcagtcctccgagacaagaagcatcaccaacacaactgtctgtaccaagtgcggcggggccggccacattgcgtcggactgtaagttccagcggccaggggatccccaatccgcccaggataaggccagaatggacaaggaatacttatctctcatggccgagctgggggaggctcctgtgccggcctccgtgggctctacctctgggcccgcaacaacccccctggcttctgcacctcgtccagccgctcctgctaataacccacctcccccctcactcatgtctacaacgcagtcccggcccccttggatgaattccggacccagcgaaagccgcccatatcatgggatgcatggtggcgggcccggcggaccaggaggggggccacatagtttcccccatcccctgccatccttgacgggtgggcatggaggccaccccatgcagcataacccaaatggtcctccacccccctggatgcagccgccacctccccctatgaaccagggtccgcacccccctgggcatcatgggcccccgccaatgggtaagtcagtacctggcaaatacgcctgcggcctgtggggtctctccccggctagcaggaaaaggtatgatgccgctacaacgtatggccacgacgctgccgctgctgcggcctcccagtgggccgccccaactcctagcctttggtcctcttcccccatggccaccaccgctgcggcagcatccgccactccgtctgcgcagcagcaatacgggtttcaatatccactggctatggccgctaagataccccctcgaggaggggatggacccagccacgagagcgaagatttccccagaccactggtgacgctccctggcaggcagcctcagcagcgaccatggtggacgggctggtttggcaaagccgcctag

SEQ ID NO: 136122 - DNA, 1302 bp, synthetic construct
  misc_feature 1..1302: note = Description of Artificial Sequence: Synthetic coding sequence
  source 1..1302: mol_type = other DNA
atggttgcactcaaccctgacttcaagccacccgccgactataaacctccggcaacacgggtaagcgataaagtgatgatcccacaggacgagtatccggaaatcaactttgtcggcctgctgattggcccacgaggcaacacattgaagaatatcgagaaagaatgtaacgccaagattatgatcagggggaaaggcagcgtgaaggaaggaaaggtcggccgtaaggacggacaaatgttaccaggagaagacgagcccttgcacgctcttgtaaccgccaacacgatggagaacgtaaaaaaggcggtggaacaaataagaaacatcttaaaacaaggtatcgagacacccgaggatcagaatgaccttagaaaaatgcagcttagagagctggcacggctgaatggtactctgcgcgaggatgacaacagaattttaagaccgtggcagagcagcgaaactaggtccatcaccaatactaccgtgtgtacaaagtgcggcggggccgggcatatcgcctcagattgcaagttccagcgacctggcgacccccagtccgcacaggataaagcgaggatggacaaagagtacttaagtctgatggctgagttgggtgaggcaccagtgccagccagcgtcggctccacaagtgggcccgctactacacctttggcgtccgcaccaaggccagcagctcccgcaaacaatcccccacctccttcactgatgtccacaacccagtcacgcccgccttggatgaattctggcccgtcagagagcaggccgtaccacggaatgcatggaggaggtcctggagggccgggcggggggcctcactcttttcctcaccctctgcccagcctgaccggaggacatggaggtcaccccatgcagcataatcctaacggcccaccaccaccatggatgcaaccgccccccccacctatgaatcaagggcctcacccgccaggccaccatggacctccaccaatggaccaatatctggggtccacgcccgtaggtagcggggtgtaccgtctccatcagggaaaggggatgatgcctccgccgccgatgggcatgatgcccccgccaccgccccccccaagtgggcagcccccccctccaccaagcggaccactccctccatggcagcaacaacaacagcagccacctccgcctccccctccatcctctagtatggcttcaagcacccccctaccctggcagcaacgttcactccccgccgccgctatggcccgggccatgcgggttcgcaccttcagggcccactggtag

SEQ ID NO: 136123 - DNA, 2022 bp, synthetic construct
  misc_feature 1..2022: note = Description of Artificial Sequence: Synthetic coding sequence
  source 1..2022: mol_type = other DNA
atggctaccggcgcgaacgcaacgcctctcggaaaactgggtccacccggacttcctccgctgccaggccccaagggcggctttgagcccggccccccccccgcccctggaccaggtgcaggcctgctggcgcccggccccccacccccaccaccagtcggatctatgggtgcgctgacggccgcgttcccgttcgcagcacttccccctccacccccgcccccgcctccccccccacctcaacaacccccaccaccccccccaccgccctcaccgggggctagctatccaccgccacagcctccccccccccctcctttatatcagagggtgtctcccccccaaccccccccaccccagccgccaaggaaagaccaacagccaggacccgctggcgggggcggagactttccaagcaagaagcgcaaaaggtctcgttggaatcaggataccatggaacagaaaacagtcattcccggaatgcccaccgttattccacccggactgacgagagaacaggagagggcctacatcgttcaactgcagatagaggaccttactagaaagctccgcaccggcgacctgggcatccccccaaaccctgaggatagaagtcctagtcctgagcctatctacaacagcgagggtaaacgcctgaatacgagggagtttagaacacgcaagaagctagaggaagagcggcacaatttaattaccgagatggtggccctgaatccagactttaagccaccagccgattacaaacctccagccacgcgggtatccgataaggtgatgattccacaggacgagtaccccgagattaactttgtaggacttctgatcggcccacggggtaacacgctcaagaacattgaaaaagaatgcaatgcaaagatcatgatccgtgggaagggaagcgtgaaagagggtaaagtaggaaggaaagatggacaaatgctgccaggggaagacgagccactacacgcactcgtgactgccaacaccatggaaaacgtcaaaaaggcagtggagcagatacgcaacattctgaagcaaggaatcgagacacccgaagaccaaaacgacctgcggaaaatgcaactgcgagaactcgctagactgaatggaaccctgcgcgaggatgataaccgtattcttcgcccctggcaatcaagcgagactcgttctatcacaaacacaacagtgtgcactaaatgcggtggtgcaggacatatagctagtgattgtaagtttcagaggcctggggacccgcagagcgcccaggataaggcccgcatggacaaggagtacctgagcttaatggctgaactaggcgaagcacccgtccctgcttcagttggtagcacttccgggccagcaaccacacccctcgcgtcagctcctcggcctgccgcacccgcaaataatcctccccctccttctttgatgtctacaacccagagtagacccccgtggatgaacagcggaccctcagaatccaggccctatcacggcatgcacgggggcggcccaggtgggcccggtggcggccctcacagctttccccatccactccccagccttacaggtggccacgggggccacccgatgcagcacaatccaaacggaccaccacctccctggatgcagcccccacccccccctatgaatcagggacctcaccctccaggacatcacggtccacctcctatggaccagtatctcggcagcactcctgtcggatcgggggtgtaccgtctgcatcagggcaagggaatgatgccccctccgcctatgggcatgatgccacctccaccccccccccctagtggtcagcctcccccccccccatccggcccccttcctccctggcaacaacagcagcagcagccccccccccctcccccaccatcctcctccatggccagtagtacaccattaccttggcagcaaagatcgcttccagccgccgccatggccagggcaatgcgggtccgaaccttcagagcccattggtag

SEQ ID NO: 136124 - DNA, 1842 bp, synthetic construct
  misc_feature 1..1842: note = Description of Artificial Sequence: Synthetic coding sequence
  source 1..1842: mol_type = other DNA
atggagcagaagaccgttattccaggcatgccaacagtgattccacccggactgacccgggagcaagaacgggcttacatcgtccaattgcagatagaggacctgactcgaaaactccgcaccggagacttgggtatccctccgaaccccgaggatcggagcccctcccccgagcccatatacaattctgagggcaagcgtctgaatacccgggaatttagaaccagaaagaaactcgaagaggaacgccacaatctgatcactgaaatggtggcgctgaatcctgattttaagccacccgccgactataagccccctgccactcgcgtgtccgacaaagtgatgatccctcaggacgaatatcctgaaataaacttcgttgggctgctgatcggcccgcgtgggaacacacttaagaatatagagaaggagtgcaatgctaaaatcatgatccggggaaagggtagcgttaaggaaggaaaggtgggccggaaggacggacagatgctgcccggagaggacgagccacttcacgccctggtgacagctaacacaatggagaacgtcaagaaagctgtggaacagattcggaacatactcaagcagggaatcgaaacacccgaggaccagaacgaccttcgcaagatgcagctccgggagcttgcccgccttaacggcaccttacgggaagacgataatcgaattctgagaccctggcagtcatccgagactcggtcaattacaaacaccactgtctgtacaaagtgtggaggcgccggtcacatcgctagtgactgcaaatttcagaggccaggggacccacaaagtgcccaagacaaggcccgaatggataaagaatacctgtctctgatggcggagctcggcgaggctcccgtccccgcctccgtgggctccacaagtggacccgccacaactcccttagcctctgccccacggcccgccgcacccgccaacaatcctcccccaccaagcctgatgtccacgacccagtcaaggccaccctggatgaactccgggccctcagagagtagaccttaccatgggatgcatgggggcggaccaggaggtcccggaggtggtccccattcatttccccacccactcccttccttgacgggcggccacggggggcatcccatgcaacacaacccgaatggtccgccacctccctggatgcaaccacctccccctcctatgaaccagggcccccatcctcctggccaccatggaccacccccaatggatcagtacctgggctcaacccccgtgggttctggggtttatcggcttcaccagggcaagggtatgatgccgcccccccctatgggcatgatgcccccacctccccctcctccaagcggccagccccctcctcccccctcaggtcctttacctccttggcaacagcagcagcagcagccgccaccacctcctccaccgtcctcgtcaatggcctcttcgaccccattgccatggcagcaaaacaccactacgactacaacgagcgccggtaccggttcaatccccccatggcagcaacagcaggcagcagccgcagcatcccctggcgccccccagatgcagggtaatcccacaatggtgcctcttcccccaggggtccaaccacctttgccaccgggagctcctcctccccctccaccaccgcctcccggtagcgcagggatgatgtatgcccctcccccaccccctccccctcccatggatccctcaaacttcgtcaccatgatggggatgggggtcgccggtatgccacctttcgggatgccccccgcaccgccccctcctccaccccagaactag

SEQ ID NO: 136125 - DNA, 1527 bp, synthetic construct
  misc_feature 1..1527: note = Description of Artificial Sequence: Synthetic coding sequence
  source 1..1527: mol_type = other DNA
atggccaaatctaatggggagaatggtcccagagctcccgccgccggcgagagcctgagcgggacccgggaatccctggctcagggtcctgatgctgcgactactgatgagttgtcatctctagggtctgactccgaagcaaatggattcgccgaaagacgaatagataaattcggattcattgtgggcagccagggtgctgaaggagcgctcgaagaagtccccctggaggtgctgcgacagcgggaaagcaaatggctcgacatgctgaataattgggataaatggatggcaaagaagcataaaaagatcagattaagatgccagaaggggataccgccctcactgagaggccgggcgtggcagtacctgtccgggggaaaggtaaaactgcagcagaatccaggaaagtttgacgaactcgacatgagcccaggggatcctaaatggctggatgtcatagagcgggacttgcatagacagttcccattccatgagatgtttgtgtcgagggggggtcatggacaacaggaccttttcagggtgttgaaggcctacactctctacagaccagaagagggatactgtcaggctcaggcccctattgccgccgtcctgctgatgcatatgcctgccgaacaggccttttggtgtttggttcagatttgcgagaaatatcttcccggctattactcggagaaactggaagccatacaattagatggggagatactcttcagtctgttgcagaaagtatcacctgtcgcccacaagcacttgagtcgtcagaagatcgacccactgctgtacatgactgagtggtttatgtgcgcttttagccgcactctgccctggtccagtgtcttaagagtttgggacatgttcttctgtgaaggagtcaaaatcatatttagggtgggcctggttctgttgaagcacgccctggggagcccggaaaaggttaaggcctgccagggccagtatgagactatcgaacgccttcgatctctgagcccgaagattatgcaggaagcctttctcgtccaggaagtggtggagctccctgtgacagagagacaaattgaacgagagcatctcattcagctgagacgatggcaggagacgcgtggagagcttcagtgtaggtcccccccgaggctccatggtgccaaggccatcctagatgctgagcccgggcctcgcccagctttgcaacctagtccttctattcggctccccctggacgccccgctccctggcagcaaagctaagcctaagccgcctaaacaggcacagaaggaacagagaaaacagatgaaaggcagaggccaactggagaagcctccggcacctaatcaggccatggttgtcgccgccgctggagacgcctgtcctcctcaacacgtgccgcccaaagactcagctcctaaggatagtgccccccaggacctggcacctcaagtgtctgcccaccacagatcccaggaatctttaacatctcaggaaagcgaagacacctatctgtag

SEQ ID NO: 136126 - DNA, 2187 bp, synthetic construct
  misc_feature 1..2187: note = Description of Artificial Sequence: Synthetic coding sequence
  source 1..2187: mol_type = other DNA
atgcctgcagggcctgtacaggcagtgccccccccaccccccgtaccgactgaacccaaacagcctacagaagaagaagctagctcgaaggaggactctgccccgagtaagccagtggtcggaatcatatatcctccccccgaagtgcgtaacattgtcgataaaaccgctagcttcgtcgcccgcaatgggcctgagtttgaggcccgcatcagacagaatgagatcaataacccgaaatttaacttcctaaaccctaacgacccataccatgcttactaccgacacaaggtctcagagtttaaggaaggcaaggcgcagtttgtcgcacgcaatggccggcaatttcttactcaactaatgcaaaaagagcagcgaaactaccaattcgacttcctgcgcccccagcacagtctgtttaactactttactaagctggtggagcagtacacaaagatactaataccacccaaggggctgttttccaagttaaagaaggaagccgagaacccacgcgaagtgctggaccaggtgtgttaccgagtggaatgggctaagttccaggaacgggagaggaaaaaggaggaggaagagaaagaaaaggaaagagtggcctacgcccagatcgactggcacgatttcgtggtagttgagaccgttgatttccaaccaaacgagcaggggaatttcccgcctcccaccacgccagaagagctgggagcacgcattctaattcaggagagatacgagaagtttggggagtccgaggaagttgagatggaggtggaaagtgacgaggaagatgataaacaggagaaagccgaagaacctccttcccagctcgatcaagatacgcaagtccaggacatggacgaaggctctgatgacgaagaagagggccagaaagtacctccacccccagaaacaccaatgccgccaccactaccccctacaccagatcaggtaatcgtaagaaaggactacgacccaaaggccagtaaaccactcccacctgcccccgcgcctgatgagtacctcgtcagcccaattaccggcgaaaaaataccagcatcaaaaatgcaagaacatatgcgtataggccttctggacccacgatggctggagcagcgcgacagaagtatcagagagaaacagtccgatgatgaggtctatgctccgggcctggacatcgagtctagtcttaagcagttagcagagaggagaacagacattttcggtgtcgaagagaccgccatcggcaagaagatcggcgaggaggagatccagaaacccgaagagaaagtgacatgggatggtcactccggctccatggcccggactcagcaggcagcacaagcaaatatcactctacaggaacagatagaggccatacacaaggccaaggggttagtacctgaggatgacactaaggagaagatcggtccgtccaaacccaacgagatcccccagcaacctccacctccatcaagcgcgacgaacatcccttcctctgctccacccatcaccagtgtgccacgccctcccaccatgccccctccagtccgcaccacagtggtctctgctgtcccagtgatgcccaggccccccatggccagtgttgtgcgattgccacctgggtctgtgattgctcccatgccaccaatcatccacgcgccgcgaatcaacgtcgttccaatgccccctagcgcacctccaataatggctcctcggcctccacccatgattgtgccaacagcgttcgttccagcacccccagtggccccggtgcccgctccagctcctatgcccccggtgcatcctcccccgcccatggaggatgagcccacctcaaaaaagctcaaaaccgaggactccttgatgccagaggaggagtttctcagacgcaacaagggtcctgtcagcatcaaagtgcaagttcccaacatgcaagacaaaacagaatggaagctgaatggacaggtgttggtgtttaccctccccctcaccgatcaggtgtctgtcatcaaagtaaaaatccacgaggcaacaggcatgcctgccggtaaacagaaattgcagtacgaagggatcttcatcaaagacagcaatagcctggcctattataacatggctaacggagcagtgattcatttagcacttaaggaaagaggtgggcgaaaaaagtag

SEQ ID NO: 136127 - DNA, 2073 bp, synthetic construct
  misc_feature 1..2073: note = Description of Artificial Sequence: Synthetic coding sequence
  source 1..2073: mol_type = other DNA
atgacactcacgatgccgaccacagcaatccccaaggtcatgcaacagcaacagcagacaacccaacagcagctgccccagaaagtgcaggcacaggtaattcaggagaccatagtgcccaaagaaccacccccggagtttgaattcattgctgaccctccgtccatttccgcattcgaccttgatgtggtaaagctgactgcccagtttgtcgcccgcaatggacggcaattccttacccagctgatgcagaaggagcagcgaaattaccaattcgatttccttaggccccagcacagtctcttcaactactttactaaattagtcgagcaatataccaagatactcattcccccgaaaggactattcagtaaacttaaaaaggaggctgaaaacccacgagaggtcctcgaccaggtctgttacagggtggagtgggcgaagtttcaggagcgggagcgaaaaaaagaggaggaagaaaaggagaaggaacgtgtcgcctatgcacagatcgactggcatgactttgtcgttgtggagacagttgactttcaacctaacgagcaggggaacttcccacctcccactaccccggaggagctgggcgcccgcatactgatacaggagcgctacgagaagttcggagaatccgaagaagtggagatggaggtagaatctgatgaagaggatgataagcaggaaaaggctgaagagccaccatcccagttggatcaggacacccaggtccaggatatggacgaaggtagcgatgacgaggaggaggggcagaaggtgccaccaccacctgagacccctatgccgccccctttgccccccacaccagaccaggtgatcgttagaaaggactatgatcccaaggcctccaaaccactcccccctgcacctgcccccgatgaatatctggtctcgccgataacaggcgaaaagatacccgcgtctaaaatgcaagagcatatgagaatcggcctgctggaccccaggtggctcgaacagcgtgaccggagcatcagggaaaaacagtcggatgatgaagtatacgcgccgggcctcgatatcgagtccagcctgaagcagctcgccgaaagaaggacggatatttttggtgttgaggagacggccattggaaagaaaattggcgaggaggagatccagaaaccagaagagaaggtaacctgggacggccacagcgggtccatggccaggacccaacaggccgctcaagctaacattactttacaagagcaaattgaagccatccacaaggctaaaggcttggtacctgaagacgatacaaaggaaaaaatcggaccctctaagccaaacgagattccacagcagcctcccccgcctagtagcgctactaacattcccagttcagctcctccaatcacaagcgttcctcggccccctacgatgccgcccccagtgcgaaccacagtggtttctgctgtgccggttatgccacgcccgccaatggcctccgtcgttaggctgccccctggttccgtaatagccccaatgccaccgattattcacgcaccgaggatcaatgtggtgcccatgcccccatctgccccaccgattatggcccccaggccccccccgatgatcgtgcccaccgcttttgtgcccgctccgcctgtcgcccctgtgcctgccccggctcccatgcctcccgtacaccctccacccccaatggaggatgaaccaacatctaaaaagctaaaaacagaagatagcctgatgccggaggaggaattcttgagacggaataaagggcctgtttccatcaaagttcaagtgcctaacatgcaagacaagactgaatggaagctgaatggtcaggtcctggtgttcacgcttcctctgactgatcaggtctctgtgattaaggtgaaaatccatgaggccaccggcatgcctgcaggcaagcagaaactgcagtatgagggaatattcattaaggatagtaattcgcttgcttattacaatatggccaatggcgccgttattcacctagcactgaaggaacgcggaggacggaagaagtag

SEQ ID NO: 136128 - DNA, 900 bp, synthetic construct
  misc_feature 1..900: note = Description of Artificial Sequence: Synthetic coding sequence
  source 1..900: mol_type = other DNA
atggacctgtctgagttggagcgggataatacggggcgctgccgactgtcctcacctgtgccggcggtgtgccgcaaagagccctgcgtgttgggtgtcgacgaggctggtcgtggccccgttctcggacctatggtgtatgccatttgttactgccctctacccaggctggcagatttagaggcactgaaagtcgctgatagtaaaacattgctggaaagcgagagagagcggctgttcgctaagatggaagacaccgacttcgtggggtgggccctcgatgtgctttccccaaatctcatcagcacctctatgctgggcagggtgaaatacaatcttaacagcctgagtcacgatactgccaccggtctcatccagtatgcccttgatcagggagtgaatgtaactcaagttttcgtggacacagtgggcatgcccgaaacgtatcaggcccgactgcagcaatcttttcctggcatcgaggtgaccgtgaaggcaaaggcagatgccctgtatcccgtggtaagcgccgcaagtatttgcgccaaggttgcccgggaccaggccgtgaaaaaatggcagttcgtggaaaagctccaggatctcgataccgattatgggtcaggctatccaaacgatccgaaaaccaaagcctggctaaaggagcacgtggagcccgtctttggatttcctcagttcgttcggttctcctggcgaactgctcagactattctcgagaaggaggctgaagatgtgatttgggaagattctgcgtctgagaaccaggaaggactgcggaaaattaccagctacttcctgaatgagggttcacaggctaggccaaggagtagtcacaggtactttctggaacgtggtttggaaagcgcaaccagcctttag

SEQ ID NO: 136129 - DNA, 3915 bp, synthetic construct
  misc_feature 1..3915: note = Description of Artificial Sequence: Synthetic coding sequence
  source 1..3915: mol_type = other DNA
atggccaagattgcgaagacacacgaagatattgaggctcagattcgggagattcagggaaagaaggccgccctcgacgaggcacagggcgtgggcctggactcaaccgggtattatgaccaggagatctacggcggcagtgactccagatttgccgggtacgtcacctcgatcgctgccacagaactcgaggacgatgacgatgattactcaagctctacatcactgttgggtcagaaaaagcccggctatcacgccccagttgctctgctcaatgacattccccagtctaccgagcaatacgacccattcgccgagcatagacctccgaagattgccgatcgcgaagacgagtataagaagcatcggcggactatgatcatcagccccgagcgactggatccctttgcagacggtggcaagacccccgatcctaaaatgaacgctcggacttatatggacgtaatgcgagaacaacacttaaccaaagaagaacgggaaatcaggcagcagttggccgagaaagccaaagcaggtgagctgaaggtggtcaacggtgccgctgcaagtcagccaccctccaagaggaagagacgatgggatcagaccgccgaccaaacacccggggcaactccaaaaaagttgtcttcatgggaccaagcggaaactcctggacacacaccatcactgcgatgggacgagactcctggcagggccaaagggagtgagacaccaggcgctactccaggatccaaaatctgggaccctaccccctcccatacacctgcgggggctgccacgcctggccgcggggacaccccaggacatgccacacccggccatggtggggcgacctcatctgctagaaagaatcgatgggacgagacgcctaaaacagagcgagacacgccgggacacggtagcggctgggctgagacacccaggacggacaggggaggtgattcgatcggtgaaacccctacacctggtgcatctaaacggaaatctcgttgggatgagacaccagcatcacagatgggggggtctacgccggtcctgacacccgggaagaccccaatcgggacccctgctatgaatatggcaacccctacccccggtcacattatgagcatgactccagaacagttgcaagcatggcgctgggagagagagatagatgaacgcaacaggcccctttccgacgaagagcttgacgctatgtttccagaaggttacaaagtcttacccccacctgctgggtacgtccctattcgcacacctgccagaaagttgacggccacccctacccctctggggggcatgactggattccatatgcaaacagaggaccggaccatgaagtccgtcaatgaccagcccagcggaaatctgccgtttcttaaaccagatgacattcagtacttcgacaaactactcgttgacgtggacgagtctacattgagcccagaagagcagaaagagaggaagatcatgaagttgcttctgaaaatcaaaaatgggacccctcccatgagaaaagccgctctcagacaaatcaccgacaaagccagagagttcggggccgggccgctgttcaaccagattctccctctgctgatgagccctacgttagaagaccaggagcggcatctgttggtgaaagtaatcgaccgaattctgtataaattagacgacctggtgagaccctatgtacacaagatactggtcgtcatcgagcctctcctgattgacgaagattactatgcgagggttgaaggacgggagataatcagcaatctggccaaggctgctggtctagccactatgatatccacaatgcggccagacatcgacaacatggacgagtacgttcgcaacaccaccgcccgagcttttgccgtggtggcaagtgccctgggtatcccctcgcttctgcccttcctcaaggccgtgtgtaaaagcaaaaagagctggcaggctcgacacaccgggattaaaattgtgcagcaaattgccatactgatgggctgcgctatcctcccccatctgaggtcactcgtggagatcatcgagcacggactggtcgacgagcagcagaaggtgcgcacgatctccgccctcgccattgcagcactggccgaggccgccactccatatggtatcgagagttttgacagcgtgctgaaacccctctggaagggcatacggcagcatagaggtaaaggtttagccgcctttctgaaagcaattggctaccttatcccactgatggacgcagagtacgccaactattatacccgggaggtcatgttgatcctaatcagggagttccaaagccctgacgaagagatgaaaaaaatcgtgctcaaggttgttaaacagtgttgcgggaccgacggtgtggaagctaattatataaagaccgaaattctgccgccattctttaagcacttctggcaacatagaatggccctggaccgtagaaactaccggcagctggtcgataccactgtagaacttgctaacaaggtaggcgccgcagagatcatctctcggatcgtggatgacctgaaggacgaggccgaacagtaccgaaaaatggttatggaaacgatagagaaaattatgggcaacctgggagcagccgacattgaccacaagcttgaggaacagctgattgatgggattctctatgctttccaggagcagaccaccgaagacagcgttatgctgaatggattcggaactgtcgtgaatgccctcggcaagagagtcaagccgtaccttccccagatatgcggcactgtgctttggaggttaaataataagagtgcaaaagtcagacagcaggccgcagacctcataagtcggaccgccgttgtgatgaaaacttgtcaagaggaaaagctgatggggcacctcggggtagtattgtacgaatacttgggcgaggagtaccccgaagtcctgggctccattctcggtgcgttgaaggctatcgttaatgtcatcggtatgcacaaaatgactcctccaatcaaggacctcctgcctaggctgacacccatactgaaaaaccggcacgagaaggtgcaggagaactgcattgacctcgtcggaagaatcgccgaccgcggggcagagtatgtaagtgcacgcgagtggatgcgcatctgctttgagctgctggaactgttaaaagctcataaaaaggcgatacggcgcgcaactgtcaatactttcgggtatatagcaaaagccatcggcccccacgatgtgctggcgacactccttaacaacttaaaggtacaggaacgacagaatcgagtctgcaccaccgtagccattgctatcgtggcggaaacttgctcccctttcacagtccttcctgcactcatgaatgaatatcgggtgccggaattgaacgtgcaaaacggggtgctcaaatctttgagttttctgtttgagtacataggagagatggggaaggattatatctatgcagtaacccctctgcttgaggacgccctaatggatcgggatctggttcatagacaaactgcctctgctgtggtgcagcacatgtcgctgggggtctacggtttcggctgtgaggactctctgaaccacctccttaattatgtctggcccaatgtttttgagactagtcctcacgtgatacaggcggttatgggagccctggaaggcctgagggtagccataggaccttgcagaatgctccagtactgtctccagggcctattccacccggcaaggaaggtaagagacgtttattggaagatctataactctatttacatcggctctcaggatgctcttatagctcactacccgcggatatacaacgatgacaaaaacacatatatccggtatgagctcgactacatactgtag

SEQ ID NO: 136130 - DNA, 435 bp, synthetic construct
  misc_feature 1..435: note = Description of Artificial Sequence: Synthetic coding sequence
  source 1..435: mol_type = other DNA
atggctaagatcgcgaagacgcatgaagatatagaagcccaaattcgagaaatccagggtaaaaaagcagcactggatgaagcccagggtgtagggctggactcaaccggttactatgaccaggagatatatgggggaagtgactcgcggtttgccgggtacgtgacgtcgatcgcagccactgagcttgaggacgatgacgatgactattcttcatctacttctctcctggggcagaagaagcccggatatcatgctcccgtagctctactgaatgatattccacagagtactgagcagtacgacccattcgccgaacataggccccctaagatagcagatagagaagatgaatacaaaaaacataggcgcacaatgataatatcaccggagcggcttgatcccttcgctgacggcttttacagcgcagcatag

SEQ ID NO: 136131 - DNA, 435 bp, synthetic construct
  misc_feature 1..435: note = Description of Artificial Sequence: Synthetic coding sequence
  source 1..435: mol_type = other DNA
atggcaaaaatcgccaagactcatgaggacatcgaggctcagattcgagaaattcagggcaagaaagccgccctggatgaggcccaaggtgtcggcctggacagcacaggatactatgaccaggaaatatacggagggtcagattctcgctttgccggttacgtaaccagtatagccgcaacagagctcgaagatgacgatgacgattatagcagttccacatcgctgctggggcaaaaaaagccagggtaccatgcccccgtcgcccttctgaatgatataccacaatctacagagcagtatgatccatttgcagaacatcggccaccaaaaattgcagaccgggaggatgagtataaaaaacacaggcgcactatgatcatttcccccgaaaggctggacccattcgccgatggcttttatagcgctgcctag

SEQ ID NO: 136132 - DNA, 2688 bp, synthetic construct
  misc_feature 1..2688: note = Description of Artificial Sequence: Synthetic coding sequence
  source 1..2688: mol_type = other DNA
atggctacggaacaccctgagcctcctaaggctgaacttcagctgccacctccacctccccccggtcattacggcgcatgggcagcccaagagctgcaagcaaagcttgcagagatcggggctcctatccaaggcaatagggaggaacttgtggagcggctccaaagttatacccggcagaccggcatcgtgctcaaccggcccgtcctcagaggggaggacggcgacaaagcagcacctcccccgatgagcgcccagctacccggcatcccaatgcctcctcccccgcttgggctgccacccctacagcctccccctcctccacccccaccccctcccgggcttggtcttggatttcctatggctcatcctcccaacctggggcccccaccccctttacgggttggagagcctgtcgcactgtccgaggaagagaggctaaaattggctcagcagcaagccgcgctgctgatgcagcaggaggagcgtgctaaacaacagggcgatcacagtctgaaggaacatgaacttctggaacagcaaaagcgggcagctgtactgctggagcaggagcgacagcaggaaatagccaaaatgggaacccctgtgcctcggcctcctcaagatatgggccagattggggtgcggacacctctcggtcctagggtggccgcacctgtgggtccagttggccctacgccaacggtgctgcctatgggcgcacccgtgcccaggcccagggggcctccccccccccccggggatgaaaatcgcgaaatggacgaccctagtgttgggcctaagattcctcaggctctcgagaagatccttcagctgaaagagtcccggcaggaggagatgaatagtcagcaggaggaggaggaaatggagacagacgcacgctcttccctggggcagagcgcatctgaaacagaggaagacacggtgtcagtgtcaaaaaaggagaagaacaggaagaggcggaacaggaagaaaaaaaagaaaccccagagggtaaggggggtaagcagcgaatcttccggggaccgcgagaaagactccacgcgcagcagaggtagtgactctcccgcggctgacgtcgaaattgagtacgtaacagaagagcccgagatttacgaaccgaatttcatcttcttcaagcgcatcttcgaggcctttaaactgactgatgatgtgaagaaagaaaaggagaaggagccagagaagctggacaaattagagaatagcgcagccccaaaaaagaaaggatttgaggaggaacataaggatagcgacgacgactcctcggacgacgaacaggaaaagaagccggaagcccctaaattgtccaaaaagaagctccgtcgcatgaacaggtttacagtggccgaacttaagcagctggtggctcggcctgatgtcgtggaaatgcacgatgtgacagcacaggatcctaagctactggtgcatctgaaggcaacaaggaatagcgtgcccgtgcccagacactggtgttttaagcggaagtatctgcagggcaaacgggggattgaaaaaccgcccttcgaactgccggattttatcaagcgtacaggaatccaggagatgagggaagcacttcaagaaaaagaggagcagaaaactatgaagtcgaagatgcgcgagaaggtgcggcctaaaatggggaaaatcgacattgattaccaaaaattgcacgatgcgttctttaagtggcaaacgaagcctaagctgacaattcacggcgatctttattatgagggcaaggagttcgaaacccggctcaaggagaaaaaacccggcgacctgagcgatgaattacgtatctcactaggcatgccagtgggccctaatgctcacaaagtacccccaccctggctcatcgcgatgcagcgttacggacctcctcccagctatccaaatctgaaaatacctgggttgaatagccccatcccagagagttgttcctttggatatcatgccggaggctggggcaaacctccagtggatgaaactggaaagcccctgtatggcgacgtgtttggaacaaacgccgcggagttccaaacaaagaccgaggaggaggaaattgatcgcaccccatggggggaattggaaccgagcgatgaagagtctagcgaggaagaggaggaagaagaatccgatgaagacaagcccgatgaaacaggatttatcacaccagcggactctggcctgataacacctggggggtttagctctgtgcccgcaggcatggagacaccagagctcatcgagctccggaaaaagaagattgaggaggccatggacggcagcgagactccccaactgttcaccgttcttccagaaaaacgtacggccacagtggggggtgccatgatgggatcaacacacatctatgatatgagcacagtgatgagccgcaagggccccgcgccagagctccagggagtcgaggtggcactcgctcccgaagagctggagttagacccaatggctatgacccagaagtatgaagagcacgtgagagaacagcaggctcaggtcgaaaaagaagattttagcgatatggtcgctgagcacgcagccaaacagaaacagaaaaagcgtaaagcacagcctcaggactcgcgtggcggcagcaagaagtacaaggagtttaagttttag

SEQ ID NO: 136133 - DNA, 2400 bp, synthetic construct
  misc_feature 1..2400: note = Description of Artificial Sequence: Synthetic coding sequence
  source 1..2400: mol_type = other DNA
gccaagatggccacagaacaccctgagccacccaaagcagaactccaactccctcccccccctccacccggccactacggcgcatgggccgcacaggagttgcaggccaaactggctgagataggagcccccattcagggcaacagagaggaactcgtggagcgactgcagtcatacacacgtcagaccggcatagttctgaataggcccgtcctaaggggcgaagacggcgacaaggccgccccacctcccatgtccgctcagctgccaggcatccccatgcctccaccccctttgggactgcccccgctgcagcccccaccacccccccctccgccaccgcctggcctagggcttggcttcccaatggcacaccctcccaatctggggcctccgcctccccttcgcgtaggtgaaccagtcgcactttccgaagaggagagactcaagctggcacaacagcaggccgcactcctgatgcaacaggaagagagagcgaagcaaggagatcactccctaaaagagcacgagctacttgaacagcagaagcgggcggccgtgctgcttgagcaggaacggcagcaagaagaagaagagatggagacagatgcacgcagtagcttaggccagagcgcctccgaaaccgaggaggataccgtgagtgtttctaaaaaggagaaaaatcgaaagcgcagaaataggaaaaaaaaaaaaaagcctcagcgcgtcaggggggtctcgagcgagagctccggcgacagggaaaaagactccacgcgcagtcgcggttctgattcccccgctgctgatgtcgagatcgaatacgtcaccgaggagcccgagatctacgaacctaactttatcttcttcaagcgtatttttgaggcctttaagttaaccgatgacgtcaagaaggaaaaggagaaggagccggaaaagttggataagcttgagaattcagccgccccaaagaaaaaagggtttgaggaggaacacaaggacagtgacgacgacagttcagacgatgagcaggaaaagaagcctgaagctcctaaattaagcaagaaaaagctgagaagaatgaataggtttacggtggccgaactgaaacagcttgttgctcgcccagacgtggtcgagatgcacgatgtgacagcccaggatcctaaacttctggtgcacctaaaagctacccggaattcagtcccggtgccgcggcactggtgcttcaaaagaaaataccttcagggcaagcgcggaatcgaaaagcccccgttcgagctccccgactttatcaaaaggacaggtatccaggagatgagggaggcccttcaggaaaaggaggagcagaaaactatgaagagtaaaatgagagagaaggttcgtcccaaaatggggaagatcgatattgactaccagaagcttcatgacgcattcttcaagtggcaaaccaaaccaaagctgaccattcatggggatttgtactacgaggggaaggaatttgagaccaggctcaaggaaaagaagcctggcgatctgtcggatgaactccggatttcactcgggatgccagtagggccaaatgcgcacaaggtgcctccaccctggctgattgcaatgcagcgttacggcccaccaccatcctacccaaacctgaagatacccgggctcaatagtcctatcccagagtcctgctcgtttggataccacgccggtgggtggggcaagcctcccgtggacgagactggaaaacccctctacggcgatgtgtttgggacaaacgcagccgagttccaaaccaaaaccgaggaagaggagattgatcgtactccatggggagagctggaaccatccgacgaggagagtagcgaggaggaagaggaagaggaatctgatgaagataagccggatgaaactggatttattactccagctgattccgggctgattaccccgggggggttttcgagtgtgcccgctggcatggaaacgcccgagctgatagaactgcgtaaaaagaaaatagaggaggcaatggacggtagcgaaacaccccagctgttcactgtgctgcccgagaaacggacagccacagtcgggggagccatgatgggctccacccacatctatgacatgagcactgtgatgagccgcaaaggacctgctcctgaactccagggcgtggaggtagcactcgcccccgaggagctggaactcgaccccatggctatgacccagaagtatgaggagcacgtgcgagagcagcaggcccaagtagaaaaagaagatttctctgatatggtggccgagcacgcggcaaagcaaaagcagaaaaagcgaaaggctcagccccaggactcaagaggtggatccaagaaatataaagagttcaaattctag

SEQ ID NO: 136134 - DNA, 3654 bp, synthetic construct
  misc_feature 1..3654: note = Description of Artificial Sequence: Synthetic coding sequence
  source 1..3654: mol_type = other DNA
atgtttttgtacaacctcacccttcagcgagctactggaattagcttcgctatccatggaaattttagcggaaccaaacagcaggaaattgttgtttctcggggcaaaattctggagctgctgaggcctgatccaaacacagggaaggtccacacgttactgaccgtagaagtgtttggggtcatccgatcgctgatggcgtttagactgacaggcggcacaaaagactatatcgtcgtgggatccgacagtggacgcatcgtgatactcgaataccagccctcaaaaaatatgtttgagaaaatccatcaagagacttttgggaaatcagggtgcaggagaatagtgcccgggcagtttctagctgtggatcctaaggggcgggcagtgatgatctccgcaatagagaagcagaaactggtgtacattttaaatcgggatgccgccgcacgcttgacaatatcgtcgccattggaggcacataaggccaacacgctggtgtaccacgtcgtcggcgttgatgtaggcttcgagaatcctatgtttgcttgtttagagatggattatgaggaagccgataacgatcccacgggagaggccgccgccaatacacagcaaacgctgactttctacgagctggatctgggactaaatcatgtcgttcgcaagtattcagagcctcttgaggagcacgggaactttttgatcacagttcccggcgggtcagatggtccctcaggtgtcctaatttgttctgaaaattacattacctacaagaatttcggcgatcaaccagatatccgctgtccgattcctcgcagaagaaacgatctggacgatcctgagagggggatgattttcgtctgctccgctacgcataaaacaaagtcaatgttttttttcctggctcaaactgagcagggggacattttcaaaatcacccttgagactgatgaggatatggtgaccgaaatacgcctgaagtactttgataccgttcctgtggcagccgctatgtgcgtcctgaagaccggatttctgttcgttgcctccgagtttggtaatcactatctctatcagatcgcccatctgggtgatgatgacgaagagccagaattctcgtcagcaatgcctctggaggagggagatacctttttttttcagccccggccacttaaaaatctcgtgctggtggatgaactggattcactttcccccattctgttttgccaaatagccgacctggcaaatgaagataccccgcaattatatgtcgcctgtggtcgtggaccccgcagctctctccgagtcctgcgccacggtctggaagttagcgaaatggcagtctctgagctcccaggaaatccgaatgcagtgtggactgtgagacggcacatagaagatgagtttgatgcttacatcatcgtttcctttgtcaatgccactcttgtgctttccattggcgaaactgtagaagaagtcaccgactcaggcttccttggcaccacccctaccctgtcatgcagcctactaggcgatgatgcgctggttcaggtctacccagacggaattcgacacattagagctgacaagcgggtgaatgaatggaaaacacctggtaaaaagacaattgttaaatgcgccgtcaatcagagacaagtggttatcgccctgaccggtggggagctcgtgtacttcgagatggaccctagcggacagttgaatgagtacactgaacgaaaagaaatgagcgccgatgttgtctgtatgtcactggccaatgtgccacctggtgagcagcgtagcagatttttggctgtggggctggtcgacaatactgttcgaatcatttccctggacccttcggattgcctgcaaccactgtctatgcaggccctgccagctcaaccagaaagtctgtgcatcgttgaaatgggaggtaccgaaaagcaggatgaactgggagaacgggggtccatcggatttttgtatttgaatattggattacagaatggggttcttcttagaactgtgctggaccctgtcaccggtgacctgtctgatacgcggactcgttatctgggctcccgcccagtgaagctctttcgggtgagaatgcagggccaagaggccgtgctggcaatgagcagcagatcctggctgagctactcatatcagtcccgtttccatttgacacctttatcttacgaaaccctggagttcgcctctgggttcgcgtctgagcagtgccccgagggaattgtggctatctccactaatacactccgtatcctagccttagagaagctcggcgctgtgtttaaccaggtcgcgtttcctctgcagtacaccccgaggaaattcgttattcaccctgagtcgaacaatctcatcatcatcgagaccgatcataatgcatataccgaggccacaaaagcgcagcgcaagcagcagatggcagaagagatggtagaggctgcaggggaggacgagcgagagctggctgctgaaatggccgcagcttttctgaatgagaacctgcctgaaagcatttttggggctcctaaagcaggcaacggacaatgggcgtctgtaattagggttatgaatccgattcaaggtaacacgctggacctcgtgcagctggaacaaaacgaagccgcgttttccgttgccgtgtgcagattctcaaacacaggcgaggattggtatgtattagtaggtgtggcaaaggatcttatcctcaaccctcgctccgttgcaggcgggtttgtctacacatacaaactggtaaacaatggtgaaaagctggagttccttcataaaacacctgtggaggaagtgcccgcagcaattgctcctttccagggtcgcgtcctgatcggcgtgggaaagctgctccgtgtctacgacttgggcaaaaagaagctgctgcgcaaatgcgagaataaacacatcgcaaattatatctctggcattcagacgatcggacacagagtcattgtgtctgacgttcaggagagtttcatttgggttcgttataaacgaaatgaaaaccaactcattatctttgccgatgatacttacccaaggtgggttactacggcaagtctgctggactatgatactgtcgcaggcgcagataagtttggtaatatctgtgtcgttcgcctgcctcccaacactaatgacgaggtggatgaagacccgactggcaataaggctctgtgggacagaggcctcctcaatggggccagccagaaagcagaagttattatgaactatcatgttggggagactgtactctccttacaaaagacgacccttatcccagggggaagcgagtcattggtgtatacaaccctctctggtggaattggaattctggttcccttcacaagtcatgaagatcacgacttcttccagcatgttgaaatgcatctccgctccgagcatccgccgttgtgcgggagggaccatcttagcttccggtcttattactttcctgttaagaatgtcatcgatggcgacctgtgcgaacagttcaactctatggaaccaaataagcagaagaacgtgtctgaagagcttgacaggacgccaccggaagtgagcaagaagcttgaagatattcgcacccgatacgccttctag

SEQ ID NO: 136135 - DNA, 828 bp, synthetic construct
  misc_feature 1..828: note = Description of Artificial Sequence: Synthetic coding sequence
  source 1..828: mol_type = other DNA
atgttcctttacaatctgacattacagagagcaaccggcatttcatttgctatccacgggaatttctctgggaccaagcaacaggagatcgtagtgtcgcgggggaaaatactcgagcttctgcggccagatcctaacacgggcaaggttcacacactgctcaccgtggaggtttttggggtcatccggtcccttatggcctttaggctgaccggaggtaccaaggactatattgttgtgggtagcgactccggtaggatagtaattctcgaatatcagcctagtaagaatatgtttgaaaagatccaccaggaaacgtttgggaagtcaggctgtcggagaattgttcccggtcagttcctcgcggtggacccgaaaggtcgcgcggtcatgatctctgcgatagaaaaacagaaattggtttatattcttaatagagacgccgcggctagactaacaattagctctcctcttgaggcgcataaagccaacactctcgtgtaccacgtggtaggagtggatgttgggttcgagaatccaatgtttgcatgcctcgaaatggattacgaagaggcagacaacgaccccactggcgaggccgccgcaaatacgcagcagactctcactttttatgaattagacctggggctgaatcacgtggttagaaaatactctgaacctttggaggagcatggaaatttcctaatcaccgtgccagggggttcagacggaccttcaggggtcctgaacctatccccgcccttccccaaagcaataccggcacttatctgcttggacagccctgtgtacttttgtacacatccatag

SEQ ID NO: 136136 - DNA, 1275 bp, synthetic construct
  misc_feature 1..1275: note = Description of Artificial Sequence: Synthetic coding sequence
  source 1..1275: mol_type = other DNA
atggctgctggacccataagtgaaagaaaccaagacgctaccgtctatgtgggtggccttgacgagaaagtgagtgagccgctactctgggagctgttcctacaagccggtccagtggtcaacacccatatgcccaaagaccgtgtcacaggccagcatcagggatatggttttgtggagtttctgtccgaggaggacgctgattatgcaatcaaaattatgaacatgatcaaattatatggaaagcccatacgcgtgaacaaggcaagcgctcacaacaagaacttagatgtgggcgcaaacatctttattggtaacctggacccagagatagatgagaagctgctttacgataccttctctgccttcggcgtgatactccagacgcccaagataatgagagacccagataccgggaatagtaaaggatatgcattcattaacttcgcatctttcgatgcctcggacgccgcgatagaggctatgaacggacaatatttatgtaaccgtccaattactgtttcttatgcctttaagaaggatagcaagggagagcgtcatggctccgccgcggagcgcctgcttgctgcgcagaaccctctcagtcaggcagataggccccatcagctcttcgccgatgccccacctcctccctctgcaccaaatcctgttgtatcttcattgggctccggtctcccacccccggggatgccacctcccggctcctttccgcccccggtgcctcctcctggggctcttccccccgggatacctcccgccatgcctcccccaccgatgccaccgggggcagccgggcatggcccgccctcagcaggtacccctggcgccgggcacccaggccatggtcatagccatccacaccctttcccaccaggtggcatgccgcatccggggatgtctcagatgcaactcgcacaccacggccctcatggactcggtcaccctcatgccggacctccaggctctggtgggcagccacctccacggcctccacccggcatgcctcaccccggcccaccgccgatggggatgcctccacgggggccacctttcggcagtcctatggggcatccaggaccaatgccaccccacggtatgcggggcccaccacccctcatgcctcctcatggctacacaggcccacccaggccccccccatatggataccagcgaggcccactgcccccgcctagacccactcctcgccccccagtgcctcctcgtgggcccctgaggggccctctcccacagtag

SEQ ID NO: 136137 - DNA, 573 bp, synthetic construct
  misc_feature 1..573: note = Description of Artificial Sequence: Synthetic coding sequence
  source 1..573: mol_type = other DNA
atgcccaaagatagagttaccggtcagcatcaggggtacggttttgttgagtttctgtccgaggaggacgcagattacgccataaagatcatgaatatgatcaaactgtatgggaagccaattagagtcaataaagcgagcgctcacaacaaaaaccttgatgtaggggccaatatattcattggcaatttggatcctgagatcgacgaaaaattattgtatgatactttcagcgcatttggcgtcatcctgcaaactcctaaaatcatgcgggatccggataccggcaactctaaggggtacgctttcattaattttgcctcattcgacgcctccgacgcagcaatagaggctatgaatggccagtacctgtgtaaccgccccataaccgtaagttacgcctttaagaaggactccaagggcgaacggcacgggagtgccgccgagcgacttttggctgctcagaaccccttgtcacaggccgaccggccccatcagttatttgctgatgctcctccaccaccgagcgccccaaaccctgtggtgagttctttgggaagcgggttgccttag

SEQ ID NO: 136138 - DNA, 2124 bp, synthetic construct
  misc_feature 1..2124: note = Description of Artificial Sequence: Synthetic coding sequence
  source 1..2124: mol_type = other DNA
atgtcacgtgacaggttcaggtcacgcggcgggggtggaggcggcttccaccgaagaggcgggggcggcggaagaggtggacttcatgacttccggtccccgcccccaggcatggggctgaaccaaaaccggggcccgatggggcccggccctggccaatctggacctaagccacccatccccccgcccccccctcatcagcaacaacagcagcctcctccacaacagccaccaccacagcaaccgccaccccatcagcctcccccccatccacaaccgcaccagcaacaacagcctcccccgccaccccaggacagctctaagcccgtggtggcacaggggcccggccccgccccaggagtcggatcagcgcctccagcttcctcttccgctccccccgcaaccccacctacctctggagcacccccaggcagtggaccaggccccacaccaaccccacctcccgccgttacctctgccccacccggggcccccccacctactcccccctccagcggagttccaactacccccccccaggctggtgggccccccccacctcccgccgcagttcctggccccggccccggccctaagcaggggcccgggcctggcggcccaaaagggggtaaaatgccaggaggacccaagcccggaggcgggcctgggctgagcacccctggtgggcacccaaagccgccccaccgaggcggtggcgaacccagggggggacgacagcaccatcccccctatcaccagcagcatcatcagggccctcctcctggaggcccaggaggaagatctgaagaaaagatttccgactccgaaggattcaaagcaaacctcagtctgctgcgacggcccggcgagaagacatatacacagcgttgcagactattcgtcgggaacctgccggcagatatcaccgaggacgagtttaagcggctgttcgccaaatacggagagcccggagaggtcttcatcaataaaggaaagggattcggttttattaagctagagtcgagagctctcgccgagatcgcgaaggccgagctggatgatacacccatgcgcggccgccagttacgagtccgttttgccacgcacgccgctgctttgtccgtcagaaacctgtctccatacgtcagtaacgagcttttggaggaggctttctcccagtttgggcccattgagagagctgtggtgattgtggatgatcggggcagaagtacggggaaaggcatcgtcgaattcgcatccaaaccagccgcacgtaaggcttttgagcgctgctccgaaggagtcttcctgttgacaacaaccccccgccccgtgatcgtagagcccctggagcagctggatgacgaggatggactacctgagaagctcgcgcaaaaaaaccccatgtaccagaaggagcgggaaacaccccctcggttcgcccagcacgggacgtttgaatacgagtatagtcagcgctggaagtcactagatgaaatggaaaagcaacaacgggaacaagttgagaaaaacatgaaggatgccaaggacaagctggaaagtgaaatggaggacgcttatcatgaacaccaagctaacctgctgcggcaggatctcatgaggcggcaggaggagttaaggagaatggaagagttgcacaaccaagagatgcagaagcgcaaagaaatgcagttaagacaggaggaggaacgacgtcgcagagaagaagaaatgatgataagacagagggagatggaggagcaaatgcgtagacaacgtgaggagtcgtactcgcgcatgggttacatggatcccagagagagagacatgcggatggggggagggggcgccatgaatatgggggacccctatgggagcggcggccagaagtttccacccttgggaggcggtggcggcatcggatacgaggctaaccccggagtccctcccgctactatgtccgggtcaatgatggggtcagacatgcgaaccgaacgctttggacagggcggggccggccctgttggtgggcagggcccccgggggatgggccctggcactccagcagggtacggcagagggcgggaagaatatgaggggccgaataaaaaacccaggttttag

SEQ ID NO: 136139 - DNA, 1875 bp, synthetic construct
  misc_feature 1..1875: note = Description of Artificial Sequence: Synthetic coding sequence
  source 1..1875: mol_type = other DNA
atgaactctgggggggggtttggcctcggtttaggcttcggattgacaccaacttccgtcattcaagttactaacctctctagcgcagtgacatccgagcagatgaggaccctgttctcgtttctgggggagattgaggagttgcgtctgtaccctcccgataatgccccgctggcgttttcaagcaaggtgtgctacgtaaaatttcgagatccctcctccgtgggagtggcacagcacctgactaacactgtgtttatagatcgggccctgatagtcgtgccatgtgccgaaggcaagatcccggaggagagcaaagccctgagtctccttgccccggcccccacgatgacctcgctaatgccaggggccggcctcctgccaattccaacacctaatcccctcaccacactgggcgtgtctcttagtagcctgggggccatccctgcagcggccctggaccctaacattgctactctgggggaaatcccacagccaccactgatggggaacgttgacccttcaaagattgacgagattaggcgcaccgtttatgtgggaaatctgaatagccagaccaccactgccgatcagttgctggaattttttaagcaggtcggagaggtgaagttcgtgcggatggctggagatgaaacacagcctactagattcgccttcgttgaatttgctgatcagaactccgttcctagagccctggcttttaacggagtaatgtttggtgacaggcccctgaagatcaaccactcaaataacgcaatcgtgaagcccccagagatgacccctcaggccgcggctaaggagctcgaggaggtgatgaaacgtgtccgggaggcgcagtccttcatttccgcggcaatcgagcctgaatcagggaaatctaacgagcgcaaaggggggaggagccgatcacatacgcgatccaagagtcgttcttcgtctaaatcacatagtcgccggaagcggtctcagtccaagcaccggtcgagaagccacaacagatctcgaagccggcagaaggacagaagacgctccaagtcaccccacaagaagcgctccaagtctagagagcggagaaaaagcagatctagaagccacagccgcgacaaacgcaaggacacacgcgagaaaatcaaggaaaaagagagagtgaaggaaaaagacagagaaaaagagcgggagcgcgagaaggaaagagaaaaagaaaaggagaggggcaaaaataaggatagggacaaggagcgggagaaggaccgggagaaggacaaggaaaaggatcgcgagcgcgagagagaaaaagaacacgagaaggatcgtgacaaggagaaggaaaaggagcaagacaaggagaaggagcgggaaaaagaccgaagcaaagaaattgatgaaaaacgaaagaaggataagaagtctcggactccacccagatcctacaatgccagccgccggtcacggtcctcaagccgcgagagacgccgaagacgaagcaggagctccagcagaagtccacggacatccaagacaatcaaacgcaagtcttctagatctccgagccctaggtctaggaacaagaaagataaaaaacgcgaaaaggagcgcgatcacatttccgaacgccgagagcgcgaacgaagcactagtatgcggaagtcttcaaatgaccgcgacggtaaagaaaaacttgagaaaaattctaccagtctgaaagaaaaggaacataacaaagaacctgacagtagtgtgtccaaggaggtagacgataaggacgccccccgcactgaggaaaacaaaatacagcacaatggcaattgtcagctgaatgaggagaatctgtctacgaagaccgaagccgtttag

SEQ ID NO: 136140 - DNA, 1527 bp, synthetic construct
  misc_feature 1..1527: note = Description of Artificial Sequence: Synthetic coding sequence
  source 1..1527: mol_type = other DNA
atgacaagtctaatgcccggcgccggactactgccaattccaaccccaaacccattgaccaccttgggtgtatccttgagcagcttaggtgctatcccagctgcagctcttgatcctaatatcgccacacttggggagatccctcagcctcctctcatgggtaacgtggatccctccaaaatcgacgagattcgcaggactgtctacgttggtaacttgaacagccagaccaccaccgccgatcagcttctcgagttcttcaagcaggtgggagaggtgaagtttgtccggatggctggtgacgagacacagcctacacgttttgcttttgttgaatttgcggatcaaaactcagttcctagagccctggcgtttaacggggtgatgtttggggatcggcccctgaaaataaatcactccaataacgcgattgtcaaaccccccgaaatgactccccaagcagccgcaaaagagttagaagaggttatgaagagagtcagagaggcacagtcctttattagtgctgccatagagccagagtcggggaagtccaatgagcgtaagggagggcgctcacgatcccatacgcgtagcaaatctagatcctcctcaaaatctcactcaagacggaaaaggagccagtctaagcaccgcagtagaagccataaccgcagccgatcaagacagaaagaccgtcgcaggagcaaaagtccccataagaagcgttccaagagtagggagaggcggaagtcgaggagccggtcacatagtcgggacaagcgcaaggatacacgcgagaagattaaagaaaaagagcgcgtgaaagaaaaggatagagagaaggaacgggagagggagaaggagcgagagaaagagaaagagagaggaaaaaacaaagatcgtgacaaggaacgagaaaaggatcgcgaaaaggataaagaaaaagacagagaaagagagcgggaaaaggaacatgaaaaagatagggataaagaaaaggagaaagagcaagacaaggaaaaagagcgggaaaaggacagaagcaaggagattgatgagaaaagaaagaaggacaaaaaatctagaaccccaccacgatcctataacgcatccagacgcagccgctcatcatcccgggaacgaaggcgtaggagatcccggtcctcctctagatctccgaggaccagcaagactattaagcggaaaagctccagatccccttcccccaggagccgcaacaagaaagataaaaaaagagaaaaggaacgtgatcatattagtgagcgacgggagcgagagcgtagcacctctatgcggaaatcctccaatgatagagatgggaaggaaaagctagagaaaaacagtacctcccttaaagagaaggaacataacaaggagcctgatagttccgtcagtaaagaggtcgatgacaaggacgcaccacggacggaggaaaataaaatccagcacaacggtaactgccagttgaatgaagagaacctcagcactaagactgaagcggtgtag

SEQ ID NO: 136141 - DNA, 231 bp, synthetic construct
  misc_feature 1..231: note = Description of Artificial Sequence: Synthetic coding sequence
  source 1..231: mol_type = other DNA
atgacttcactgatgccaggggcaggcctcttgcctatcccaacacctaatccactcacgacgctgggtgtgtccctatcgagtttaggagctatccccgccgcagccctggatcctaacattgccactctgggcgagataccccagcccccacttatggggaacgttgacccctccaagattgatgagattagaagaaccgtgtacgttgggaacttaaactctcagtag

SEQ ID NO: 136142 - DNA, 1545 bp, synthetic construct
  misc_feature 1..1545: note = Description of Artificial Sequence: Synthetic coding sequence
  source 1..1545: mol_type = other DNA
atgaactctggcggcggcttcgggttaggattgggtttcgggctgacaccgacatctgtgatccaagtgaccaacctgagcagcgccgttacttctgagcagatgaggacactgttctctttcctaggagaaatcgaggagcttcggctgtatccacccgataatgcacctctggctttttctagtaaggtctgttacgtcaaatttagagacccttcctcagttggcgtggcacagcacttgacaaacacggtttttatagaccgtgcactgatcgtggtgccctgcgctgaggggaaaatccccgaggagagcaaggccctgtcattgctggcacccgcaccaacaatgacaagcctcatgcccggagccggtctcctgcctattccaactcccaaccctcttaccaccttgggagtctctctatctagtctgggtgccatccctgctgctgccctcgatcccaatatcgctaccctcggggagataccgcagccccccctcatgggtaacgtggatccctctaagatcgatgagattaggcgcactgtttacgtgggtaacctgaatagtcagacaacgacagcagaccaactgttggagttcttcaagcaagtgggggaggttaaatttgtcagaatggcaggcgacgaaacccagccgacacggttcgcctttgttgaattcgctgaccagaattccgtgccaagggctctcgcattcaacggtgtcatgtttggggatcgtcccctgaagatcaatcactccaacaacgccatcgtgaagccacctgagatgactccccaggcggctgccaaggagctggaagaggtgatgaagagggtcagggaagctcaaagctttataagcgcggctatcgaacccgaaagcgggaaatcaaatgagaggaaaggcgggcggtcccgctcccatacccggagcaaatcaagaagctcctccaagtcacacagtaggcgcaagcgctctcagagcaagcacaggtcgcggtcacacaatcggagtcgttccaggcagaaggatcgcagaaggtctaaatcgccccacaagaagcgctccaaatccagggaacgacggaagtctagatcccgcagccacagtagggataagcgtaaagatacacgggaaaagattaaggagaaagagagggttaaagaaaaggatcgcgaaaaggagagagaacgagagaaggagcgtgaaaaggaaaaggagagaggaaaaaataaggaccgtgataaggagcgggagaaagatcgcgagaaggataaagagaaagatagagaacgagaaagagagaaagaacacgagaaggaccgagacaaggaaaaagagaaagagcaagataaggagaaggagagggagaaagatcgctcaaaagaaattgatgagaagaggaagaaagacaaaaaccctgagcaccaccctggcgtaactatgcacagggaggatttagtggtccctgcgggcaaaggtgtgggtggtggcgccggcgtgctgcccgatcggcaggagcaccaaaagccttag

SEQ ID NO: 136143 - DNA, 213 bp, synthetic construct
  misc_feature 1..213: note = Description of Artificial Sequence: Synthetic coding sequence
  source 1..213: mol_type = other DNA
atgtctgaaaagaaacagcccgtggacctcggtctcctggaggaggatgatgagtttgaggagttccctgcggaggactgggcagggctggacgaggatgaagatgcccatgtgtgggaggataattgggatgacgataatgtggaggatgacttttcaaatcaactcagagcagagctggagaagcatggctacaaaatggaaacctcctag

SEQ ID NO: 136144 - DNA, 1077 bp, synthetic construct
  misc_feature 1..1077: note = Description of Artificial Sequence: Synthetic coding sequence
  source 1..1077: mol_type = other DNA
atggcgtttgcccctatgggaccggaggctagcttttttgacgtgcttgataggcacagagaatccctccttgcagccctgagacgggggggccgggaaccacccaccggaggatcccggctcgcctcccggttcgaggattccgtgggccttcagatggtgtctcactgtacaacacgcaaaatcaaaagcgacagccccaagagtgcacagaagttcagcttgatccttaagattctgagcatgatctacaagctggttcagtcaaatacgtacgctacaaagcgagacatctactacacagattcccagttgtttggcaatcaaaccgtagtcgacaacatcataaatgatatcagttgtatgctcaaggttagcaggcgctctctgcacatcctaagcacttctaaaggactaattgccggtaacctccgctatatcgaggaggatggaaccaaggtgaactgcacctgcggagccactgctgttgccgtgccctcaaacatccaaggcatccgaaatctggtgactgacgcaaaatttgtgttaatcgtcgagaaagatgcaactttccagcggctccttgatgacaacttttgtaacaaactatccccttgtattatgattacggggaagggagtgccagatctgaatacacgactcctcgtgaagaaactatgggacacatttcatgtgcccgtgtttaccctcgtagacgcagacccacacggaatagaaatcatgtgcatatataaatacgggtccatgtccatgtctttcgaggcacaccatctgaccgtgccagccattcgatggttagggctcctgcccagtgatctaaaacgcctcaatgtgccgaaagattccctgatccccctgaccaagcgtgaccagatgaagctggacagtatccttagacgcccctacgtgacctgtcagcccttctggagaaaggagatggagatcatggccgacagcaaaatgaaggccgagatccaggccttgaccttcctgagtagcgactatttgtcacgggtatacttacctaacaaactcaagttcggtggatggatctag

SEQ ID NO: 136145 - DNA, 1065 bp, synthetic construct
  misc_feature 1..1065: note = Description of Artificial Sequence: Synthetic coding sequence
  source 1..1065: mol_type = other DNA
atggcctttgccccgatgggcccggaagctagctttttcgacgtcctggatcgccatcgtgaaagcctgttggccgctcttagaaggggaggcagggaacctcctacaggcgggtcacgcctcgccagccgcttcgaggatagcgtgggtctgcaaatggtttcccactgcacaacccgcaagatcaaatcagactccccaaaaagtgcacaaaagttctcgctcatactgaagatcctctcgatgatctataaactggtgcagagcaatacttacgcaacaaagcgcgatatctactacaccgatagccagctattcggcaaccaaacagtcgtcgataacattataaatgatataagttgtatgctcaaggtctcaagacggagcttacacatcttgagtacctccaaggggctcatagccgggaatctcagatacatcgaggaggacggcacaaaagtgaactgcacctgtggcgccaccgccgtcgctgtaccatccaatattcagggtatacgcaatgctaaatttgtgctgatcgtagagaaggacgcaactttccagagacttctcgatgataacttctgcaataaactgtcaccatgcatcatgattactggaaaaggcgtgcctgacctaaacacaaggcttcttgtcaagaagttatgggacacctttcacgtccccgtgttcactttggtggacgccgaccctcatgggattgaaattatgtgcatctacaagtacggatctatgtctatgtccttcgaggcccatcacctgactgtgcctgcaatcagatggcttggccttcttccatcagaccttaagcgactgaatgttccaaaagactccctgatcccactcaccaaacgcgatcagatgaagctggattcgattctccggcgaccctatgtcacatgccaaccgttctggagaaaggaaatggaaatcatggcggacagtaaaatgaaggcggaaatccaagccctgactttcttatcctctgactatctctctagggtttatctgcctaacaagttgaagtttggcgggtggatttag

SEQ ID NO: 136146 - DNA, 1191 bp, synthetic construct
  misc_feature 1..1191: note = Description of Artificial Sequence: Synthetic coding sequence
  source 1..1191: mol_type = other DNA
atggcctttgcccctatgggacccgaggcgtcattcttcgacgttctcgacagacaccgagagtccctgcttgccgctctaagaagaggcggaagggaacccccaaccgggggctcccgtctggccagcagcagcgaggtacttgctagcattgaaaatatcatccaggatatcatcacttcgctcgccagaaatgaggcccctgcttttaccattgataatcggagcagctgggagaatatcaaattcgaggatagcgtagggcttcagatggtgagtcattgtaccacgcgtaaaatcaaaagcgactcccctaagtcagctcaaaaattttccctaatcctcaaaatcttgagtatgatctacaaactcgttcagtctaatacctacgctacgaagagggatatatattatacagatagccagctctttggcaaccaaactgtggttgacaacatcatcaatgacatctcatgtatgctgaaagtcagcagaagatcgctgcatatcttgtctacgagcaaaggtctcatcgctggaaacctgcggtatattgaggaagacggcactaaggtgaattgtacttgtggagcaacagcggttgccgtgccctctaatatacaaggcatacgcaatctggtaaccgacgccaaatttgttctgatcgtagagaaggacgccacatttcagcgtctgctcgacgataatttttgtaacaaactgagtccctgcatcatgatcaccggcaagggagtacctgatttaaacaccagactgcttgtaaagaaattgtgggacaccttccacgtgcccgtgttcactcttgtggacgccgatccccacggcatcgagatcatgtgcatctataaatatggtagcatgtcaatgtctttcgaggcacatcatctaaccgttcctgccatacgctggctgggtttactaccctccgatctaaagagattgaatgtgcctaaggatagcctcatccccttaaccaaaagagatcagatgaagctggactctatcctaagacgtccctacgtaacatgtcagccattttggagaaaggaaatggagataatggctgacagcaagatgaaggcggaaattcaggccctgacttttctgtcttccgattacctttccagagtctacctgcctaacaagctgaaattcggaggatggatttag

SEQ ID NO: 136147 - DNA, 813 bp, synthetic construct
  misc_feature 1..813: note = Description of Artificial Sequence: Synthetic coding sequence
  source 1..813: mol_type = other DNA
ctgctcgcggccttgagacggggtggaagggagccccccaccggcgggtcgaggctcgccagctcttccgaggtcctggcctcaatcgaaaacattatccaggatattattacttcactagcccgtaatgaggcgcctgcgtttactattgataacagaagtagctgggaaaacattaagttcgaagacagtgtgggcttacagatggtgagccactgtaccactaggaagattaagtccgactcccccaaatcagctcagaaattctctctcattctcaaaatccttagcatgatatacaaacttgtgcaatcaaatacttacgctacgaaacgagacatctattatactgactctcagttgttcggaaaccagacagtggtggataatatcattaatgatatctcatgcatgttgaaagtcagtcggcgctcgctgcacatactctccactagtaagggcctcatcgccggaaatctcaggtatatcgaggaggatggaacaaaagtgaactgtacgtgcggagccacagcagtggctgtgccttctaacattcagggtatcagaattactgacgccaagttcgtgctcatcgtagaaaaagacgctactttccagagactcttggacgataacttttgcaataagctgtccccctgcattatgattacggggaaaggtgttcccgatctgaacacccggctgctggtcaaaaagctttgggacacattccatgtgccagttttcacgctggtggacgcagacccacatgggattgagattatgtgtatttacaaatatggaagtatgtag

SEQ ID NO: 136148 - DNA, 996 bp, synthetic construct
  misc_feature 1..996: note = Description of Artificial Sequence: Synthetic coding sequence
  source 1..996: mol_type = other DNA
atggagaacccgtcgcccgccgctgccctcggtaaggccttatgcgccttactcctggccacccttggcgccgctgggcagcccctgggaggggagagcatctgtagtgctagagctctggcaaagtactctatcaccttcacggggaagtggtcgcaaaccgccttccccaaacagtaccccctcttccggccgcccgcacagtggtcatcgctgctgggtgccgctcacagttctgattattccatgtggcgtaaaaaccagtatgtgagtaatggcttgagagacttcgcagaaaggggagaggcatgggccttgatgaaggaaatcgaggccgcaggggaggctctgcagtctgtgcatgcggtcttttcagcacccgccgtgcccagcgggaccggtcagacatcagccgagttagaggttcagaggcgtcattctcttgtctccttcgtcgtgcggatcgtccctagccccgattggttcgtcggcgtggactcgttggacttgtgtgatggagatagatggcgggagcaagcggcccttgatctgtacccttatgacgctggaactgattccggtttcactttctctagtccaaattttgccactatcccccaggacacggttacagagattacaagctcttctccttcccaccctgcgaacagcttttactatccgcgcctgaaagcgctgccaccaattgctcgtgtgacactggtgcggctccgacagagcccacgggcgttcatccctcccgctccagtgctccctagtcgagacaacgaaattgtcgactcagcaagtgttcccgaaacaccactcgactgcgaggttagcctctggtccagctggggcttatgcggtggacactgtggacgcctcggaactaaaagtcgcactaggtacgtgcgcgtgcagcctgcgaacaatgggagtccatgcccagagttagaggaggaagccgaatgcgtacctgacaactgcgtctag

SEQ ID NO: 136149 - DNA, 996 bp, synthetic construct
  misc_feature 1..996: note = Description of Artificial Sequence: Synthetic coding sequence
  source 1..996: mol_type = other DNA
atggagaacccatccccagcggctgctctaggaaaggccctctgcgccttgcttcttgccactttaggtgctgccggtcaaccccttggaggcgagagtatttgctcagctcgagccttggctaaatattccatcacatttacggggaaatggagccagacggccttcccgaagcagtatcccttgttccgtccccccgcccagtggagcagcctccttggggccgcccatagctcagattatagcatgtggagaaagaatcagtatgtgagcaacgggttgagagacttcgctgagcgaggcgaggcatgggctctgatgaaagagatcgaagccgccggcgaagcacttcagtcggtacacgcggtcttttcagcccctgccgttccttctgggaccggccaaacgagtgccgaactcgaggtgcagaggcgccactctttggtttcgttcgtcgtgcgcatcgtgcccagcccagattggttcgttggggtcgattcgttggacctttgtgatggtgacaggtggagagagcaggcggccctcgacctctacccgtacgacgccgggacagatagtggcttcacattctcttctcctaactttgccaccattccccaagacaccgtaactgagattacctcttctagcccttcacacccagctaatagcttttactatcctagactgaaggctttgcctcctatcgccagggtgacactagtgcgccttcgccagtcaccaagagccttcattcctccggcccccgttctgcctagccgggacaatgagatcgtcgacagtgccagcgttcccgagacgcctcttgactgtgaggtgagcctttggagctcttggggcctgtgtggtggacactgcggtcgcctggggaccaaaagtcgtaccagatatgtgcgggtgcaacccgcaaataacggctcgccttgccctgagctggaggaagaagctgagtgtgtacctgataactgtgtctag

SEQ ID NO: 136150 - DNA, 186 bp, synthetic construct
  misc_feature 1..186: note = Description of Artificial Sequence: Synthetic coding sequence
  source 1..186: mol_type = other DNA
atggaaaaccccagtcccgctgctgctctcggcaaggccctctgcgccctcttgctggctactctgggagctgccggacaaccactgggtggagagagtatctgctccgcccgggcattggccaagtactctatcacctttaccgggaaatggtcacaaacagccttcccaaaacagtatccatag

SEQ ID NO: 136151 - DNA, 327 bp, synthetic construct
  misc_feature 1..327: note = Description of Artificial Sequence: Synthetic coding sequence
  source 1..327: mol_type = other DNA
atggagaacccctccccggctgccgcactggggaaagcgttgtgcgccctcctgctggcaacccttggcgctgcgggccagccccttggtggggagagcatctgctccgcgagggctcttgccaagtatagtattacttttaccggcaaatggtcccagactgccttccctaaacagtatcccctgtttaggccacccgcacagtggagctctctgctcggagcggctcacagttctgactacagcatgtggaggaagaatcaatatgtgagtaatggcttgagggacttcgccgagcggggagaggcatgggcactgatgaagtag

SEQ ID NO: 136152 - DNA, 54 bp, synthetic construct
  misc_feature 1..54: note = Description of Artificial Sequence: Synthetic coding sequence
  source 1..54: mol_type = other DNA
atggagaaccccagtccagccgccgcgctcggaaaagccctgtgtgcattatag

SEQ ID NO: 136153 - DNA, 27 bp, synthetic construct
  misc_feature 1..27: note = Description of Artificial Sequence: Synthetic coding sequence
  source 1..27: mol_type = other DNA
atggagaacccttctcccgctgcatag

SEQ ID NO: 136154 - DNA, 51 bp, synthetic construct
  misc_feature 1..51: note = Description of Artificial Sequence: Synthetic coding sequence
  source 1..51: mol_type = other DNA
atggaaaacccatcacctgctgctgcgctgggaaaggctctctgtgcatag

SEQ ID NO: 136155 - DNA, 75 bp, synthetic construct
  misc_feature 1..75: note = Description of Artificial Sequence: Synthetic coding sequence
  source 1..75: mol_type = other DNA
atggagaacccctctccagcggccgctctgggaaaggccctgtgtgcattactgcttgcaaccctcggtgcctag

SEQ ID NO: 136156 - DNA, 195 bp, synthetic construct
  misc_feature 1..195: note = Description of Artificial Sequence: Synthetic coding sequence
  source 1..195: mol_type = other DNA
atggaaaatccgtcacctgcagccgccctgggaaaagccctctgcgccctgctgctcgcgacacttggagccgccgggcagcccctgggcggggagagtatatgtagtgcaagagctctggccaagtactctataacatttacaggaaaatggtcccagactgcttttcccaagcaatatccgcttttccgctag

SEQ ID NO: 136157 - DNA, 960 bp, synthetic construct
  misc_feature 1..960: note = Description of Artificial Sequence: Synthetic coding sequence
  source 1..960: mol_type = other DNA
atggacccccaaaaccaacatggaagtgggtcatctctcgtagtgatccagcagccctcactggatagccgacagagactggactacgaacgggaaatacaaccgacggctattctgtcactagatcaaattaaggcgattcggggctcaaacgaatacaccgagggcccttctgttgttaagaggccagccccacggaccgctccacgccaagagaagcatgaacggacccacgagatcatacccataaacgtgaataacaattatgagcaccgacacacatctcacctgggccatgccgtgctccctagtaacgctagaggtccaatcctctcccgctccacctccactggaagtgctgcgagttcaggaagcaactctagcgcatcttccgagcagggactgctggggagaagcccccctacacgacccgtgccgggccatcgctctgagcgggctattcgaacacagcctaaacagctgattgtcgatgaccttaagggtagcctgaaagaggacctgactcagcataaatttatctgtgagcagtgtggcaagtgtaagtgcggagagtgcacagccccgcgcacacttcctagctgcctggcatgtaaccgtcagtgtttgtgctccgcggaaagcatggtggagtatggtacatgtatgtgcctcgttaagggaatcttttatcactgcagcaatgacgatgagggagattcctacagtgataatccctgctcctgttctcagtcacactgttgctcccgctatttgtgtatgggcgctatgtccctctttttgccttgtcttttgtgctacccaccagctaaaggctgtctgaaactctgccgacggtgctatgactggattcacagacccggatgcagatgcaaaaatagcaataccgtgtactgtaagctcgagtcttgtccatcacgagggcagggcaagccctcatag

SEQ ID NO: 136158 - DNA, 960 bp, synthetic construct
  misc_feature 1..960: note = Description of Artificial Sequence: Synthetic coding sequence
  source 1..960: mol_type = other DNA
atggacccccagaatcagcacggcagtggttccagcctggtcgtgatccagcagccttcactcgactcacgccaaagactcgactacgagcgggagatccagccaacggctatcctttcactagatcagattaaagctattcgaggtagtaacgagtacactgaaggtccaagcgtggtcaaaagacccgctcctagaacggcccctagacaggaaaagcacgagaggacccacgagataatacctatcaatgtgaacaacaattatgaacatcggcatacctcccacttggggcacgccgttttacctagtaacgccaggggcccaatcctatctcgttccacaagcactggcagcgcggccagtagcggctctaattcttccgcgtcctcagaacaaggactcctcgggcgcagccctcctacgcgtccggtaccaggacatcggagcgaacgcgccataaggacccaaccaaaacagctgatagtggatgacctcaagggaagcctgaaagaagacctgacccagcataaattcatctgcgagcagtgtggaaaatgcaagtgtggagaatgtaccgctcctcgtacactgccttcctgtttagcctgcaaccggcaatgcctgtgtagcgcagagagcatggtggagtatgggacatgcatgtgcttggtgaagggaattttctatcactgcagtaacgacgatgagggtgattcctactccgacaatccctgctcctgtagtcagtcacactgttgttcgaggtacttatgcatgggcgcaatgagtctgttcctgccatgcctgctttgctatccaccagccaagggatgtttaaagctgtgtagacggtgttacgattggatacatagacccggctgtcgctgcaagaatagcaatacagtgtactgcaagcttgagagctgtcccagcagggggcagggcaagccaagttag

SEQ ID NO: 136159 - DNA, 204 bp, synthetic construct
  misc_feature 1..204: note = Description of Artificial Sequence: Synthetic coding sequence
  source 1..204: mol_type = other DNA
atggacccacaaaatcaacatggctccggctctagtttggtcgtgatccagcagccttcccttgacagcagacagcggttggattacgagagagaaattcaacccaccgcaatactcagtctggaccagatcaaggccattcgcggcagcaatgaatatactgagggaccctccgtcgtgaaacgacctgcacctcgcacatag

SEQ ID NO: 136160 - DNA, 630 bp, synthetic construct
  misc_feature 1..630: note = Description of Artificial Sequence: Synthetic coding sequence
  source 1..630: mol_type = other DNA
atggatccacaaaatcagcacggctccggctcttctttggtcgttatccaacagcccagtttggattcaagacagagactggattatgagcgagaaatccagccaaccgcgatcctgtctctcgatcagatcaaggccatccggggcagcaatgagtacacagaaggaccaagcgtcgtgaaaaggcctgctccaagaactgccccacggcaagagaaacacgagagaacccatgaaataatccccattaatgtcaacaataattatgagcaccgccacacctctcacttaggtcatgccgtgctgccgtccaacgcccgagggcctatactgagccgatctacctctacggggtctgccgcctcaagtgggagtaacagctccgcctcgtcggaacaaggtctgctgggcaggagtccacccaccagaccagtgcccggccacaggtctgagcgcgcaatccgtacccagcctaagcagcttatagtagacgacctgaagggaagcttgaaggaggatcttacacagcacaaattcatctgtgagcagtgtggcaagtgtaaatgcggcgagtgtactgcgcctcgcacattacccagttgccttgcttgcaatcgtcagtgcctgtag

SEQ ID NO: 136161 - DNA, 108 bp, synthetic construct
  misc_feature 1..108: note = Description of Artificial Sequence: Synthetic coding sequence
  source 1..108: mol_type = other DNA
atggacccccagaaccagcatggctcaggatcctccttagtggtgatccaacagccttcactggactctcggcagcggctggactacgagagagaaatacagccatag

SEQ ID NO: 136162 - DNA, 948 bp, synthetic construct
  misc_feature 1..948: note = Description of Artificial Sequence: Synthetic coding sequence
  source 1..948: mol_type = other DNA
atggaagcacgcgctcaatctggcaacgggtctcagcctcttctgcagactcccagagacggcggccgtcagaggggagagccggatcctagagatgccctgacccagcaggtgcatgttttatcactggatcagatcagggcgatccgcaacaccaacgagtacaccgaggggccaactgtggtgccacggccgggcctgaaaccagcaccgaggccgagcacccagcacaagcatgagagactgcacggactgccagaacataggcaacctcctagattacaacactcacaagtgcacagttctgcgagggcccctcttagtcgctccatttccaccgtgagctctggctcacggagtagtacccgcacaagcacgtcaagctcgagtagtgagcagagacttctgggctccagctttagctccggacctgtagccgatggcattattcgagtccaaccgaagtccgaattaaaacccggcgaactcaagcctctcagtaaagaggacttagggctgcacgcttaccgatgcgaggattgtgggaagtgcaagtgtaaggaatgtacttatccccgccccctcccatcagattggatttgcgacaaacaatgtttgtgcagtgcgcaaaacgtcatcgactacggcacctgcgtgtgctgcgtgaaggggctgttctaccactgtagtaacgatgacgaggacaactgcgctgacaacccatgctcttgcagtcagagccactgctgcactaggtggagcgcaatgggtgttatgtcactcttcctgccctgcttatggtgctaccttccagcaaagggctgcctgaaactgtgtcaaggctgctacgaccgagtcaacagacccggctgccgctgcaagaattcgaataccgtttgctgcaaggttcctacagtcccgcccaggaacttcgagaagcccacatag

SEQ ID NO: 136163 - DNA, 948 bp, synthetic construct
  misc_feature 1..948: note = Description of Artificial Sequence: Synthetic coding sequence
  source 1..948: mol_type = other DNA
atggaggccagagcccagtcaggaaacggatctcaacctttgttgcagaccccccgagacggcgggcgacagcgaggggaacctgatcccagggacgcacttacccagcaagttcacgtgcttagcctggatcagatcagagccattcgtaatactaacgaatacacagagggaccaacagtcgtccctaggccaggactaaaaccagctcctcgccctagcacacaacacaaacatgaacggctacacggcctgccagaacaccgacagccgccaagactgcagcacagccaggttcacagctctgcccgcgctcctctatctagaagcatttctacggtgtcctccggcagccgatcgtctacgcgaacatcaacaagcagcagtagcagtgaacaacgcctgctgggtagcagtttctcatctggtccagtggcagacggcatcattagggtgcaaccaaaatccgaacttaagcccggggagctaaagcccctgtccaaagaagatctcggcctgcacgcctacagatgcgaggattgtggaaaatgtaaatgtaaggaatgtacatatccaagaccactaccatcggattggatctgcgataaacagtgtctttgctccgctcaaaatgtgatcgattacggcacctgcgtttgttgtgtaaagggcttattctatcattgttcgaacgacgatgaagacaactgtgcggacaacccttgctcgtgtagccaatcacactgctgcactaggtggtcagcaatgggggtgatgtcgctgttcctcccttgtctgtggtgctatcttccagcaaaaggctgtctgaaattgtgccagggctgctatgaccgggtgaacaggccaggttgcaggtgtaaaaactctaacaccgtctgttgcaaggtacccacggtgccaccgaggaacttcgagaaacctacgtag

SEQ ID NO: 136164 - DNA, 948 bp, synthetic construct
  misc_feature 1..948: note = Description of Artificial Sequence: Synthetic coding sequence
  source 1..948: mol_type = other DNA
atggaggcgagggctcaatctggtaacggctcgcagcccctgttgcaaactccgagggatggaggccgtcagagaggcgagcccgacccccgtgatgctttgacacagcaggtgcatgtgctatctctggatcagatacgagctatccggaatacgaatgaatacacagaaggacctaccgtggtcccaagacccggcctaaaacccgcgcctcggccaagtactcaacataagcacgaacgattgcatggattacccgaacaccgtcagcccccaagactccagcactcccaggtgcattccagtgcccgcgctccactgtcacgctcaatcagcacagtctcctccggatcaaggagcagcacccggacctccaccagttctagttctagtgagcagagactgctcggttcaagcttttcctcaggtccggtggcagacggcatcattagagtgcagcccaaatccgagctcaaacccggcgaactcaagcccctctccaaggaggatctgggcctccatgcttaccgatgtgaagactgcgggaagtgcaagtgtaaggagtgcacctacccccgacccctgccctccgattggatttgtgacaagcaatgcctgtgctctgctcaaaatgtgatagactacggtacctgcgtctgctgcgtcaaaggactcttctaccactgttctaacgacgacgaggacaactgcgccgataacccctgtagttgctcgcagagtcactgttgtaccaggtggtccgctatgggcgtaatgagcctgttcctcccttgtctctggtgctaccttcctgcaaagggctgtttgaagctgtgtcagggatgttacgatagagttaacaggccagggtgccgatgtaaaaactctaacacagtctgctgtaaggtccccacagttcctccgaggaatttcgagaagccgacatag

SEQ ID NO: 136165 - DNA, 1062 bp, synthetic construct
  misc_feature 1..1062: note = Description of Artificial Sequence: Synthetic coding sequence
  source 1..1062: mol_type = other DNA
atggaagccagggctcagtctgggaatgggagccaaccactgttgcagacccctcgtgacggcggaagacagagaggagagcccgatccacgcgatgctttaactcagcaggtccatgtgctgtcgctggaccaaattagagctattcgcaacactaatgaatatacggagggcccaaccgttgtccctcgcccaggcttgaaacccgcaccccgcccatctacccagcataagcacgaacggttgcacggattgcctgagcacaggcagccacctcggcttcagcactctcaggtgcacagtagcgccagggctcccctgagcagatctatcagtacggtatcttccggaagtagatctagtacccggactagcacttcatcgtcctctagcgaacagaggctgctaggctcatccttctctagcggcccagtcgccgacggcataatccgcgtccagcccaaatcggaactcaagcctggcgaactcaagcctctttccaaagaagatttgggcctgcatgcctaccgctgcgaggactgtgggaagtgcaaatgcaaggagtgtacatatccaaggccccttccgagcgattggatctgcgacaaacagtgcctctgttccgctcaaaacgttattgattatggaacttgtgtgtgttgtgtcaagggcctgttttatcattgctcaaatgatgatgaggataattgtgcagacaatccttgcagttgtagccagtcgcattgctgtacccgctggagtgctatgggggtcatgtccttgttcctgccatgcctttggtgttacctgcccgcgaaaggttgcttgaaattgtgccagggatgttatgatagggtgaatcgtcctgggtgccgttgcaagaattcgaacaccgtttgctgcaaggtcccaactgtaccgccgaggaccttaaagaaccagcacagtataatcaaccaggaatactatagcaatgaggactttttcttccttttcctgatccatatttgcaaccagctaaacagctataacctgggaactgttaacagaaaagtggggtag

SEQ ID NO: 136166 - DNA, 867 bp, synthetic construct
  misc_feature 1..867: note = Description of Artificial Sequence: Synthetic coding sequence
  source 1..867: mol_type = other DNA
atggatgctgcagtgaccgacgacttccagcagatcctcccaatcgagcagctgaggtctacccacgccagcaatgattatgtagagaggccgccagcaccgtgtaagcaggccttatcgtcccccagcttgattgtccagacccacaagagcgactggagtctcgctaccatgcctacttccctgccccggagtctgtcgcagtgccaccaactgcaacccctacctcagcatctgtcccagagttctatcgcaagcagcatgtcacacagcaccaccgctagcgaccagagactactcgcttcaatcacccctagtccaagcggtcagtctatcattcgcacccagccaggtgctggagtgcacccaaaagcggatggggcattaaagggagaggccgagcagtctgctggacacccctctgaacacctcttcatttgcgaggagtgcgggcggtgcaagtgcgtgccttgcaccgcggccagacctctgccatcgtgttggctgtgtaatcaaagatgcctgtgtagcgcagagagcctcctggattacggaacctgtttgtgttgcgtgaaggggcttttttaccactgtagcaccgacgacgaggataattgcgcggacgagccgtgttcctgtggcccaagtagctgtttcgtgaggtgggcagccatgtccctaatctccctgtttttaccatgtctgtgctgctacttaccaactagagggtgtctccatttgtgccagcagggttatgattcattgcggagacctggatgtagatgtaaacggcacaccaatacagtgtgcagaaaaatcagctccggctcagctccttttcccaaggcccaggaaaaaagtgtgtag

SEQ ID NO: 136167 - DNA, 378 bp, synthetic construct
  misc_feature 1..378: note = Description of Artificial Sequence: Synthetic coding sequence
  source 1..378: mol_type = other DNA
atggacgccgcagtgacagatgatttccaacagatacttcctattgagcagctgcggagcacccacgcatcgaacgactatgtcgaacgaccacccgccccctgtaagcaggctctgtcttctccatctctgatcgtacagacccataaatctgattggtcactcgcaactatgcccacttcgctgccgaggtccctgagtcagtgtcaccaattgcagcccctaccacagcacctgtcccagtcaagcatcgcctcaagtatgagccattcaactacggcttcttctaccacagcccccctgatgatgaagaccacggtgctgatgtcccccgctctcgtgggattggttttggccctctctgccggacagccctag

SEQ ID NO: 136168 - DNA, 969 bp, synthetic construct
  misc_feature 1..969: note = Description of Artificial Sequence: Synthetic coding sequence
  source 1..969: mol_type = other DNA
atgctcagtcccctgcctaccggcccgctcgaggcgtgtttcagtgtacaatcgcggacatcctctcctatggaacccccaattcctcaatcagctcctctgacaccaaactcagtcatggtgcagccgctcctcgatagcagaatgtcacattctcgtctacagcatccgctaaccattctgcctatcgaccaggtcaaaactagccacgtggagaatgactatatcgacaacccctccctagcgttgaccaccgggcctaagcgaacacggggcggtgcacccgagctggcccccacacccgcaagatgtgatcaagatgttacacatcactggatctccttctctggcaggccatcctctgtgtccagcagttcaagcacatcgtctgaccaaagactgctcgatcatatggccccaccacccgtggctgaccaggcgagtcccagagcggtgcgcatccagccgaaagtcgttcactgccaacctttagaccttaaggggcccgcagtgcctcctgaactagataaacacttcctcttgtgcgaggcctgtggcaagtgcaagtgcaaggaatgtgctagccctagaacgttgccatcttgttgggtctgcaatcaggagtgcctttgttcagcccagaccctggtcaactacgggacctgcatgtgtctggtccaaggaatattctatcactgcaccaatgaggatgacgaaggttcttgtgccgaccatccttgcagctgcagtaggtctaattgctgcgccaggtggagtttcatgggcgctctgtcagtggtgctgccctgtttattatgttacctcccagcaaccgggtgtgtaaagctggcccagcggggttacgataggctgcgaaggccaggatgtagatgcaaacacacaaacagtgtcatctgtaaagcagccagcggggacgcaaaaacgtccagacccgataagccattctag

SEQ ID NO: 136169 - DNA, 321 bp, synthetic construct
  misc_feature 1..321: note = Description of Artificial Sequence: Synthetic coding sequence
  source 1..321: mol_type = other DNA
atggagcccccaattccccagtctgctccactcacccctaacagtgtaatggtccagccgttgttggactcaagaatgtcacattcaagactgcagcatcctctcactatcctccccatagatcaggtcaagactagtcatgtcgagaatgactatattgataatccctccctggcccttacaacagggccaaaaagaacgcgcggcggcgcccctgagttggcccccacaccagctagatgcgaccaggatgtcacccaccactggatctccttcagcggcagaccctgttcagctacatgcctccccccagctgcttag

SEQ ID NO: 136170 - DNA, 900 bp, synthetic construct
  misc_feature 1..900: note = Description of Artificial Sequence: Synthetic coding sequence
  source 1..900: mol_type = other DNA
atggaaccacccatcccgcagtccgctcccttgaccccgaacagtgttatggtccagcccctactggactcacgcatgtctcacagcagactccaacatcctctcaccatattaccaattgatcaggtgaagacatcacacgttgagaatgactacattgacaatccctccctcgccctgacaaccggacctaaaaggacacgaggaggagcacccgaattagccccgactcccgcacgatgtgaccaagacgtcacacatcactggatctcattttcaggccgcccatcgagcgtgagctcatcttcctccacatcctccgaccaacgactgcttgaccatatggcccctccccctgtggccgatcaggcgtcaccgcgggctgtccgaatccaacctaaggtcgtgcactgccagcccttggatctgaaaggccccgcagtcccaccggagctggacaagcacttcctgctttgtgaagcctgcggtaagtgtaaatgcaaagagtgcgcatcccccaggacattaccttcatgctgggtgtgtaatcaggagtgcctctgttccgcacagaccctggttaactatggtacttgcatgtgcttagtgcaaggcattttttaccattgtactaatgaagatgacgaaggcagctgcgccgaccacccatgttcttgtagccggtctaactgctgcgcacgctggagctttatgggagccttgtcagtggtgttgccgtgtctcctgtgctacctgcccgcgacaggttgtgttaaacttgcgcagcgagggtacgatcggctcagaagaccaggctgtcgctgtaagcacaccaatagcgtcatctgcaaagccgcatccggagatgcgaaaacatcacggccagacaagcctttttag

SEQ ID NO: 136171 - DNA, 153 bp, synthetic construct
  misc_feature 1..153: note = Description of Artificial Sequence: Synthetic coding sequence
  source 1..153: mol_type = other DNA
atggaaccccctattcctcagagcgcgcccctgacccccaactcggtcatggtacaaccactgttggattcacggatgagccacagccgcctccagcatccactcactatacttcccatcgaccaggtgaaaaccagccatgtggaaaattag

SEQ ID NO: 136172 - DNA, 1335 bp, synthetic construct
  misc_feature 1..1335: note = Description of Artificial Sequence: Synthetic coding sequence
  source 1..1335: mol_type = other DNA
atgagcgaggagaccgctaccagcgacaacgataactcgtacgcgcgagtgagagctgtcgtaatgacgagagatgactctagtggcggttggcttcctttgggggggtcgggcttgagcagcgtgaccgttttcaaagtgccccaccaggaagagaatggctgtgccgatttttttattaggggcgaacgtctgcgggacaagatggtggtcctggaatgcatgctgaagaaagatctgatctacaacaaggtaaccccgactttccaccactggaagatcgatgacaagaagtttgggctcaccttccagagccccgcagatgctcgggcctttgacagagggatccgcagagctattgaggacatttctcagggctgtcccgagagtaaaaacgaggcagaaggcgccgacgatcttcaggctaacgaagaagacagcagcagttccctggtaaaggatcatttattccagcaggagacagtcgttacctcagaaccgtaccgaagtagcaacatccggccttccccattcgaggacctaaatgcccgaagagtatacatgcagtcacaagctaaccaaatcacttttggccaacccggtctcgatatccagtcgcgaagtatggagtacgtacaaaggcagatcagcaaggagtgtggttcccttaaatcccagaaccgggtacccctcaaatccattagacacgtttcatttcaggatgaagacgaaatagtaaggattaacccccgggacatactgattcgacgatacgccgactacaggcaccccgatatgtggaaaaatgatcttgagcgagatgacgctgactccagcattcaattctcgaagccagatagtaagaaatcagattatctgtattcttgtggagatgagacaaaactctcttcccctaaggattctgtggtgttcaagacacagccatcctccctgaaaatcaagaaatcaaagagaagaaaggaagatggggaaaggtcaagatgtgtttactgtcaggaaaggttcaaccacgaggaaaacgtgcgtggcaagtgccaggacgcccccgatcccattaagcgatgcatttaccaggtgtcttgtatgctgtgcgccgaatctatgttgtaccattgcatgagtgatagcgaaggggacttttccgacccatgcagttgcgacactagcgacgacaagttctgtcttagatggctcgccttagtcgccctgagttttatagtgccatgtatgtgctgctacgtccccctgcgaatgtgccatagatgcggagaggcttgtgggtgttgtggcggcaagcacaaagctgctggctag

SEQ ID NO: 136173 - DNA, 1257 bp, synthetic construct
  misc_feature 1..1257: note = Description of Artificial Sequence: Synthetic coding sequence
  source 1..1257: mol_type = other DNA
atgaccgaggagacacacccggacgacgatagctacatcgtgcgcgtgaaggcagtggtgatgacccgggacgacagctcaggaggatggttcccgcaagaagggggaggaatctcccgtgtaggcgtgtgcaaagttatgcaccccgagggcaacggccggtctggatttctaatacacggagagcgacagaaggataagctggtggtgcttgagtgctacgtgcggaaagacctcgtgtatactaaagccaaccctacgtttcaccactggaaggtagacaatcgaaaattcgggctgacctttcagagcccagcagatgctcgcgcgtttgacaggggtgtgcgcaaagccatcgaagatctaatcgaggggtccactacttcgagcagcaccatccataacgaggccgagttaggcgatgatgatgttttcaccacagcaaccgacagttcgagcaatagttcgcaaaaacgtgagcagcctacccgcactatcagctcacctaccagctgcgaacaccggagaatctatacactgggacatctgcacgatagctaccctactgatcattatcacctggaccagcctatgccccgcccatatcgccaggtcagcttccctgatgacgatgaggagatcgttaggataaatccacgcgaaaaaatctggatgaccggctacgaggactacagacacgcccccgtcagagggaaatacccagatccgtcagaagatgccgactccagttacgttagatttgccaagggcgaggtgcccaagcatgattacaactacccctatgtagactcctccgattttggactgggcgaagaccctaagggccgcggtggcagtgtaattaagacacagccctcccgaggtaagagtcgacgccgcaaagaagatggagaacgttcacgttgcgtgtactgccgggacatgttcaatcacgaggaaaatagaagagggcattgccaggatgcccccgactccgtgaggacctgcatacggagggtctcctgcatgtggtgtgccgacagcatgctgtaccactgcatgtccgatcctgagggtgattacaccgacccctgctcctgcgacacgagtgatgagaagttctgcctgcgttggatggccttaatcgccctgtcattcctggccccgtgcatgtgttgctatctgccccttagggcttgctaccattgcggggtgatgtgtaggtgttgtggcggtaaacataaggctgctgcctag

SEQ ID NO: 136174 - DNA, 351 bp, synthetic construct
  misc_feature 1..351: note = Description of Artificial Sequence: Synthetic coding sequence
  source 1..351: mol_type = other DNA
atgactgaggagacccacccagacgatgacagctacattgttcgcgtcaaggcagtcgtgatgacacgcgacgattccagtggaggctggtttcctcaggagggaggcggaatcagccgcgtgggagtgtgcaaggtcatgcaccccgaaggcaatggtagaagcgggtttctcatccatggcgagcggcagaaagacaaactcgttgtgctggaatgctacgttagaaaagacctggtgtatactaaggcaaatcctacattccaccactggaaggtggataataggaagtttggactcacttttcagagccctgcagatgccagggcattcgatcgcggtgtgcgatag

SEQ ID NO: 136175 - DNA, 1248 bp, synthetic construct
  misc_feature 1..1248: note = Description of Artificial Sequence: Synthetic coding sequence
  source 1..1248: mol_type = other DNA
atggctagccccggatccgattcatatatcgtacgggtaaaagctgttgtcatgacaagagacgacagttcaggtggttggtttccacaggagggcgggggcatatcccgggttggcgtgtgcaaggtgatgcatccggaaggtaacggccgcagcggttttctgattcacggagaaagacagaaggataagctggtggtcctggaatgttacgttagaaaggacctggtgtacacaaaagcgaacccaacatttcaccactggaaagtcgataaccgtaagttcgggctgacattccagagccctgccgacgctcgcgcatttgaccgcggcgtaagaaaggccatcgaggacctgatagaggggagtacaacaagctcatccacgatccacaacgaggcagaattaggagacgacgatgtgttcacgaccgccacagacagtagctcgaactctagccagaaacgtgaacagccaacgaggaccatcagcagccctacttcgtgtgagcacagaaggatttacacactggggcatctacacgattcatatcctaccgaccactaccacctggaccaacccatgccaagaccctaccgccaggtctcattccccgatgatgacgaggaaatcgtgcgaattaatccccgggagaaaatttggatgacaggttatgaagactaccggcacgcccctgtccgcggaaaataccctgacccaagtgaagacgctgactcctcctatgtcagattcgcaaaaggagaagtgccgaagcatgattataattatccatatgtagacagttcggattttggcctcggtgaggaccccaagggaaggggggggtccgtgatcaagactcagccttctaggggcaaaagtagaaggagaaaggaagacggggaacgatctcggtgcgtgtattgccgcgacatgttcaatcatgaagagaatcggcggggccattgtcaggacgctcctgacagtgtgcgtacctgtattcgccgcgtgagttgtatgtggtgtgccgattctatgctctatcattgtatgtcagatccagagggcgattataccgatccctgcagttgcgacacttccgacgaaaagttctgccttagatggatggcactgatagccctgagctttcttgccccgtgtatgtgctgctacttgcctttgagagcctgttatcactgtggagtaatgtgccgttgctgcggcgggaagcataaagccgctgcttag

SEQ ID NO: 136176 - DNA, 1233 bp, synthetic construct
  misc_feature 1..1233: note = Description of Artificial Sequence: Synthetic coding sequence
  source 1..1233: mol_type = other DNA
atggtccgagtaagggctgttgttatggctcgcgacgatagtagcggtggatggctacctgtcggcggggggggtttatctcaggtgtctgtttgtagagtgcgaggcgccagacccgagggcggggcacgccagggtcattatgtgatccacggtgagaggctgcgagatcaaaaaaccactcttgagtgcacacttaagccaggcctcgtttataacaaagtgaaccccattttccaccactggagtttgggggattgtaagttcggcctgaccttccagtccccagcggaagccgacgaattccaaaagtcacttctggctgctctcgcagctctcgggagagggtcactgaccccctcaagttcctctagttcttcgagtccatcacaagataccgcagagacaccttgccctctcacctcccacgtcgatagtgatagtagctcatcacacagccgccaggaaacacctccaagcgccgccgccgctcccattatcactatggagtccgcatccggcttcgggcccaccacaccccctcagcgtcgccgcagtagtgcccagagttacccccccctgctaccttttaccgggattcctgaaccgtccgaacctttggcgggggccgggggtctgggttggggaggcaggggatatgaagattacaggcgaagtggcccaccagcccctcttgccctgtcaacctgcgtcgtgcgatttgcaaagaccggagcgctgcgtggcgcagctttaggccctccagcggcactgcctgctccacttaccgaggcagccccccccgcccctcccgctagaccgcctcccggtcctggtcctagcagcgcacccgctaaggcaagtcccgaagcagaggaagcagcacgttgtgttcattgtcgagccctgttccgcagacgcgcagacggaaggggggggaggtgcgctgaagcgcccgatcctggccgcttactggtgcgtaggttgtcttgtctctggtgcgctgagagcctcctctatcactgcctgtctgatgccgagggagatttcagcgatccatgcgcgtgcgagccagggcatccccgccctgctgcacgatgggccgcactcgctgccctgagcttagctgttccctgcctgtgctgttatgcccctcttagggcatgtcattgggtggctgcaagatgtggctgcgctggatgcgggggtcggcacgaagaagctgcaagatag

SEQ ID NO: 136177 - DNA, 459 bp, synthetic construct
  misc_feature 1..459: note = Description of Artificial Sequence: Synthetic coding sequence
  source 1..459: mol_type = other DNA
atggttcgggtcagagctgtggtaatggcacgcgacgattctagtggaggatggctgcccgtgggaggcggaggtctgtctcaagtctctgtgtgccgcgtgcggggtgcaaggccagaggggggggctagacagggccattacgttatccatggcgagcgtttacgggatcagaagacaaccttggaatgcacgttgaaacccgggctggtgtacaacaaggtcaacccaatttttcaccactggtccctcggcgactgtaaatttggtctgacgttccagtcccccgccgaggccgacgaattccaaaaatctctgctcgcagccctagctgctctcggccggggaagcctcactccgtccagttcctctagctcttctagcccttcccaggacaccgctgaaaccccttgtccgttaactctatcccaatattttaggcacatgctctgtccgtag

SEQ ID NO: 136178 - DNA, 1725 bp, synthetic construct
  misc_feature 1..1725: note = Description of Artificial Sequence: Synthetic coding sequence
  source 1..1725: mol_type = other DNA
atgtggacattcctcggtatcgctacgttcacatatttctacaagaagttcggggacttcattaccttagccaaccgagaggtcctgctgtgcgtcctggtattcctttcgctcggcctcgtcttgagctataggtgtcgccacaggaatgggggactgttggggcgccagcagtctggcagtcagttcgccctgttttcggatatactctctggcctgccattcatcggttttttctgggccaagagtccccccgaatccgagaataaagaacagctggaagctaggaggaggaggaaggggactaacatctcggagacatcactgattggtactgctgcctgtacttctaccagcagccagaatgacccagaggtaattatcgtaggtgccggcgtcctgggatccgccctggctgctgtgttatcccgcgatgggagaaaggtgaccgtgattgagcgggacctgaaagagccagaccgcattgtgggggaattcttgcagcccggagggtaccatgttctcaaagatttgggactcggcgatactgtcgagggccttgacgcacaggtcgttaacggctatatgattcacgatcaggaatcaaagagcgaggtgcaaatcccgtacccactctccgagaacaaccaggtgcagtctgggcgggccttccaccacgggcgattcatcatgagcctgcgtaaggccgcaatggcagagcccaatgctaaattcatcgagggcgtggtcctgcagctgttagaggaagacgacgtggtcatgggagttcagtacaaagacaaggaaacaggggacattaaggagctgcacgctccgcttactgtggtggctgacggtctgttttcaaagttcaggaagagtttagtcagcaacaaggtgtcggtttcttctcacttcgtaggtttcctgatgaaaaatgctccacagtttaaggctaaccacgcagagctgatcctggccaacccttctcccgtgttgatctatcaaattagtagttccgagaccagagtcctggtcgacattagaggcgaaatgccacgtaaccttagggagtatatggttgagaagatttatcctcagattcctgatcacctcaaggagccttttctagaagccaccgacaattcacatttacggagcatgccagcctcttttctgccgccctcaagtgtgaaaaaacggggtgtcctgctgctcggcgacgcctataacatgaggcacccattgacagggggagggatgaccgtcgcattcaaggatatcaagctttggcgtaagttactgaaagggatcccagacctctacgatgacgctgcaatctttgaagccaaaaaatccttttattgggctagaaagactagccattccttcgtggtgaacatactggctcaggccctgtacgaactgttctcagctactgatgattcgctccaccaacttcgtaaagcttgttttctttacttcaaactgggaggggagtgcgttgcaggcccagttggtctgctgtctgtgctgtcccctaaccccctggtgctcattggtcactttttcgccgttgctatctacgctgtatatttctgttttaaatccgagccgtggataactaaacctagggccttactttctagcggagcagtgctgtataaggcgtgcagtgtgatctttcctctgatctattcagagatgaaatacatggtgcattag

SEQ ID NO: 136179 - DNA, 1440 bp, synthetic construct
  misc_feature 1..1440: note = Description of Artificial Sequence: Synthetic coding sequence
  source 1..1440: mol_type = other DNA
atgttaaggcgcaaggggaccaatatctccgagacatcacttatcgggaccgcagcctgcacatctacttcatctcagaacgaccccgaagtaatcatcgtcggagcgggcgttctcggctcagccctggcggccgttctgtccagagacgggcggaaggtgacggtcattgagagagatcttaaagagcctgaccgaattgtgggcgagtttctgcaacccggagggtaccatgtgctaaaggacctcggacttggcgatacagtggagggcctggatgctcaagtggttaacggttatatgattcacgaccaagaaagtaagagcgaagtgcagattccctatcccctgtctgaaaataaccaagtgcaaagtggccgagcttttcatcatggtagattcataatgagtctccggaaggcggcaatggcagaaccaaacgcaaagttcatagagggggtggtactccagctcctcgaggaagacgacgttgtcatgggtgtgcaatacaaagacaaagaaaccggagacataaaggagctgcatgcgccactgacagtggtggctgatggtctattcagcaagttccgtaagtccttagtgtcaaataaagtgagtgtctcctcccactttgtggggttcctgatgaaaaacgccccccagtttaaagccaatcatgcagagcttatcctcgccaacccctcacccgtcctgatatatcagatctcctcgtccgaaacccgggttttggtggatatccggggcgaaatgcctagaaatctcagggaatatatggttgaaaaaatctatcctcagatacctgatcacctgaaggaaccttttctcgaagccactgacaatagccacttacggtctatgcctgcctcctttctgccacccagtagcgtgaaaaagcgaggggtgctgcttctgggtgacgcctacaacatgaggcatcctttgaccggcggtggcatgacagtagccttcaaagacataaagctctggcggaagctgctgaagggtatccccgacttgtatgatgatgccgccatattcgaagctaagaaatcgttctactgggctcgcaaaaccagtcacagctttgtcgtaaacatccttgcccaggccctgtatgagctcttctcagccacagatgactccttgcatcagctgagaaaggcatgtttcttgtacttcaagctgggcggagagtgtgtcgcaggcccggtggggctgctctctgtgctgtccccaaacccgttagtgttaattggccacttcttcgccgtcgcaatctacgcggtatacttctgttttaaaagtgagccctggataactaagccacgagcactgctgtcctctggtgcggtgctgtataaggcttgctctgtgatattcccactgatctatagtgaaatgaagtacatggtgcactag

SEQ ID NO: 136180 - DNA, 1140 bp, synthetic construct
  misc_feature 1..1140: note = Description of Artificial Sequence: Synthetic coding sequence
  source 1..1140: mol_type = other DNA
atgattcacgatcaggagtcgaaatctgaggttcagatcccttaccctctgtccgaaaataaccaagtccagagcggtagagcgttccaccatggccggttcataatgtcgctgcggaaagccgccatggctgaaccgaatgctaagtttatcgagggagtggttctacagttgttggaggaggatgacgtcgttatgggggttcagtacaaggacaaagaaaccggcgatataaaggagctgcatgcaccgttaaccgtcgtggcggacggcctcttttccaaatttcgcaaatccctggtgtccaataaagtttcggtatcaagtcatttcgtgggatttctgatgaaaaacgctccccagttcaaagctaaccatgctgaactgatcttagcgaatccttctcccgtgttgatttatcagatctcctctagcgaaaccagagtgctggtggatatcagaggcgagatgcctagaaacctccgggaatatatggtagagaagatctatccacaaatccctgaccaccttaaggaaccctttcttgaggcaaccgacaatagtcatcttcgctccatgccagcaagcttcctccccccttcctcagtgaagaaacggggcgtgttacttctgggcgacgcctataacatgaggcaccctctgacagggggcggcatgaccgtggcattcaaggacataaagctgtggagaaagcttctgaaggggatcccagatttatacgatgacgctgccatcttcgaagcgaagaaatctttctactgggcccgcaagacaagtcacagttttgtggtcaatatactggcacaggctctgtacgagctatttagtgccaccgacgattctctgcatcagcttagaaaggcctgttttctgtacttcaaactcggaggggagtgcgtcgctggtcctgttggtctgctttccgtactgagtccgaatccattagtcctgattggccatttctttgcggtcgccatatatgcggtatacttctgcttcaaaagcgaaccctggatcacaaagcccagggccctcttgtcgagtggcgccgtgttatacaaggcctgctccgtcatcttccctctgatttactctgagatgaaatatatggtgcactag

SEQ ID NO: 136181 - DNA, 822 bp, synthetic construct
  misc_feature 1..822: note = Description of Artificial Sequence: Synthetic coding sequence
  source 1..822: mol_type = other DNA
atgaagaagacacagacatggatcctgacctgcatctatctccagctgctcttatttaacccccttgttaaaactgaagggatctgtaggaaccgcgtgacaaataacgtgaaagacgtgacgaagctggttgctaaccttccaaaggattacatgattactttgaaatatgttcccggcatggacgttctaccttctcattgctggatcagcgagatggtggtgcaactctcagacagcctgaccgatctgctggacaagttctctaacatttctgaggggctgtccaactacagtatcatcgacaagctcgtaaacatagtcgatgatctggtagagtgtgtgaaagaaaattcctctaaggaccttaaaaagagctttaagtcaccagaacctcgcttatttactccagaggagttttttagaatattcaatcggagcattgacgccttcaaggatttcgtggtggcatccgagacctcggattgtgtggtctcctctacgctttcaccagagaaggatagccgcgtgtcggttactaaaccattcatgctgccacctgtcgctgctagctcgttgagaaatgacagctcaagcagcaacagaaaagctaagaatccccccggagacagtagccttcactgggcagccatggccctaccggccctgttttctctgatcatcgggttcgcatttggtgccctttactggaagaaacgtcaaccttcattaacccgcgcagtagagaacatccagataaatgaggaagacaatgagatcagcatgttgcaagaaaaagaacgagaatttcaggaggtgtag

SEQ ID NO: 136182 - DNA, 2100 bp, synthetic construct
  misc_feature 1..2100: note = Description of Artificial Sequence: Synthetic coding sequence
  source 1..2100: mol_type = other DNA
atgaggctgagaaggttgggccagggagggcgatgctatcggggactctggcccctgcggcacacccgtccctggagctcacctggggaatacgaatgggaatacgacgaggaggaggagaaaaatcaattggagatagagaggttggaggaacaactgtccattaacgtgtacgattataattgccacgttgacctcatccggctgctacggctggagggcgagctgaccaaagtgaggatggcccgacagaaaatgtcggagattttccccttaacggaagaattgtggctcgagtggctccacgacgagatttctatggctcaggacggcttagatcgagagcacgtctacgacctgttcgagaaagccgtcaaggactatatatgccctaacatctggttggaatacggtcagtactccgtgggcggcataggacaaaaaggggggctggagaaggtgcgtagcgtgttcgagcgcgccctttcctccgtgggtcttcatatgacaaaaggtttggctctgtgggaggcttatcgggagtttgagtccgctatcgtagaagccgccaggctggaaaaggtccactcgctgttccgccgacaactggccatccctctctatgatatggaagctacatttgctgagtatgaagagtggtcagaggatcccattcccgagtcagttatccagaactataacaaagccctacagcagctggagaaatacaaaccatatgaggaagccctcctccaggccgaggcccccaggctggccgagtaccaggcctatatagacttcgagatgaagatcggggaccctgcaaggatccagttgattttcgagagggcactggttgaaaactgtttggtccccgatctctggatccgatacagccaatatcttgacaggcaattaaaagtgaaagatctggtgttgtccgttcacaacagagctattagaaactgtccgtggactgtcgcactgtggtcccgctacttgttagctatggagcgacacggagttgatcatcaggtgatctctgtgaccttcgaaaaagctcttaatgcaggttttatccaggctaccgattatgtggaaatttggcaggcctacttagactacctaaggaggagggtggattttaagcaagatagcagcaaggaactggaggaattacgggccgcatttacaagggccttggagtacttaaagcaagaagtcgaagagagattcaacgaatcgggcgaccccagctgcgtgatcatgcagaactgggccagaatagaggccagattgtgcaacaatatgcagaaggcccgcgaactgtgggatagtatcatgactcggggcaatgccaagtatgcgaacatgtggttagagtactacaatttagagagagcacacggtgatactcagcactgccgcaaagcactgcacagagccgtgcagtgcacaagcgactaccccgagcacgtctgcgaggttcttcttactatggaacgtacagaggggtcgcttgaagactgggatatagctgtacaaaaaactgagactaggctggccagagttaacgagcagcgcatgaaagctgcggagaaagaggccgccctggtgcaacaggaagaagagaaggctgagcaaagaaagcgcgccagagctgaaaagaaggcccttaaaaaaaaaaaaaaaatcagggggcctgaaaaacggggggcagatgaagacgatgagaaggagtggggagatgatgaggaagcctttcagacccaaaaaggcagagagcagcatccctgctcttggcgcaacacaaagtgtaggagctctagcagagctcggtgggagatgtgttgtcgacgctgtggagctccattcgaggccgagggggaaggtagtttacctgaggaagggcatgcacagggagcagctagacagcagcagggccagcaccataggctatgtcaacaaccagctttacaacacgcaggggctggtcacgaagcccaggccacccttaggggcctctggggcggcggccctgaccctacccaccttcaacagccctggggatttccaagactgctcttacgtggagtctag

SEQ ID NO: 136183 - DNA, 2784 bp, synthetic construct
  misc_feature 1..2784: note = Description of Artificial Sequence: Synthetic coding sequence
  source 1..2784: mol_type = other DNA
atggccactgcagcggaaacctccgcaagcgagccggaggccgagtctaaggccgggccgaaagcagacggcgaggaagatgaagtcaaagcggcgaggacccggcgcaaagttcttagtcgggccgtcgcagcagccacttataagaccatgggaccagcctgggatcagcaggaggagggcgtcagcgaatctgatggggatgagtacgctatggcatcctctgcagagtcatctcccggagagtatgagtgggagtatgatgaagaggaggaaaaaaatcagctggagattgagcgcctggaggagcagctgtcaataaatgtttatgattacaactgccacgtggacctgatccggttgttaagactggaaggggaactcaccaaggtgagaatggcccggcagaaaatgagcgagatttttcccctgaccgaggagctatggctcgaatggctccacgacgaaatctctatggctcaggacggactggacagggaacacgtttacgatctgttcgagaaagccgtgaaggactacatatgcccaaacatatggttggagtacggccagtactcagtgggtggcatagggcagaaaggaggcctagaaaaggtacggagcgtatttgagcgtgcactgtccagcgtgggattacacatgactaaaggtctggctctctgggaagcctacagggagttcgagtctgcaatcgttgaggccgcacgtctggaaaaggtacattctctgttcagacgtcagctcgccatccctctctacgacatggaagccacattcgcagagtatgaagagtggtctgaggacccaattccagagtctgtgatccagaactacaacaaggcgttgcaacagcttgaaaagtacaagccttacgaagaggctttactccaggcagaggcccccaggctcgccgagtaccaagcatacatcgattttgagatgaagatcggggacccggctcggattcagctgatatttgagcgggcactagtggaaaactgtctggtgcctgacctttggattcgctactcacaatatctggatcgacaactgaaggtaaaggatctggtgttatcagtccataatagagccataagaaactgcccttggaccgttgcactctggtccagatacctgctggccatggagagacatggggtggaccaccaagtgatcagtgattcttctaaggaactggaggaattgcgggcagcatttacaagagcgctggagtatttgaagcaggaagtggaagagcgcttcaatgagagtggggaccccagctgcgtgattatgcaaaactgggctaggattgaagccaggctgtgtaataatatgcagaaggcgcgggagttgtgggacagtattatgactaggggcaatgccaagtatgccaatatgtggctggagtactataatctcgagcgcgcacacggggatacacagcactgtcggaaagctctgcatcgggctgtgcagtgcacatcagactatccagaacacgtctgtgaagtgctgctgaccatggagagaaccgagggatctctggaagactgggatatcgctgtgcagaaaactgagactaggctcgccagagtgaatgaacagcgcatgaaagccgcagagaaggaggcagctctggtgcagcaagaggaggaaaaagctgaacagaggaagcgcgcaagagctgagaaaaaggctctgaagaagaagaagaagattcgtggcccagagaagcgaggagccgacgaggacgacgagaaggagtggggcgacgacgaggaggagcagccttccaaacgtcgtagagtcgaaaacagtattcccgccgcaggcgagacacaaaatgttgaggtcgccgccggaccggcagggaaatgtgccgccgtcgacgtagagccgcccagtaagcagaaggagaaggctgcctccctgaagcgggatatgcccaaggtgctgcatgatagctccaaagattctattactgtgtttgtcagcaatctgccatactccatgcaggagcccgacacaaagctgcggccgctgtttgaggcatgcggcgaggtagtccaaataagacccatttttagcaaccgcggtgattttaggggatactgttacgtggaatttaaggaggagaagtcggccttgcaggcccttgaaatggataggaaaagcgtagagggaagacccatgtttgtcagcccctgtgtagacaagtctaagaatcccgacttcaaagtcttccgctattcgacttcactagaaaaacacaaactctttatttcaggcctgcccttttcctgtacgaaagaggagctggaggagatctgtaaagcacacggcacagtaaaggacctccgcctggttactaacagggctggcaaaccgaagggtttagcttacgtggagtacgagaatgaatcacaggctagccaggctgttatgaagatggacggtatgactatcaaagagaatataattaaagtcgccatttctaaccccccacagcgtaaggtgcctgaaaagcctgagaccagaaaggctccgggcggccccatgttgctcccacagacatatggggccagaggcaagggacgaactcagctgtctctactgcccagagccctgcagcgacccagtgctgctgctcctcaggccgaaaacgggcccgccgcggcacctgcggtggctgcacccgcagccactgaggccccaaagatgtcaaacgccgacttcgcaaagctcttccttagaaagtag

SEQ ID NO: 136184 - DNA, 1587 bp, synthetic construct
  misc_feature 1..1587: note = Description of Artificial Sequence: Synthetic coding sequence
  source 1..1587: mol_type = other DNA
atggagcggcatggggtagaccatcaggtgatctccgattccagtaaggaactggaagaactgagggcagccttcacccgggccctagaataccttaaacaggaagttgaggaacgattcaacgagagcggtgacccatcctgcgttattatgcagaactgggcccgaattgaagctcgcttgtgtaataacatgcagaaggctcgcgaactgtgggactccattatgacgagaggcaatgccaagtatgccaacatgtggttggagtactacaacctagaacgcgcccatggggacacccaacactgcaggaaagctttacacagagccgtgcaatgcacaagtgattaccccgaacacgtctgcgaggtgctcctcactatggaacggaccgaggggagccttgaggattgggatatagctgttcaaaaaaccgagactagactggcacgcgtcaatgaacagcggatgaaagctgccgagaaggaagcggccctggtccaacaagaagaggagaaagccgaacagcgcaagagagcacgggctgaaaaaaaggccctgaagaagaagaaaaagatccgcggaccggagaagcgtggcgctgacgaagatgatgaaaaagagtggggcgacgatgaagaggagcaaccaagcaagcggcgtcgtgttgagaactctatcccagcagccggggagacacagaatgtggaggtggccgcaggcccagccggcaaatgtgctgccgtggatgtcgagcccccgagcaagcagaaggagaaagcagcatccctaaaacgcgacatgcccaaagtgttgcacgattcaagcaaggactctatgcaggagccagacacaaagctgcgcccactcttcgaggcgtgcggagaagtggtccagatcaggcccatttttagcaataggggagactttcgaggttactgctatgtggaatttaaggaggagaaatctgccctccaagcactcgagatggaccggaagagtgtcgaaggaaggcccatgttcgtgtccccctgtgtcgataagtctaaaaaccccgacttcaaagtatttcggtattcaactagtttggaaaaacacaaactctttatttctggcctgccctttagttgcactaaagaggagttagaagagatctgcaaagcccatggcaccgtcaaagacttacgcctggtgaccaatagagctggaaagccaaagggtcttgcctacgtagagtacgagaacgagtctcaagcatcccaggccgtaatgaagatggatggcatgactataaaggagaacatcattaaggtcgccatcagcaatcccccccagcgtaaggtccccgaaaagccagagacaagaaaggcgcctggaggacctatgctgctgccgcagacatacggcgctagaggcaaaggccgaacccagctctctttgctgccccgcgcgctgcagcggccatcagctgccgccccccaggctgagaatgggccggcagccgcccctgccgtcgctgcccccgctgccaccgaggctcctaaaatgtcaaatgctgatttcgccaaactgttcctgcggaaatag

SEQ ID NO: 136185 - DNA, 390 bp, synthetic construct
  misc_feature 1..390: note = Description of Artificial Sequence: Synthetic coding sequence
  source 1..390: mol_type = other DNA
atggcaactgctgcagaaacatcagccagtgagcctgaggcagaaagcaaggcaggtcctaaagctgatggtgaagaagatgaagttaaggcggcaagaacaagacgcaaggtgctgagccgtgcagtggcggccgcgacctataaaaccatgggccctgcttgggaccagcaagaggaaggagtcagcgagagtgatggggacgagtatgccatggcctcttcagccgaaagctcaccgggagaatacgagtgggagtacgatgaggaggaagagaagaatcaactcgaaatagaaagactcgaggagcaggtgggcccaggcgttggtagcggacatctccccgtgttccaagtgcttggatcgccatgcccggggccacccccatag

SEQ ID NO: 136186 - DNA, 330 bp, synthetic construct
  misc_feature 1..330: note = Description of Artificial Sequence: Synthetic coding sequence
  source 1..330: mol_type = other DNA
atggccgcatccgcggcccgcggagctgctgcactgagacggagtataaatcagccagttgcctttgtgcgccggattccttggactgcggcaagtagccagttgaaagaacacttcgcccagtttgggcatgtgcgccggtgcattctgcccttcgataaagaaaccggattccaccgagggctcggatgggtgcagttcagctcagaggaaggcctgcggaatgcccttcaacaggaaaatcacattatcgatggtgttaaagtgcaggtgcacactaggcgacccaagctgccacagacttccgacgatgaaaaaaaggacttttag

SEQ ID NO: 136187 - DNA, 894 bp, synthetic construct
  misc_feature 1..894: note = Description of Artificial Sequence: Synthetic coding sequence
  source 1..894: mol_type = other DNA
atggctaaatggcttaataagtatttttctctgggaaattctaaaacgaagagccctccccagccacctcgcccagactaccgggaacagagacgcagaggcgagcgcccgtcccagcctccacaggctgttccccaggcctcttctgccgctagcgctagttgtggtcctgcaacagcatcctgtttttccgcttcctctggcagtttgcctgacgatagcggcagtacgtccgatctgattcgtgcataccgggcacaaaaagaacgggacttcgaggacccatacaacggtcccggttctagcctaagaaaactccgcgctatgtgccgtttggattattgcggcgggagcggggagccgggcggcgtgcaaagggctttcagcgcaagctccgcttcgggagccgctggatgctgctgcgccagcagtggagccggagccgccgcatcatcctcctcaagttctggctctccacacctataccgatcatcttccgagcggaggccagccacacctgccgaagtgcgctacatctcacccaagcacaggcttattaaagtagaatcagctgctggcggtggagccggcgatcctctgggcggcgcctgcgccggaggaagaacctggtcaccaacagcttgtggaggaaaaaagctgttgaataagtgtgctgcatcagcggctgaggaatccggtgccggcaagaaagacaaggttaccatagccgatgactattctgacccctttgatgctaaaaatgacctgaaatcaaaagccgggaagggtgagtccgctggctacatggagccatatgaggcccagcggattatgaccggtctccaagaggcatggcgacatagcccaagcgggtgctttcccgtgggtccatag

SEQ ID NO: 136188 - DNA, 1530 bp, synthetic construct
  misc_feature 1..1530: note = Description of Artificial Sequence: Synthetic coding sequence
  source 1..1530: mol_type = other DNA
atggctaagtggctgaataagtactttagcctgggcaattctaagaccaagtccccccctcagcccccacgccctgactaccgtgagcagagacggcgcggcgaacgcccaagtcagcccccacaagccgtgcctcaggctagcagcgcagctagtgcaagctgtggaccagcaaccgccagctgctttagcgcctccagcggcagtctgccggacgatagcggatctacctccgatttgatccgcgcttacagggctcagaaagaaagagactttgaggatccgtataatgggccagggtctagtttgagaaagctgcgcgccatgtgtcgcttagactattgtggaggaagcggagaacccggaggcgtacaacgcgcattcagtgcctcatccgccagtggcgccgcaggatgctgttgtgcctcgtccggagcaggcgctgcagcctcctcctcttcctcaagcggaagcccgcacttgtataggagctcaagcgagcgacgaccggccacgcccgccgaggttaggtatatttcccccaaacaccgacttatcaaggtggaaagtgctgccggtggtggggccggggatccgctcggcggggcatgcgcagggggcagaacctggtcccctactgcctgtgggggtaagaaactgctgaataagtgcgccgcgagtgctgcagaggagtctggggcaggaaagaaggacaaagtgaccattgccgacgactacagcgatccattcgacgcaaagaacgacctcaaatcgaaggcgggtaagggggagagcgctgggtacatggaaccctatgaggcacagcgcataatgactgagttccagagacaggagtctgttagatctcagcataaaggcattcagctatacgataccccatacgagcctgagggacagagcgtagattccgatagcgaaagcaccgttagcccacgattacgagagagcaagttgccccaggacgacgatagacctgctgatgagtacgatcaaccgtgggagtggaacagagtcactataccagccttggcagcccagttcaacggaaacgagaagcgccagtcttctcctagcccctctagggatagacggcggcaactccgcgccccaggagggggatttaagcctatcaagcacgggtcacccgaattttgtggaatcctcggagaacgcgtggaccctgcagtgccactggagaagcagatctggtaccacggagccattagtcgaggcgatgcagaaaacttgctgagactgtgcaaggaatgctcatatttggtgcgcaattcccaaacatcaaagcacgattactctctctcactccgcagcaatcagggctttatgcatatgaagctcgccaagacgaaggagaaatatgtcttggggcagaattcaccgccattcgactctgtacccgaagtgattcactattacaccaccaggaaactgccaataaaaggtgctgaacacctcagtctgctgtatccagtcgcagtgcgcactctgtag

SEQ ID NO: 136189 - DNA, 1080 bp, synthetic construct
  misc_feature 1..1080: note = Description of Artificial Sequence: Synthetic coding sequence
  source 1..1080: mol_type = other DNA
atgcaagcggccgccttgccagaggagattagatggctgctggaggacgccgaagagtttctggcggaggggctcagaaatgaaaatcttagcgcagtcgccagagaccatcgagatcatatcctgcgaggatttcaacagataaaggcacggtattattgggactttcagccccagggtggggacatcggccaggactcctcggatgataaccacagtggaaccttggggctgagtctgacgtccgatgcgccgtttctctcggactaccaggatgaagggatggaggatatagttaagggagctcaggagctggataatgttatcaagcaggggtatctcgagaagaaaagcaaagaccatagcttcttcggatccgaatggcagaagaggtggtgcgtggtctcccgcggactgttctattactacgcaaacgagaagtcaaaacagccaaagggtacattcctcattaagggatacggtgtgaggatggccccacacctcagaagggacagcaaaaaggaatcttgctttgaattgacctcccaggataggcgctcctatgagtttacagcgacctcccccgccgaagcacgggactgggtggatcagataagcttcctcctaaaggacctgtcctcgttgaccatcccctacgaggaagacgaggaggaggaggagaaggaggaaacttacgatgacattgatgggttcgatagtccttcctgcggctctcagtgtcggcccaccatcttgccgggttctgtgggtattaaggagcctacagaagagaaggaagaggaagacatttatgaagttctccccgacgaggagcacgatctggaagaagacgagagcggaaccaggcgtaagggggttgactatgcaagctattatcaaggactttgggactgccacggagaccagcccgatgaattatcatttcaaaggggtgaccttatcaggattttgagtaaggagtataacatgtacggttggtgggtgggggaactgaactctctggttgggatcgttcccaaagagtacctgaccacagccttcgaagtcgaggagcgctag

SEQ ID NO: 136190 - DNA, 831 bp, synthetic construct
  misc_feature 1..831: note = Description of Artificial Sequence: Synthetic coding sequence
  source 1..831: mol_type = other DNA
atgggcaactcaatgaaatctactccggctcccgctgagaggccattgccaaatccagagggactagattctgattttctggccgtgctgagcgattaccctagtcccgatatatcccctcccatctttagaaggggggaaaagctgcgcgtgattagtgacgaggggggctggtggaaggcaattagcttgtcgacaggtcgggaatcctatatccccggtatctgtgtggccagggtgtatcacggttggctgttcgagggcctcgggcgggataaggccgaggagctcctccagttgcctgacacgaaggtgggctcgttcatgatacgggaatcagaaactaaaaagggcttttattccttgtcagtccgtcaccggcaggtcaaacactacaggatattcagactgcctaacaactggtactatatctcaccacgcctaacctttcaatgccttgaggacctagtaaaccactacagcgaagtcgccgacgggctttgttgcgttctgaccactccctgccttactcaatctactgctgcacctgccgtcagggcgtcttcaagccccgtgacactacgacaaaaaacggtggactggagaagggtcagtagattgcaggaagaccctgaggggactgagaaccccctgggggtcgacgaaagtctcttttcctacggcctgcgggaatccatcgccagttatctgagcttgacatccgaggacaacactagctttgaccggaagaaaaagtccatctcactcatgtatggaggatcaaaaagaaagagctcttttttcagctctccaccctactttgaagattag

SEQ ID NO: 136191 - DNA, 882 bp, synthetic construct
  misc_feature 1..882: note = Description of Artificial Sequence: Synthetic coding sequence
  source 1..882: mol_type = other DNA
atgctccacagactctgggcctcacccgctgcccctggtaaaaaaaaggagatgggcaactcaatgaagtctacacccgcccccgcggaacgacctctgccaaatccggaaggattggatagtgactttctagccgtcctctccgattatccttctcccgacatcagccctccaatttttcgccgtggagaaaagctgcgcgttatctccgacgagggtgggtggtggaaagctatctctcttagcaccgggagagaaagctacattcccgggatttgcgtggcccgggtttatcacgggtggctcttcgagggacttggaagagacaaggcagaggaactcctgcagctgcctgataccaaggtgggaagctttatgattagagaatctgaaaccaaaaagggcttttacagtttgtccgtacggcacagacaggtgaaacactaccgtatatttcggctgcccaacaattggtattacatctctcccagactaacttttcagtgcttggaggatctggtgaatcactattctgaggttgctgacggcctttgctgcgtgcttacgacaccctgccttacccaatctacagctgcgccggccgtcagggccagctcaagccccgtgaccctccgtcagaagacagtcgactggaggcgcgtgagccgcctgcaggaggaccctgagggtacggaaaaccccctaggcgttgacgagagtctcttcagttacggcttgcgggaaagtattgcttcgtacctgtccctgactagtgaggataatacatcctttgatcggaaaaaaaaaagcatttccctcatgtacggcggaagcaaaagaaagtccagcttttttagctcacccccctatttcgaagactag

SEQ ID NO: 136192 - DNA, 951 bp, synthetic construct
  misc_feature 1..951: note = Description of Artificial Sequence: Synthetic coding sequence
  source 1..951: mol_type = other DNA
atgcttagtaagctgggtcacagccccctcgggggacttcgagcaagactaaccttccccgtctgtttactttatcacaggctgtgggccagcccagctgcccccggcaaaaaaaaagagatgggtaatagtatgaaatcaacacctgcccccgccgaacgcccactaccgaatcctgaggggctggatagtgactttctggcagtgctcagcgactatccctcacccgacatctctcccccgatctttcggaggggcgagaaactcagagtgatttccgatgaggggggatggtggaaagccatctcactgtccaccggcagggaatcttacatccctggtatttgcgtggcaagggtctaccatgggtggttgttcgaaggactggggagggataaagccgaagaattactgcaattgccagatacgaaagtcggtagctttatgattcgtgagagcgagactaagaagggtttctatagtctttctgtccgccaccgccaagtaaagcattaccggatcttcagactgcctaacaactggtactatatcagcccaaggcttacttttcagtgtctcgaagatctggtcaatcactacagcgaggtggccgatggcctttgttgcgtgctgaccacgccctgtctcacacaaagcaccgcagcaccagctgttcgggctagttcttcaccggtcactctcagacagaagaccgtggattggcgacgcgtgtcccggctgcaggaagacccagagggaacagagaatccacttggagtcgacgaatccctcttctcttatggccttagggagtctatagcttcctacttgagtctgacgagcgaagacaacacctcgtttgatcggaagaagaaatctatcagtctcatgtacggaggaagtaagaggaaatctagctttttttcctcaccaccttattttgaggactag

SEQ ID NO: 136193 - DNA, 276 bp, synthetic construct
  misc_feature 1..276: note = Description of Artificial Sequence: Synthetic coding sequence
  source 1..276: mol_type = other DNA
atggggaactcaatgaaatccactccagcccccgcagagcgtcccttgccaaatcctgaggggctggatagtgactttttggccgtgctgagcgattacccctccccggacatcagcccgccaatctttaggagaggcgagaagctacgcgttatatcagacgaaggagggtggtggaaggccataagcctgtcaacgggtcgggaatcttacattccaggtatttgtgttgcccgggtgtaccatgggtggctgttcgaggggctgggtaggtag

SEQ ID NO: 136194 - DNA, 45 bp, synthetic construct
  misc_feature 1..45: note = Description of Artificial Sequence: Synthetic coding sequence
  source 1..45: mol_type = other DNA
atgggcaactctatgaagtccacgcccgcacccgctgaacgttag

SEQ ID NO: 136195 - DNA, 150 bp, synthetic construct
  misc_feature 1..150: note = Description of Artificial Sequence: Synthetic coding sequence
  source 1..150: mol_type = other DNA
atggggaacagtatgaaaagcacgcctgcgccagccgagcgcccgctccctaatcccgagggacttgactcagatttcttagcggtactgtctgactatccatcgccagacatatcgccgccgatatttcgcagaggcgagaagttgtag

SEQ ID NO: 136196 - DNA, 477 bp, synthetic construct
  misc_feature 1..477: note = Description of Artificial Sequence: Synthetic coding sequence
  source 1..477: mol_type = other DNA
atgggcaactctatgaaatccacccccgccccagccgagcgtccactccccaatccagaggggttagacagcgacttcctggctgtcctgtctgattacccttcaccagatatctctcctccgatctttaggcggggtgaaaaattgcgagtcataagtgacgaggggggttggtggaaagctattagcctgtccaccggccgcgaatcttatatccctggcatttgtgtggcccgtgtttatcatgggtggctattcgaaggcctcggacgggacaaggctgaggagctgctccaattaccagataccaaggtgggatctttcatgatcagggagtccgagactaagaagggcttctactccttgagtgtgcggcaccgccaggtcaaacactatcggatcttcaggcttccaaataactggtactatatctctcctaggttaacattccagtgtctagaagacttggtgaactag

SEQ ID NO: 136197 - DNA, 123 bp, synthetic construct
  misc_feature 1..123: note = Description of Artificial Sequence: Synthetic coding sequence
  source 1..123: mol_type = other DNA
atgggtaactccatgaaaagtacccccgcccccgcggagaggccactaccaaaccctgagggcctcgactctgatttcctggccgtactttccgactatccttccccagacatctcaccttag

SEQ ID NO: 136198 - DNA, 786 bp, synthetic construct
  misc_feature 1..786: note = Description of Artificial Sequence: Synthetic coding sequence
  source 1..786: mol_type = other DNA
atgggttcgctgccaagtagaaggaagtcactccccagccccagtctgagcagtagcgttcagggtcaggggcccgtcaccatggaagctgagaggagtaaggccactgcagtggccctgggtagcttcccggccggtggcccagcagaattatccctgcggctgggggagcctctgaccattgtgagtgaagacggcgattggtggaccgttctgtctgaggtgagcgggcgagagtataatattccctcagtacatgtagccaaagtgagccatggttggctgtacgaggggttgtcacgcgagaaagctgaagaacttctgctgttgccgggcaaccccgggggggccttcctcattagagagtctcagaccagacggggctcctatagcctctctgttaggctgtcacgcccagcaagctgggatagaattagacactaccgaattcactgccttgacaacggctggctgtacattagcccacgcctgaccttccccagtctgcaagcgctggttgaccactacagcgagctggccgatgacatttgttgcttgctcaaggagccatgtgtactgcagcgcgccggtcctctgcccggcaaagatattcctctgccagtaaccgtgcaaagaactccacttaactggaaggagctggactcgtcactgttattcagtgaagccgctacgggggaagagagtttgctgagcgagggcctccgtgaaagtctgtctttttacatatccctaaacgacgaggccgtttccctggatgatgcatag

SEQ ID NO: 136199 - DNA, 633 bp, synthetic construct
  misc_feature 1..633: note = Description of Artificial Sequence: Synthetic coding sequence
  source 1..633: mol_type = other DNA
atggggtcgcttccatcaaggcgaaagagcctaccttccccaagcttaagtagtagcgttcaggggcagggtccagtaacaatggaggcggagagaagcaaagcgacggcagttgcactgggttcctttccagctggagggccagctgaactcagccttcgactcggggagccactgactattgtatccgaggacggggattggtggaccgtactgtccgaagttagcggaagggagtacaatattcctagtgtgcacgtcgcgaaggtgtcccatggctggctctatgaaggcttgagccgggagaaggccgaggagttgctgctcctcccaggcaatcctggcggggcttttcttattagggagagccagactcgcagaggttcttactccctaagcgttagactgtctaggcctgcatcctgggatcgcatccgacattaccgaattcactgtttggacaatggatggctctacatcagtccacgactcacttttccgtcactgcaagccctggtggatcactacagtgaagggtggccggcaccctggcaaggatacacccccacatgtgattgcgccgaagacaccacacaactcgagcgtgctgggcagctgccacccgtgttttag

SEQ ID NO: 136200 - DNA, 3840 bp, synthetic construct
  misc_feature 1..3840: note = Description of Artificial Sequence: Synthetic coding sequence
  source 1..3840: mol_type = other DNA
atgaccctcaccgaacggctgagagaaaagatcagccgcgccttctacaaccacggactgttgtgcgcaagctaccccattcccataatcctgtttacgggtttctgtatcctggcttgctgttatccgttgctcaagctcccactccccgggactgggcctgtggaattcacaacaccggttaaggactacagcccgcctccagtagacagcgaccgcaagcaaggtgaacccacagaacagcctgagtggtacgttggtgccccggtagcatatgtccaacagatattcgtgaaatcttctgtattcccctggcataagaatctactagctgtggacgtcttcaggtctcctttaagcagggctttccaattagtggaggagattcgcaaccacgtgcttcgagattctagtgggattcgttctttagaggagctctgccttcaggtcaccgatttgctgcctggcctacgcaaactcaggaacctgctccccgaacacgggtgcctgcttctctcacctggtaacttttggcaaaatgactgggaacgcttccatgccgaccctgacatcatcggcacgattcatcagcatgaacctaaaaccttacagaccagcgcaacccttaaagacctgttatttggagtcccgggtaaatatagcggggtgtctttgtacacccggaaacggatggttagctacacaatcacattggtttttcagcactatcacgcgaagtttctgggttctctgcgagcccgactgatgctgctgcacccttcccctaattgctctctgcgggctgaatcactggtgcatgtgcacttcaaagaggaaatcggcgtggcagagctaattccacttgtaacaacatacataattcttttcgcatacatttatttctcaactaggaaaattgacatggtgaagagtaagtggggcctggcccttgctgcggtggtaaccgttctgtcctctctgttgatgtctgtgggactttgcacactctttggcctgacccctacactgaatggaggtgagatctttccctatctagtggttgtcatcggactggaaaacgtcctggtgctgactaaaagcgtggtgtccacgcctgtcgaccttgaagtcaagctgcgtatcgcccaggggctcagctctgaatcttggtccatcatgaagaacatggccacggagcttgggatcatcctcatcggatattttaccctggtgccagccatccaggagttttgcctattcgcagtggtggggcttgtttcagacttttttctgcaaatgctgttcttcaccactgtgctctcaatcgacatcaggagaatggaactcgcggacctcaataaacggctgcctcctgaggcctgcctcccgtcagccaaaccagtagggcagcctacccgatacgagcgtcagctggccgtcaggcctagtactcctcacaccatcaccctacagccttccagttttcgcaatttgcgcttacccaaaagattacgtgtggtgtattttctcgctcgaaccaggttggcccagagacttatcatggcagggactgttgtctggatcggcattttagtttatacagacccagccgggttgcgcaattaccttgccgcacaggtgaccgagcagtcacctctgggcgaaggagcgttggcaccaatgccagtgccttcaggaatgctaccaccctcacatccagatcctgccttctccatattcccacccgatgccccaaaactccctgaaaatcagacatctccaggcgagtccccagagcgggggggaccagcagaggttgtacatgacagccccgtgccagaagtgacttggggccccgaggatgaggagctttggcggaagctgagctttcgacactggccaacccttttttcctattacaacatcaccctagctaaacgatacatcagccttctccccgtcatacccgttacgctgagactgaaccccagagaggcgctggagggcagacatcctcaggacgggcgttcggcctggcccccaccaggtcctatcccagccggtcactgggaggccggacccaagggacccggcggcgtgcaggcacatggtgacgttaccttatataaggttgccgcgctcggcctggcgacgggtattgtgcttgtcctgttattgctgtgcctttacagggtattgtgcccgcgtaactacggccagctgggaggcggacccgggagaagaagacgcggggagctgccatgcgatgactacggatatgctccacccgagactgaaattgtacctttggtactgcgggggcacctaatggacatcgaatgcctggcctctgacgggatgctgctcgtttcctgttgtttagccggtcatgtgtgtgtgtgggatgcccagacaggcgattgtttgaccagaattcccagaccaggcaggcagagacgagatagtggagtaggcagtgggctcgaagctcaggagtcgtgggagcgcctctctgatgggggcaaagctggtcccgaggagcccggcgactccccgccgttacggcaccgaccgcgcggtccccctccaccatctctgttcggcgatcaacctgacctgacctgcttaatcgacaccaacttctcagctcagcccagaagcagccagcccacgcagccggagcctcgccaccgcgctgtctgtggtagaagtagggatagcccaggctacgatttctcctgtctggttcaaagagtgtaccaggaagaaggcttggctgcagtgtgcacccccgcccttagacccccatctccaggacccgtgctgagtcaggcgccagaggatgaagggggaagcccggagaaagggtctcccagtctcgcctgggccccatccgccgagggatcgatctggtcccttgaacttcagggtaatcttatagtcgtgggccggtcctccggaagactggaagtctgggatgcgatcgagggagtgctgtgctgcagctctgaagaggtatcttctggcatcaccgctctggtattcctggacaaaaggatcgtggctgcacggctgaacgggtccctggacttcttctctctggaaactcatactgccctctccccactgcagtttaggggaacaccaggaaggggcagctccccggcgagccctgtctattcttcaagcgacacagtcgcttgtcacctgacccacactgtgccttgcgcgcatcagaaacctatcactgcccttaaagcggccgccggacgtcttgttactggcagccaggatcatacactgagagttttcaggttggaggattcttgctgcttgtttaccctgcagggacacagtggggccataactaccgtgtacattgatcagactatggtgctggcctcaggcggccaagatggcgctatttgtctgtgggacgtcttgacagggagccgtgtttcccacgtttttgcccacagaggagacgttacaagcctgacctgtacaacatcttgtgtcatatctagtggcctcgacgacctgatcagtatctgggaccggagcaccgggattaaattttacagcatacagcaagatcttgggtgcggagcctccttgggtgtgatctcagataatctgctggtcacgggcgggcaggggtgcgtatcattctgggacttgaactacggagatctcctgcagaccgtgtatctcgggaagaacagcgaggcccagcctgccagacagatcctggtactggacaatgcggcgattgtctgcaactttggaagtgagctctctctggtgtatgttccatccgtcttagagaaattggactag

SEQ ID NO: 136201 - DNA, 2316 bp, synthetic construct
  misc_feature 1..2316: note = Description of Artificial Sequence: Synthetic coding sequence
  source 1..2316: mol_type = other DNA
atgaccctgaccgagcgactgagagagaaaattagccgggccttctacaatcacggcctgctctgtgcatcttacccaattcctattatactgttcacagggttctgtatcttggcatgctgttaccctctgctgaaactgcccttgcctgggacagggcccgtcgagttcaccacccctgttaaggactactcgcctcctccagtcgattcagatagaaaacagggggagccaactgagcagcccgagtggtatgttggcgctcccgtggcttatgtgcaacagatcttcgtgaaaagctccgtgtttccttggcacaagaatctcctggccgtggacgtcttccggtcaccacttagccgggcctttcagctagttgaggagatccgcaaccatgtcttgcgagattcatcaggtatccgcagcctggaggaactatgcctgcaggtcacagatctgctccctgggcttcgcaagctccgaaaccttctgcctgaacacgggtgtctgctgctgtctcccggtaatttttggcagaacgactgggaacgtttccacgccgatccagacatcattggaaccattcaccagcacgaacctaaaacgctgcagacctcagctaccctgaaggacctgctgttcggagttcccggaaaatatagtggcgtgagtctgtacacacggaaacgtatggtatcctataccatcaccttagttttccagcactaccacgcaaaattcttgggatccctgcgggcgcggctcatgctgctgcatcctagcccaaactgtagtctacgcgctgagtctctggtgcacgtgcatttcaaagaggagataggggtagcagagctcatacctcttgttacaacttatatcattttgttcgcttacatctacttcagcacaagaaagattgacatggttaagtccaagtggggactggccttggctgctgtggtgaccgtcctttctagtcttctgatgtccgttggtctttgcacattgtttgggctgacacccaccttaaacggcggagaaatttttccgtacctggtcgtggtgataggtctagaaaatgtgttggtgctcactaagtcagtggtctctaccccagtcgatctggaggttaagttgcggattgcacagggcctcagcagcgagtcgtggtccattatgaaaaatatggcaacagagcttggtattatcttgatcggctactttaccctagtcccagccatccaggagttctgtctgttcgcagtggtgggcctggtttcagacttctttctccaaatgctgttttttaccacagtgctctccatcgatataagaagaatggaacttgcagatttgaacaaacgattgcccccagaggcctgtctgccctctgctaagcctgtcggccagcctactcgttatgagcgctcttctggcaggctggaggtttgggatgccatcgaaggagtgttgtgctgctcatctgaggaagtgagttcaggtataactgcactggtgttcctggacaagaggatagttgccgcgcgtttgaacggctctctggacttcttcagtctcgagacacacaccgccctgtcccccttacagttccgcgggactcccggcaggggatcttccccagcttcgccagtgtatagcagctctgacaccgtggcttgccacctgacacacacggttccttgtgcacatcagaagcccataaccgctctgaaagctgccgccggccggctcgtgaccggtagtcaggatcacacattgcgtgtttttagactcgaagattcttgctgccttttcacattgcagggccacagcggtgccattaccaccgtgtatattgaccagactatggttctggctagcggggggcaggacggcgcgatctgtctctgggacgttttgaccgggtctagagtgtctcatgttttcgcgcatcgaggagatgtcacatctctgacttgtactacctcctgcgtgattagttcaggattggacgatctcatttctatttgggatagaagcaccggcattaagttctattctatccagcaggatctgggatgtggagccagcctgggcgtgataagcgataatttactggtcacggggggccaaggctgcgttagtttctgggacctgaattacggagacctcctgcaaaccgtgtacctggggaagaactcagaggcccagccagctaggcaaatcctggtcctggataacgcagcaatcgtctgtaactttggctccgagttaagcttagtatatgtgcccagcgtgctggagaaactggactag

SEQ ID NO: 136202 - DNA, 2718 bp, synthetic construct
  misc_feature 1..2718: note = Description of Artificial Sequence: Synthetic coding sequence
  source 1..2718: mol_type = other DNA
atgacactcaccgaaaggctgcgggagaaaattagccgtgctttctataaccacgggctcctgtgcgcgtcttacccgataccaattattctaattggatacttcacacttgtcccggcaatacaggaattctgcctgtttgcagtggtgggactggtttcagacttcttccttcagatgctattttttactacggtgctgtccatcgatatacgaagaatggaactcgctgaccttaacaagcggctcccacctgaagcttgcctaccctcagcgaagccagttgggcaacccacacggtacgagcgtcagctggcggtgcgtccgtctacgccacatacaattaccctgcaaccctctagcttccggaacctgagactgcctaaacggctgcgggtggtatacttcctcgcccgaactcgcctggcccagcgactcatcatggctggcacggttgtgtggattggaattctggtgtatacagatccggccgggttaaggaattatctcgcggcacaggtcacggagcagtcccctttgggtgagggcgcccttgcacccatgcccgtgccatccggcatgctgcctccgagccacccagatccggcattttctatttttccgcccgatgcgccaaaacttcccgaaaaccagacttcccccggtgaaagtccggagagaggtgggcctgctgaggtggttcacgacagtcccgtgcccgaagtgacatggggaccggaagatgaagagctttggaggaagctgtcatttaggcattggccaactctgttctcatattataacatcaccctggctaaaagatacattagcctcctgcccgtcattcctgtcaccctacggctcaaccctagagaggctctggagggccgacacccccaggacgggaggtccgcatggcctcctccaggccccatccctgccggccattgggaagctggaccaaaaggcccaggaggggtgcaagcccacggcgacgttactctgtataaggtcgctgcccttggactcgccactgggattgtcctggtcttgcttctcctctgcctgtatcgagtcctctgtcctaggaactacggccagctgggtggggggcccggacgtcgtcgccgtggtgaactgccctgcgacgactatggttatgctccccccgaaacagagatcgtaccactcgtacttcgaggccatctgatggacatagagtgccttgcatcagacggaatgctgctggtgtcttgttgtttggcggggcacgtttgtgtatgggatgcccagacaggcgactgcctgacgagaatcccaagacccgggcagcgcagggacagcggggtcggaagtggactggaagcgcaggagagctgggaacgtctgagtgatggcggtaaagcggggcccgaggagcccggagattccccacctctgcgccaccggccccgcggccctccccctcccagcttgtttggagatcaacccgacttgacttgcctgattgatactaatttttccgcacaaccacgatcttctcaacccacccagcccgagcctcgacaccgcgccgtgtgcggacggtcacgggacagccctgggtacgatttcagctgccttgtacagagagtgtaccaggaagagggcctggcagctgtgtgtaccccagctctccgccccccatctcccggtcccgtgctttcccaagcccctgaggacgaaggcggctcccccgagaaagggtctccttcgttggcgtgggcccccagtgctgaaggatccatttggagcctggaattgcagggtaatttgattgtggtcgggagatcttcgggacgccttgaggtgtgggatgctatcgaaggcgtgctgtgctgcagctccgaggaggtcagttctgggatcacagccctggtgtttctagataagcggatcgtagccgcacggcttaatggtagtctcgacttcttcagcttggaaacacatacggcactatcacccctccagttccgcggaacacctgggcgcggtagtagccccgcttcccctgtgtacagctcctctgacacagttgcctgccacctgacccatacagttccttgcgcacatcagaaaccaatcaccgccctgaaggctgccgcgggcagactcgtgactggctctcaggaccacacgctgcgcgtcttcaggctagaagatagttgctgcctctttacattgcagggtcacagcggggcaatcaccaccgtgtatatcgatcagaccatggtgctagcaagcggcggtcaggatggggccatttgcctgtgggacgtactgaccgggagtagagtgtcacatgtgttcgcccacagaggggatgtcactagcctcacctgcacgacatcgtgcgtgatctcctctggcctggatgaccttatctcgatctgggatcgctccacaggaattaagttttattccatccagcaggatctgggttgtggcgcctctcttggcgtgatctccgacaaccttttggtcaccggcgggcaggggtgtgtatcattttgggacttgaactacggcgacctgctgcaaactgtgtatcttgggaaaaatagcgaagcccagcctgcacggcagatcctcgttctggacaatgctgccatagtgtgcaatttcggatctgagctgtcccttgtctatgttcccagtgtactggagaaattggattag

SEQ ID NO: 136203 - DNA, 1059 bp, synthetic construct
  misc_feature 1..1059: note = Description of Artificial Sequence: Synthetic coding sequence
  source 1..1059: mol_type = other DNA
atggtgaaatcaaagtggggccttgcgctcgctgcagtcgtgaccgtgctgtcgagtctcctgatgagcgtcgggctctgcaccctcttcggccttacgccgaccttaaatggaggcgagatctttccctacctggtggtagtgattggcctcgaaaacgtcctcgtgcttacgaagagtgtcgtcagcacccccgtggatctcgaggtaaaactgcgaatcgcccagggactcagcagtgagagttggagcatcatgaaaaatatggcaacagagctaggcatcatcctaattggctacttcacactggttccggctattcaggaattttgcctgttcgcagtggtcgggctcgtgagcgattttttcttgcagatgttgttctttactaccgtgctaagcatcgacattagacggatggaactagcagacttgaacaagcggctgccccccgaagcatgtttgccctccgccaagcctgttggacagccgacacgctacgagagacagttggcggttcgtcctagtactccacacactattacattgcaacctagcagctttcgcaatctacggctccctaagaggcttcgagtcgtctattttctagccccaacaggcgcacacacctgttgggctctgggcagcaggacacaaggtccccggtggggagcgggaccttggcgtagacacgcggtgcagggcgggggtgccggccctggccatcgccacagactcggggccgcagcagctctaccactccccagggccatgccggcccagctgagagccgcgggctggtgggccagagcagcagaggcccgtggtgccgccctgcgcaggctacggctctgtgccacccgtgacggggatagggccgcttgtgccgccaggccaccgcatggtcaccgtgtgcctgggcagaggcggcacgccgccggcgagttactgccaggtaggccaaggctcagggtggggagggcagataggggactgccgaacgctcattccgcgcccagacaagctgcacctggacaatggaggggccagcgcgcatag

SEQ ID NO: 136204 - DNA, 411 bp, synthetic construct
  misc_feature 1..411: note = Description of Artificial Sequence: Synthetic coding sequence
  source 1..411: mol_type = other DNA
atgactctgacagaaaggttgcgggagaaaatcagccgcgcattttataaccacggactcttatgtgccagttatcccatccccatcattctcttcacaggtttttgtatcctggcttgttgttaccctcttcttaaactgcccctccctggcacaggaccagttgaattcacaaccccggtgaaagattacagccctccacccgtggatagtgaccgtaagcagggcgagccaaccgagcagccagaatggtatgtgggagcccccgtggcgtacgttcagcaaatcttcgttaaatccagcgttttcccatggcacaaaaatctattggccgtcgacgtatttagatcccccctctccagggctttccagcttgtcgaggagattagaaatcacgtcctgcgcgactag

SEQ ID NO: 136205 - DNA, 3072 bp, synthetic construct
  misc_feature 1..3072: note = Description of Artificial Sequence: Synthetic coding sequence
  source 1..3072: mol_type = other DNA
atgctgcttcatcccagccccaattgctcccttagggcagagtcgctcgtgcacgtgcattttaaggaagaaataggcgtggccgagcttatacccctggtgacaacctatataattctgtttgcctatatctacttctcaacccgtaagattgacatggtcaaatccaagtggggactggcccttgccgctgtagtaaccgtcctgtcctcccttttgatgagtgtcggcctgtgtacacttttcggactgactccaactttgaacggaggggaaatttttccctacttagtagttgtcatcggattagagaatgtgttggtgcttaccaagtccgtggtaagtaccccggttgatctggaggtgaagttaagaatcgctcaggggctgtcatcagaatcctggagcattatgaagaatatggcaacagaactcggcatcatcctaattggttattttaccctggttccagctatccaggagttttgtctgttcgcagtcgtcggccttgtcagcgactttttcctgcaaatgttgtttttcacaaccgtcctgtctatcgacattcgcaggatggagctggcggacttgaataagcggctgccaccagaagcttgcctgcccagtgccaagccggtgggtcagccaactcggtacgagaggcagctggctgttcgaccttcaacaccccatactattaccttgcagccctcaagtttccgaaatttaaggttgcctaaaaggctcagagtggtgtattttctggcccgaactcgcttggcccagagacttatcatggcagggaccgttgtgtggattggaattttggtctacacggatccagcgggtctccgcaattatctggcagcacaggtaactgaacagtccccacttggtgagggtgctctggcgcccatgcccgtgccatctggaatgctccccccaagccaccctgaccccgcattctcgatctttccgccagatgcacctaagctgccagagaaccaaacttcacctggggagagtcccgagagaggtggacccgcagaagtggttcacgattcccccgtcccagaggtgacatggggacccgaagatgaggaactttggcggaagttgtcttttcggcactggccaaccttgttctcttactacaatataacactggcaaagcgctacatctcactgctgccagtaattccagtcacactacgactcaacccccgtgaggccctggaaggccgacacccccaggatggacggtccgcgtggcccccaccaggtcccatcccagccgggcactgggaggcgggacccaaaggacccggtggggtccaagcgcatggtgacgtcaccctgtacaaagttgccgccctgggactcgccacaggtatcgtgctcgtgctgctgctgctgtgcttatatcgagtgctatgtccacggaactatggtcaactgggaggcgggcccggtcggaggagaagaggggagctgccatgcgatgattacggctacgcacctcctgaaaccgaaatagtgccactggtcctgcgtggccacctgatggacatcgagtgcttggcctcagacgggatgctgctcgtgagttgttgcctcgcgggccacgtgtgcgtttgggatgcacaaactggagattgcctgactaggatccctagaccaggtcaaagaagagattcaggcgttggctctggattagaagcccaggaatcatgggaacggctcagcgacggtgggaaagcaggaccggaggaacctggggacagcccccccttgcggcatcgcccccgcggacccccacctcctagcttgttcggcgatcagcctgacctgacctgcctgatcgacacaaacttttctgcccagcccagaagttcacagccaacccagcctgaaccacggcatcgagcggtgtgtggacgctcaagggactcccctggctacgacttctcatgcttggttcaacgagtctatcaggaggaaggactggctgcagtttgtacaccagcccttcggccaccgtcccctggcccggtgctgtcccaggctcctgaagacgagggcgggtcccccgaaaagggcagtccttccctggcctgggctccttcagctgagggatccatctggagcttagagctccagggaaatctgatcgtcgtcgggcgctcgagcgggagactggaggtgtgggatgccatcgaaggtgtgctgtgctgcagctcggaggaggtcagtagcgggatcaccgctttagtgttccttgacaagaggatcgttgccgccaggctgaacgggtccctggacttttttagccttgagacgcatactgccctgtctcctttgcagttcagggggacaccaggacgtggttcgtcaccagcgtcacctgtgtattcctctagtgacaccgtggcctgccacttgacccacactgtgccatgcgcccaccagaagcccatcaccgcgctcaaggctgccgcgggcaggctggtaacaggctcccaggaccacaccttgcgcgtgtttaggctcgaggatagttgttgtctctttacactacaagggcactccggggccatcacgacagtttacattgatcagacaatggtgctcgcctccggaggacaggatggagccatctgtctgtgggatgtgctaacaggaagtagagtttctcacgtttttgcacaccgcggtgacgtgacaagcctgacttgcacaacctcttgtgtgatttcctctggtctggacgacctaatttcaatctgggacaggagcaccggcataaagttttacagcatccagcaagatctggggtgcggggcaagtctcggggtgatctccgataacctactggtaactggcggtcaggggtgcgtatccttttgggatcttaactatggagatctcctgcagaccgtgtatctgggcaaaaatagcgaggcacagccagcaagacagattctcgtcctggacaacgctgctatcgtgtgtaattttgggtctgagctcagtctggtgtatgtgccctcggtgcttgagaaattggattag

SEQ ID NO: 136206 - DNA, 267 bp, synthetic construct
  misc_feature 1..267: note = Description of Artificial Sequence: Synthetic coding sequence
  source 1..267: mol_type = other DNA
atgacgctcacagagagactgagggagaaaatctcaagggcgttctacaaccacgggctcctgtgtgcaagctaccctatccccatcatactctttacgggtttttgtatcctggcctgttgttatccactgctaaagttgccacttcccggtacaggtcctgtcgagttcacaacccccgtgaaagattattcccctcctcctgttgacagtgatagaaagcaaggagagcccactgagcaaccggagtgggtgggcactcgctag

SEQ ID NO: 136207 - DNA, 399 bp, synthetic construct
  misc_feature 1..399: note = Description of Artificial Sequence: Synthetic coding sequence
  source 1..399: mol_type = other DNA
atgactctcactgagcgcctccgcgaaaaaatttccagagccttttataaccacggtctgctgtgcgcctcttaccccattcccatcatactgtttacaggcttttgtattcttgcctgttgttatcctcttctaaaactgcccctgccagggacaggccctgtggaattcaccaccccggtgaaggattactcccctcccccagtggattctgaccggaaacagggagagcccactgaacaaccagaatggtacgtgggcgccccggttgcctatgtccagcagatcttcgtcaagtcgtccgtgttcccatggcataaaaacttgttggctgtggatgtgttcagatcccctctgtcaagggcgttccagctggtggaggaaatcaggaatcattag

SEQ ID NO: 136208 - DNA, 2661 bp, synthetic construct
  misc_feature 1..2661: note = Description of Artificial Sequence: Synthetic coding sequence
  source 1..2661: mol_type = other DNA
atgaagaacatggccaccgaactcggaatcatcctgatcggatacttcacccttgtgcctgccatccaagagttctgcctgttcgctgtagttgggcttgtgtctgacttttttctacagatgctgttctttacgactgttctgtccattgatatccgacgcatggagcttgcagatctcaataagagactcccccccgaagcttgcctcccttccgccaagcccgttggacaaccgactcgctacgagcgccagctggccgtgcgtccaagtaccccacacactattacactccagcctagtagttttaggaatctgcgtctccccaagcgcttaagggtggtatacttcctggcccgcacgcggctcgcacagagattgattatggccggtaccgtggtttggatcggaatcttagtgtatacagatcctgccggcttgcgtaactacctcgccgctcaagtaacggagcagagccctttaggagaaggcgcactggctccaatgccagtaccatcaggtatgctgcccccttcacatcccgatcctgcgtttagcattttcccaccagatgcccccaaactacctgagaatcagacgagccctggcgagtcccctgaaaggggcggaccagcggaggtcgttcacgatagtccagtgccggaggtcacatggggccccgaggatgaagagctgtggcggaagctgtctttccgccactggcccactttatttagctactacaacataacactggccaagcgatatatttcgctgcttccagtgatccccgtcacattgcgattgaatcccagagaagccctggagggacgacacccccaggatggcagaagtgcatggccacctcctggcccaattcctgccgggcactgggaggccgggcccaaaggccccggcggagtgcaggcacacggcgacgtcacattatataaggtggctgcacttggcctcgctactggtattgtgctggtgctactgctgctgtgcctgtaccgcgtgctgtgcccacgcaattacggccaactcggggggggccccggccgacggagacggggggagttaccgtgcgacgactatgggtatgccccgcctgaaacagagatagttcctctggtgttgcggggacatctcatggacattgagtgcctggccagtgacggcatgcttctggtgagctgttgcttagcagggcacgtgtgtgtgtgggacgcacagaccggggattgtctgaccaggatcccaagaccggggcagaggcgcgatagcggtgtgggaagcggcttggaagcgcaggaatcttgggaacgactgtctgacgggggcaaagcaggccccgaggaacctggtgattcaccacccctccggcatcgccctagggggccacctccgccttctttatttggagaccagcctgacctcacgtgcctgatagatacaaacttctctgcccagccacggagctctcagcctacccagcccgaacccagacatcgcgcggtatgcgggagaagtagagatagcccgggttacgacttctcttgcttggtgcaaagagtgtaccaggaggagggactcgctgccgtgtgcacccctgctctgagaccaccttcacccgggcccgttctgagtcaggctcctgaggacgagggaggctctccagaaaagggctcacccagcctggcatgggctccatccgcagaaggatcgatttggtctctcgaactccaagggaatctaattgttgtggggagaagctcaggtcgccttgaggtgtgggacgctattgaaggagtcttatgctgttcctcagaggaggtgagctcaggaatcactgccctagtctttctagacaagaggatcgtcgcagctcggttgaacgggtcactcgacttcttctcgcttgagacccacactgcgctgagtcctctacagtttcgggggacgcccgggaggggtagctcacccgccagtccagtctattcctcaagcgacaccgtggcatgtcatctcacccacaccgttccatgtgcccaccagaagcccatcacggcgctgaaggccgccgcaggccggctggtaacaggatcacaggaccataccctgagagtgttccgactggaggatagttgttgtctcttcacactgcagggtcatagtggcgctatcacaactgtttacattgatcaaaccatggtactcgcctctggagggcaggacggcgccatctgtctctgggatgtcctcaccggctctagagtgagccacgtgttcgctcataggggagacgtgacctctctcacgtgcaccaccagctgcgttatttccagcggattggatgacctgatctccatctgggaccgatcaacaggcatcaagttttattctattcagcaagacctgggctgcggcgccagcctgggcgttatttctgacaacttgctggtgaccggcggccaaggatgcgtctcgttttgggatctgaattatggtgacttgttacagacagtgtatctgggcaaaaatagcgaagcccagccagctcggcaaattctggtcctcgataatgccgctatagtctgtaactttggatcggaactgtctctggtgtacgtgccttccgtgctcgaaaagcttgattag

SEQ ID NO: 136209 - DNA, 792 bp, synthetic construct
  misc_feature 1..792: note = Description of Artificial Sequence: Synthetic coding sequence
  source 1..792: mol_type = other DNA
atgctcctcgcttgggtgcaagctttcctagtgtctaatatgcttctcgcggaggcctacggtagcggcggctgtttttgggacaatggacatctctatcgagaggatcagacgagtccagctcccggcttgagatgcttgaattggttggacgcacagtccggcctggcgagtgctcccgtttccggcgcgggaaatcatagttattgtaggaacccggacgaagatcctcgcggaccctggtgttacgtgtccggcgaagccggtgtgcccgagaagaggccttgtgaagatctgcgctgccccgagacaactagccaggcactcccggcctttacgacagaaattcaagaagcctccgagggtcctggggcggacgaagtccaggtgttcgctccagctaacgctctgccagctaggtccgaggccgccgccgtgcagcccgtgatcggcatcagtcagagagtcaggatgaacagcaaggagaaaaaggatcttggaacattagggtacgtactggggatcaccatgatggttatcattattgcgataggcgcaggaattatcctgggttacagctacaagaggggcaaggatctgaaggagcagcacgaccagaaggtctgcgagagagagatgcaacgcatcaccctgcccctgagcgctttcaccaaccccacctgcgagatagtcgatgaaaagaccgtggtggtgcataccagccagacaccagtagatccccaagaggggactacccctctcatgggacaggccggcacccctggggcttag

SEQ ID NO: 136210 - DNA, 1176 bp, synthetic construct
  misc_feature 1..1176: note = Description of Artificial Sequence: Synthetic coding sequence
  source 1..1176: mol_type = other DNA
atgtacagcatgatgatggaaacggaccttcacagtccaggcggcgcccaggcacctaccaatctcagtggtcctgcaggcgcaggcgggggcggtgggggtggtggggggggcggcggaggcggaggcgcgaaggccaaccaggatcgggtgaagcgaccgatgaacgctttcatggtttggtcacgagggcagcggcgcaagatggcccaagagaaccccaagatgcacaactccgaaatctcaaagcggctcggtgcagaatggaaggtcatgagtgaggctgagaagaggccatttatcgacgaggctaagcgtctccgagctctccatatgaaagagcaccccgactataaataccgaccgagacggaaaactaagacactgctgaagaaagacaagtatagtcttgccggcggccttttagcagcaggagccggcggcggaggtgccgccgtggccatgggggtgggcgtaggtgtgggcgccgcagcagtgggccagaggttagagtcaccaggaggagcagccggtggtggctatgcccatgtgaacggatgggctaacggagcatatcctgggagtgtcgccgccgcggccgccgctgctgctatgatgcaggaagcgcaattggcctacggtcagcaccccggggcaggcggagcccatccccacgctcatcctgcacaccctcatcctcaccacccacatgcccacccacacaatcctcagcctatgcatcgttatgatatgggcgctcttcagtactcgccaattagcaactctcagggctacatgagtgcctcaccaagcgggtatggaggacttccctatggcgctgccgccgcggccgctgccgcagctgggggggcgcatcagaattccgcggtggctgctgcagctgccgccgcagccgcatctagtggagccctaggcgcactcggttcactggtgaagtcagaaccttccggctctcccccagctccagcacactctcgggcaccatgtcctggagatctcagggagatgatatcgatgtacttaccagccggtgaagggggcgaccccgcagccgctgcagctgcggctgctcaaagtcgcctgcattccctacctcagcactaccagggggcaggcgccggcgttaacggcaccgtgcccctgacccacatctag

SEQ ID NO: 136211 - DNA, 1326 bp, synthetic construct
  misc_feature 1..1326: note = Description of Artificial Sequence: Synthetic coding sequence
  source 1..1326: mol_type = other DNA
atggtccaacaggccgagtccctggaggctgaaagcaatttaccccgggaagccctcgacaccgaagagggagaattcatggcttgcagtccagtagccctggatgaatccgaccctgattggtgcaagaccgcttctggtcatatcaagcgtcccatgaacgccttcatggtatggtccaaaattgaacgtcggaagatcatggaacagagtcctgacatgcacaacgccgaaatttccaagcgattggggaagaggtggaaaatgctgaaggacagcgaaaagatcccttttatcagggaggccgagaggcttcgtttgaaacacatggctgattaccccgactacaaatatcggcctaggaagaagcctaagatggaccctagtgctaagccctccgctagccagtcgccggagaagtcagctgctggtgggggaggaggctccgcaggcggtggagccggcggagctaagacctccaagggaagttcaaaaaaatgtgggaagcttaaagctcctgcggccgctggagccaaagcaggagccgggaaggcagcgcagtctggcgactacgggggtgcaggcgacgactacgtccttggctccttacgggtaagcgggtcgggtggcggcggcgccggtaagacagtgaagtgcgtattccttgacgaggatgatgatgacgacgacgacgacgatgaactccaattacagatcaaacaggaaccagacgaagaggatgaggagcccccacatcagcaactgctgcaaccaccaggtcagcagccatcacagttgcttcggagatacaacgtcgcaaaggtgcccgctagtcctacactgtcaagctcagccgagtctcctgagggggcctcactttatgatgaagtgcgcgccggcgctacctctggcgcaggcgggggctcgcgtctatactactcatttaaaaacataacaaaacagcatccgccaccccttgcccaacctgctctcagccctgcttcttctaggagcgtgagtactagctcctcatcgagttcaggtagttcatctgggagcagcggcgaggatgccgatgatctcatgttcgatctgtctttaaacttctcccagtccgcccactccgcgtccgaacaacaacttggagggggcgctgcagctgggaacctgagcctcagcttagtggacaaggacctggacagtttttctgagggaagccttggctcacactttgagtttcctgactactgtacacctgagttaagcgaaatgattgcaggagactggctcgaggccaatttctccgacctcgtattcacctactag

SEQ ID NO: 136212 - DNA, 948 bp, synthetic construct
  misc_feature 1..948: note = Description of Artificial Sequence: Synthetic coding sequence
  source 1..948: mol_type = other DNA
atggtacaacagcgcggtgcccgcgccaagagggatggcggtccacctccaccagggccagggccagccgaagagggtgctagagaacccggatggtgtaaaactccctccggccatattaaacggccaatgaacgcttttatggtatggtcccagcatgaaagacgaaagattatggatcagtggcccgatatgcacaacgcagaaattagtaagagactaggacgacgttggcagctgctgcaagactcggaaaaaattccattcgtaagagaggctgaaagactgagactgaagcatatggcggattatcccgattataagtaccggccccggaagaaaagtaagggtgcaccagcaaaggcccggcctagaccaccaggaggcagcggcggaggatcccggctcaaacccgggccacagttgcccgggagaggcgggcgccgggctgccgggggacccttaggaggaggagctgcagcgcctgaggatgatgatgaagacgacgatgaggaactgctggaggttcgcttggtagagacaccaggcagggaactctggcgcatggttcccgccggccgagccgcccgcgggcaggcagaacgtgcccagggccctagcggagagggagctgccgctgcagcagcagctagcccgaccccctcagaggacgaggaacctgaagaggaggaggaggaagcagccgctgctgaagagggggaggaggagaccgtcgcttccggagaggagtcattaggcttcctttccaggctccccccggggcctgctggtttagactgctccgctcttgaccgggaccctgacctgcaaccccctagtggaacatctcacttcgagttcccagactattgtacccctgaagtgactgaaatgatcgccggcgactggcggcccagtagtattgcagatcttgtgtttacctactag

SEQ ID NO: 136213 - DNA, 948 bp, synthetic construct
  misc_feature 1..948: note = Description of Artificial Sequence: Synthetic coding sequence
  source 1..948: mol_type = other DNA
atggtgcaacagaggggagcccgtgcaaaaagagatggcgggcccccaccaccaggacctggtcccgcagaggaaggcgcccgggagcctggttggtgcaagactccaagtggtcacatcaagcgcccaatgaatgctttcatggtttggtctcaacatgagagacgcaagatcatggaccagtggcctgacatgcacaacgctgaaatctcgaaacggttaggtcgccggtggcagctgttgcaggattcagagaagatcccattcgttagagaggctgagcgactgcgacttaaacacatggctgattatccagactacaaataccgccctcggaagaaatcaaaaggcgcccccgctaaagcccgaccacgcccccccggaggaagcggcggggggtcacggttgaagccgggaccccaactacctggccgggggggtcggagggccgcaggcgggcccctgggaggaggtgctgctgcgcccgaggatgacgacgaagacgatgacgaagagttactggaagtgcgtcttgtcgagactcctggtagagagctctggcggatggtgcctgctgggcgagcagcgaggggacaggccgaaagggctcagggccccagtggtgaaggtgcagccgcagctgctgccgcgagccccactcctagcgaagatgaggagcccgaagaagaggaggaagaagctgcggctgccgaagagggtgaagaggagacagtggcgagcggagaggagtccctcggttttctgagcagacttccgcccggcccggccggtcttgactgtagcgcgctagaccgcgatcccgacctgcagcctccaagcggcacttcacactttgagtttcccgattattgcaccccagaggtgactgaaatgattgcaggagattggcgaccctcttcaattgcagacttggtgttcacatattag

SEQ ID NO: 136214 - DNA, 1869 bp, synthetic construct
  misc_feature 1..1869: note = Description of Artificial Sequence: Synthetic coding sequence
  source 1..1869: mol_type = other DNA
atgtctatgcggtcacccattagtgcacaattggcactcgatggcgtggggacgatggtgaactgcacaatcaagtcagaagaaaagaaggagccctgccacgaggccccccagggctctgctacggcagccgagccccagcctggcgatcccgcaagagcaagccaggattcagcagatccacaagcccccgcacaaggtaactttagaggaagctgggactgttcatccccagagggaaacggcagccctgagccaaagcgacctggtgtatcagaggctgcctccggcagtcaagagaaactggacttcaatagaaatctcaaggaggtcgtgcccgctattgagaagcttctaagttctgactggaaggagcgcttcctcggtcggaacagtatggaggcaaaagacgtcaaaggcacgcaagagtccctggccgaaaaagaacttcagctgctggtaatgatccatcagctgagcaccctgagggaccagttgctgacagcccatagtgagcagaaaaatatggctgccatgctatttgaaaagcagcagcagcaaatggaacttgcccgccaacagcaagagcaaatcgcaaagcagcagcagcagttgatccagcagcaacacaagatcaaccttctccagcagcagatccagcaggtcaatatgccctacgtcatgataccagcatttcccccaagtcaccaaccgctgccagtgacacctgactctcagctggcactgcccatacagcccattccatgcaaaccagttgaatatcctctccagctcttgcacagccccccagccccggtggtgaagcgtcccggtgctatggcaactcaccacccgcttcaggagccttctcaacctcttaatctgacagccaagccaaaggcccccgaactgcctaacacctcaagcagccctagtctgaagatgtcgtcctgtgttcctcgtccgcctagtcatgggggacccacaagggacttacagtcctcccccccgtccctgcccttaggatttttaggagagggtgacgctgtgacaaaggctattcaagacgcccggcagctgttgcactcacattctggggccctcgacggcagtcctaatacaccatttcgcaaggatttgatttctctcgattcctcacccgccaaggagaggctggaggatggttgcgtgcacccactcgaggaggcaatgctatcctgcgatatggacgggtcaaggcatttcccagagagccggaattctagccacattaaaagaccaatgaatgcgtttatggtgtgggcaaaagacgagcgccggaagatcctccaggcctttcccgacatgcataattcctctataagtaagattctcggctccaggtggaagtcaatgacaaaccaagagaaacagccgtactatgaagagcaggctcggctgtccaggcagcatctcgagaagtatcctgattacaaatacaaaccccgccccaagcggacatgcatagtggaggggaagcgtctcagggtgggtgagtataaggccctcatgaggactcggaggcaggacgcccggcaatcgtatgtaatacccccacaggcaggacaggtccagatgtctagctcagatgtcttgtatccacgcgccgccggtatgcccttagcacagcccctggtggaacactacgtgccacgatcattggacccgaatatgccagttatcgttaacacctgctcacttcgtgaagagggcgagggaacagatgacagacactccgtggccgacggtgagatgtatcggtactccgaagacgaagacagcgaaggcgaggaaaaaagtgatggcgagcttgttgtcctgacggattag

SEQ ID NO: 136215 - DNA, 174 bp, synthetic construct
  misc_feature 1..174: note = Description of Artificial Sequence: Synthetic coding sequence
  source 1..174: mol_type = other DNA
atgagtatgcggagtcccataagtgcccagctggccttggacggcgtcggaactatggtcaactgtacaatcaaatctgaggagaagaaagaaccatgccacgaggcgccccagggttcagcaacagctgccgagcctcaacccggagatccagcacgtgccagtcaggattag

SEQ ID NO: 136216 - DNA, 543 bp, synthetic construct
  misc_feature 1..543: note = Description of Artificial Sequence: Synthetic coding sequence
  source 1..543: mol_type = other DNA
atgtctatgcggagtccgataagcgcccaactagcgcttgatggcgttggcactatggtcaactgtactatcaaaagtgaggaaaaaaaagagccttgccatgaagcgccccagggatccgccactgccgcagagccccagcctggagaccccgctcgggcctcccaggattcagccgacccacaggccccggcccagggcaattttcggggaagctgggactgttcttctccggagggtaacgggagcccagaaccaaagcgcccaggagtcagtgaggcagccagcggctcgcaagagaaattggactttaatcggaacctgaaagaagtcgtgccagcgatcgagaagctcctgtcctcggattggaaggaacgctttcttggccgcaattccatggaggccaaagacgttaagggtactcaagagagcttagcagaaaaagagctacagctcttagtaatgatacatcaactctccactttacgagaccagctcttgacagcacactctgagcaaaagaatatggcagctatgttgtag

SEQ ID NO: 136217 - DNA, 723 bp, synthetic construct
  misc_feature 1..723: note = Description of Artificial Sequence: Synthetic coding sequence
  source 1..723: mol_type = other DNA
atgtcaaaacctagtgaccacatcaaaaggccaatgaacgcttttatggtatggtccagaggccagaggagaaagatggcccaagaaaaccctaaaatgcacaattcagagatttccaaacgtctgggagcagaatggaaactactgtcagaagctgaaaagagaccatacatcgacgaagcgaagagacttagggcccagcatatgaaagaacatcctgattacaaatatcggccccgtaggaaaccaaagaatctgctgaagaaggacaggtacgtgttccccctgccctacttgggagacacagatccactgaaagcagctgggctgccggttggcgccagcgacggactgttatccgccccggaaaaagcccgcgcgttcctcccccccgcttccgccccgtattctttactcgaccctgctcagttttctagcagcgctatacaaaaaatgggagaggtgcctcacacactagccacaggcgcactgccctatgctagcaccctcgggtatcagaacggtgcttttggttccctttcctgtcctagtcaacacacccacacgcacccatctccaaccaaccctggttacgtggtaccatgtaactgtactgcttggtcagcaagcaccctgcaaccacccgtagcttatatcctgtttcctggcatgactaagacaggcattgacccatacagctctgcacacgccacggcaatgtag

SEQ ID NO: 136218 - DNA, 702 bp, synthetic construct
  misc_feature 1..702: note = Description of Artificial Sequence: Synthetic coding sequence
  source 1..702: mol_type = other DNA
atggcacttccagggtccagccaggaccaagcatggtctctcgaaccgcctgcagccactgccgccgccagttcatcaagcggcccgcaagagcgtgaaggagctggatcccccgccgctcctggcaccttgccgctcgaaaaagtcaagaggccaatgaacgcctttatggtgtggtcttcagcccaaagacggcaaatggcccagcagaatcctaagatgcataactctgagatttccaagaggctgggcgcgcaatggaaactcctagatgaggacgaaaaaagaccgtttgtagaggaagctaaacggctgagagccaggcatctaagggattacccagactataagtaccgccccaggcgcaaggcaaaaagctcaggagccggaccttcccgatgcggccagggcagagggaacctggctagcggcggacctctgtggggcccaggctatgctactacgcagccgagtcgggggttcggataccggcctcccagttattcaactgcgtacttgccggggtcctatggctcaagtcactgtaaactagaagcacctagtccgtgctcgctgcctcagagcgatcccagactgcagggtgaattgctgccaacctatacccattatctcccacctggcagcccaacaccatacaaccctcccctcgccggcgcacctatgcctcttacacacttatag

SEQ ID NO: 136219 - DNA, 702 bp, synthetic construct
  misc_feature 1..702: note = Description of Artificial Sequence: Synthetic coding sequence
  source 1..702: mol_type = other DNA
atggctttaccaggctcctcgcaggaccaggcttggtccctcgaacccccagccgcaacagccgccgcaagcagtagctccggacctcaggagcgagagggcgccggatcacccgctgcaccgggaacattgccactagaaaaggtgaaaaggccaatgaacgcctttatggtctggagttccgctcagcgtaggcaaatggcccagcagaatcctaagatgcacaacagtgagatcagcaaaagattgggcgcacagtggaaattgttggatgaggatgaaaagcggccttttgtggaggaagcgaagcgcctgagggcgaggcatctgagagactatcctgactataagtaccgacctcggcgtaaagccaaatcatccggggccggtcccagtaggtgtgggcagggaaggggtaatctggccagcggcggacccctatgggggccaggatatgcaacaacccagccaagccgcggctttggttaccggcctccatcctatagcacagcatacctaccagggtcttacggcagttcccattgcaaactcgaagctccctctccatgcagcctgcctcaaagcgaccctaggcttcagggggaattgctgccaacatacacccattatctgcctcccggatctcctacgccatacaaccctcctctggcgggcgcccccatgcccctgactcacctctag

SEQ ID NO: 136220 - DNA, 1245 bp, synthetic construct
  misc_feature 1..1245: note = Description of Artificial Sequence: Synthetic coding sequence
  source 1..1245: mol_type = other DNA
atgagtagcccagacgccggctacgccagcgatgaccagagccaaacacagtctgcactacctgcagtgatggctggactgggcccctgcccttgggccgagtcactctcccctataggtgatatgaaggtaaagggagaggcacccgccaactcgggtgcgccagcaggggccgccggccgagccaagggagagtcaaggattcgccgccccatgaatgctttcatggtgtgggccaaagacgagaggaaacgattggctcaacagaaccccgacctgcacaatgcagagcttagtaagatgttgggaaagagttggaaggctctgaccctggccgagaaaagacctttcgttgaggaagccgaacgccttcgggttcagcatatgcaggatcatccgaactacaaatatcgaccaagaaggagaaaacaagtaaagcgtctgaagagagtcgaaggggggtttttacatgggcttgccgaaccacaggcagcagccctgggacctgaaggcggacgcgttgctatggatgggctgggcctgcagtttccagaacaggggtttcccgccgggccaccgcttctgcctccccacatgggtggacactatcgtgattgccagtcattgggcgcgcctccactcgatggctaccctctcccaacccctgacacatcaccgcttgacggagtggatcccgaccctgcctttttcgccgcacctatgcccggtgattgccccgccgcaggaacgtattcttacgcccaggtctcagattatgctggccctcctgagcctccggccggtcctatgcatcctaggctgggcccagagccagccgggcctagtatcccagggcttctagcacctccttcagcattgcacgtgtactatggtgcaatgggaagcccaggagccggcggcggcagaggtttccagatgcagccacagcaccagcaccaacatcagcatcaacatcacccccccggcccaggccagccttcgcccccccccgaagccttaccatgccgagacgggactgatccatctcagcccgctgagctccttggagaggtggatcgtaccgaattcgagcagtatcttcatttcgtctgcaagcccgagatgggccttccataccaggggcacgactctggggtgaacctcccggatagccacggcgcgatttctagcgtcgtgtccgatgcctcctccgctgtgtactactgtaattatcctgatgtatag

SEQ ID NO: 136221 - DNA, 1155 bp, synthetic construct
  misc_feature 1..1155: note = Description of Artificial Sequence: Synthetic coding sequence
  source 1..1155: mol_type = other DNA
atgcagagaagcccccccggatacggggcacaggatgacccccccgcccgacgggactgtgcctgggcgccaggtcacggcgctgctgcagatacgcgcgggcttgcagctggtccagccgcgctggccgctcctgcagcgcctgcttctccaccctccccacaacgctccccccccagaagccccgaaccaggcagatacggactctctccagccggcagaggtgagcggcaggccgccgacgaatccaggattaggagacctatgaatgctttcatggtgtgggcaaaggatgagcggaaaaggctcgcacaacagaaccccgatcttcataatgctgttctcagcaagatgctcggaaaagcctggaaggaactgaatgcagccgagaaaaggccctttgtagaagaggccgaacgtctgagagtccagcacttgcgggaccatcccaattataagtatcgaccccgccggaagaagcaagctagaaaggctagacgcctggagccaggcttactacttccaggtctggctcccccacaacctcctcccgaacccttcccagcagctagtggctccgcccgcgcttttagggaactgcccccattgggcgctgagtttgacggcttaggcctgcccaccccagagcgttcccccttggatggtctcgaacctggggaggcagccttcttcccccccccagctgcacccgaagattgcgccctccggccttttcgcgccccctacgcccccaccgagctgagccgggacccggggggttgctacggagcacctttagcagaagcactgcggactgcccctcccgctgcccccctggcagggctctattacggcacactcggcaccccaggcccgtacccaggtcccctttcgccgcccccagaagcacctccccttgaatcggcagaacccctaggacccgccgctgatctgtgggctgacgtcgacttaactgagttcgatcagtatctcaactgttctagaacacggcctgacgcaccaggccttccttaccacgttgctctggcgaagttgggaccgcgcgccatgtcctgtcctgaggagtcctccttgatcagcgccctgtcagatgcctcgagtgctgtgtactacagtgcatgcatatccggatag

SEQ ID NO: 136222 - DNA, 831 bp, synthetic construct
  misc_feature 1..831: note = Description of Artificial Sequence: Synthetic coding sequence
  source 1..831: mol_type = other DNA
atgtctaaacccgtagaccacgtaaaacgcccaatgaatgcatttatggtgtggagcagggcccagcgacgaaaaatggctcaggaaaatcccaagatgcacaattccgagatttcgaaaagactcggcgcagaatggaagttgcttaccgagtcagagaagcggcccttcatcgacgaagcaaaacggctgcgtgctatgcatatgaaggaacatcctgattacaaatatagacccaggaggaagcctaaaacactgttgaagaaggacaaatttgcattccccgtaccgtatgggctcggtggtgtcgcagacgccgagcacccagcgctgaaggcgggagccggtctccacgctggcgctggcgggggattggtccccgagtccctgttggccaatcccgagaaagcagctgccgctgctgctgcagccgccgcaagagtatttttcccccaatcagctgccgccgccgcagctgcagccgcggctgccgccgcaggaagcccttatagcctcttagacttgggttcaaagatggccgagatttcctctagttcctcgggactgccatatgcctcatcactggggtaccctaccgctggtgcgggagcttttcacggtgctgctgctgcagccgctgccgctgcagctgcagcaggcggacatactcattcacacccctcccctggcaatccgggttacatgatcccatgcaactgctctgcctggcccagcccaggactgcaaccacccctggcatatatattgctgccaggcatgggcaaaccacagctggatccataccccgctgcttacgctgctgctctgtag

SEQ ID NO: 136223 - DNA, 1341 bp, synthetic construct
  misc_feature 1..1341: note = Description of Artificial Sequence: Synthetic coding sequence
  source 1..1341: mol_type = other DNA
atgcgccctgtgagggaaaattcctctggcgcccggtcccctagagtgcctgccgaccttgctcggtcaatcttgatttcattaccattccctccagatagtctcgcacatcgcccaccttctagtgcccctacggagtcacaaggcctgtttaccgtagctgcaccagccccgggagccccctctccacctgcgacactcgcccacctcctgcctgccccagctatgtactcattgctcgaaacagagttgaagaatcctgtgggtacaccaacacaggccgctggaacagggggccctgccgctccagggggcgccggtaagagtagcgctaacgccgcaggaggcgcaaactcaggaggaggcagtagcggcggagcatcgggtggcgggggcggcaccgaccaggacagggtaaagaggcctatgaatgctttcatggtatggagccggggccagcggaggaagatggccttagaaaatcccaaaatgcacaattctgaaatctctaaacggctcggagccgactggaaactgctcaccgatgcggagaagcgccctttcattgacgaggccaaaagattgagagccgtgcatatgaaggagtaccctgattacaagtaccgcccgaggcgcaagaccaagacactgctcaagaaggacaagtactcccttccgagcggcttgcttccacccggcgccgccgcagcggctgctgccgctgccgctgccgcagccgccgcatcctccccagtgggggtgggtcagcgcctagacacctacacacacgtgaacggctgggctaacggcgcctactccctcgtccaagagcaactaggctacgcacagcccccctccatgagctctcctcccccaccaccagccttaccacccatgcatcgatacgacatggccggcttgcagtactctcccatgatgccacccggggcacagagctacatgaacgtagctgctgctgctgcagcagcgagcggatatggcggcatggccccctcagctactgctgcagccgctgctgcttatgggcagcagccagccacagccgctgccgctgcagctgctgcagcagccatgagtctaggtcccatggggtctgtggtgaaaagcgagccttcatcgccacccccagctatcgccagccactcccagagagcgtgcttgggagacctgagagacatgatatctatgtatctaccacctggtggggacgccgccgatgctgcttctccgctgccaggaggtcgacttcatggtgtgcaccagcattaccagggggcgggtactgccgttaacggcaccgtccctttgacacatatttag

SEQ ID NO: 136224 - DNA, 2253 bp, synthetic construct
  misc_feature 1..2253: note = Description of Artificial Sequence: Synthetic coding sequence
  source 1..2253: mol_type = other DNA
atgagtagcaaaaggcctgcctctccttatggcgaggcagacggggaggtggccatggtgaccagtagacagaaggtggaggaagaagagtccgacgggctcccagcttttcacctccccctgcatgtttcctttcccaacaagccccatagtgaggaattccagccagttagcctgttaacgcaggaaacctgcgggcacaggaccccaaccagccaacacaacacaatggaggtagacggtaacaaggtaatgtcttcatttgcccctcacaactcctccaccagtcctcagaaggcagaggagggcggtaggcaatcgggcgaaagcctttcaagtacagcgctcgggactccggagcgtcgtaaaggcagtctggctgacgtcgtggacacactgaagcagcgcaagatggaggagttaatcaaaaacgaaccagaggagacaccatcgatcgaaaagctcctcagcaaagactggaaggataaactgctggcaatgggatcgggcaacttcggagagataaagggcactccggagtctctcgcagagaaggagcggcagttgatgggtatgatcaaccagctgacaagcctccgagaacagctgctagccgcccatgatgaacagaagaaactggctgcctctcagatcgagaaacagcggcagcagatggagctcgcaaagcaacagcaggagcagattgcgcgacagcagcagcaactattgcagcaacagcacaaaatcaacctgctgcaacagcagatccaagtgcagggtcagttaccaccccttatgatcccggtattccctccagaccagcggacactggccgcagctgcgcaacaaggctttcttctgccaccaggcttttcctataaagccggttgtagcgatccctaccccgttcagctcattccgaccactatggctgctgcggccgcggccacccctggactcggcccgctgcagttgcagcagttgtacgccgcacaactggccgcaatgcaggtctcccctggcggtaagcttcccggcattcctcagggaaatctgggcgccgctgtttccccaaccagcatacatactgataagtccacaaactcaccgccacccaaatctaaagacgaagttgcacagcctctgaatctcagcgcaaaacctaagacaagtgatggcaaaagccccacatcacctaccagtccccatatgcctgccctgcgcatcaatagtggagctggcccactgaaagccagcgtccccgctgccctggctagccccagtgcgcgtgttagcaccatcgggtacctgaacgaccatgacgccgtgaccaaagcaattcaagaggcgcgacaaatgaaggagcaacttcggagggaacagcaggtcctcgatgggaaagttgccgtggtaaactcgctggggttgaacaactgtcgcactgagaaggagaagactacattggagtccctgacccagcaactggcggttaaacaaaatgaggagggaaagtttagtcatgcaatgatggactttaatctgagtggcgattccgatggcagcgccggagtgtcagaatctagaatctatcgagagtccagagggcggggtagcaacgaaccgcatatcaagaggccaatgaacgcctttatggtttgggccaaggacgaacggagaaagatactccaggctttccctgacatgcataattccaatatatcgaagattctggggtcacgctggaaggccatgacgaatttagagaaacagccttactatgaagagcaggccagactgtccaaacagcacttagagaaataccctgattataaatataaaccgcgaccaaagcgcacttgccttgtggacggcaaaaagttgcgcattggagagtataaggctatcatgaggaacaggcggcaggagatgagacaatatttcaatgtgggccagcaggctcagattccaattgccaccgctggcgtggtgtatcccggcgctatagctatggccggcatgccatctccacatcttccctccgagcattcgtcggtatcctcttcccctgaaccaggcatgccagtcattcaatcaacgtacggcgttaagggggaggagccccacatcaaagaggagattcaggctgaagatataaatggcgaaatttacgacgagtatgacgaggaggaagacgatcccgacgtggattatgggtccgattctgagaatcacattgcaggccaggccaattag

SEQ ID NO: 136225 - DNA, 1929 bp, synthetic construct
  misc_feature 1..1929: note = Description of Artificial Sequence: Synthetic coding sequence
  source 1..1929: mol_type = other DNA
atgtcttctaaacgccctgcctctccctacggcgaagccgacggcgaggtggcgatggtgacgagccggcagaaggttgaagaagaagaatctgacggcctccctgcctttcacttgccgcttcatgtatcgtttcccaacaagcctcactctgaagagttccagccggtgtcactattgactcaggagacctgtggacacaggactccaacctctcagcataacacaatggaggtggacgggaacaaagtaatgagttcattcgctcctcataacagcagtacaagtccgcagaaggccgaagaggggggaaggcagtccggagagtcactgtcttccaccgcattaggcacccccgagcggcgcaaaggttccctcgcagatgtggtggatacccttaagcagagaaagatggaggaactgatcaagaatgagcctgaggagacccccagcattgagaaactgctgtctaaagactggaaggataaattactggccatgggctcgggtaactttggagaaatcaaaggcacccctgaatcactggccgagaaggagcgacagcttatgggcatgatcaaccagttgaccagtttgcgtgagcagctcctggcagctcacgatgaacagaaaaaacttgcagcttctcaaatcgagaaacaacgccaacagatggaactggctaagcagcagcaagagcaaattgctcgacagcagcagcaactcttgcaacaacagcataagatcaacctcctgcaacagcagattcaagttcaaggccaactgcccccattaatgatcccagtgttccctcctgaccaaaggacattagccgcggcggcccagcagggtttcctgctgccacctggttttagttataaagccgggtgtagtgatccgtaccccgtacagcttattccaaccactatggcagctgcagctgctgcgactcccggactgggaccattgcagctgcagcagctgtacgctgcccagttggctgcaatgcaggtttccccgggcggcaagcttccaggtattccccagggaaatctgggtgctgccgttagtccaacctctattcataccgataaatcaactaacagccctccccccaaaagcaaggaaaaaaccaccctggagagcttgacacagcagcttgctgttaaacagaacgaggaaggaaaattctcccacgccatgatggactttaacctctctggagattcagatggatctgcaggagtctccgagtctcggatctaccgggaatccagaggaagaggctcgaatgagcctcacattaagagaccaatgaatgcctttatggtatgggccaaggatgaaagacggaaaatcttgcaggcctttcccgatatgcacaactctaacatctccaaaattctgggctccagatggaaggccatgaccaacctggaaaaacagccatattatgaagagcaagcaagactgagcaaacaacatcttgaaaaatatcccgattataagtacaagccccggccaaagagaacatgtctggtagatggaaagaagcttagaatcggcgagtacaaagccattatgcggaataggcgccaggaaatgcgacaatacttcaatgtgggtcagcaagcccagatccccatagcaacagcgggcgtcgtctacccgggggccatcgcaatggccggaatgcctagccctcacctgccctctgagcactcctccgtctcttccagccccgaaccgggtatgcctgtgattcagagcacttatggagtaaaaggtgaggaacctcatattaaggaagagatccaagccgaggacattaacggcgagatttatgatgagtacgacgaagaagaagatgatcccgacgtggactacgggtcggacagcgaaaatcacatagctggacaggccaactag

SEQ ID NO: 136226 - DNA, 1134 bp, synthetic construct
  misc_feature 1..1134: note = Description of Artificial Sequence: Synthetic coding sequence
  source 1..1134: mol_type = other DNA
atgcatgacgaagtggctcaacctctaaacctttctgccaagccaaagacatctgatggtaagtccccgacatctcccactagcccacatatgccagccctccgtataaacagcggggcgggccccctcaaagcctccgtgccagcagctctggcatccccatcagctcgcgtgagcaccatcggctacctaaacgatcatgacgcggtgaccaaggccattcaggaagctcggcaaatgaaggagcagctcagacgtgagcaacaggtcctggatgggaaggtggcagttgtgaacagcctcggtctcaataattgtaggactgagaaggaaaaaactactcttgagagtcttactcagcagctggcagtgaagcagaatgaagagggaaagttcagccacgctatgatggattttaacctgtccggcgattctgacggaagcgctggtgtgagcgaatccaggatttatcgtgagtccagagggcggggatcaaatgagccacacattaagcgccccatgaacgcctttatggtgtgggcgaaggacgagcgcaggaaaattctccaggctttccctgatatgcacaactccaacatcagcaaaattctaggctcacgatggaaggctatgacaaacctggagaagcaaccttactacgaagagcaggcacgtctcagtaaacaacaccttgagaagtaccccgactacaaatataaacctagacctaaacggacctgtctggtggacggaaagaagcttcgtattggcgagtacaaggccatcatgcgaaaccggaggcaggagatgagacaatatttcaacgtcggccagcaagctcaaattcccattgcaaccgcaggggtcgtgtatcccggcgccatcgcaatggcagggatgcccagccctcacctgccaagcgagcactcctcggtgtcttcctccccagaaccaggaatgccagtcattcagagcacttacggcgtgaaaggcgaagaacctcacatcaaagaggaaatccaggctgaggatatcaatggggagatctacgacgagtatgacgaggaagaggatgaccctgacgtggactacggttctgactccgaaaaccatattgctggacaagccaactag

SEQ ID NO: 136227 - DNA, 1764 bp, synthetic construct
  misc_feature 1..1764: note = Description of Artificial Sequence: Synthetic coding sequence
  source 1..1764: mol_type = other DNA
atgagcagcaaacgtcccgcatccccttacggagaggcagacggtgaagttgcaatggtgacaagcagacaaaaagtcgaagaagaggagagcgatggattaccagcgtttcacttgcctttacacgaagtcgatgggaataaggtgatgtcatcattcgcccctcacaatagctccacatcccctcagaaggccgaggaaggtggccggcagtcaggagaaagcctatcctccaccgccctgggaacccctgaacgaagaaagggcagcctggccgacgttgtagacaccctgaagcagcgcaagatggaggaactaattaaaaacgaacctgaagaaacaccgtcgatcgaaaaactgctgtcaaaagattggaaagacaagcttcttgcgatgggaagcgggaacttcggggagatcaaaggaactcctgagtccctggccgagaaggaacggcaactcatgggcatgataaatcaactgacttctctgcgggagcagctgctggcagcccacgatgagcaaaagaaactggctgcaagccagatcgagaaacagcgccagcaaatggagttagctaagcaacagcaggagcagatagctcgccagcagcagcaactccttcagcagcagcacaaaattaacctgctgcagcagcagatccaagtgcagggccagctccccccccttatgatccctgtctttccaccggatcagaggaccctggctgccgcggcacagcagggcttccttctgccacccggcttttcatataaggcaggctgttctgatccataccctgtgcagctgattcctaccacgatggcggctgctgcggcagccacccctggcctcggacccctacagttgcagcagctgtatgcagcgcaactggcagctatgcaagtgtcacccggagggaaacttccaggaatcccccagggcaatctgggcgctgctgtctctccgacctcaattcatactgacaagagcaccaatagcccccctccaaaaagtaaagacgaagttgctcaaccgctcaacttgagcgctaaaccaaaaacatccgacggtaaaagccctactagccctacatctccccacatgcccgctctgaggatcaatagtggggccggaccactgaaagcctcggtgccagccgcattggcctctccttccgccagggtcagcacgattggctatttgaatgaccacgatgcagtgactaaggcaatccaggaggctagacaaatgaaagaacagctcagacgcgaacagcaggtattggatggcaaggtggctgtcgtcaattcactgggcttgaacaattgcaggacggagaaggagaaaacgaccctggagtcactaacacagcagctcgcggtgaaacagaacgaagaaggtaagttcagccacgctatgatggactttaatctgtcaggggatagtgatggttcagccggggtgtcagagagccgcatctatcgcgagtcccgtgggcgcggaagcaacgaaccacatatcaagcgccctatgaacgcatttatggtgtgggcaaaggatgagaggcggaagatcctccaggcgttccccgaccttggcttcctgtgtgtctgcatgtatgttatcatggtgctgatcatcggcattacccttgatcactgtgaactgaacccgcatctgggcatgaagagccatatcttgcccagcgactggagccgcaacaatttggatcttgacttcgctctgcaaatgacgacatag

SEQ ID NO: 136228 - DNA, 2292 bp, synthetic construct
  misc_feature 1..2292: note = Description of Artificial Sequence: Synthetic coding sequence
  source 1..2292: mol_type = other DNA
atgcttaccgacccagacctcccccaggaatttgaaaggatgtcatcaaagcggccagcctcaccatatggggaagcagacggagaggtagcgatggtcacatctcgacagaaagtggaggaagaggagtcggatggcttgcccgcctttcatctccctctgcatgtgagctttcccaacaagccacacagtgaggaattccagcccgtgtctctgcttactcaggaaacctgcggccacaggacaccaaccagtcagcacaatactatggaagttgacgggaataaggtaatgtcttcattcgccccacataactctagtacttctccacagaaagctgaagaggggggacgccagtcaggcgagtcactttccagtactgcgctcggcacacccgagcggcgcaaaggttccctggctgacgtggtggatacccttaaacagcgaaagatggaggaattgatcaagaatgaaccagaggagaccccaagcatcgagaaacttctctccaaggattggaaagacaaactcttggcgatggggtccgggaatttcggtgagatcaagggaacccccgagtcactcgccgagaaggagcggcagctcatgggaatgatcaaccaattgactagcttgcgggagcagctgctcgcggcacatgacgagcaaaagaaactggccgccagccaaattgagaagcagaggcagcagatggaactggccaagcagcaacaggaacagatcgctagacagcagcagcagctgctgcagcagcagcacaaaatcaaccttctgcagcaacagatccaggtgcagggccagctgccccccctaatgatccccgtgttccctccagaccagcggactctagcagctgcagcacagcaaggattcctgctgccccctgggttttcctacaaggccggatgttccgatccctacccggtccagctgattcctacaacaatggccgccgcagccgccgccacccccgggctcggacctctacagctccaacagctgtacgcagcccagcttgctgcaatgcaagtctctcccggaggcaagctgccgggaatcccccaggggaacctcggggctgctgtgtcccccacctccatccacaccgataagagtacaaacagtccgcctcctaaaagcaaagacgaggtggctcagccccttaatttgtctgctaagccaaagacatcagacggcaagtcccctaccagtccaaccagtccacacatgcctgcactaagaattaactctggggcagggcctcttaaggccagtgtccccgctgctttagcctcacccagtgcacgggtctctactattgggtatcttaatgatcatgacgctgtgacaaaagccattcaagaggcacggcagatgaaggagcagcttaggagggagcaacaggtcctcgacggcaaggtcgccgtcgtcaacagtttgggactcaataattgtagaacagaaaaggagaaaacaaccctcgaaagcctgacacaacagctcgcagtgaagcagaatgaggaggggaaattcagtcatgcgatgatggactttaacctaagtggcgattcggacggctcagccggcgtctctgaaagcaggatctacagagaaagtaggggacgcggctctaacgagccccatatcaagcggccaatgaatgctttcatggtttgggctaaagacgagagaagaaaaatcctccaggccttcccagatatgcataattccaacatcagtaagatcttagggtcaagatggaaagctatgacaaaccttgaaaagcagccctactacgaagagcaggccaggttgtcaaaacagcatcttgagaagtaccctgattacaagtataagccgcggcccaaaagaacatgcctcgtggatggtaagaagctgcggatcggagagtacaaggcaataatgcggaaccgacgccaggagatgcggcaatacttcaatgttggccagcaggcccaaatcccaatcgcgactgccggagtggtgtatcctggcgccatcgccatggccgggatgccatcacctcacctgccttcagaacatagttcagtctcatcttctccggaaccagggatgccagtcattcagtcaacttacggagtcaagggagaggagccccacatcaaagaggaaattcaagcagaggatataaatggggaaatctacgacgagtacgatgaagaagaagatgatcctgacgtagactatggcagcgattcagagaatcacattgctggtcaggcgaattag

SEQ ID NO: 136229 - DNA, 1929 bp, synthetic construct
  misc_feature 1..1929: note = Description of Artificial Sequence: Synthetic coding sequence
  source 1..1929: mol_type = other DNA
atgtcatccaaaagacccgcttctccatatggcgaggccgacggggaggtcgcgatggtgacttcacgccaaaaggtggaagaggaggaatcagatggactaccagcttttcatcttccactccacgtcagttttcctaacaagccgcacagcgaggaatttcaacccgtgtcattgttaacacaggagacatgcggacatcggacccctacctctcagcacaatacaatggaagtggacgggaacaaggttatgagttcctttgctccacacaatagtagcacctccccccaaaaggcggaagaagggggccggcagtccggagagtcactcagtagcacagcccttgggacgccggagcgtagaaagggtagcctggctgatgtggtggatactctaaagcaacgcaaaatggaggagttaattaaaaacgagccagaagaaacacctagcattgagaagctcctctctaaggactggaaggataagctgctcgcaatgggctcgggtaactttggggaaattaaggggaccccagaatctttggctgagaaggagagacaactgatgggaatgattaatcaattgacatccctgcgggaacagttgttagccgcccacgatgagcagaaaaagttagctgccagccagatcgaaaagcaaagacaacaaatggagctggctaagcagcaacaggagcagatcgccagacaacagcagcagctcttgcaacaacaacacaagatcaaccttctccagcagcaaattcaggtgcaaggccagctgccgcctttgatgattcccgttttccctcctgaccagcgcactctagctgctgccgcacagcagggcttcctcctgccacctggatttagttacaaggcgggatgctcagacccatatcccgtgcagctgatccctactactatggcagctgccgctgcagcaacgccaggcctcggccccttacaactgcagcagctgtatgcagcgcaactggctgcaatgcaagtgtctccggggggcaaactgcccgggatcccacaggggaaccttggtgccgctgtgtccccaacttcgatccacaccgataagtccacaaattcccctccgccgaagagcaaggagaaaaccacattagagtctctgacccagcagcttgccgtgaaacagaacgaggaggggaagttctcccacgccatgatggactttaatttatctggcgactctgacgggtcagcaggggtaagcgagtcaaggatataccgggagagtcggggcaggggttccaacgaaccacacataaaaaggccgatgaacgcctttatggtgtgggccaaagatgagagacgcaagatcctccaggctttccccgacatgcataattcgaatatcagtaagattcttggctcaaggtggaaggctatgacaaatttggaaaaacagccctattatgaagaacaggcccggctgtctaagcaacacttggagaaatacccagattacaaatacaaaccccgacctaagaggacatgtcttgtagacggaaagaagctgcgcattggagagtataaggccataatgaggaaccgccgtcaggaaatgagacagtatttcaatgtgggacagcaggcacagattccgattgcaaccgccggggttgtgtatccaggcgctatcgccatggcgggtatgccttcaccgcatttgccttctgaacatagttccgtgagctcgagccctgagcctggaatgcccgtaatccagtctacttacggagttaaaggtgaagaacctcatattaaagaggagatacaggctgaagatatcaatggtgaaatctacgacgagtacgacgaagaggaggatgatcccgatgtggactatggatccgactccgagaaccacattgccggtcaggctaactag

SEQ ID NO: 136230 - DNA, 2253 bp, synthetic construct
  misc_feature 1..2253: note = Description of Artificial Sequence: Synthetic coding sequence
  source 1..2253: mol_type = other DNA
atgtcttcaaagagacctgcgagtccatacggagaggctgacggggaagttgcaatggtgacatccaggcagaaggtcgaggaggaagagagcgacgggctgcctgccttccatctgccattgcatgtcagctttcccaacaagccgcattccgaagagttccagccagtctctctgctgacccaggagacctgcggtcacaggacccctacctcgcaacataacacaatggaggtcgatggcaataaagttatgtcatccttcgcaccgcataactcttctacttctcctcaaaaggctgaagaaggtggccggcaatccggtgagtcactatcatccactgcactgggtacaccagaaaggcggaagggcagtctagccgacgtggtcgacaccctgaagcagcgtaaaatggaagagctgattaagaacgaacctgaggagactccttcaatcgagaagctcctaagcaaagactggaaagacaagctcttagcaatgggctcaggaaatttcggcgaaatcaagggtactcctgagagccttgcagagaaggaacggcagctgatggggatgattaaccagctcacgtctcttagagagcagttgctcgcagcgcacgatgagcagaaaaagctcgccgcctctcagatcgaaaagcaacgacaacagatggaactcgctaagcagcagcaggagcagatcgcgagacagcaacagcagctcctgcagcaacagcataaaatcaatctgctgcaacagcagatccaggtgcaaggccagctacctcctctgatgatccctgtttttcccccagaccaaagaactctcgctgcggcagcacagcaaggattcctccttccgccaggcttttcttataaggcagggtgcagtgacccataccctgtgcagcttattccgacaaccatggcagcagccgcagctgccacacccggcctaggtcccctgcagttgcaacagctttacgctgcccagctagctgcaatgcaggtgtcaccaggaggcaagttgcctgggattccacagggaaatctcggcgcagctgtgtcaccgacttcaatacacaccgacaaatctactaattcgccaccccccaagagcaaggatgaggtcgcccaacccctaaacttgagcgccaaacccaaaacatctgacggtaagagtcccacctcaccaacttcaccccacatgcctgccctgcgcattaactctggagccggccctttgaaggcttctgtgcctgccgccttggcttccccttctgcccgggttagcacaatagggtacctgaacgaccatgacgctgtgactaaagccattcaggaggcgagacagatgaaggagcagttgcggcgggagcaacaggtgttagacgggaaagtagcagtggtcaacagcctgggactgaacaattgcaggaccgagaaggagaagacgactctcgaatcgctcactcagcagctggctgtgaagcagaacgaagaaggcaagttttcccatgccatgatggatttcaacctcagcggcgatagcgacggatctgccggggtttctgaaagcaggatctatagagaatcaagaggtcgcgggtcaaacgaacctcacattaagcgcccgatgaatgcgtttatggtatgggcgaaggacgagcgtcgcaagatcttgcaagcgtttcccgacatgcacaattcaaatatttccaagatcctgggcagccgctggaaggctatgacaaatctagagaagcagccctactatgaagaacaagcacgcttatctaagcagcacttagagaagtaccccgattataagtacaagcccaggcctaaacggacatgcctggtagatggtaagaaactccggattggcgagtacaaggctattatgcgcaataggcgccaggaaatgagacaatattttaatgtgggccagcaagctcagattcctatcgccaccgcaggcgtggtgtatcctggcgccatagccatggcgggcatgccaagtcctcatctcccgtcggagcacagctcagtatcctcatcccctgagcccgggatgcccgtgatccagtccacatacggtgttaagggtgaagagccacatataaaggaagagatccaggccgaggacatcaatggcgaaatctacgacgagtatgacgaggaagaggacgaccccgatgtggactatggttcagatagcgaaaatcatatcgctggtcaagccaattag

SEQ ID NO: 136231 - DNA, 2427 bp, synthetic construct
  misc_feature 1..2427: note = Description of Artificial Sequence: Synthetic coding sequence
  source 1..2427: mol_type = other DNA
atgagttccaaacaagccacctctcctttcgcctgtgccgccgatggggaagacgctatgacacaagatcttacgtctcgcgaaaaagaagagggcagcgatcaacatgtggcaagccatctccctctccaccccatcatgcataataagccgcacagcgaggagctgcccactttggtgtccaccatccagcaggacgccgattgggatagcgttctctcaagtcagcaacggatggagagcgaaaataacaagctttgtagcttgtatagctttcggaatacctcgacatcccctcataagccggatgaggggtcccgggacagggagatcatgacttctgtaaccttcggcaccccggaaagaaggaaaggctcacttgctgacgtggtagatactctgaagcagaagaagcttgaggagatgacaaggaccgaacaggaggattcaagttgcatggaaaaactactttcaaaggactggaaagaaaagatggagcggttgaatacttctgagctactgggcgaaatcaaaggcacccccgagtcgttggctgaaaaagagcggcagctgtccacaatgatcactcagctgatatcgctgcgggagcagctgctcgcagcccacgacgagcagaaaaaactagcagcatcacagatcgagaaacagaggcagcagatggatttagcgaggcagcagcaggagcagattgccagacaacaacaacagttgttgcaacagcagcacaagatcaacttactgcagcagcagattcaggtgcagggccatatgccccctttgatgatccccatctttcctcacgaccaacggacattagcggcagctgctgccgcccagcaggggtttctgttcccacctggcattacatataaaccaggggacaattaccccgtccagttcataccatctacgatggccgccgccgcagcttccggcctatcgcccttacagttacaaaaaggtcacgtgagtcacccacaaatcaaccagcggctaaagggtctctctgatcgctttggacggaatctggatacattcgagcacgggggcgggcattcatacaaccacaaacagatcgaacagctgtatgcagcccagttggcttctatgcaagtttcccctggagccaagatgccttccacaccgcagcctccgaacactgcgggaaccgtcagtccgacaggaatcaaaaacgaaaagcgcggcacaagtcctgtcacccaggtgaaggatgaggcagccgcccagccactcaatctgagctctagaccgaaaactgcggagcccgttaagtctccaactagccccacacagaatctgtttccagcaagcaagactagccctgtaaacctaccaaacaaaagctcgattccttctcctatcggcggcagtctggggaggggatctagcctagacattctgtcctcactcaattctccagctctcttcggtgatcaggatacagtgatgaaggccattcaggaagctcggaagatgagagaacagatccaacgggaacaacagcagcagcaaccgcatggggtcgacggcaagttatcctctatcaacaacatgggtctgaactcttgtcgaaacgagaaggagcgtacaagattcgaaaaccttggaccgcaactgacagggaagagtaatgaggacggaaagctcggccccggagtgattgaccttaccagacccgaggatgccgaaggcggggctacggttgcggaagcccgcgtgtacagagacgcccgaggaagggccagtagcgagccccacatcaagaggccgatgaacgcatttatggtgtgggcgaaagatgagaggaggaagattctgcaagcttttcccgatatgcacaattccaatattagcaagatcctcgggagccgctggaagtccatgtcaaatcaggagaaacagccttactatgaagagcaggcccgattgagcaaaattcatctcgaaaaatatcccaattacaagtacaaaccccgtccaaaaagaacttgcattgttgacggcaagaaactgagaatcggagaatacaagcagctaatgagatctagacgccaggagatgcgccagttctttacagtcggtcaacagcctcaaatcccgatcaccaccggaactggggtcgtctatccaggggctatcacgatggccaccaccactcccagtccacaaatgacgagcgattgctcgagtacttctgcgagtccagagccatctttgccggtaatccagagtacctacggcatgaaaactgacggcgggtcgctggctggcaacgagatgatcaacggggaagacgagatggaaatgtacgatgactacgaagacgacccaaaatctgactacagctccgaaaatgaggctccagaagccgtgtctgctaattag

SEQ ID NO: 136232 - DNA, 2487 bp, synthetic construct
  misc_feature 1..2487: note = Description of Artificial Sequence: Synthetic coding sequence
  source 1..2487: mol_type = other DNA
atgtctagtaagcaggccaccagtcctttcgcatgcgccgcggacggcgaagatgctatgacccaagacctgacctcccgcgagaaagaagaaggatctgaccagcatgtagcctcccacctgccgctacacccaatcatgcataacaagcctcacagtgaggaattaccgacactggtgtcaaccatccagcaggatgccgactgggacagcgtactaagctctcagcagcggatggaatcagaaaataacaaactctgtagcctgtacagcttcaggaacacctccacctcacctcataagcctgacgaggggtcacgggaccgagagattatgaccagtgtcacctttggcacaccggaacgtagaaaagggtccctggccgacgtggtggatactctgaagcaaaagaaacttgaggaaatgaccagaaccgagcaggaggacagctcctgtatggagaagttgctcagtaaagattggaaagagaagatggagaggcttaatacgagcgagttacttggagagattaaaggcacacctgaatctctcgccgagaaagaacgacagctgagtacaatgataacacaactaatcagtctgcgtgaacagctgctcgctgcccatgatgaacagaagaaacttgccgcgagccagatcgagaagcagaggcagcagatggacctcgctcggcagcagcaggaacagattgccaggcaacagcaacagctattacagcagcaacacaaaatcaacctcctgcagcagcagattcaggttcagggtcacatgccccccctaatgattcccatcttcccacatgaccagaggacactcgccgcggccgccgccgcacagcaggggttccttttcccacctggaattacgtacaaaccaggcgacaactaccccgttcagttcatccctagtacaatggcggcagctgccgcttccgggctatcaccactccagctgcaaaaggggcatgtgagtcaccctcagattaatcaaaggctcaaggggctatctgatcgttttggccggaacctcgatacattcgagcacggggggggacactcctataaccataagcaaattgagcagctttacgcagcgcagctcgcttccatgcaagtgtcccccggagcaaagatgcccagcacccctcaacctcctaataccgcgggtacggtgtctcctacgggtataaaaaatgaaaagcgcgggacaagcccagtgacacaggtcaaagatgaagccgcggcgcagccgctgaacctttccagcagacccaagacagctgagccagtgaagtcacccacgagcccaacacaaaacttgttccccgcatctaagaccagccccgtgaacctccctaacaaaagctcaatcccaagccccatcggtggctccctggggcggggtagttcattagacatcctgtcctcactgaatagcccagcactgttcggggatcaagataccgtgatgaaggcaatccaggaagctagaaaaatgcgtgagcagatccagagagaacagcagcagcagcagcctcacggtgtcgacgggaaactgtccagcattaataatatgggactgaattcctgtcgcaacgaaaaagaacgtacccgtttcgagaacctcgggccgcagcttactggtaagtccaatgaggacggcaaactcggacccggcgtgatcgatcttacccggcccgaagacgctgaagggagcaaggctatgaacggatccgctgccaagctgcagcagtattactgttggcctacaggaggggccacagtggctgaagcgcgggtgtaccgagacgcacgtgggcgcgcctcctccgagccacatattaagaggcctatgaatgcctttatggtgtgggccaaagatgagagacgtaagatcttacaggcattcccagacatgcataattcaaacatctctaagattttaggaagcagatggaaatcgatgagcaaccaggagaaacagccctactacgaggagcaggcgcgcctgtctaaaatccacctggagaaatacccaaactataagtacaagcctagacctaagagaacatgtattgtggacggcaaaaagctccgtattggagagtataaacaactaatgcggtcgaggcggcaggagatgcggcaatttttcaccgtggggcagcagcctcaaatccctattacaaccggtaccggcgtggtttatcccggcgcgatcacaatggcgaccactacaccttctcctcagatgacaagtgattgttcaagcacatccgcatctcctgaaccctcacttccagttatccagtctacatatggtatgaagacagacggcgggagtttggccggtaacgaaatgatcaatggggaggacgagatggaaatgtatgacgactacgaagacgatcccaaatctgactatagtagcgaaaatgaagcaccagaggcggtgtcagccaattag

SEQ ID NO: 136233 - DNA, 2427 bp, synthetic construct
  misc_feature 1..2427: note = Description of Artificial Sequence: Synthetic coding sequence
  source 1..2427: mol_type = other DNA
atgagcagtaagcaagcaacgtcccccttcgcatgcgccgcagatggggaggatgccatgacacaggatctgaccagtcgcgagaaggaagagggatccgatcagcatgtggctagccacttgcctttacacccaatcatgcataacaagccgcactctgaggagctccctacccttgtctcaactatacaacaggatgctgattgggattctgtgctgtcttcccagcaaagaatggagagtgagaacaacaaattatgctcactctattcattccggaatacttctactagtccgcacaagcctgacgagggcagtcgtgaccgcgaaataatgacaagtgtgaccttcgggacgcccgagcggcgcaaagggtccttagcagacgtagttgatacgcttaaacagaagaagctggaagaaatgacacggaccgagcaagaggacagttcatgtatggaaaagctcctaagcaaggattggaaggaaaagatggagagactgaatacaagcgagctgctgggcgagatcaaaggtactcctgagagtttggccgaaaaagagcgccagcttagcacaatgattacgcagttgatttccctgcgggaacagttgcttgcagcgcatgatgaacagaagaagctagctgcctcccagatcgaaaagcagcggcaacagatggacctcgcgcgacaacaacaggagcagatcgccaggcaacaacagcaactcctgcagcagcagcataaaatcaacctcctgcagcagcagattcaggtgcaggggcacatgccaccactcatgatccccatcttcccccatgatcagcgaacgctggccgccgctgccgctgcacaacaggggttcttatttccacctggaataacctacaagccaggggataattacccagttcaatttatcccatcaaccatggctgcagcagccgccagtggcctgtccccactgcagctgcaaaagggtcatgtgtcgcacccccagatcaaccagcgccttaagggtctgtccgacaggttcgggagaaaccttgatacatttgaacatggcggaggacactcttacaaccacaaacaaatcgagcagctgtatgctgcccagctcgcaagcatgcaggtttctcctggtgcgaagatgccctccaccccacagccgcccaacacggctggaaccgtttctcctacaggcataaaaaacgaaaagaggggcacctctcccgtcacccaggtcaaggacgaggccgccgcacaacccttaaacctctcctccagacccaagaccgccgaacccgtaaaatcaccaacgtctcctactcagaacctgtttccagcttcaaaaacttcaccagtgaatcttccaaataaatcaagcattccgtctcccatcggtggttctctgggcagaggctcctcactcgacatactgtcctcattgaattctcctgccctctttggagatcaggacaccgtgatgaaagccattcaggaagcacggaagatgagagaacagattcagagagagcagcagcagcagcagccacacggtgtagatggcaaactaagctctataaataacatgggcctgaattcatgccgcaacgaaaaggaacggactaggttcgaaaatctgggcccccaactgacagggaaaagcaatgaggatggaaaactggggccaggggtcatcgatctaactagacctgaggacgcagaaggcggggcgactgtggctgaagcccgagtgtaccgagatgcgcgggggagggcctctagtgagccccatattaaaagaccaatgaatgcattcatggtctgggcaaaggatgaacgcaggaaaattttgcaagcattccccgatatgcacaatagcaatattagtaaaatcctcggatctcgatggaagtcaatgagcaatcaggaaaagcaaccttactacgaagagcaggctaggctgtccaaaatccacctcgagaaatatcctaattataagtataaaccacgccccaagagaacttgcattgtcgatggaaagaagctgagaatcggggaatacaagcagctgatgcgaagccggaggcaggagatgcggcaattcttcactgtcggccagcagccacaaattccaattactacaggcaccggagtggtgtatcctggcgcgatcacaatggccaccacgacgccatcacctcagatgacaagcgattgcagtagcacatccgctagcccagagccatccctgcctgttattcaaagcacctacggcatgaagactgacgggggttcgttagcaggaaacgagatgattaacggagaggatgaaatggagatgtacgacgactatgaggatgacccgaagtcagactactcctccgaaaacgaagcccctgaggccgtttccgccaactag

SEQ ID NO: 136234 - DNA, 420 bp, synthetic construct
  misc_feature 1..420: note = Description of Artificial Sequence: Synthetic coding sequence
  source 1..420: mol_type = other DNA
atgtccagcaagcaggctacaagtccattcgcttgcgctgcggacggggaagacgcgatgacccaggacttaacgtctagggaaaaggaggagggaagcgatcagcatgtcgcttcacatcttcctttacacccgataatgcataataagccacattcagaggagcttcccaccctggtcagtacaatacagcaggacgccgactgggactcagtgctttctagtcagcagcgtatggaatccgaaaataacaagttgtgttctctctattcttttcgcaatactagtacctctccacacaagcccgatgagggctcacgcgatcgggaaatcatgaccagcgtcacttttgggactccagaacggagaaaaggctccctggcggacgttgtcgacaccctgaaacaaaaaaagctctag

SEQ ID NO: 136235 - DNA, 2406 bp, synthetic construct
  misc_feature 1..2406: note = Description of Artificial Sequence: Synthetic coding sequence
  source 1..2406: mol_type = other DNA
atgtccagtaaacaggctacgtcccccttcgcatgtgcagcggacggcgaagatgcaatgacgcaggacctcacatcacgcgagaaggaggaagggtccgatcagcacgtcgccagccatcttccccttcaccccatcatgcacaacaagccacattcagaagagctcccgactctagtgagcactatacagcaggatgctgactgggattccgttctaagttcccagcagagaatggagtcagagaacaacaaactgtgcagcctttactcattcagaaacaccagcacatcacctcacaagccagatgaaggcagccgtgatcgggagattatgacgagcgtgaccttcgggacccctgagcggcgtaaggggtcacttgcagatgtagtggacaccttgaagcagaagaagctcgaggaaatgacccgcaccgagcaagaggacagctcttgtatggagaagctgctgagcaaagactggaaggaaaaaatggagcgcctcaacacctccgagctgttgggcgagatcaaggggacccccgaatccctcgctgaaaaagaaagacaactgagtaccatgataacccagctcatttctttgcgggagcaactgcttgcagctcacgatgagcagaagaaactcgcagcgtcccagattgaaaagcaacgccagcaaatggatctcgcccgacagcagcaggagcaaatagccaggcaacagcagcagctgctccaacagcagcacaaaatcaacctgctccaacagcaaatacaggtgcagggccatatgccccctctcatgatcccaattttcccacatgatcagcggactttggcagccgccgccgcagctcagcagggcttcctgtttcctcccggcattacctataagccaggagacaattacccggtgcagttcataccctccacaatggccgccgcggcagcctcaggcttatcgcccctccaactccagcagctgtacgcagcccagctcgcctcaatgcaggtatcaccaggtgccaagatgccttctaccccccagcctccaaacaccgccgggaccgtatcccctaccggcatcaagaacgaaaaaagaggcacctcccctgtaacccaggtgaaggacgaggctgccgctcagccacttaatctctctagtcgcccaaagacagctgagcccgtcaagagcccgactagccctacccagaatctttttcccgcatcaaagacctctcccgtgaaccttccaaacaagtccagcataccaagccctattggaggatccttagggagagggtcaagcctagggaaatggaaatcgcagcatcaagaagaaacatacgagctcgacatcctgtccagcctaaacagtcccgcactctttggcgatcaggatacggtgatgaaggccatacaagaagcccggaaaatgagggaacagatccaaagggaacagcagcaacagcagcctcatggagtggacgggaagctgtcatcgataaacaacatgggactgaattcctgccggaacgagaaagagaggacaaggttcgaaaatcttggcccgcaactgaccggcaaaagcaatgaagatggtaagttggggcccggcgtgattgatttgacaagaccagaagacgcggagggaagcaaagctatgaatgggagcgccgctaaattgcaacagtactactgttggccgactggcggcgccacagtcgccgaagcccgtgtatacagagacgctcgcgggcgagcatcttctgagccccacatcaagagaccaatgaacgccttcatggtgtgggccaaggatgagcggcggaagatcttacaggccttccccgacatgcataactctaatatatccaaaatcctggggtccaggtggaaatccatgtcaaatcaggagaaacaaccctattatgaagagcaagctcgcctctctaaaatacacctggagaagtacccaaattataagtacaagcctagacctaagcggacatgcattgtggacggaaagaagctcaggatcggggaatacaagcaactcatgcgatcccgaaggcaggaaatgcggcaattcttcaccgttggacaacagccacaaatccctataacaactggtactggggtggtgtaccccggcgccattactatggctaccactactccaagcccgcaaatgacttccgattgttcatctacatctgcaagcccagagccctcattgcccgtgatccagagcacttatgggatgaaaacagacggaggcagcctagcagggaacgagatgatcaatggggaggacgaaatggagatgtacgatgactacgaggacgatcctaagtccgactactcatcagaaaacgaagcccctgaagctgtctcagcaaactag

SEQ ID NO: 136236 - DNA, 2487 bp, synthetic construct
  misc_feature 1..2487: note = Description of Artificial Sequence: Synthetic coding sequence
  source 1..2487: mol_type = other DNA
atgtcatcaaaacaggccacctcaccctttgcttgtgcagccgacggggaggacgccatgacgcaggacctgacttcaagggagaaggaggaaggatctgaccaacatgtcgcctcacaccttccattgcaccccatcatgcataataagccgcactcagaagaactcccgaccctggtgagcacaatccaacaggacgctgactgggactccgtcctgagctcacagcagcgcatggaaagcgaaaataataagctgtgttccctttatagctttaggaacaccagtacctcccctcataagcctgatgagggcagtcgcgaccgggagataatgactagtgtgacattcggcaccccagagagacggaaagggtccctggcagatgtcgttgacaccctgaagcagaagaagctggaggaaatgacaaggacggaacaggaggattcttcgtgtatggaaaagttgcttagtaaggactggaaggagaaaatggagcggttgaacacctctgaactgcttggagagatcaaaggcacccccgagtctcttgccgaaaaggaaagacagctgagcacaatgataacacaactcatctccctgcgggagcagctcctggctgcccacgatgaacaaaaaaaattggctgcttctcagatagaaaaacaaagacagcagatggacctcgcacgccagcagcaagaacaaatcgcgcgccagcagcaacagctattgcagcagcagcacaaaattaacttgctgcagcagcagattcaggtgcaaggccacatgccccccctgatgattcccatttttccacacgatcaacggactttggctgccgctgcggcggcccagcagggctttctgtttcccccgggcatcacctataaacctggcgataactacccagtgcagttcattccaagcacgatggccgcagcagccgcaagtgggctcagccctctccaactgcaaaaaggacatgtgtcccaccctcaaattaaccaacggctgaaaggcctgtccgatcggtttggtcggaacctagacaccttcgagcacggagggggacattcctataatcataaacagattgagcagctttatgcggcccaactcgccagtatgcaggtgagtcccggtgcaaaaatgccctcaactccccaaccacctaacacggccggtaccgtctctcccacaggtatcaagaacgagaaaagggggaccagtcccgttacacaggtgaaggacgaagccgctgcccagcccctcaatctgagtagcaggccaaaaaccgccgagcccgtcaagtctcctacgtcaccaacacaaaatctgttcccggcatccaaaactagccccgtaaatctgcccaacaagtcctccatccccagtcctatcggcgggtccctgggaaggggatctagtttagatatcctttcatcccttaattcacctgcattgttcggtgaccaagatacagttatgaaagctatccaagaggcgaggaagatgcgggagcagattcaacgggagcagcagcagcagcaacctcatggagtggatggcaaattgagctctatcaataacatgggccttaacagctgtcgaaacgagaaggaacggactagatttgagaatcttggtccacagctcaccgggaagtcaaacgaagatggtaaactggggcccggcgtgatagaccttactcggcctgaggatgcagagggctctaaagccatgaacggatcggccgcaaaactgcagcagtattactgctggccgactggtggcgctactgtggctgaggcccgtgtctatcgcgacgctagggggcgggcatcttctgagcctcatataaagagacctatgaacgcgttcatggtttgggcgaaggacgagcgccgtaagatcctgcaggctttccccgatatgcacaactccaatatcagcaagattcttgggagccgctggaagagcatgagcaatcaggagaagcagccctactacgaagagcaggcccgccttagtaaaatccacctggagaaataccctaactataagtacaaacccaggcctaaacggacatgtatcgtggatggtaagaagctacggatcggcgagtacaagcagctgatgaggtctcgccggcaggagatgagacaatttttcactgtcggacaacagccccagatcccaatcacaactggcaccggggtggtataccccggggccataacaatggctaccacaactccctctccccagatgacttcagactgcagctccacatcggcatccccagagcctagtctcccggtgatccaatccacatatggaatgaaaaccgatggcggaagcctagccggaaacgagatgattaatggtgaagacgagatggaaatgtacgatgactatgaggatgaccctaagagcgactacagcagtgagaatgaggcgcccgaggccgtgagcgccaactag

SEQ ID NO: 136237 - DNA, 240 bp, synthetic construct
  misc_feature 1..240: note = Description of Artificial Sequence: Synthetic coding sequence
  source 1..240: mol_type = other DNA
atgtcctccaagcaggcaacttcccccttcgcgtgcgctgcggacggggaggatgcaatgacccaggatctgacaagtagggagaaggaagagggttcagaccaacacgtggcttcccatctcccattacatcccattatgcacaacaagccacatagtgaggaattgcccacgctggtatccacaatccaacaggacgccgactgggattccgttctgagttcccagcagcggatgtag

SEQ ID NO: 136238 - DNA, 480 bp, synthetic construct
  misc_feature 1..480: note = Description of Artificial Sequence: Synthetic coding sequence
  source 1..480: mol_type = other DNA
atgtcaagcaagcaggccaccagccccttcgcttgcgcagccgacggcgaagacgcaatgacccaggatctcacaagtagggagaaagaggaggggtcggatcagcacgttgcctctcatctcccactgcacccaataatgcacaacaaaccccatagcgaggagctgccgaccctcgttagcaccatccaacaggatgccgattgggattcagtgctgtccagtcagcagcgcatggagtccgagaacaataaattatgttctctctattcttttagaaacacaagtacctccccccacaagccagatgaagggtcacgcgatcgggagataatgacttctgtcacgtttggcactcctgaacgacgaaagggctcactggcggatgtggtcgacacgctgaagcagaagaaattggaagagatgacaagaactgaacaggaagatagctcatgcatggagaagctactctctaaatag

SEQ ID NO: 136239 - DNA, 2415 bp, synthetic construct
  misc_feature 1..2415: note = Description of Artificial Sequence: Synthetic coding sequence
  source 1..2415: mol_type = other DNA
atgggcaggatgtcctccaagcaggctacctctcccttcgcgtgcgctgccgatggcgaagacgcaatgacgcaggacctcacgtctcgtgaaaaggaagagggtagtgatcagcacgtagccagccacctccctctgcacccaataatgcataacaagccacacagtgaggagcttccaacgctcgtgtctaccattcaacaagacgcagactgggacagcgtgctgtcttctcagcagagaatggaatccgaaaataataagctgtgcagcctgtactcattcaggaacacaagcacaagcccgcacaaacccgatgaagggtccagggatcgcgaaatcatgacgtccgtgacatttggcacacctgaaagacggaagggctcactggcagacgtagttgacaccttaaagcaaaagaaattggaagagatgaccaggacagaacaagaagactcttcatgcatggagaaactgcttagtaaagactggaaggaaaagatggagcgacttaacacctccgaattgctgggtgagatcaagggtacacctgagtctttggcggagaaggagcgtcagctttcgaccatgatcacccagttgatttcattacgcgaacagttactcgcagcccacgatgagcaaaaaaaactggccgctagtcagatcgagaaacaaaggcaacagatggacctggccagacagcagcaagagcagatcgcccggcagcagcagcagctcctgcagcagcagcacaagatcaacctgctgcagcagcagatccaggtccagggtcatatgcctccccttatgatccccattttccctcatgaccaaagaaccctggcagcagcggccgcagctcagcaggggttcctgttccctccaggcattacatacaagcccggcgacaattaccccgtacagtttattccgagtacgatggctgccgcagcagcatcaggtcttagcccactgcagttacagcagctgtacgccgctcaattggcaagcatgcaggtcagccccggcgctaagatgcccagcaccccccagcctccaaataccgcgggcaccgtcagtcctaccggaattaagaacgagaagagagggacttccccagtgactcaggtgaaggatgaagccgcagcacaaccactgaacttgtcgtctcgccctaagaccgccgaaccagtgaaaagccctacctcacctacccagaatcttttccccgccagcaagacttctccagtaaacctaccaaataaaagttccattcccagccccattggcggctccttaggacgaggctcttcactcggcaagtggaagtcacagcaccaggaggagacatatgagttggacattctcagctccctcaacagcccagcactatttggagaccaggacacagttatgaaagctattcaggaggcacgaaagatgagggagcagatccagcgagaacagcagcaacagcagccccacggggtggatggtaagctctccagcatcaataatatgggcttgaattcttgccgaaatgaaaaagagcgtactcgttttgaaaatttgggcccacaactgacaggtaagagcaacgaagatggcaaactcggcccaggggtgatcgacctgacccggccggaagacgccgaagggtccaaggcaatgaacggatcagctgccaaactgcagcaatactattgttggccgacaggaggcgctaccgtggctgaagcacgagtttaccgggatgctcggggcagggctagctcagagccacacattaaacgcccaatgaatgcctttatggtttgggcaaaggatgaacgacgcaagattctgcaggcctttccagacatgcataacagcaatatctctaaaattctggggtcgaggtggaaatccatgtccaaccaggagaaacagccatactatgaggaacaggcccggctttcaaaaattcaccttgagaagtatccaaactataagtacaaaccccgcccaaagaggacgtgcatcgtggacggtaaaaaactgaggattggcgagtacaaacagctgatgcgttcaagacgccaagaaatgaggcagttcttcacggtcggccagcagcctcagatcccaataactacaggaacaggggtggtctaccccggggctatcacgatggccacgactacgccttccccccagatgacctctgattgcagttccacctccgctagccccgaaccctccctgccagttatccagtccacatacggaatgaaaacagacggggggagtctcgccggtaatgaaatgattaatggggaggacgagatggagatgtatgatgattatgaggatgatcctaagtccgactactcctcagagaacgaggccccggaggcagtctcagccaactag

SEQ ID NO: 136240 - DNA, 1167 bp, synthetic construct
  misc_feature 1..1167: note = Description of Artificial Sequence: Synthetic coding sequence
  source 1..1167: mol_type = other DNA
atggctagtttgttaggtgcttatccatggcccgaaggactggaatgcccagctctggatgcagagttgagcgatgggcaaagcccacctgctgtgccacgacctccaggtgataaaggcagcgaatcacggatacggcggcccatgaatgccttcatggtgtgggccaaagacgagcgtaaacggctggccgtccagaatcccgatttgcacaacgccgagctttcaaagatgcttggtaagagctggaaggcacttactcttagccagaagagaccatacgtggatgaggctgagagactgaggctgcaacacatgcaagactaccctaactataagtacagacctcggcgcaagaagcaggcgaagagactgtgcaagagagtggacccgggattcctattatcaagcctgagcagagatcagaatgcactccccgagaagcgctccggctctcggggtgcattaggcgaaaaagaagaccgcggtgaatatagcccagggaccgctctgccttcactccgtggctgctatcacgaaggaccagcaggaggtgggggcggcgggaccccttcttccgtagacacttatccttacggattaccgacacccccagagatgagccctttggacgtacttgagccggaacagacatttttctcctctccttgccaggaggaacatggccatccacggcggattccacacctcccagggcacccgtactcgccagaatatgcaccctctcccctccattgctcccatcctttgggctctctggctctcggccaatccccaggggtgtccatgatgtctccagtgcctggctgccctccctcccctgcatattactcacctgccacatatcatcccctgcacagcaatctgcaagcccatctggggcagttgagtccgcctcctgaacatcctggatttgatgctctcgatcagctgtctcaggtcgaactgctcggcgatatggatcggaatgaattcgaccagtatctaaatacgcccggtcaccccgattctgctacgggcgcaatggcactttcaggtcatgtacccgtatctcaggtcactccaacggggcccactgaaactagcctgatttccgtgcttgcggacgcgactgccacatactacaactcctactctgtatcctag

SEQ ID NO: 136241 - DNA, 1323 bp, synthetic construct
  misc_feature 1..1323: note = Description of Artificial Sequence: Synthetic coding sequence
  source 1..1323: mol_type = other DNA
atgagtatgctcgccgagagaaggcgcaagcagaaatgggctgtggatcctcagaatacagcctggagtaacgacgacagcaagttcggacaacggatgctcgagaagatgggatggagcaaaggcaaaggtcttggcgcccaggaacagggcgccaccgaccacatcaaggtccaagtgaagaataaccacctgggcctgggggcaaccataaacaacgaggataattggatcgcccaccaggacgactttaaccagctgctggctgagctgaatacttgtcacgggcaggagaccacagactcatctgacaagaaagaaaaaaagagtttctcgcttgaagaaaagtctaagatttctaagaatagagtccattacatgaaattcaccaaagggaagagctggaaggcgctgacactctcgcaaaagcgcccatatgtagacgaagcggagcggctgagactgcagcacatgcaagattaccctaactataagtaccggccaagacggaagaagcaggcgaagaggctgtgtaagcgcgttgacccgggattccttttgagctctctgtctcgcgaccaaaatgcactccctgaaaagagatcagggtctcggggcgctttgggagaaaaagaggacagaggagagtattcgcctggcaccgcattaccaagcctacggggatgctatcacgaggggcccgccggcggaggagggggggggacacctagctctgtggacacttacccttatggattgccaacacctcccgaaatgtcacccctcgatgtgctggaacccgagcaaaccttttttagtagtccctgccaggaggagcatggacatcctcggcgaataccccaccttcctggtcacccatattcaccagagtatgcccccagtcccctacattgtagtcaccctttgggtagcctggcactagggcagtcccccggggtatcaatgatgagtccggtgccagggtgtcccccctcaccagcctattactcccctgctacatatcaccctctccattcaaacttacaggcccatctggggcagctgagcccacctccggagcaccccggctttgacgccttggatcagttgtcacaggttgagctgcttggagatatggatagaaacgagtttgatcagtatttgaatacacccggtcacccagatagcgccacaggggctatggcgctgagtggccacgtccccgtttcacaggtgactccaactgggcctacagagacctcccttattagtgtcttggcagatgcaacagcaacatactacaatagctattccgtgtcttag

SEQ ID NO: 136242 - DNA, 1341 bp, synthetic construct
  misc_feature 1..1341: note = Description of Artificial Sequence: Synthetic coding sequence
  source 1..1341: mol_type = other DNA
atgctggacatgtccgaggcccgtagccagcccccctgcagtccttccggtaccgcttccagtatgtcacacgtggaagactcagacagtgacgcccccccatcccctgctggatctgaggggctgggcagagctggtgtcgccgtcggcggcgcgaggggcgacccagctgaagccgctgacgagagattcccggcctgtatccgagatgctgtatcccaggtccttaaaggctatgattggagcctggttcccatgcctgtacgcggcgggggcggcggggcactgaaggccaaaccacacgtcaaacgccccatgaacgctttcatggtatgggctcaggcagcccgaaggaaacttgccgatcaatacccacacttgcacaacgctgagctgagcaagaccttgggtaaactctggaggctcctgagcgagagtgagaagaggcccttcgttgaagaagcggaaagactccgcgtacagcacaaaaaagaccatccagactataagtaccaaccccgccgtcgcaagagcgccaaggctgggcatagcgactccgattctggcgccgaactgggccctcaccccggaggaggggcagtgtacaaagccgaggctggtctaggagacgggcaccaccacggtgaccacaccggtcagacccacggaccacccactccacctacgacgccgaagaccgaacttcagcaggcgggggcaaagcctgagctcaagctagaaggcaggagacctgtcgactctggtaggcagaatattgacttctccaatgtggacatatctgagctgtcctctgaggtgatgggtaccatggacgccttcgacgtacatgagtttgaccagtatcttcccctgggaggtcctgcgcctcctgaaccaggtcaggcgtacggtggcgcatactttcacgccggcgcaagtccagtttgggcccataagagtgccccgtccgccagcgctagccccaccgagaccgggccacctcggccgcacattaagacggagcagccttcacccggacattatggagatcagccacgaggttctcccgattatggaagctgtagcggacagtcaagtgccacacctgcagccccagccgggccatttgcaggatcccaaggagactacggggatctacaggcctcatcctactatggagcctacccggggtacgcacctggactgtatcagtacccttgcttccactccccccgcagaccttacgcaagtcccttgttaaacggcctggcacttccaccagctcactcacccacttcccattgggaccagcctgtgtatactaccttaacccgcccctag

SEQ ID NO: 136243 - DNA, 1530 bp, synthetic construct
  misc_feature 1..1530: note = Description of Artificial Sequence: Synthetic coding sequence
  source 1..1530: mol_type = other DNA
atgaacttgttggatccttttatgaaaatgacagacgaacaggagaaagggctgtctggggctccgagccctaccatgagcgaggactccgcgggaagcccttgtccatccggatccggctccgacaccgaaaatactagaccacaggagaatacatttcccaagggtgagcctgatcttaaaaaggagtcggaggaagacaagttccccgtctgcatacgggaggccgtctcgcaggtcctaaagggatacgactggactctggtccctatgcccgtcagagtcaatggatcatccaaaaataaacctcatgtaaaacgacctatgaacgccttcatggtgtgggcccaggcagctagacggaaactcgccgatcaatatccacacctccataacgcagaactgagcaagacgctggggaagctttggaggttgctaaatgaaagtgaaaaaagaccatttgtggaagaggctgagaggttacgggtgcagcacaagaaggaccatcctgactataagtatcagcctcggcgacggaaatccgtgaagaatggacaagccgaggctgaagaggcgactgaacaaactcacatttcccctaacgctatcttcaaggctctgcaggcagatagtcctcacagctcttccgggatgtccgaagttcactcccccggcgagcacagcggccagtcccagggccctccaacacctccaacgactcccaagactgatgtgcagccagggaaggccgacctaaagcgcgagggcaggcctctgcctgagggagggagacagccgcccattgattttcgggatgttgatattggagaacttagctccgacgtcatcagcaacattgaaactttcgacgttaacgagttcgatcagtacttgccaccaaacggacaccccggagtccctgctacccatggccaagtgacatacaccggttcatacggtattagctctaccgcagccaccccagccagtgcaggccatgtgtggatgtcaaagcaacaggcgcctccaccaccgccacagcagccaccccaggcgccccctgcaccacaggcccctcctcaaccccaagctgctcctccccagcaacctgcagccccaccgcagcaaccacaagcacataccctgacaacactgtccagcgaaccaggacaatcacagagaacccacatcaagactgaacaactcagcccttcccattacagcgaacagcagcagcacagtccacagcagattgcatactcacccttcaacctaccacattactctccttcctaccccccaatcacaaggtcacagtacgactatactgatcaccaaaacagtagtagctactattctcacgccgctggccaagggactggattatatagcacgttcacctacatgaatccagcccaacggcctatgtacacacccatcgcagacacctcaggggtgcctagcatcccacagacgcacagtcctcaacactgggagcagcccgtatacacccaactgacacgaccttag

SEQ ID NO: 136244 - DNA, 1338 bp, synthetic construct
  misc_feature 1..1338: note = Description of Artificial Sequence: Synthetic coding sequence
  source 1..1338: mol_type = other DNA
atgaacctcctcgaccctttcatgaagatgaccgatgagcaggaaaaggggctgtccggcgcaccttccccgacaatgagcgaggacagtgcaggcagcccttgtccttctgggtctggctcagatacagagaatactagaccgcaggagaacacattccccaagggcgagccagacctgaagaaggaaagcgaggaggataagttccctgtttgcatacgggaggctgtctcccaggttcttaagggctatgattggactctggtacccatgcctgtgcgggtaaacggttcaagcaagaataagccacatgtgaagaggcccatgaacgcctttatggtgtgggcccaggccgcccgccgcaagctggccgaccaatatccacaccttcacaacgcagagctctcgaagaccctgggaaagttgtggcgactcctcaatgaaagcgagaagcgaccttttgtggaggaggcggaacgcctgcgagtccagcataaaaaggaccacccagactataaataccagcccaggcggcgcaagtccgtcaaaaatgggcaggctgaagctgaagaagctacagaacaaacccacatctcccctaacgcaatcttcaaggctctgcaggctgacagccctcactcctcaagtggtatgtccgaggttcactccccaggtgagcacagtggccaatcacaagggccacctacccctcccactactccaaaaacagacgtgcagcctggcaaggccgatctgaagcgtgaaggcagacctttgcctgagggggggcggcagccgccaatcgacttccgcgacgtcgacattggggaactgagtagcgacgtgatttccaatatcgaaacgttcgacgtgaacgaattcgatcagtacctaccacccaacggacacccaggggtcccagctacgcatggtcaggtgacctataccggctcgtatggcatcagttccacagcagccactccagcctcagctggccatgtgtggatgagcaagcagcaggcaccgccaccaccaccacaacagcactcgccgcaacagatcgcatacagtccgtttaatcttccacattacagcccatcatacccgcccattacacgaagtcaatacgactacacagatcatcagaattctagctcatattactctcatgcggctgggcaggggacagggctgtacagcacgtttacctatatgaaccccgcccagaggcctatgtatactccaatcgccgatactagcggcgttccttctatacctcagactcattcccctcagcactgggaacagccagtttacacgcaactgacccgcccgtag

SEQ ID NO: 136245 - DNA, 273 bp, synthetic construct
  misc_feature 1..273: note = Description of Artificial Sequence: Synthetic coding sequence
  source 1..273: mol_type = other DNA
atgagagggtacctggtggctattttcctgagcgctgtcttcctgtactacgttctgcattgtattctttggggaacaaacgtttactgggtagctccagtggagatgaaacggcgcaacaaaatacagccttgtctgtccaagcctgcctttgcaagtctcctgtctcaatcctctgcatatattctgagaaagggtatagaggaactgaatcaaaccagcattctgttcacacaagtgagcagcgtgagtcctttttctgtgtgcggctag

SEQ ID NO: 136246 - DNA, 273 bp, synthetic construct
  misc_feature 1..273: note = Description of Artificial Sequence: Synthetic coding sequence
  source 1..273: mol_type = other DNA
atgagggggtacttggtcgcaatcttcttgagcgcagtgttcttgtattacgttctccactgcatcctatggggtacgaatgtgtactgggttgcccccgttgagatgaaaaggagaaataaaatacaaccttgtctgtcgaagcctgcattcgcatctctcctgagtcagagctcggcttacatattacggaagggcatcgaggaactgaaccagacttctatcctgttcacccaggtctcctctgtgtccccctttagcgtgtgcggctag

SEQ ID NO: 136247 - DNA, 1335 bp, synthetic construct
  misc_feature 1..1335: note = Description of Artificial Sequence: Synthetic coding sequence
  source 1..1335: mol_type = other DNA
atgggcctgctcgtttttgtgagaaacctcttgttggcactctgcttatttctggtgctggggtttctgtactacagtgcctggaaacttcacctgttacaatgggaggaggattcttctaagtatagtcactcttcctccccccaggagaaaccggtggctgattccgtggtgctgagtttcgattcagcgggccaaactctggggtctgagtacgatagactggggtttctgctgaatttagacagcaaactgagtcctcgcacactctgcactgtggtgttcggattggactgcattcttgaatccccaggtgagccaaaaaaattactgatgcccgcatctcaccccctagagatcttgaagtccttatctgaagataccgcctttgcactcggcttcctgaaacttccgcggcctgccgagctagctacaaagtacgcgaacttttccgagggagcgtgtaagccaggctatgcgtcggcgctgatgactgccatcttcccccggttctcaaaacctgcccctatgttcctcgatgactcttttaggaagtgggcccgcattcgggaatttgtccctccttttggaattaagggacaagataaccttattaaggcaattctgtccgtgaccaaggagtatcgcttgactccagccttggactcgcttcgctgtcgtcgatgcatcattgtcggaaatggcggggttctcgccaacaagtccttggggtcacgcatcgatgactatgatattgtggtgcggctgaacagcgcaccagtgaaaggtttcgagaaagacgttggatcaaagacaacgctgcggatcacctaccctgaaggagctatgcagaggcctgagcagtacgagcgagactcgcttttcgtactggccggcttcaaatggcaggactttaagtggctgaaatatatcgtgtataaggagagagtgagcgcttccgacggcttctggaaatccgtggccacccgggtcccaaaggagcctcctgaaattcgtattctgaacccctattttattcaggaagccgccttcaccttaattggactgccatttaataatggattgatgggtcgtggaaacattcctacgctggggagcgtagccgtgaccatggctctgcacggctgtgatgaggtcgctgtcgcgggtttcggatacgatatgtccacacctaatgcacccctgcattactatgaaacagtacgtatggcagctataaaggagtcctggacacataatatacagagagagaaggagtttctgcggaagcttgtgaaagctcgcgtgataactgacctgtctagcggcatctag

SEQ ID NO: 136248 - DNA, 468 bp, synthetic construct
  misc_feature 1..468: note = Description of Artificial Sequence: Synthetic coding sequence
  source 1..468: mol_type = other DNA
atggggcttctggtctttgtcagaaatctcctcctagctctgtgtcttttcctggtcttggggttcctctattattccgcgtggaagctccatctcctccagtgggaggaggactctaacagcgtagtcctgagcttcgattcagcaggacaaaccctggggtccgagtatgaccggcttgggttcctgttgaacttggattcaaaactacccgcagagttggcgacaaaatatgcaaacttttcagaaggcgcctgtaaacctggctacgcctccgcgctgatgacagccatcttcccacggttcagtaaaccagcgcccatgtttctcgacgactcttttcgaaaatgggcccgaattagagagttcgtaccaccctttggaattaaaggccaagtgctggatgcacaatatcctgccagggaacgcgtgagcgctgaagctggtgagtcatctcggcatcactag

SEQ ID NO: 136249 - DNA, 1035 bp, synthetic construct
  misc_feature 1..1035: note = Description of Artificial Sequence: Synthetic coding sequence
  source 1..1035: mol_type = other DNA
atgggcctccttgtgttcgttcgaaacttactgctggcattgtgtctctttctggttctgggctttttgtactatagcgcttggaagctccatctcttgcagtgggaggaggactctaattcagtagtcctaagttttgatagtgcaggccagacactgggcagcgagtacgaccgcctgggcttcctgctcaatctcgactcgaagctgttcagcaagccagcacccatgttcctagacgacagtttcaggaagtgggcgcggatccgagaattcgtgccccccttcggaattaaagggcaggacaacttgatcaaagctatcctctctgtgacaaaggaatatcgacttacacccgctctggattctctgcggtgtcgcagatgtattatcgttggcaacggcggtgtgcttgctaacaaatctcttggttcacggattgacgattacgacatagttgtacggctaaatagtgctcccgttaaaggatttgagaaggacgtgggcagtaagaccacattacggattacttatcctgagggcgccatgcagcgccccgaacagtacgagcgcgatagcttatttgtgctggccggctttaaatggcaggactttaaatggctgaaatacattgtttacaaggagagagtcagcgcatctgatggcttttggaagagcgtcgccacacgtgtcccaaaggagccccccgagatccgcatcttgaacccatatttcatccaggaggcagcatttactttaattggcctgcccttcaacaacggcctcatgggcagagggaacattcccaccttgggtagcgttgctgttacaatggctctccacggctgcgatgaggtggctgtggcaggctttggctatgatatgtctactcccaatgccccacttcattattatgagaccgtgcgcatggcagctatcaaagagtcctggacgcataacatccagcgggagaaggagtttcttaggaagctggtaaaagccagggtgatcaccgacttatcgtccggcatttag

SEQ ID NO: 136250 - DNA, 687 bp, synthetic construct
  misc_feature 1..687: note = Description of Artificial Sequence: Synthetic coding sequence
  source 1..687: mol_type = other DNA
atgggactgctcgtctttgtgagaaatctcctcctcgccctctgtttgttcctcgtactgggttttctgtattacagtgcttggaagctgcaccttctgcagtgggaagaggactccaagtacgatcggctggggtttttactcaacctggatagtaaattgccagcagagctcgcaaccaagtacgccaactttagcgagggtgcctgtaagccaggatacgctagcgctctgatgaccgcgatttttccgaggtttagtaagcccgcccccatgttcttggacgactcctttaggaaatgggctcggatcagagaatttgtgccaccttttggcattaagggacaggacaatctgattaaagcgatcctgagtgtaactaaggagtatcgcctcaccccggcattggatagtctcagatgccgacggtgcatcatcgtgggtaacggaggcgtccttgccaataaaagtctgggctccaggatcgacgattatgacatcgtagtgagggtgcaccggatggccagcggcaacctgtggccactggagtgcccaaggagcccacttcggtttgaaagttccacacatattagctctcgtaggcctcccagtccttccttagcctgtccgtcaacaatggcatcgtgggccggcggaacctcactgccgctcgctgtgtggcagtag

SEQ ID NO: 136251 - DNA, 1173 bp, synthetic construct
  misc_feature 1..1173: note = Description of Artificial Sequence: Synthetic coding sequence
  source 1..1173: mol_type = other DNA
atgggcctgctagtgtttgtccgcaatctacttctggctctgtgcttgtttctggtgttggggttcctttactatagcgcatggaagctccatctgctgcaatgggaagaggactcttccaagtactctcatagttctagcccacaggagaaacccgttgctgactcagttgtgctctcttttgattccgccggccagactctgggctccgaatacgaccgcctaggcttcctgctgaacctggattccaagctccctgctgaactagctacaaagtatgccaatttctctgaaggcgcatgtaaacccggttacgctagcgctcttatgactgccatatttcctcgcttcagtaagcctgcccccatgtttctcgacgacagctttcgtaagtgggccaggatacgcgagttcgtacccccattcggcatcaaagggcaggacaatctaattaaagcaatactgtcggtgacaaaggagtaccgcctaacaccagcgcttgactcactaagatgtaggagatgtattattgttgggaatggcggcgtactcgcaaacaagtctctgggctcaagaattgacgattatgatatcgttgtgagattgaacagcgcccccgtgaaaggatttgaaaaggatgtgggctctaaaacgacactcagaatcacatatcctgagggggcaatgcagcggcctgagcagtatgaacgtgacagtctgttcgtgctggcaggttttaaatggcaggacttcaagtggctgaaatacattgtgtacaaagaaagggtttcagcatcagacggcttctggaaatcagttgccactcgcgtgccgaaagaaccccccgagataaggattctgaacccatactttattcaggaggccgcttttactctgattggactgccttttaataacggcctgatggggcgcggcaacattcctacgctcggatctgtggctgtaaccatggcccttcatggatgcgacgaggttgccgtggcgggttttggttacgatatgtcaacccccaacgctccactgcactactacgagaccgtccggatggccgctattaaagaaagctggacacacaatattcaaagagaaaaggagtttttgcggaagctcgtgaaagcccgggtgatcaccgacctgagcagcgggatctag

SEQ ID NO: 136252 - DNA, 1242 bp, synthetic construct
  misc_feature 1..1242: note = Description of Artificial Sequence: Synthetic coding sequence
  source 1..1242: mol_type = other DNA
atgggtctgctggtgttcgtcagaaatcttctgctggccctgtgccttttcctcgtcttagggtttctgtattacagcgcctggaaactgcacttgcttcagtgggaggaggactcgaagtacgacaggttaggtttcttgctgaacctggattctaaactctcgccaaggacactgtgcaccgtagtgttcggcctggactgcattcttgaatctcccggcgagccaaagaaactcctaatgcccgcttctcaccctctggagatcttgaagtcactgtccgaggatacagcctttgccttgggcttcctgaaactgccacggccggctgaacttgctactaagtatgcaaatttttcggagggggcatgtaaacccggatatgcctctgcccttatgacagccatctttccccgattctctaagcctgcccctatgtttctagacgacagcttccggaagtgggcccgtattcgcgaatttgttcctccatttgggattaagggtcaggataacctgatcaaggccattcttagcgtgacaaaggaatatagactgacgcccgcccttgacagccttaggtgtcgtcggtgtattatcgtcgggaatggaggcgtgttggccaataagtctcttgggtcccgaatcgatgattacgatatcgtagtccggttgaactcagcccccgtgaagggctttgagaaggacgtcggcagtaagactacgttaagaatcacgtatcccgagggcgctatgcaacgacccgaacagtatgaaagagactccctcttcgttctggccgggtttaagtggcaggatttcaagtggcttaaatacattgtgtacaaagaaagagtgagcgcgtcggacggtttttggaagtccgtggccaccagagtgcccaaggagcctccagaaatacgaatcctgaacccttattttatacaggaagctgccttcacgctgatcgggttgccattcaacaacgggctgatgggtcgaggaaatattcccacactcgggagcgtggctgtcacaatggcgcttcacggatgcgatgaagtggcggtcgccggcttcgggtacgatatgagtacgcccaacgcacccctgcactactatgaaaccgtgaggatggcggcaatcaaggagtcctggacgcacaatattcaacgagaaaaagaattcttgcggaaactcgtgaaagccagagtcatcacagaccttagcagcgggatttag

SEQ ID NO: 136253 - DNA, 834 bp, synthetic construct
  misc_feature 1..834: note = Description of Artificial Sequence: Synthetic coding sequence
  source 1..834: mol_type = other DNA
atgggcctgttggtgtttgtgcggaatctgctgctggctctttgtctgtttcttgtgctggggttcctgtactactcggcgtggaaacttcacttactgcagtgggaggaagattctaactccgtggtcctgagtttcgattctgctggacagaccctgggatcagaatacgatagactgggcttcctgttaaatcttgatagtaaactgcccgcggagctcgccacaaaatatgccaacttctcagagggcgcctgcaagcccggatacgcctccgccctcatgacggccatcttcccgaggttctcaaagcctgctccgatgttcctcgacgactcatttcgcaagtgggctagaatcagagagttcgtgcccccttttgggatcaagggacaggataacttaattaaggccatcttaagcgtgaccaaagagtaccgattgacgcccgccctggattccctacggtgtcgacgatgtatcatcgtagggaatgggggagtgctggccaacaaaagcctcggctccaggatcgatgactacgacatcgtagtgaggttaaatagtgctcctgtcaaaggtttcgagaaagatgtcggaagcaagaccactctgagaataacttaccccgaaggtgctatgcagcgccccgagcaatatgagagggattctttgtttgtccttgctggcttcaaatggcaggacttcaagtggctgaagtatattgtctacaaagaacgggtgtcctggacccataacatccaacgcgaaaaagagttcctgcggaagctcgtaaaggctcgagtcattacagatctgtccagtggtatctag

SEQ ID NO: 136254 - DNA, 1128 bp, synthetic construct
  misc_feature 1..1128: note = Description of Artificial Sequence: Synthetic coding sequence
  source 1..1128: mol_type = other DNA
atggggctcctcgtgttcgttcggaaccttctgttggcactgtgcttgtttctagtcttgggattcctgtactactccgcgtggaaactgcacttgctccagtgggaggaagacagcaacagcgttgttctgagtttcgactctgccggccaaaccctcggctcagagtacgatagactgggattccttctgaacctggactcgaagctccctgccgaattagcgacaaaatacgccaactttagtgagggggcctgcaaacccggctacgctagtgcattgatgacagcaatatttcccagattctcgaagccagcacccatgtttctcgatgactcgttccgtaagtgggctagaatcagggagttcgtacccccctttggcatcaaaggccaggataacctgattaaagctatcctcagcgttactaaagaataccgtttaacacctgctttggacagtctgcgttgtcgtcggtgcatcatcgtcgggaacggaggtgttctggcaaacaaaagcctggggtcccgaattgatgattatgatatcgtcgtccggctcaacagcgctcccgtgaaaggctttgagaaggacgttgggtccaagactacacttagaattacctaccctgaaggcgcgatgcagcgcccagagcagtacgagagagactctttattcgtcttggcaggctttaaatggcaggacttcaaatggctgaagtacatagtttataaggaacgggtcagcgcatctgatggattttggaaatctgtggcgactcgagtccccaaagagccacccgaaatccgcatcctcaatccatatttcattcaggaggctgccttcactctcataggtctacctttcaataatggtctcatggggcggggcaatattcccactctcggctcagtcgccgtgacgatggcactccacgggtgcgatgaggttgccgtggctgggttcggatacgatatgagcaccccaaatgcccccctccattactatgaaaccgtgcgcatggccgccatcaaggaatcttggacccacaacatccagcgcgaaaaggaattcttacgaaagctagtgaaagcgcgggttattacagacttgtctagtggaatctag

SEQ ID NO: 136255 - DNA, 1080 bp, synthetic construct
  misc_feature 1..1080: note = Description of Artificial Sequence: Synthetic coding sequence
  source 1..1080: mol_type = other DNA
atgggactcctggtgtttgttagaaatctgttgctggccctgtgtctttttttagttttgggcttcctgtattactcagcgtggaaactgcacctcttacagtgggaggaggatagcaaatacgatagattaggatttctgctcaacctggacagcaaactgcctgcagaactcgccactaagtatgccaatttttccgaaggagcctgcaaacccgggtacgcttctgctttgatgactgcaatcttccctcgcttctccaagcccgcgcctatgttcctggatgattcttttcgcaaatgggctcggatccgcgagtttgtgccaccattcgggataaagggccaagacaacctgatcaaggccattctctctgtgactaaggagtaccgtttgaccccagctctcgatagtctgcgttgtagaaggtgcatcatagtcggaaacggaggcgttctcgctaataaatctcttggcagccgcatagatgattatgatattgtggtgcgcctgaattccgctccggtcaaagggttcgaaaaggacgtgggatccaagaccacactgagaataacctatcccgaaggcgctatgcaaagacctgagcagtatgagagggactctctttttgtgctggcaggattcaaatggcaagattttaaatggttaaaatacattgtgtacaaggagagagttagtgccagcgacgggttttggaagtctgtcgcaactcgggtaccaaaggaacctcctgagatcaggattctcaacccatacttcatccaggaagccgcctttacactaatcgggttaccatttaacaacgggttgatggggagaggaaacatacctaccttgggaagcgtagctgttacgatggcactgcatggctgcgacgaagtggcagtggcgggatttggctacgacatgagcacccccaacgctcccttgcactactacgagacagtgagaatggcggcaataaaagaaagctggacccataatattcagcgtgaaaaggagttcttgcgaaaactggttaaagctcgggttatcactgatctgtcttccggaatctag

SEQ ID NO: 136256 - DNA, 1335 bp, synthetic construct
  misc_feature 1..1335: note = Description of Artificial Sequence: Synthetic coding sequence
  source 1..1335: mol_type = other DNA
atgggtttgttggttttcgtccgtaatctgctgttggcactgtgtttatttcttgtgctgggattcctgtattactcagcctggaaactccacctgctacagtgggaggaggactctagtaagtactctcattcaagctcccctcaggaaaaacctgtcgcggactcagtcgtactgtcttttgactccgccggccagacccttgggtctgaatacgaccggctcggttttctactgaatctggacagtaagctgagtccacgaacgctatgtacagtggttttcggcctggactgcatcctggaatcccccggagagcctaaaaaattgttaatgccagcctcccacccccttgagatcctgaaaagtttgtctgaggacacagccttcgcattaggattcctgaagctcccaagaccagcagagctggccaccaaatatgctaatttttccgagggggcatgcaaaccaggatatgcatctgccttgatgaccgctatttttccccgcttcagcaaaccagccccgatgtttctggacgactctttccggaaatgggctcggattagggaatttgtgccaccgtttgggatcaaaggacaagataacttgatcaaggcaatcctctccgtgaccaaggagtaccggctcactccggctctggacagtctgaggtgtcggagatgcattatagtcggaaatggcggcgtcctcgctaataagagcctggggtctaggattgacgattatgacatcgtggttaggttaaacagtgcccctgtgaaaggcttcgaaaaagacgtgggtagcaaaactacgctgcgcatcacctaccctgagggcgccatgcaaagaccggagcaatacgagagggattctttgtttgtgcttgcgggctttaagtggcaagatttcaagtggctgaaatatatagtttacaaagagagagttagtgcatctgacggcttctggaagagcgtagccacccgtgtccctaaagaaccgccggagatccggatcctcaacccatactttatccaggaggctgctttcactttaattggattaccgttcaacaacggtctcatgggccggggaaacattcccactctaggctcggtggcagtgacgatggccttgcacggctgcgatgaggtggccgttgcaggattcggatacgacatgagcaccccaaatgcacccctccactactacgagaccgtgaggatggccgcgatcaaggagtcatggactcacaacatccagagagagaaggaatttctgagaaaattggtgaaagccagggtgatcactgatctttcttctggtatttag

SEQ ID NO: 136257 - DNA, 513 bp, synthetic construct
  misc_feature 1..513: note = Description of Artificial Sequence: Synthetic coding sequence
  source 1..513: mol_type = other DNA
atggggcttttggtgttcgtgcggaatcttctgctcgcgctgtgtctctttcttgtgctaggatttctctattactctgcttggaagctgcacttgttgcaatgggaagaggactcaagcaagtacagccattctagcagtccgcaagaaaaaccagtggccgattccgtggtattgagcttcgattccgctggacagactctggggagtgaatacgaccgattaggttttctgctgaacctggactccaagctccctgccgaattagctactaagtacgcaaattttagcgaaggtgcctgtaaacctggctatgcctcagccctgatgaccgcaattttcccgaggttctccaaacccgcccccatgtttctcgatgattcatttcgcaagtgggcaagaatcagagagttcgtcccgccgtttggaattaagggccaggtcctagacgcgcagtacccagcgcgagagagagtcagtgctgaagccggagagtcatccagacaccactag

SEQ ID NO: 136258 - DNA, 468 bp, synthetic construct
  misc_feature 1..468: note = Description of Artificial Sequence: Synthetic coding sequence
  source 1..468: mol_type = other DNA
atgggcctgctcgtgttcgtgcggaacctcctgctggcgctatgtctctttctcgtcctggggttcctgtattacagtgcatggaagttgcatctgttgcaatgggaagaagattccaattccgtggtgctgtcatttgacagcgccggacaaaccctggggtccgagtacgacagactcggattcctgttgaatttggacagtaagcttccagccgagcttgcgaccaagtacgcgaacttcagcgagggagcctgcaagccagggtacgccagtgccttgatgacggccattttccccagatttagtaaaccagctcccatgttccttgacgacagctttcgtaagtgggctaggatcagagagtttgtgcccccttttggaatcaagggacaagtgttggatgcacagtatcccgctcgcgagcgggtttctgcggaagctggagagtcgagcagacatcattag

SEQ ID NO: 136259 - DNA, 561 bp, synthetic construct
  misc_feature 1..561: note = Description of Artificial Sequence: Synthetic coding sequence
  source 1..561: mol_type = other DNA
atggggctgctggtcttcgttagaaatctgttgttagctctgtgcctgtttttggtgctcggatttctgtattactctgcttggaaactgcatctgttgcaatgggaagaggacagtaattccgttgttctgtcttttgattcagccggccaaaccttgggcagcgagtatgacaggctgggcttcctgctgaacctcgactcaaagctccctgccgaactggctacaaagtacgcaaacttcagcgagggagcatgtaagccggggtacgcttccgccctaatgacggccattttcccaaggttctcaaaacccgcccctatgtttctcgatgatagttttagaaagtgggctcggattcgagagtttgtgccgcccttcgggattaaggggcaagacaacctgattaaagccatactgagtgtaactaaggaatatcggctgactccagcattagactcgctacgctgcaggagatgtatcattgtcgggaacggtggcgtgttggcgaacaaatcgcttgggtcgagaatcgacgattacgacattgtcgtgcgttag

SEQ ID NO: 136260 - DNA, 558 bp, synthetic construct
  misc_feature 1..558: note = Description of Artificial Sequence: Synthetic coding sequence
  source 1..558: mol_type = other DNA
atggggctgctggttttcgtgcgaaatctgcttctggcactgtgtctgttcctcgttctcggattcctgtactattctgcctggaagcttcatttgctgcagtgggaggaggattcttctaagtatagtcatagttctagtccgcaagaaaagccagttgccgaatatgatagactcggcttcttactgaacctcgactccaaactccccgctgaactggccactaagtacgccaattttagtgagggcgcgtgtaaaccggggtacgcttccgccctgatgacagccatcttccctcggttctctaagcccgccccaatgtttctcgacgacagcttccgaaaatgggcaagaattagggaattcgtgccacctttcggaatcaaaggacaggacaatctgatcaaagctattcttagcgtaacaaaagaataccggctcacacccgcactagacagcctaaggtgcaggcgatgcataatcgtgggaaatggcggcgttttagccaacaagagtctaggtagccgaatcgatgactacgatatcgtggttagatag

SEQ ID NO: 136261 - DNA, 606 bp, synthetic construct
  misc_feature 1..606: note = Description of Artificial Sequence: Synthetic coding sequence
  source 1..606: mol_type = other DNA
atgggactgctagttttcgtccgcaacctgttgcttgcattgtgtctcttcctcgtcctgggatttttgtactacagtgcttggaagctgcacctcctgcaatgggaagaagactccagtaagtactctcactcttcatcaccacaggagaaacccgtggccgagtatgatcgactcggcttcttgctgaatctcgactccaaactgcctgccgagttggctaccaagtatgctaacttctcagagggagcttgcaaaccagggtacgcgtctgcactgatgaccgcaattttcccgcgctttagtaagcctgcaccgatgtttctggacgattcctttcgaaaatgggctcgcattcgagagttcgtgccaccgttcggtatcaaggggcaggataatctcataaaggccatactttcagtaacaaaagagtaccgcctgaccccagccctcgactccctgcggtgtcgcaggtgcatcatcgtcggaaacggcggcgtcctggctaataaatctctgggttctagaatcgacgattacgacattgtagtcagccccggccgcaccatcagttctgagaggaagtcattctgtggctcatggtag

SEQ ID NO: 136262 - DNA, 1290 bp, synthetic construct
  misc_feature 1..1290: note = Description of Artificial Sequence: Synthetic coding sequence
  source 1..1290: mol_type = other DNA
atgggtctgctggtgttcgtcaggaacctcctgctcgcattgtgtctctttctcgtgctcgggttcctgtactattcagcatggaaactccacctgcttcagtgggaggaagatagtaactcagtggtcctgagttttgacagtgcagggcaaacccttgggtcagagtatgacagactgggatttctcctcaacctcgacagcaaactctcaccacgaaccttatgtactgtggtcttcggactcgactgtattctggaaagcccgggcgagccgaagaaactgctgatgcccgcaagtcacccgctggaaatactcaaaagtctctcagaggacacggccttcgccctgggctttctgaaactgccacggcccgcagaactcgctaccaagtatgccaacttcagcgaaggcgcgtgtaaaccagggtacgctagcgcactgatgaccgccatattccctcggttcagcaaacccgccccaatgttcctggacgatagcttcaggaagtgggccagaatcagggagtttgtaccccccttcgggattaagggccaggacaacctgatcaaggccatactgtccgttacaaaagagtatagactaactcctgccctcgactctctgaggtgtcgcagatgcattattgtgggcaacgggggagtcctggctaacaaaagtctgggaagccggattgatgactacgacatcgttgtgcggcttaactctgctcccgtgaaagggtttgagaaagacgtgggatccaagacaacactccgcatcacgtatccagaaggcgccatgcagagacccgaacagtatgagagagactccctgtttgtgctcgcagggttcaagtggcaggactttaagtggctcaaatacattgtgtacaaggagcgtgtctccgcctcagacggcttctggaagtccgtagctaccagagttccgaaagaacctccagagatacggatactgaatccatattttatccaagaagccgcttttaccctgattggcctgccctttaacaacggcctaatggggagaggtaatataccaacactagggtccgtcgccgtgaccatggccctgcatgggtgcgatgaagtggccgtcgcaggcttcggttacgacatgagcactcctaatgcaccattgcactattacgagaccgttaggatggctgccataaaggagtcatggacacataacatccaacgcgagaaggagtttttgagaaaacttgtgaaggctcgggtgataaccgacctcagtagtggcatctag

SEQ ID NO: 136263 - DNA, 1038 bp, synthetic construct
  misc_feature 1..1038: note = Description of Artificial Sequence: Synthetic coding sequence
  source 1..1038: mol_type = other DNA
atgggcctgctcgtctttgttagaaatctgttgctcgcactatgtctgttcctcgtgttgggctttctttactacagtgcatggaagttacatttactgcagtgggaggaagactcaaactccgtggtgctgagtttcgactccgctgggcaaactctgggaagcgaatacgatcgtctcggattcttactcaacctcgattcaaagcttccagccgagttggcaaccaaatacgccaacttctccgaaggcgcctgtaaacccgggtacgcgtcagcactgatgaccgccattttcccacggttcagcaaaccagcccccatgtttttagatgattcttttaggaagtgggcccgcatccgtgagttcgtgcctccttttggtattaaaggccaggataatctcataaaagctatcttaagcgtgaccaaggagtaccggctgacccccgccctcgatagcctccgatgtcgcaggtgtatcattgtgggaaatggtggggttttggctaacaagtcactcggaagtaggatcgatgactatgatatagtcgttcggctgaactctgcccctgtcaagggatttgagaaagacgtaggcagtaaaacaacgttacgtatcacataccccgaaggcgccatgcagagaccggaacagtacgagagagattcactgttcgtgctggcaggattcaagtggcaggatttcaaatggcttaagtacattgtgtataaggaaagggtggaggcggcgttcacccttatcgggcttccttttaacaacgggctcatggggaggggtaatattcccacattggggtccgtggcagtgaccatggccttgcacggctgtgatgaagtcgcggtggcaggctttggctacgacatgtcaacgcccaacgcacctctacactattatgaaaccgtgagaatggccgccatcaaagaatcatggacacacaacattcaaagagaaaaggagtttttgcgcaagttagtgaaggcaagggtgataaccgatctgtcttcagggatatag

SEQ ID NO: 136264 - DNA, 1242 bp, synthetic construct
  misc_feature 1..1242: note = Description of Artificial Sequence: Synthetic coding sequence
  source 1..1242: mol_type = other DNA
atgggactgctcgtcttcgtgaggaatctgctcctagctctttgtctattcctggtgcttggattcctgtactattccgcatggaaactgcacctgctgcagtgggaggaagattcaaagtatgaccggctgggcttcctgctgaacctggattccaagcttagtccaaggacattgtgcacagtggtatttgggctggattgtattctggaaagccctggcgaacctaagaaactgctcatgccagcctcgcacccgctggaaatcctgaaatcgctgtcagaagatacagcgttcgcactcggattcctgaagctgccccggccagcagaactcgcaacaaaatacgccaatttctccgaaggggcatgtaaaccgggctatgccagcgcattgatgaccgccatttttcccagattttccaagcccgcccccatgtttcttgatgacagtttcaggaaatgggccagaatacgcgagtttgtaccacctttcggcattaagggacaggacaacctcataaaggccatcctaagcgtcacgaaggagtatcggctgacacctgcattggattcactgagatgtcggcgctgcattatcgtgggaaacggcggggtgctggccaataaatccctgggttcacgtattgatgactacgacattgtggtaaggctaaattcagcaccagttaagggcttcgagaaggacgttggctctaaaaccactcttcgaattacctacccagagggcgccatgcagcgccccgagcagtatgaacgggattccctctttgtgctcgcagggttcaagtggcaggactttaagtggttgaagtatatagtctataaggagagagtgtcagcatctgacgggttttggaagagcgttgctaccagggttccgaaagagccccctgagatccgcatcttgaatccatactttatccaagaggccgctttcacgttgatcggacttccattcaacaatggactgatgggtaggggaaatatccctacgctgggcagcgtagctgttaccatggccctgcacggctgcgatgaagtggccgtggcaggatttggttacgatatgtcaacacctaacgcccccctgcactactatgagactgtgcggatggctgccatcaaggaatcctggactcacaatattcagcgcgagaaagagttcctgcgcaagttagtgaaagctcgtgtgattacagaccttagctcaggcatatag

SEQ ID NO: 136265 - DNA, 1035 bp, synthetic construct
  misc_feature 1..1035: note = Description of Artificial Sequence: Synthetic coding sequence
  source 1..1035: mol_type = other DNA
atgggtttgttggtctttgtgcgaaacttgctgttggcattatgcctttttttagtactgggattcctgtactactctgcttggaagttacacctcctgcaatgggaggaggacagcaatagtgttgtgctgtcattcgattccgcgggacagacactgggatcggagtatgaccgactgggttttttattgaaccttgactccaagctcttttccaaaccagcccccatgttccttgatgactcctttagaaaatgggcaagaatccgggagtttgtgccaccttttggcattaaaggccaggacaacttgatcaaagcaattttgagtgtaaccaaagaatacaggctaacccctgctctcgacagtctgcgatgccgaagatgcatcatcgtcggaaacggtggggtgctggcaaacaagagtctgggctccaggatcgatgactacgacatcgttgtgcgcttaaatagtgctcctgtcaagggcttcgagaaagacgtgggctcgaagaccacacttcggataacctacccagagggcgcaatgcaacgaccagaacagtatgagagggattctctgttcgtcctagcaggcttcaaatggcaagatttcaagtggctgaagtacatcgtgtataaggagcgagtaagcgcctctgacggtttttggaaatcggttgcgacgagggtgcctaaagagccccccgagatcagaattctgaacccatatttcatacaagaggcagccttcacactgatcggcctgccgtttaataacggacttatgggccgtggaaacattccaacattgggatcagttgctgttacgatggctcttcatggctgtgatgaggtggctgtggccgggtttggatatgatatgtcaactcctaatgccccactgcactactatgagacagttcgcatggctgccatcaaggagtcttggacccacaacatccagcgggaaaaggagtttctgcgcaaacttgtgaaggctagagtaatcaccgatctgagcagcggaatctag

SEQ ID NO: 136266 - DNA, 1290 bp, synthetic construct
  misc_feature 1..1290: note = Description of Artificial Sequence: Synthetic coding sequence
  source 1..1290: mol_type = other DNA
atgggtttgctggttttcgtccgaaatctgctgctggcattgtgcctgttcctggtgctgggcttcctgtactattctgcctggaaattgcacttactgcagtgggaagaagattctaatagcgtagtcctctcatttgactctgccggacagacgctcgggagcgagtatgaccggctcggttttctgttgaacctggactcgaaactgtctccccgaactctttgcaccgtggtatttggccttgactgcatcctcgagtcacccggtgagccaaagaaacttctgatgcccgccagtcatcccctggagattctcaaaagcctgagcgaagataccgcgttcgcattagggttcttgaaattgccgagacctgcagagcttgcaactaaatatgctaacttctccgaaggggcatgcaagccaggttacgcttctgcccttatgaccgcaatctttcctcggttcagcaagccagcacctatgtttctggacgattccttcagaaaatgggccagaattagggaattcgtgccaccatttggaatcaaagggcaggacaacctcattaaggctattcttagcgttactaaagagtacaggctgacccctgcccttgactcactgcgctgtaggaggtgtatcatcgtcggaaatggcggagtcctggccaacaaatctttgggctcacgaattgatgactacgacatcgtggtaagactcaactcggcccccgtgaagggattcgagaaagacgttggctccaaaaccaccctgcgcattacctaccccgagggtgccatgcaaaggcctgagcagtacgagagggattctctgttcgttctagccggcttcaagtggcaggactttaagtggctgaagtatattgtgtacaaagagcgtgtttccgcctccgatggattctggaaaagtgtggcgacacgggttcctaaagagccaccggagatcaggatcctgaatccttattttattcaggaagctgcgtttaccttgatcggtctgccatttaataatggtctgatgggcagaggaaacatccccaccttggggtccgtggcagtgacaatggcattgcacggctgcgacgaagtggccgttgccgggtttggatacgacatgtccacccccaacgcccctctccattattacgaaactgtgaggatggcagccatcaaggaaagctggactcacaatattcagagggagaaggagtttctccgtaagcttgtgaaggcccgcgtgatcactgatctgtcttctgggatctag

SEQ ID NO: 136267 - DNA, 456 bp, synthetic construct
  misc_feature 1..456: note = Description of Artificial Sequence: Synthetic coding sequence
  source 1..456: mol_type = other DNA
atggggctccttgtttttgtgaggaacctgctgctcgcactctgcctgttcctggtgctgggcttcctctactattccgcttggaaactacaccttttgcagtgggaggaggactccaacagtgtggtcctgtcttttgactcagccggacagaccttaggaagcgaatacgaccggttaggattcctcctcaaccttgactcaaaattgcctgccgaattggcgacaaagtatgcgaatttttcagagggggcttgtaagccaggctacgctagcgctctgatgaccgccatcttccctagatttagcaaacctgctccgatgttcttagacgattctttcagaaagtgggcccgaatcagggagtttgtgcccccgttcggaataaaagggcaggaatgtattggctggttgttagagatatgtggccactcatctgcacagggagccccttag

SEQ ID NO: 136268 - DNA, 561 bp, synthetic construct
  misc_feature 1..561: note = Description of Artificial Sequence: Synthetic coding sequence
  source 1..561: mol_type = other DNA
atgggcctgctggtgttcgtgcggaatttactgttggcgctgtgtctgtttttggtcctcggcttcctgtactactctgcctggaaacttcatctgctccagtgggaggaggattcaaaatacgatagactcgggttcttactgaatctcgattcgaaactgcctgctgagttggccactaaatacgctaatttctctgagggagcttgtaaaccaggctacgccagcgccttgatgaccgctatttttccgcgtttttctaaaccagcacctatgtttctggacgactcttttaggaagtgggcacggatccgagagtttgtgccgcctttcggaatcaagggtcaggacaatctgattaaagcaatcttaagtgtcacaaaagagtaccggctcacccccgcccttgactccctccgctgcaggcgctgtatcatcgtcggtaatggcggcgtcctggccaacaagtctttgggttcccgaatcgacgactacgacattgtggtatcacccggaagaaccatatcctcggagagaaaaagcttttgtgggagctggtag

SEQ ID NO: 136269 - DNA, 420 bp, synthetic construct
  misc_feature 1..420: note = Description of Artificial Sequence: Synthetic coding sequence
  source 1..420: mol_type = other DNA
atgggattgctcgtgttcgtgagaaatcttctgttggccctatgcctgtttttagttcttggcttcctgtactattccgcgtggaagttgcacctgctccaatgggaagaggactcaaaatatgaccgcctggggtttctcctcaacttggactccaaactgccagccgagttggcaacaaagtacgctaatttcagtgagggtgcttgcaagccggggtatgcatccgcactcatgacggccattttccctagattctcaaagccagctcccatgttcctggacgacagtttcagaaagtgggcccggatccgggagtttgttcctccctttggaatcaaaggccaggtgcttgacgcgcagtaccccgccagagagagagtttctgccgaagctggcgagagctccaggcatcactag

SEQ ID NO: 136270 - DNA, 306 bp, synthetic construct
  misc_feature 1..306: note = Description of Artificial Sequence: Synthetic coding sequence
  source 1..306: mol_type = other DNA
atgggtttgttggtgttcgtgcgtaacttgctgcttgccctatgcctattcctagtgttgggcttcctgtattattcagcctggaaactgcaccttctccagtgggaagaagatagcaagtacgaccggctgggattcctgcttaatctcgatagtaagctgccagcggagctcgcaacgaagtacgcaaattttagtgagggagcctgcaaacccggatacgcgagtgcccttatgaccgcaatcttcccgcggccaggaaggaccataagcagcgagaggaaatccttttgtggctcctggtag

SEQ ID NO: 136271 - DNA, 786 bp, synthetic construct
  misc_feature 1..786: note = Description of Artificial Sequence: Synthetic coding sequence
  source 1..786: mol_type = other DNA
atgggattacttgtttttgtccgaaacctgctgctcgccctgtgtctgttccttgtgttgggattcctatattacagtgcttggaaactgcatctgctgcagtgggaggaggacagcaagtatgatagactgggtttcctactgaatctagactcaaagctaccggcggagctcgccaccaagtatgcaaacttctcagagggagcttgtaagcccggatacgcatctgcactgatgacagctatcttccccagattctctaaaccggcccctatgttcttggacgacagcttccgcaagtgggctcggatacgtgagtttgtcccaccatttggaataaaaggacaagataacctgattaaggcaattctaagcgtgacaaaggaataccggctgactccagctcttgattcacttcgctgtaggagatgtattatcgtagggaacggcggtgtgctcgccaacaaaagcctcgggagcaggatcgatgattatgacatagtcgtcaggctgaattccgcgccagtcaagggcttcgaaaaagatgtcgggtctaagactactttgcgcattacgtacccagaaggcgccatgcaacggcccgaacagtacgagcgggactctctttttgtcttggccggcttcaagtggcaggacttcaagtggctgaaatacattgtgtacaaagaacgggtttcctggacacacaacatacagcgggaaaaggagtttctgagaaaattggtaaaggcccgagtcataactgacctcagctcagggatatag

SEQ ID NO: 136272 - DNA, 834 bp, synthetic construct
  misc_feature 1..834: note = Description of Artificial Sequence: Synthetic coding sequence
  source 1..834: mol_type = other DNA
atgggtctgcttgtgtttgtgcggaacctgctgttagccctatgtctctttctggtcctgggttttctgtactatagcgcctggaagctccacctgttgcaatgggaggaagactcaaatagtgtggttctgtcgttcgactctgccggacagacattaggctcggaatatgacagactgggtttcctcctcaatctagattcaaagcttcccgcggagctggctactaagtacgccaattttagtgagggtgcatgcaaaccaggatatgcttctgccctcatgaccgcaatctttcctagattctcaaaaccggctcccatgtttcttgacgattcctttcgcaagtgggcaaggattcgggagttcgtcccgcccttcggcattaaaggacaagataatcttatcaaggcaattcttagtgtcaccaaagagtaccgtctcacaccggcactcgacagcctgcgctgccgacgctgtatcattgtggggaacggtggcgtgctcgcgaacaagagcctgggctctcggatcgacgattacgatatcgttgtgcgccttaatagtgcacctgttaagggctttgaaaaggatgttgggtctaaaaccactctaaggatcacataccctgagggagcaatgcagaggcccgagcagtacgaaagagacagtctattcgttctggcggggttcaagtggcaagacttcaaatggctgaaatacatcgtctacaaagagagggtctcatggacacataatatacagagggagaaggagtttctccggaagctcgtaaaggctagagtaattacggatctaagcagtggcatttag

SEQ ID NO: 136273 - DNA, 513 bp, synthetic construct
  misc_feature 1..513: note = Description of Artificial Sequence: Synthetic coding sequence
  source 1..513: mol_type = other DNA
atgggcttgctggtgtttgtgcgcaatcttctcctcgcgttatgtctgttcctggtgcttggctttctctattatagcgcctggaagctgcacttgttgcagtgggaagaggattcatcaaaatattcccattcaagctccccccaggagaagcctgttgccgactcggtcgtcctctccttcgatagtgctggccagaccctgggcagcgaatatgaccgtctgggattcctcctgaatttggatagtaagctccctgctgaactggctacaaaatacgctaatttcagcgagggagcctgcaagcctggctatgcctctgctctcatgacggcaatttttcccaggttctccaagccagcacccatgtttttagacgattccttccgaaagtgggcccggattcgggaattcgtgcctccctttggcattaaaggccaagtgctggacgcccagtacccagcccgcgaaagggtgtccgcggaggcaggagagtcatcaagacatcactag

SEQ ID NO: 136274 - DNA, 642 bp, synthetic construct
  misc_feature 1..642: note = Description of Artificial Sequence: Synthetic coding sequence
  source 1..642: mol_type = other DNA
atgcgcacttccgccgagtacttccgcctcgctctgagcaagcttcagagctgcgacctattcgacgaatttgataaaatgaacaatggcccagtccttgggcatgaagaagaagtgggaaggcgaacgacattcagactattctatcccgaatcagtcttctcggacccgattcacaacgaccctaatactacggtgatcctcactgcttttaaaccccacgatctccgatggctactggagcttctgatgggtgataagataaataccaatggtttttggaaaaaacctgcgcttaacctcatatataaaccctaccagatacggatactcgatccatttatcatcagaacagcagcttatgagttactgcactttcctaaggtattccccaagaaccaaaagcccaagcatccaaccactgggatcattgccattactttagccttctatatatgccacgaggttcacctggcgggttttaaatacaattttagcgacctgaagagcccgcttcactactacgggaatgccactatgtccctgatgaataaaaacgcttatcacaatgtcactgcagagcagttatttttaaaggatattattgaaaagaatcttgtgatcaatctcacccaggattag

SEQ ID NO: 136275 - DNA, 996 bp, synthetic construct
  misc_feature 1..996: note = Description of Artificial Sequence: Synthetic coding sequence
  source 1..996: mol_type = other DNA
atgaggggttatctggtggccatcttcctttccgcagtgtttctgtattatgtcttgcattgcattttgtgggggaccaatgtctattgggtggcccctgtggaaatgaagcggcgcaacaagattcagccatgcctgagcaaacctgccttcgcctcgctgttgcggtttcaccagttccaccccttcctgtgtgcagccgactttcgcaagattgccagtttgtacggatccgacaagtttgacctgccttatgggatgcgtacctctgccgaatacttcagacttgccctatcaaaacttcaatcatgtgacctcttcgatgagttcgacaacattccttgcaaaaagtgcgtggtcgttggcaacggcggcgtgctaaagaacaaaaccttgggagagaaaatcgactcctacgacgtgattatccggatgaacaacggacctgttttaggccatgaggaggaggtggggagacggacaacatttaggctattttatccggagtctgtcttcagcgatcctatccacaacgatcctaatactaccgtgatcctcactgcctttaagccgcacgatctgcggtggctgctggagctgctcatgggtgacaaaatcaacacaaatggtttctggaaaaagccagcactgaacctgatctacaaaccataccaaattcgaattttggatcctttcattatacgtacagcagcttacgaactcctccacttccccaaggtcttccccaaaaaccagaagcctaagcaccctaccaccggtattatagcaatcaccctggccttctatatatgtcacgaggtccatctcgccggctttaagtataatttttcagatttaaaaagcccactgcattattacggaaacgcaacaatgagtctaatgaacaagaacgcttatcacaacgttacggccgaacaattattcttaaaagacatcatcgaaaagaacttggtgattaacctgactcaggactag

SEQ ID NO: 136276 - DNA, 996 bp, synthetic construct
  misc_feature 1..996: note = Description of Artificial Sequence: Synthetic coding sequence
  source 1..996: mol_type = other DNA
atgagaggatacttggtggctatttttctgtccgcagtcttcctgtactatgttctgcactgtattctgtggggaaccaacgtttattgggtggctccagttgaaatgaaacgccgaaataaaatccagccatgtcttagcaaaccggcctttgcatcactgctccgcttccaccagttccacccttttctgtgtgctgcagatttccgtaagatagcaagtttatacggcagcgataagttcgacctaccctacggcatgagaacgtcagcagaatattttcggctggcgctgagcaagctccaatcctgcgatttgtttgatgagtttgataatatcccttgcaagaaatgcgtggtggtagggaacggtggagttctgaagaacaaaactcttggagagaagatagactcttatgacgtcattatacgcatgaacaacggtcctgttctggggcatgaggaggaggtagggaggcgtaccacgtttaggctgttctatcctgaatccgttttttcagatcccatccataacgaccctaatactacagtgattctgacggctttcaagccccatgatttgaggtggctgcttgagctccttatgggcgacaaaattaatacaaacggattctggaagaagcctgcgctcaacttgatctacaaaccttaccagatccggatcctggatccctttattattaggactgccgcatacgaattgctccatttcccaaaggtgtttccgaaaaatcagaaaccaaaacacccgacaactggcattatcgccatcaccctcgccttttatatctgccatgaggtccatctggctgggttcaagtataacttttcggatctgaagtcgcccctccactactacggtaacgctacaatgagtttaatgaataaaaacgcttaccataacgtgaccgccgagcagctgttcctgaaggatattatcgagaagaatctggtcatcaatctaacacaagactag

SEQ ID NO: 136277 - DNA, 696 bp, synthetic construct
  misc_feature 1..696: note = Description of Artificial Sequence: Synthetic coding sequence
  source 1..696: mol_type = other DNA
atgcgcggatacttagtagccatcttcctgtccgctgtattcctgtactatgtactgcactgcatcctctgggggactaatgtctattgggtggcacccgtagaaatgaagcgccgaaacaaaatccagccctgcctgtctaaacctgcttttgccagcctcttgagattccaccagttccaccctttcctatgtgcagccgactttagaaaaatagcatcgctctacgggtccgataaattcgacctgccttacggcatgcggacttccgcagagtattttcggctggcactgtctaaactgcagtcatgtgatttattcgacgaatttgataacattccttgcaagaaatgtgtggtggtgggaaacggtggcgtgctgaagaataagacactgggcgagaaaattgactcatacgacgtgattatccggatgaacaatggcccggtacttggccacgaagaggaagtgggccgaaggaccacattcagacttttctacccagagtcggtgtttagtgaccctattcataacgaccccaacacaactgtgattctcactgccttcaagccccatgacctaagatggcttctggaattactgatgggggataagatcaacaccaatggcttttggaagaagccggccttgaatctgatttacaagccctaccagatccggattttggacccgtag

SEQ ID NO: 136278 - DNA, 741 bp, synthetic construct
  misc_feature 1..741: note = Description of Artificial Sequence: Synthetic coding sequence
  source 1..741: mol_type = other DNA
atgcactgccgggactgcgcgctggtaacgtctagcgggcatcttttgcatagccgtcaaggcagtcagatcgaccagacggagtgcgtgatccgaatgaacgatgctcccactcggggatatggccgggatgtgggcaaccggacctctctgcgagttattgcccattcgtctattcaacggatactgcggaatcgtcacgacttactgaacgtgtcccagggcacagtatttattttttggggccccagctcttacatgcgccgagacggaaagggacaggtctataataatctgcacctgctgagccaggttttaccaagattaaaagcattcatgataactcgtcataagatgttacagtttgatgagctcttcaagcaagagacgggcaaggatcggaaaatctccaatacgtggctgagtaccgggtggtttaccatgaccatcgcattggagttgtgcgatcgaatcaatgtgtatggtatggtgcctccagacttctgcagagatcctaatcaccccagcgttccctaccattactacgagccgttcggccccgatgaatgtactatgtacctttcacacgagcggggtcgcaagggatcccaccatcgctttatcaccgaaaagagagtgttcaaaaattgggccagaacatttaacattcacttctttcagccagactggaagcctgaatcactcgccatcaaccaccctgaaaataaaccagtgttttag

SEQ ID NO: 136279 - DNA, 1011 bp, synthetic construct
  misc_feature 1..1011: note = Description of Artificial Sequence: Synthetic coding sequence
  source 1..1011: mol_type = other DNA
atgaaaacactgatgcgccatggcctggccgtgtgcctggctcttaccacaatgtgcacctccctcctgctggtgtactcctctttgggaggccagaaggagcggcctcctcagcagcagcagcaacagcagcagcagcaacaacaggcatctgccaccggaagcagccagcccgccgccgagtcctccacccaacaaagaccaggcgttccagccggtcctcgcccgctggatggttaccttggcgtagcagatcataagccacttaaaatgcactgtcgggactgcgccctcgtaacgtcgtccgggcacttgctgcacagccggcagggcagccagatcgaccagaccgaatgcgtaatcagaatgaacgacgcccccaccaggggatatggccgtgatgttggtaatcgcactagtctaagagtcatcgctcactccagtatccaacggatcctgcgcaaccgacacgatctcctcaatgtgtcacaaggcaccgtgtttatcttctggggcccttccagctatatgcggagggatgggaaaggccaagtatataacaatctccacctcctgagccaggtgttgcccagattaaaggcttttatgatcacaaggcacaaaatgttgcagtttgacgaactatttaagcaggagacagggaaggatagaaaaataagtaacacatggctgagtacaggatggtttacaatgactatagctttggagctgtgcgataggattaatgtttatggcatggtgccaccagacttctgccgagatccaaatcaccccagcgtgccttatcactactatgagccctttggccccgatgagtgcactatgtacctgtcccatgaaaggggaaggaaaggctcacaccaccggtttataacggagaaacgagtgtttaagaattgggctagaacgtttaatattcattttttccaacccgattggaagcccgagtctctggccatcaatcatccagaaaataagcctgttttttag

SEQ ID NO: 136280 - DNA, 1275 bp, synthetic construct
  misc_feature 1..1275: note = Description of Artificial Sequence: Synthetic coding sequence
  source 1..1275: mol_type = other DNA
atgagcgatcacggggacgtgagcctgccacctgaggaccgcgtgagggcccttagtcagctgggcagtgcagtggaagttaatgaggatatcccaccacgacgatactttcggtctggcgtagagataatccgtatggcaagcatatactcggaggaaggtaacattgaacacgcttttatcctgtataacaaatacattacgctgttcatcgagaagctgcccaagcaccgggactacaagagtgccgtgatccctgaaaagaaggacacagttaagaagctgaaggaaatagcatttcctaaagcagaggagcttaaagcagaactgctcaagcgttacacgaaagagtatactgaatataacgaggaaaagaagaaagaagccgaggagctcgctagaaacatggccatccaacaagaactcgaaaaagaaaagcaaagggtggcacagcagaaacagcagcaactggaacaggaacagtttcacgctttcgaagagatgatccggaatcaagagttggagaaggaaagattgaagatcgtacaggagtttgggaaggtggatcccggcttaggagggcctctcgttcctgatctggaaaaaccgtctctggacgtgttccccactttaaccgtgagcagtattcaaccaagcgactgtcatactacagtacggcccgcaaagcctccggtggtggatagaagtctgaagcccggcgcgctgagcaattcagagtctatcccaaccattgacggccttcgacatgttgtcgtccctggtaggctctgcccccagtttttacaattagcttccgcaaacacagctcggggggtagaaacgtgcgggatcctttgtgggaagctgatgcgcaacgaattcaccattacgcatgttctaattccgaaacagagcgccggcagcgattactgtaatacggaaaacgaggaggagctctttctgatacaggatcagcagggtctgatcacgcttggctggatccacacccaccctactcaaaccgctttcctgtcaagcgttgaccttcacacgcactgtagctaccagatgatgctgcccgaatctgtagccatcgtttgcagcccaaagtttcaggagacaggcttcttcaaactgacagaccacggcctggaggaaattagtagctgccgccagaaggggtttcaccctcacagcaaagaccccccactgttttgctcgtgttcccacgtcactgtggtggaccgggcagttactatcactgacttgaggtag

SEQ ID NO: 136281 - DNA, 1275 bp, synthetic construct
  misc_feature 1..1275: note = Description of Artificial Sequence: Synthetic coding sequence
  source 1..1275: mol_type = other DNA
atgtccgaccacggggacgttagcctccctccagaggatcgggttcgggccctgtcacagcttggatccgctgttgaagtgaacgaggacattcctccccgccgctacttcaggtctggcgtggaaatcatccgcatggcttccatttattcagaggaggggaatatcgagcacgccttcattctttataataaatatatcacactgttcattgagaagctccctaagcatcgtgactacaaatccgctgtgatccctgagaagaaggacacggtcaagaaactcaaggagatcgccttccctaaggccgaagaactcaaggctgagctgctaaagcgctatactaaagagtacactgagtacaacgaggagaaaaaaaaagaggcggaggagctggcgcgaaacatggcgattcagcaggaattagaaaaggaaaagcaaagagtcgctcagcagaagcaacagcagttagagcaagagcaattccatgcatttgaggagatgattcggaatcaagagctcgaaaaagaaaggttgaaaatcgtccaggaatttggaaaagtcgaccccgggttgggcgggcccctggtacctgatctggagaagcctagcctggatgttttccccactctaactgtcagctctatccagccctccgattgtcataccaccgtgagacccgccaagccccccgtggtggatagatccctgaaacccggcgccctgtccaacagtgagagcattccgaccatcgacgggctgcgtcatgtcgtcgtgcctggtcgcttgtgtccacagttcctccagcttgctagcgcaaataccgcgcgaggtgtcgagacttgcggcattttatgcggaaagcttatgcggaacgagttcaccatcacccacgttctcatccctaaacagtccgccgggtctgactactgcaacactgaaaacgaagaggagctgttcctcattcaggatcaacaaggcctgatcactctggggtggatccacacccatccaacacagaccgccttcttgagtagtgtcgatttgcatacacactgtagttaccagatgatgcttcccgagtcagtggctattgtctgtagtccgaaatttcaagagaccgggttcttcaagcttaccgaccatgggctcgaggagatctcatcctgcagacaaaaagggtttcaccctcacagtaaggatccgcccctcttctgcagctgtagtcatgtcactgtagtggacagagctgttacaattactgacctgcggtag

SEQ ID NO: 136282 - DNA, 1275 bp, synthetic construct
  misc_feature 1..1275: note = Description of Artificial Sequence: Synthetic coding sequence
  source 1..1275: mol_type = other DNA
atgtcagaccatggagatgtgtctctcccaccggaggatagagtcagggctcttagtcagctaggctctgcggtggaggtaaacgaggacattccacccagacggtactttcggtccggcgtcgagattattcgcatggcatccatttactctgaggaagggaacatcgagcatgctttcatcctgtacaacaagtatatcacactgttcatagaaaagctgccgaagcatagagactacaaatccgcggtgatacccgagaagaaagacacagtgaaaaaactgaaggagatcgcctttcccaaagccgaagaactgaaagcagaactgctcaaaagatatacaaaggaatataccgaatacaacgaagaaaagaaaaaggaagccgaggaactggcccgaaacatggcaatacagcaggagctggagaaggagaagcaaagagtggctcagcaaaagcagcagcagctcgaacaggagcagttccacgctttcgaggagatgatccgaaaccaggaactcgagaaggaacgcttgaaaatcgtgcaagaatttgggaaggttgacccggggctgggagggccccttgtacccgatctggaaaagccatccttagatgtcttccccacgttgaccgtgagcagtattcaaccctccgactgtcacactaccgtgcgtccggccaaaccccccgtggtcgatagaagcctcaaaccaggcgctttgtcgaattccgagtcgatccccacaatcgacggcctgcggcacgttgtggtccccgggaggctttgcccccagtttctacagctagccagtgccaatacagctagaggggtggagacctgcggtatcctctgcggtaagctgatgaggaatgaatttacaataactcacgtgctgatcccgaaacagagcgcaggctccgactactgcaatactgagaatgaggaggaactctttctcattcaggatcagcagggccttatcaccctaggctggattcacacacaccccacacagactgctttcctcagtagcgtagacctgcacacacattgctcctaccagatgatgctgcccgagtcagtcgcaatcgtgtgttcgcctaaatttcaagagaccgggttctttaaactgaccgatcacggcttagaggaaatatcatcttgtaggcaaaagggcttccacccccatagtaaagacccaccactgttctgtagctgctcccacgtcaccgtggttgacagagctgtgacaattacggacctccggtag

SEQ ID NO: 136283 - DNA, 1275 bp, synthetic construct
  misc_feature 1..1275: note = Description of Artificial Sequence: Synthetic coding sequence
  source 1..1275: mol_type = other DNA
atgtcagaccatggtgacgtttccttgcctccagaggatcgagtgagggctctgagccagctgggatcggcggtcgaggtcaacgaggacatcccacccaggcgctacttccggagtggagttgagattatccgcatggcctccatttatagtgaagagggaaatattgagcacgcatttatcttgtataacaagtacatcactttgttcattgagaagctccccaagcatagagactataaatcggctgtgatccccgagaaaaaggacaccgtgaagaagctgaaagaaatcgctttcccaaaggcagaagaacttaaagccgagctgcttaagcgatacactaaggagtacactgaatataatgaagaaaagaagaaagaagctgaggagctggctcgcaacatggccatccagcaggaactggagaaagaaaaacagcgcgtggcgcaacagaaacagcagcagctggaacaggagcagtttcacgcgtttgaggaaatgatccggaatcaggagttggagaaggagcgactaaagatcgtccaggaattcggtaaggttgatcctgggctgggcggaccgctcgttccagacctggagaagccttcccttgatgtatttccaacgcttactgttagtagcattcagccgtcagattgccacactactgtgcgccccgccaaaccccccgtcgtggacagatcactaaagccaggggccttgtctaacagcgaatctattccaaccattgatggcctcaggcatgtggtagtgcccggcagattgtgtccgcagttcctgcaattggccagcgccaataccgcccgcggcgtggagacgtgtggtatcctgtgtgggaagttaatgaggaacgagtttaccatcactcacgtgctgattccaaagcagagcgccggctccgattactgtaataccgagaacgaggaggagctcttcctgattcaggaccagcagggcctgattaccctaggttggatacatacccatcccacgcagaccgcctttctctcctctgtggatttgcacacccactgcagctatcagatgatgctccccgagtccgttgctatcgtatgctcaccgaaatttcaagaaacaggctttttcaaactgacagatcatgggcttgaagaaataagttcttgccggcagaaaggcttccaccctcactccaaggacccccctttgttctgttcctgctcccacgtgacagtggtggatcgcgcagttaccattactgaccttagatag

SEQ ID NO: 136284 - DNA, 492 bp, synthetic construct
  misc_feature 1..492: note = Description of Artificial Sequence: Synthetic coding sequence
  source 1..492: mol_type = other DNA
atgtccgaccacggggatgtgagcctcccccccgaagatagggtgcgggccctgtctcagctgggttctgccgttgaggtgaatgaagacatccctcctcggaggtatttcagatccggagtggagattatacggatggcctctatatacagtgaggaagggaacatagaacacgcgttcattctctacaataaatatatcacattgtttattgaaaagttacccaagcacagggactataaatccgccgtgatcccggaaaagaaagacaccgtgaagaaactcaaagagattgccttccccaaagccgaggagttaaaagccgagttgttgaaacggtacaccaaggaatacactgagtataatgaagagaaaaagaaggaggcagaagagctagcacggaacatggccattcagcaggagcttgaaaaggaaaagcagcgagtggcacagcaaaaacagcagcagctggaacaggagcaatttcattag

SEQ ID NO: 136285 - DNA, 957 bp, synthetic construct
  misc_feature 1..957: note = Description of Artificial Sequence: Synthetic coding sequence
  source 1..957: mol_type = other DNA
atgagcgaccatggcgatgtaagtctgcctccagaggatcgcgtgagggccctttctcagttgggatcggccgtagaggtgaacgaagacatcccaccgagacgttatttccgatccggggtcgaaattattcgaatggcctcaatatactcagaggaaggcaatattgagcacgcctttatactgtataacaaatacattacactgtttatcgagaagttgccaaaacatagggattataagtcagcagttatacccgaaaaaaaagacacagtgaaaaagttgaaggaaatcgcctttcctaaagccgaagaactgaaggcggaattgctgaagcggtatacaaaggagtacacagaatacaacgaggagaaaaaaaaagaagctgaagaattagctcggaacatggccatccagcaggagctggaaaaagagaaacagagagtggcccagcagaagcagcagcaattggaacaggagcaattccacgcgttcgaagagatgattcgcaaccaggagctagagaaagaaaggctaaagatcgttcaggaattcgggaaggtggacccgggactcgggggtccactggtgcccgatctggaaaaaccttctttggacgtatttcccaccctcacagtctctagcattcagccatccgattgtcatactacagtgcgccctgctaaaccccccgttgtggataggtcactgaaaccaggcgctctcagtaattctgagtccattcctactatcgacggcctgaggcatgtagtcgtccctggcagactgtgcccccagtttttgcagctggcctctgcaaacacggccaggggggtagagacttgtggaatactttgtggaaaattgatgagaaacgaatttacaataacacatgtgttgattcctaagcagtcagcaggaagcgattactgtaacacggaaaatgaagaggagtag

SEQ ID NO: 136286 - DNA, 414 bp, synthetic construct
  misc_feature 1..414: note = Description of Artificial Sequence: Synthetic coding sequence
  source 1..414: mol_type = other DNA
atgagtgatcacggggatgtcagtttaccaccagaggacagggttcgtgccttatcccagctcgggtccgcagtcgaggtgaacgaggacattcccccacgtaggtattttaggagtggcgtcgagataatccgaatggcaagcatttatagcgaggagggcaatattgaacacgctttcatcttgtataataagtacataactttgtttatcgagaagctgcccaaacatagggactataaatccgcggtgatcccagagaagaaagacacagtgaagaagctcaaagagatcgcgttcccgaaagctgaggagcttaaagctgaactgctgaaaaggtacacaaaagaatacaccgaatacaatgaagaaaagaagaaggaggctgaggaactggccagaaacatggcctag

SEQ ID NO: 136287 - DNA, 1047 bp, synthetic construct
  misc_feature 1..1047: note = Description of Artificial Sequence: Synthetic coding sequence
  source 1..1047: mol_type = other DNA
atgtccgatcacggcgacgtcagtcttccccctgaggatcgcgtgcgcgctctgagccagctggggtctgcagtggaagtcaatgaggacattccacctagaaggtattttaggtcaggagttgagatcattcgcatggcttccatctacagtgaggagggcaatattgagcacgccttcattctttacaataaatacatcactttgtttattgaaaaactgcccaaacacagagactacaaatcggctgtgatccccgagaagaaggatacagtaaaaaagctgaaggaaattgcttttccaaaagctgaagagctcaaggccgagctgctcaagcgctacaccaaagaatatacagagtataatgaggagaagaaaaaagaggccgaggagctcgcccgaaacatggctatccagcaggagttggagaaggaaaaacaaagggtggcacagcagaagcagcagcagctcgaacaagagcaatttcatgcctttgaggagatgatccgtaaccaggaactcgagaaggaaaggcttaagatcgtgcaagaattcgggaaagtggaccccggcctgggtggcccccttgtgcccgaccttgagaagccatcactcgacgtttttccaactttaaccgttagcagcatacaaccctccgattgtcataccaccgtgcgacccgcaaaaccacccgtggtggacaggagcctaaagccaggcgctttgagcaatagtgaaagtattcctacaattgatggtcttaggcatgttgttgtgcctgggcggctctgcccccagtttctccaattggcctcagctaatactgctcggggcgtggaaacctgtggcattctgtgcgggaagctgatgcgcaatgaatttacaataacacacgtgctgattcccaaacagagcgcagggagtgactattgtaacacagagaatgaagaagaactgtttctgatccaagatcagcagggattgataaccctggggtggatccacgtagagactctgtggagtctgaaatcactgcatgccccctag

SEQ ID NO: 136288 - DNA, 813 bp, synthetic construct
  misc_feature 1..813: note = Description of Artificial Sequence: Synthetic coding sequence
  source 1..813: mol_type = other DNA
atgaggcagcaacagctggaatccgaacagtttctgttcttcgaagaccagctgaagaaacaggagttggccaggggccagatgagatcccagcaaaccagcggtctttccgagcagatagacgggtctgctctgtcttgcttttcaacacaccagaacaactcactgctgaatgtgttcgcggatcaacctaacaaaagcgatgctactaactatgcctcccacagcccacccgtgaaccgagcactgacccccgccgctactctaagtgctgttcagaacctcgtggtcgaaggattgcggtgtgtcgtgttacctgaggatttgtgtcataaatttttgcagttggctgagtccaatacggttaggggaatcgaaacctgcgggattctgtgcgggaaactcactcacaatgaattcacgattacccacgtaatcgtccccaagcagtctgcggggcccgattactgtgatatggagaatgtggaagaactgtttaatgttcaagatcagcacgacctacttacactcgggtggattcatacccaccctactcagactgcctttttgtcgtctgtggacctccacactcactgctcataccagctgatgcttccagaagcaattgcgattgtctgctcccctaagcataaagacaccggcatcttcagattgacgaatgctggtatgctggaggtgtcagcatgtaagaagaaaggattccaccctcatacaaaggagcccagactgttctccatatgtaaacacgttcttgtaaaggatatcaagatcatcgtgctggacctgcgatag

SEQ ID NO: 136289 - DNA, 1311 bp, synthetic construct
  misc_feature 1..1311: note = Description of Artificial Sequence: Synthetic coding sequence
  source 1..1311: mol_type = other DNA
atggaccagcccttcaccgtgaattcactgaagaagctggccgccatgccagaccatacggacgttagcctgagtcctgaggagagagtgcgcgccctctcaaagctgggctgcaatattactattagcgaagacattactcccagacggtatttcaggtccggagttgaaatggagcggatggcctcagtgtatttggaagaaggaaatttggaaaatgcttttgtcctgtataataaattcattaccttattcgtggaaaaactgcccaaccacagagattaccagcagtgtgcagtccctgaaaagcaggatatcatgaaaaagctaaaggaaatcgcctttcccaggactgatgaactgaaaaacgatctgctgaagaagtacaatgtggagtatcaggagtacctgcagtcaaagaataaatacaaggcagaaatcctgaagaagctggagcatcagcggctgattgaagctgagaggaagcgcatcgcccaaatgagacagcagcaactcgaatctgagcaatttctcttctttgaggaccagctgaagaaacaagagttagctcgggggcagatgcggagccagcagacctctggcctgagcgagcagattgacggctccgcactctcctgcttttcaacacatcagaacaattcactgctgaatgtgtttgccgatcagcccaataagagtgacgctacaaattatgcctctcactcccctccggtgaatcgcgcactcacgcccgctgccactctgtcagctgtgcagaacctagtggtggagggtctgaggtgcgtggtactgcccgaggacctgtgtcacaaattcttgcagcttgcggagagcaataccgttcgggggatcgaaacgtgcggcatcctgtgcggaaaactgactcacaacgagttcaccatcacacatgtaattgttcccaaacagtcagccggcccggattattgcgatatggagaatgtggaggagctgtttaatgtccaggatcagcacgacctacttacgttaggatggattcatactcacccaacacagactgcattcctctcctctgtcgatctccacacccactgttcttaccagttgatgctccccgaagccattgcgatcgtatgctcacccaagcacaaggacactggcatttttagattgacgaacgctggtatgttggaggtcagcgcctgcaagaaaaaaggttttcacccacatactaaggaacccagactgttcagcatttgcaagcacgtgctcgtcaaggacatcaagatcatcgtcctcgacttgaggtag

SEQ ID NO: 136290 - DNA, 1311 bp, synthetic construct
  misc_feature 1..1311: note = Description of Artificial Sequence: Synthetic coding sequence
  source 1..1311: mol_type = other DNA
atggaccagccgttcacggtcaacagcctgaaaaaattagctgcaatgcccgaccacactgacgtaagcttaagccccgaagagagagtccgggctctttctaaattgggttgcaacattactataagcgaagatattacaccgagacgatacttccggtccggtgtggagatggagcggatggcgtccgtgtacctggaagagggaaatctcgaaaacgctttcgtgctgtacaacaagtttatcacactgttcgtggagaagttgccaaaccaccgagactaccagcagtgcgcggtaccggaaaagcaggatattatgaaaaagttgaaagaaatcgccttccctcggacagacgaactaaaaaatgaccttttgaaaaaatacaacgtggagtatcaggagtacctgcagtctaaaaataaatataaggcggagatattgaagaagctggaacatcagcgactgattgaagctgagcgaaagaggatcgcacaaatgaggcagcaacagctggaaagcgagcagttcctgttttttgaagaccagctcaaaaaacaggaactcgcacggggtcaaatgcggtcgcagcagacatccgggctctccgaacagatcgacggatctgcattgtcatgtttttctacccaccagaataactccttactcaatgttttcgccgaccagccaaacaagagcgacgcaacaaattacgcctcccattcgccacccgttaatagagccttgactcccgccgcaaccctctcagctgtccagaatctcgtagtggagggactgcgctgtgtcgttctccccgaagatctttgccataagtttctacagctcgcggagagcaacactgtcagaggcattgagacctgcgggattctttgcggcaaactgacccacaacgaatttactattactcatgtaatagtacccaaacagtccgctggccccgattactgcgacatggagaacgtggaggaactcttcaatgtacaggaccagcatgacttgctaacactgggttggattcatacacacccaacccagacggcattccttagttccgtggatcttcacacccactgctcataccagctcatgctccctgaagcaatcgccatagtctgctctcccaagcataaggacacagggattttccgactcactaatgctggcatgttagaagtctccgcatgtaaaaaaaagggcttccatccacatacaaaagagcccaggctgtttagcatatgtaaacacgtcctggtcaaagacattaagatcatcgtgctcgatctgcgctag

SEQ ID NO: 136291 - DNA, 1386 bp, synthetic construct
  misc_feature 1..1386: note = Description of Artificial Sequence: Synthetic coding sequence
  source 1..1386: mol_type = other DNA
atggaccagccctttactgtcaacagcctcaagaagctcgctgctatgcctgaccatacagatgtctcactctccccagaagagcgtgtcagagctttgagtaaactaggctgcaatataacgatatctgaggatattaccccaagacgatatttccgttctggggtcgagatggagcgcatggcttctgtttacttagaggaggggaacctggagaatgcgtttgtattatacaacaagtttattacactattcgtcgaaaaattgcccaaccatcgggactatcagcaatgtgccgtgcccgagaaacaggacatcatgaagaagctgaaagagatagcttttcctcggaccgacgagctgaagaatgacctcttaaagaagtataacgttgagtatcaggagtatctccagagcaaaaataaatacaaggcagaaatcctaaaaaagctcgaacaccagcgacttatcgaagcggaacggaagcgaattgcccagatgcgccaacagcagctagaaagcgaacaattccttttttttgaagaccagctcaagaagcaagagctcgcacgaggccagatgcggtctcagcagacaagcggactgtctgagcagattgacgggtcagccctgtcttgtttctctacgcaccagaataactctctcctgaacgtgttcgcagatcagcccaataagtctgacgcaaccaattatgcttcacactccccgcccgtcaatcgcgcattaaccccggccgccactctgtcggccgtgcagaatcttgttgtagaaggcctgaggtgtgtagttctgcccgaggacctgtgccataagtttctgcagctagctgaatctaatacggttcggggcatcgaaacgtgtggcattctgtgcggaaagcttactcacaacgaattcactattacccatgtcatcgtgcccaaacaatccgccggacccgactactgcgatatggaaaacgtcgaagagctgttcaacgtccaggatcaacacgaccttctcaccctgggctggatacatacccaccctacccagacagcctttctgtccagtgtcgatcttcacacccattgttcctaccagctgatgctgcctgaggctatcgcgatagtttgctctccgaaacacaaagacaccggcatcttccggctgacgaacgcggggatgttggaggtgtcagcttgtaagaagaaggggttccacccccatacgaaagagcccaggctgttctccattcagaaatttctgtccggcatcatttcaggcacagctctggaaatggagccactcaaaatcgggtatggaccaaatggattccccttactggggatcagtaggtcttcgtctccatccgaacaactgtag

SEQ ID NO: 136292 - DNA, 267 bp, synthetic construct
  misc_feature 1..267: note = Description of Artificial Sequence: Synthetic coding sequence
  source 1..267: mol_type = other DNA
atgagtattatggaccattcccccactacgggcgtggtgaccgtcatcgtcattttaatagccattgctgctctgggtgcattaatcctgggatgttggtgttacctgcggcttcagagaatatctcagtctgaagacgaggaatcgatagtgggcgatggggagacaaaggagcccttcctgctcgttcagtactcagccaagggcccttgcgtggagcgcaaagctaaactgatgaccccgaacggacccgaggtgcatggctag

SEQ ID NO: 136293 - DNA, 744 bp, synthetic construct
  misc_feature 1..744: note = Description of Artificial Sequence: Synthetic coding sequence
  source 1..744: mol_type = other DNA
atgctacagaacagtgctgttttgctggttctggtcatttccgcctccgccactcacgaagcagagcaaaatgattccgtgtccccgagaaagtccagagtggccgcgcaaaatagtgccgaggtggtgcggtgcctgaactccgctctgcaggtcggctgtggcgcatttgcctgtctggaaaattcaacctgtgacaccgatggaatgtacgatatttgtaaatccttcctatacagtgccgccaaatttgacacccaaggtaaagccttcgtcaaggagagtctcaagtgtatagctaacggagtgacaagcaaggtgttcttggccattcgacgctgctccactttccagaggatgattgcagaagttcaagaggaatgttattccaaactcaacgtgtgcagcatcgctaagagaaatcctgaagctattacagaggtagttcagcttcccaatcacttcagtaatcgctattataatcgccttgttcggagtctgttggaatgtgacgaagacaccgttagcactatccgcgacagccttatggagaaaattggaccaaatatggcaagcctcttccatatcctccagactgatcattgcgctcaaacccacccacgggctgacttcaacagacgcagaaccaacgaacctcaaaagctgaaggtcctgctgagaaatttgagaggtgaagaagactctccctcccatattaaaagaacgtcccacgaatcagcgtag

SEQ ID NO: 136294 - DNA, 537 bp, synthetic construct
  misc_feature 1..537: note = Description of Artificial Sequence: Synthetic coding sequence
  source 1..537: mol_type = other DNA
atgtacgacatttgtaaatcctttctctactccgctgccaagtttgatacccagggaaaggctttcgttaaggagagcctgaagtgtatcgcaaacggcgtaacgagcaaagtcttcttggccataaggagatgctctaccttccaaagaatgatcgctgaggtgcaggaggaatgttactctaagttgaatgtctgctccatcgcaaaaagaaatccagaagctatcacagaagtggttcagcttcctaaccatttctccaaccggtattacaataggttggtgagaagcctgcttgagtgtgatgaggacacagtgtccaccatacgtgattctctcatggaaaagattgggcccaacatggcctctctcttccatatccttcaaactgaccattgcgcccagacacatccccgagcagacttcaataggagacgaaccaacgagccgcagaagctgaaagttctgctcaggaacctacgcggcgaggaggactcaccaagtcacattaagaggacatctcacgagagtgcttag

SEQ ID NO: 136295 - DNA, 537 bp, synthetic construct
  misc_feature 1..537: note = Description of Artificial Sequence: Synthetic coding sequence
  source 1..537: mol_type = other DNA
atgtatgatatctgtaaatccttcctgtatagcgcggctaagttcgacacccaggggaaagcttttgtgaaagaaagcctgaaatgtatcgccaatggggtgactagtaaggtcttccttgctatacgtcgctgttctacattccagaggatgatcgcggaggtgcaggaggaatgctattcgaaactcaacgtgtgcagcatcgcaaagagaaaccctgaggccattacagaggtggttcagctccctaaccatttctccaaccgttattacaaccggctggtgagaagcctcctcgagtgcgacgaggataccgtgagcacaattcgggattccttgatggagaagatcggccctaatatggcttcactatttcacatcctccagacggatcattgtgcccaaactcatccccgggccgattttaacaggcggagaacgaacgagccccagaagttaaaggtactcctgagaaacctccgcggagaggaagattctccatcccacattaagaggacctctcatgaatctgcctag

SEQ ID NO: 136296 - DNA, 2733 bp, synthetic construct
  misc_feature 1..2733: note = Description of Artificial Sequence: Synthetic coding sequence
  source 1..2733: mol_type = other DNA
atggcttcctcagctcaatccggcggtagttcagggggacccgccgtgcccacggtccaacggggcattatcaagatggttctgagcggctgtgcaattatcgttcgaggccagccacgcggcggaccccctccagaaaggcaaatcaatctgtccaacatccgggcgggaaatctggctcggagggcagccgcaacccagccagacgctaaggatacccctgatgaaccatgggccttcccagccagggaattcctgcgtaagaagttaatcgggaaggaagtgtgctttacgattgaaaataagaccccccaaggaagagaatacggcatgatctatctgggcaaggatactaacggtgaaaacattgctgaaagtctagttgctgaaggcttggccaccaggcgagagggcatgagagctaataatccagagcagaaccgtctatctgagtgcgaggaacaggcaaaagccgctaaaaaggggatgtggtctgaagggaatgggtcccataccatacgtgatttgaaatataccatagaaaacccccgacacttcgtcgacagtcatcatcagaaacccgtgaacgctataatcgaacatgtacgggacggcagtgtggttagagccttactcctgcccgattactacttagtaactgtgatgttgtctggcatcaaatgtcctacattcagacgagaagctgatggctccgagacgcccgagccttttgccgccgaggccaagttcttcaccgagtcgagattattgcaacgtgatgtacagattattctggaatcatgccataaccagaacatccttggtacaatcctgcatccaaatgggaatattactgaactactgctgaaggaggggtttgccaggtgcgtggattggtcgatagcagtgtatactcgtggtgctgaaaagctccgcgcagccgaacggtttgccaaagagaggaggttgcggatatggagagactatgtggcacccacagcaaatctggatcaaaaagacaaacaatttgttgccaaggtcatgcaggttctgaatgcggatgcaattgtggtaaaactgaattctggcgactataagacaattcacctttcttcaattagacctccacgattggaaggcgagaatactcaggacaaaaataagaaactaagaccgctctacgacatcccctacatgttcgaggctagagagttccttcggaaaaagctgataggcaaaaaggtgaatgtcaccgtggattacatcaggccggcctctcccgccacagagactgtgccagctttctctgaacggacctgcgctaccgttactatcggcggaattaacattgctgaagccttggtctctaagggcctcgccaccgttatccgatataggcaggatgatgaccagcgatcatctcattacgatgagctgctggctgccgaagcaagagcgatcaaaaacgggaaggggttgcactccaaaaaagaagtccccatccaccgggttgcggacatctccggcgacacccaaaaagccaagcagtttttacctttcctgcaacgtgcgggtaggtcggaggcagtggtcgagtacgtgttttctggctctaggctaaaattgtacctgcccaaagagacgtgtcttataacattcctgcttgctgggatcgagtgccctcgcggcgcgagaaatctgcctgggctcgttcaggagggagaaccttttagtgaggaggctacactgtttaccaaggaacttgtgctgcagcgggaggtagaagtggaggtggaaagcatggataaagctggcaatttcatcggttggctgcacattgacggcgctaacctgagcgtgctgctggtggaacatgctctgagtaaagtgcactttactgccgaacggtcctcctactataagtcccttctcagtgcggaggaggccgctaagcagaaaaaggaaaaggtttgggcgcattatgaagaacagcccgtggaagaagtgatgccagtgttagaggaaaaggagcggtcagcctcatacaagccagtatttgtgaccgaaatcaccgacgacttgcacttttacgtccaggatgttgaaaccggcacacaactggaaaaactgatggagaacatgcgtaatgatatcgcatctcacccacctgttgagggatcctatgctccccgtcggggcgaattctgcatcgcaaaatttgtggacggggagtggtaccgcgctagagtggagaaggtggagtcccccgccaaaatccatgtgttctacatcgactatgggaacagagaggttttgccttctacaaggctgggaaccctgtcaccagctttctcaacacgcgtgctgcccgcacaggcaaccgaatacgcctttgcattcatccaggtccctcaagacgatgatgctcggactgacgcagttgacagtgtggtgagagatattcagaatacccagtgcctattgaatgtagaacacttaagcgcagggtgcccccatgtaaccctgcaatttgccgatagcaagggcgatgtaggcctgggtcttgtaaaggaagggttggtaatggttgaggtccgaaaagagaagcaattccagaaggtaatcaccgagtacctgaatgcccaggagtccgcgaaatcagcccggttgaatctgtggagatacggcgattttagagctgacgacgcagatgaattcggctattctcgatag

SEQ ID NO: 136297 - DNA, 2703 bp, synthetic construct
  misc_feature 1..2703: note = Description of Artificial Sequence: Synthetic coding sequence
  source 1..2703: mol_type = other DNA
atggccagcagtgccgttcctactgtgcaacgggggattattaagatggtgctgagtgggtgtgccataatcgtgagagggcaacccagagggggaccgcccccagagcgccagattaatctgagcaatataagagcaggcaatctggcccgccgcgcagccgccacacagccggacgcaaaagatacacccgatgaaccatgggcatttcccgcccgtgagtttttgagaaaaaaattaattggcaaggaggtgtgtttcactatcgagaataagacacctcagggaagagaatatggaatgatctatctcgggaaagatacaaatggagagaatatagctgagtcacttgtggctgagggcctagctactagaagggaaggcatgcgagccaacaaccccgaacagaacaggttgtcagaatgtgaagaacaggctaaagcagccaagaaggggatgtggagcgaagggaatgggtcccacacgattcgggacctcaagtatactattgaaaaccctcggcactttgttgactcacatcatcagaaaccagtgaacgcaattatcgagcatgtgcgggatggcagtgtcgtgcgcgcgctcttgctgccggactattacctagtaacagttatgctgagcgggatcaagtgccccacttttcgccgcgaggccgacggtagtgagaccccggaacctttcgctgccgaggctaaattcttcaccgaaagtaggctcctccagcgcgacgttcagattatcttggagtcttgtcataatcagaacatcttaggaactattctgcaccccaatgggaacataacagaactgttgctgaaggagggatttgccaggtgtgttgattggtcgatcgccgtttacacccgcggggccgagaagctgagagcagccgagcggtttgccaaagaacgtagactccgcatttggagagattacgtcgcccctaccgctaatctcgatcaaaaagacaagcagttcgtggctaaagtgatgcaggtgctgaatgcagacgctatcgttgttaaactcaacagtggggactacaagacaattcatctcagctctattcggccaccccgtctggagggcgaaaacacacaggataagaataagaagctgcgccccctttacgatattccttatatgttcgaagcgagggaattcctgcgaaaaaagcttattggcaagaaggtgaacgtaaccgtcgactacatccgaccggcctcacccgcaactgaaactgttccagctttctctgagaggacatgcgccactgtgaccataggaggaataaacattgccgaagctctcgtctccaaaggtctagcaaccgtgattagatataggcaggatgatgaccagagatcatcccattatgacgagctgctggccgccgaggctcgggcaataaagaacggtaaaggcctgcactcaaagaaggaggtccctattcatagagtggctgacatcagcggcgacacacagaaggccaaacagttccttccgttcctgcagagagcaggcagaagcgaagccgttgtggagtacgtgttttctggatccaggttgaagctgtatttgcccaaagaaacttgtctgattacctttttgctggccggtattgagtgtcccaggggggctagaaacctccctggcctggtgcaggaaggtgagcccttttcagaggaggcaaccctctttacaaaggagcttgtacttcaacgggaggtggaagtcgaagtggagagcatggacaaagccggcaacttcatcgggtggctccatatcgacggtgcaaatctgtcggtgttattggtagagcatgcactcagcaaggtacattttaccgcggaaagatctagctactataagagcctgttgtctgccgaggaagcagcaaagcagaaaaaagaaaaagtttgggctcattatgaggagcagccagtcgaggaagtcatgccagtcctagaggagaaggaacggtcggcatcgtacaagccagtgttcgtgacggagatcaccgatgatctgcatttctatgtgcaagatgtcgaaacaggaactcagttggagaaacttatggaaaatatgcggaacgatatcgcctcacatcctcctgtggaggggagctacgcaccacggcggggggagttctgcatcgcaaaatttgttgacggggaatggtatcgggccagagttgaaaaagtcgagtcccctgcaaagattcatgtgttctatatagattacggaaaccgggaagtgctgcctagcactcgtctaggaacgctgtctcccgccttttccactcgcgttctgcctgcgcaggccacggaatatgcttttgcatttattcaggtgccgcaagacgatgatgcccgaacggatgccgtggatagcgtggtgcgggatatccagaacacccagtgcctcctgaacgtcgagcaccttagcgccggttgtccgcacgtgactctgcagttcgctgattcaaaaggagacgtcggactgggcctcgtcaaagaaggcttagtgatggtggaggttaggaaagagaagcagtttcagaaagttatcacagagtacctgaatgcccaggaatccgctaagagcgctcgcctcaatctttggcgatacggagattttcgggccgatgacgccgacgagttcggttactctcgatag

SEQ ID NO: 136298 - DNA, 705 bp, synthetic construct
  misc_feature 1..705: note = Description of Artificial Sequence: Synthetic coding sequence
  source 1..705: mol_type = other DNA
atgaaccacctgcccgaggatatggagaatgctttgaccggctcccagagctcacacgcatccctccgcaacatccattcaatcaaccccactcagctgatggcgagaatcgaaagttatgaaggccgggaaaaaaaaggaatcagtgacgtgaggcggacattctgcctgtttgtcactttcgatcttctgtttgtgacactcctctggattattgaattgaacgtgaacggggggatcgaaaatactttagagaaggaggtgatgcaatatgattattattctagctatttcgatatctttttactggccgttttcaggtttaaagttctgattctcgcttacgccgtgtgcagattgaggcactggtgggcaatcgcccttaccacagctgtgacaagtgctttcttgctagcaaaggtgattctcagtaagctgttttcccagggagcctttggatacgtactccctatcatcagctttatcctcgcctggatcgaaacatggttcctggacttcaaggtactgcctcaggaagcagaggaagaaaataggctccttatcgtgcaggacgcttctgagcgggcagccctgattcctggaggactgagcgacggtcaattttactccccacccgagtcagaggctggatcggaagaagcggaggagaaacaggattccgagaagcccttgttagagctgtag

SEQ ID NO: 136299 - DNA, 705 bp, synthetic construct
  misc_feature 1..705: note = Description of Artificial Sequence: Synthetic coding sequence
  source 1..705: mol_type = other DNA
atgaatcacttgcctgaggacatggaaaatgctttaactggttcccaatccagtcacgcgagcctgcgtaatatacacagcataaacccgactcagctgatggcacggatcgaaagttacgaaggccgagaaaaaaaaggtatctccgatgtgaggcggactttctgtctctttgtcacttttgatctgctatttgtgacactgctctggataatcgaattgaatgttaatgggggtattgaaaacactctggagaaggaggtgatgcaatatgactattatagctcgtactttgatatattcctgcttgcagtctttcgtttcaaggtgcttattctggcctatgcagtgtgtcgcttacggcattggtgggccatagctctgactacagctgtaacctcagctttcttactggcaaaggtgatcctgagcaagctatttagccagggagcgtttgggtacgttctcccaataatcagctttatcctagcatggatcgagacttggtttttagatttcaaagtccttccccaagaagcagaagaggaaaacaggctgctgatcgtgcaggacgccagcgaacgagccgccctgatcccaggcgggctatctgatgggcagttttacagtccccccgagagcgaggcaggatctgaggaggctgaggagaagcaggattcggagaagccgctgttggaactgtag

SEQ ID NO: 136300 - DNA, 621 bp, synthetic construct
  misc_feature 1..621: note = Description of Artificial Sequence: Synthetic coding sequence
  source 1..621: mol_type = other DNA
atgaatcaccttcccgaggacatggaaaacgccctcacaggtagccagtcctcccatgccagcctgcgcaatattcacagtatcaaccccacccagctgatggcacgaatcgagagttatgaggggcgcgagaagaaaggaatcagcgacgttcgacgcaccttctgtctgttcgttacattcgaccttctgtttgtcacgcttctctggatcatcgagctcaacgtgaatggcggtatcgagaacaccctcgagaaagaagtgatgcagtacgactactactcctcctattttgacatctttctgctggctgtctttagatttaaagtgctgatcctggcgtacgccgtctgcagattgcgacactggtgggccatcgcgctgacaaccgccgtcacctccgccttcctgctagcgaaagtgattctgagcaagctgttttcgcaaggggcctttgggtatgttctgcccattatttctttcatccttgcctggatcgagacatggttccttgattttaaagtgctgccgcaagaggccgaggaagaaaaccgtttactgattgtacaagatgcatcagagagagcggccctgattcctggggggttgtcggatggatag

SEQ ID NO: 136301 - DNA, 555 bp, synthetic construct
  misc_feature 1..555: note = Description of Artificial Sequence: Synthetic coding sequence
  source 1..555: mol_type = other DNA
atgaaccacctccccgaggacatggaaaacgccctgacagggagccagtcatctcacgcatctctgcgaaatatccattcaatcaacccaacccagctcatggccaggattgagtcatacgaaggccgagagaagaaaggaatatctgacgttcgtagaacattttgcctgtttgtcaccttcgacctcctctttgtaactcttttgtggattatcgaacttaacgtgaacggcggcatcgagaacacactggagaaagaggtgatgcagtacgattactattcatcttacttcgacatattcctcctcgctgtcttcaggttcaaagtgcttattttagcctatgctgtctgtaggctgcgccactggtgggcaattgcccttactacggctgtcacttctgcatttctcctggccaaggtgattctgagcaaactgttcagccaaggcgccttcggctacgtactgccaatcatctcatttattctggcatggatcgagacttggtttctggatttcaaggtgttgccacaggaagccgaggaagagaactag

SEQ ID NO: 136302 - DNA, 519 bp, synthetic construct
  misc_feature 1..519: note = Description of Artificial Sequence: Synthetic coding sequence
  source 1..519: mol_type = other DNA
atgaatcatctgcccgaggacatggagaatgcgctgacgggctctcagagcagccacgcttcactgcggaatatacacagcatcaatccaacccaactcatggcaagaatcgaatcttacgaaggtagggagaagaaggggatctccgacgtgcgacggaccttctgccttttcgtcaccttcgatctcttgtttgtgactcttctgtggatcattgaactgaatgtgaacggaggcatagaaaatacgctagaaaaggaagtgatgcagtatgactactactcgagttattttgatattttcctgttagccgtgttccgctttaaagtgctgatcttggcatacgctgtttgtcgcttacgccattggtgggcaatagcgctgactaccgcagttacctcagctttcttgctggctaaagtaatactgagtaaattattttcccagggcgcctttggatatgtgcttcctatcattagtttcatcttggcatggattgagacatggttcctggattag

SEQ ID NO: 136303 - DNA, 684 bp, synthetic construct
  misc_feature 1..684: note = Description of Artificial Sequence: Synthetic coding sequence
  source 1..684: mol_type = other DNA
atggagaacgccttaacagggagtcagtcctctcatgcctccctgaggaatattcatagtatcaaccctactcagcttatggcaaggatcgagtcctatgaggggagagagaagaaaggcataagcgatgttaggagaacattctgcctgttcgtcacgttcgatctccttttcgtgaccctgctgtggataattgaactgaacgttaacggcggaattgagaataccttggagaaggaggtcatgcagtacgactactactcgagctacttcgatatcttcctgctcgctgtgtttcgctttaaggtgctcatcctcgcatacgcagtatgccggcttagacattggtgggctatcgcacttaccaccgccgtgacatctgcattcctgttggctaaagtgatacttagcaagctgttttcccagggggcctttggctacgtcctccctatcatcagttttattctggcgtggattgaaacctggtttctcgactttaaggtcttgcctcaggaagccgaggaagagaacaggttattaatcgtgcaggacgctagcgaacgggctgcgcttattccaggtggcctaagcgatggccaattctattccccaccagagtctgaggctggctccgaggaggcagaggagaagcaggactcagaaaagcctctgctggagctctag

SEQ ID NO: 136304 - DNA, 1338 bp, synthetic construct
  misc_feature 1..1338: note = Description of Artificial Sequence: Synthetic coding sequence
  source 1..1338: mol_type = other DNA
atgtctaagttgccacgggaactgaccagagatctggagcgttcactgcccgccgtcgcaagcctgggctccagcctgtcccatagccagagtctgtcctcacatctgctgccaccacctgagaaacggcgtgcgatctcggatgttaggcggacgttctgcctgtttgttacctttgacctgctcttcataagtttactgtggatcatcgagctcaatactaacaccggtatcagaaaaaatcttgaacaggagataatccagtacaacttcaaaactagcttttttgatatcttcgttcttgcttttttcagattttcaggactattgctgggctatgccgtgctaagactgcgccattggtgggtcatagcagttacaaccttggtgagctctgctttccttattgtgaaggtcatcttgtcggagctactctccaagggcgcatttgggtatctgcttcctatcgtgtctttcgtacttgcttggctggagacctggtttttggactttaaggtgttacctcaggaagcagaggaagagaggtggtatctggccgcgcaggtcgcagttgcccgaggaccacttctgttctccggagccctctccgaaggacaattctactctccaccggagtcattcgctggcagcgataacgaaagcgatgaggaggtggctggaaagaagagctttagtgctcaagagcgcgagtacattaggcagggcaaggaagctaccgccgtggtggaccagatactggcccaggaggaaaactggaaatttgagaagaataacgaatacggtgacactgtgtacacaatcgaagttcccttccatgggaagacttttattctgaaaacttttctgccttgtccggcagaactggtgtatcaggaggtcattcttcagccggaaagaatggtgctttggaacaagactgtgaccgcctgtcaaatcctccagcgggttgaagacaatacactgatctcctatgatgtgagtgccggcgcggccggcggtgtcgtcagtcctagggactttgtgaacgttcgtaggatcgaacgcaggagagaccgctacctgtcaagcgggattgcgacaagtcactctgcaaaacccccaacccacaaatacgtacgaggcgagaatggcccagggggcttcatcgtgctcaagtccgcttctaatccacgagtatgcaccttcgtctggattctcaacaccgacctaaaagggcgcctgccgaggtacctcattcaccagtctctcgctgccacgatgttcgagttcgcttttcatcttcgccagcgaatctccgagctgggcgcaagggcatag

SEQ ID NO: 136305 - DNA, 1284 bp, synthetic construct
  misc_feature 1..1284: note = Description of Artificial Sequence: Synthetic coding sequence
  source 1..1284: mol_type = other DNA
atgagcaaattgcctcgggagctgactcgtgaccttgaacgctcactgccagccgtggcctctttggggtcctcgctgagccactcgcagtctctaagcagtcacctgctgccccctccggaaaagcgcagagccatttccgacgttagaagaacattctgtctgtttgtgacttttgatctcctctttatcagtctgctgtggatcatcgaattaaatacaaataccggtatccggaaaaatctcgagcaagagattatacaatataactttaaaaccagtttttttgatatctttgttctcgcctttttccggttctcaggcctgcttctgggatacgctgtgctgcggcttaggcactggtgggtcatagctctgctctctaaaggggcctttggataccttttgccaatcgtgagcttcgttctggcctggcttgaaacctggttcctggactttaaggtgcttccccaggaagcggaagaggagagatggtaccttgcggcccaggttgctgtcgctagggggccccttctgttttctggggctttgagtgaagggcaattctattcaccaccagaatcatttgccggttcagataatgaatcggatgaggaagtcgcaggtaaaaaaagtttctccgcccaggaacgagaatacattaggcagggaaaggaagccaccgctgtggttgatcaaatcctggcccaagaggaaaactggaagttcgagaaaaataacgagtacggagacactgtctacacgatcgaggtgccctttcacggtaagacgtttatcctgaagactttcctgccttgcccagctgagctggtgtaccaggaagtcattctccagccagagagaatggtgttgtggaataaaaccgtaacggcgtgccaaatcctgcagcgggtggaggacaacactcttatctcctacgacgtgtcagctggtgcagccggcggcgtggtctctcccagggacttcgtgaatgtccggcgtattgagcggagacgcgaccggtacctgtcatccggaatcgccacttcccactccgcaaagccacccacacataagtatgttagaggcgaaaatggcccgggtggattcatcgtgttgaagtccgcctctaatcctcgcgtttgcactttcgtgtggatcctcaacactgacctaaagggccgcctgccccggtatttgattcaccaatccctggcagcaaccatgtttgagtttgcgttccacttgaggcagcgcattagcgagctgggggccagggcatag

SEQ ID NO: 136306 - DNA, 591 bp, synthetic construct
  misc_feature 1..591: note = Description of Artificial Sequence: Synthetic coding sequence
  source 1..591: mol_type = other DNA
atgagcaaacttccccgggaactaactcgcgatcttgagcggtcgctgcctgccgtggccagcctgggtagttcactgtcccattcccagtccctgtcctcccatctcttaccaccgcccgaaaagcggcgagcgatcagcgatgtccgaaggacattctgtctgttcgtgactttcgacctactcttcatctccctcctctggattattgaactaaacaccaatacaggaattaggaaaaatttggaacaagagataatccagtataacttcaagacatccttcttcgacatattcgtcctggctttctttcggttttccggcctgcttctgggttatgccgtgttgaggctgcgccactggtgggtaattgccgtgacaacactggtttcctctgcattcttgattgttaaagtcatcttgtcagaactattaagcaagggggcttttggctatctactgccgattgtcagctttgtcctagcatggttagaaacttggttcctcgactttaaagtcctgccacaggaggccgaggaagagcgttggtacctcgctgcccaggtagctgtcgctagagggccactgtag

SEQ ID NO: 136307 - DNA, 1338 bp, synthetic construct
  misc_feature 1..1338: note = Description of Artificial Sequence: Synthetic coding sequence
  source 1..1338: mol_type = other DNA
atgagtaagctacctcgtgagctcactcgggacctggagcggagcctgccagctgtggcaagcctgggttcttcgctttcacactcccagtccctgtcctcacatctgctgccgccacccgaaaagcggcgtgcaatttctgatgttcggcggactttttgcttgttcgtcaccttcgacttgttgttcattagccttctgtggatcatcgagttaaatactaatacaggaatcaggaagaatcttgaacaggagattattcagtataactttaagacatccttttttgatatttttgttctggctttcttccggttcagcgggctcttattaggttatgcagtactccggctgcgccattggtcacggagatggtgtcccgtgcactcttctctatctcgatcgagcagtcttagttgctccgctaaagggcatctggccacttgctcaccttcttcactgctttcatctcctggttggaggccaggctccctgactagcaaatcttaccctcgaaagctaaagcgtagcgacagcgctccccctgggtatcttgcagcgcaggtggcagtagcccgcggccccttgctgttttcaggggctctgtcagagggacaattctacagccctccagagtctttcgcgggttccgataacgaatctgatgaggaagttgccggcaaaaagagtttttctgctcaggaaagggaatacatcaggcaggggaaagaagccactgccgttgtcgatcagattctcgcccaggaggaaaactggaagtttgagaaaaacaatgagtatggtgatacagtgtacaccattgaagtgccttttcatggcaaaaccttcattttgaaaacatttcttccctgcccagcggagttggtgtatcaggaggtcatactccagccggagcgtatggtgctgtggaacaaaaccgtcacagcttgccaaatcctacaacgagtcgaagacaatacacttatttcctatgacgtgtctgctggggccgcgggtggcgttgttagccccagggactttgtcaacgtacgcagaattgaaaggcgacgcgaccgctatctgtccagcggcatagccaccagtcattcagctaaacctccaactcataaatatgtaagaggagaaaacggacctggaggttttattgttctgaaatcagctagcaacccgagagtctgcacctttgtgtggattttgaacactgatcttaaaggtcgactgcctaggtatctcatccatcagtcgttggccgctacaatgtttgaatttgcctttcacctaagacaacggatttccgagctcggagcgcgcgcttag

SEQ ID NO: 136308 - DNA, 618 bp, synthetic construct
  misc_feature 1..618: note = Description of Artificial Sequence: Synthetic coding sequence
  source 1..618: mol_type = other DNA
atggaaggcttgagtgacgtggcaagcttcgctactaagttgaagaacactcttatccagtatcatagtattgaagaagacaaatggagggtggcgaaaaagaccaaggacgtgacagtctggcggaaaccctccgaagaattcaacggctacctgtacaaggctcagggtgtgatagatgatctggtgtacagtataattgaccacatcagacctggaccctgccggctcgactgggattccctcatgacttcactggacattctagaaaacttcgaggaaaactgctgcgtgatgaggtacaccaccgctggacagctatggaatatcatttcccctagagagttcgtggacttctcctataccgttggctacaaagagggactgctgagttgtggtatatccctggactgggatgagaagcgccctgaattcgttcggggttataatcatccgtgcggctggttctgtgtgcctttgaaagataatccgaaccagagcctgctgacaggatatatccagaccgatcttcgggggatgatccctcagtcggcagtagatacagccatggcctctacgttgacaaacttttacggggatctaaggaaagcactgtag

SEQ ID NO: 136309 - DNA, 576 bp, synthetic construct
  misc_feature 1..576: note = Description of Artificial Sequence: Synthetic coding sequence
  source 1..576: mol_type = other DNA
atggaggggctgtcagatgtcgcgagctttgcaactaaactgaaaaatacactcatccagtaccacagcattgaggaggacaagtggagagttgccaaaaagacaaaggacgttaccgtctggcggaaaccttctgaggaatttaacggctatttgtacaaggctcagggcgttattgacgacctcgtgtactcaataatagaccacatcagacctgggccttgccggctggattgggattcgcttatgaccagtctggatattctagagaatttcgaggaaaactgttgtgtcatgaggtataccaccgctgggcagctttggaatataattagtcctcgcgagttcgtggatttcagctacaccgttggctacaaagaggggctcctcagctgtggaatttccctcgattgggacgagaaaagacctgagtttgtgcgggggtataaccacccttgcgggtggttctgtgtgcctcttaaagataacccaaatcagtcactgctgaccggctatatccagacggatctgagaggaatgattccccagtccgctgtggataccgctatggcttag

SEQ ID NO: 136310 - DNA, 642 bp, synthetic construct
  misc_feature 1..642: note = Description of Artificial Sequence: Synthetic coding sequence
  source 1..642: mol_type = other DNA
atggatccagctctggccgcccagatgtctgaggccgtcgcggaaaaaatgcttcagtataggcgcgataccgccggatggaagatctgtcgcgagggtaacggcgtgtccgtttcttggcgaccgtctgtcgagttccctggtaacctgtatcggggtgaaggtatcgtctacgggacactggaggaggtgtgggactgcgtcaaacctgccgtaggagggctccgggtcaagtgggacgagaacgtgaccgggttcgagattattcagagtatcaccgacaccctatgtgtgtcccggaccagtaccccatctgccgctatgaagctgatatcgcctcgagattttgtagatctggtcctcgtaaaaaggtatgaagatgggaccatatcctcgaatgcgacacatgtggagcaccctctttgcccccctaaacctggctttgtgagaggcttcaatcatccctgtggatgtttctgtgaacctctcccaggtgagccaacaaagacaaatctcgtcaccttcttccacaccgatctgtcaggttacttgcctcagaacgtggtggacagcttcttccctcgttcgatgacccgcttttacgctaatttacagaaagctgtgaagcaattccacgagtag

SEQ ID NO: 136311 - DNA, 663 bp, synthetic construct
  misc_feature 1..663: note = Description of Artificial Sequence: Synthetic coding sequence
  source 1..663: mol_type = other DNA
atggatttcaaagcaatagcccaacagacagcacaggaagttctcgggtataatagggatacttccgggtggaaagtggtcaagacctctaaaaagatcacggtgtcaagcaaggcaagccgtaagttccacggcaacttgtatagggttgagggtattatccccgagagccccgcaaaattgtcagacttcttatatcaaaccggcgataggattacctgggataagagcctccaggtgtacaatatggttcaccgcatcgattctgacacctttatctgtcacacaatcacgcaatccttcgccgtcggcagtatctcacctcgggacttcatagacctggtctatattaagcgttacgaagggaacatgaacatcattagctccaagtccgttgattttcctgaatacccaccctcttccaattacatacgcggttataaccatccatgtggcttcgtttgttctccgatggaggaaaaccccgcatactcaaagctagtgatgttcgtccaaacagagatgcgcggaaaattatctccctctatcatcgagaaaaccatgccaagcaacctggttaacttcatcctgaatgccaaggacggaatcaaggcccaccggacaccatcccggagaggcttccatcataattcccactcctag

SEQ ID NO: 136312 - DNA, 3072 bp, synthetic construct
  misc_feature 1..3072: note = Description of Artificial Sequence: Synthetic coding sequence
  source 1..3072: mol_type = other DNA
atgaccctgaacaattgtgcctccatgaaactagaggttcattttcagtctaaacaaaacgaggactctgaggaagaggaacaatgtaccataagttcccactgggccttccagcaggaatccaaatgctggagcccaatgggaagcagcgatctgctggcacctccatctcctgggctccctgccacctctagctgtgaatcagtccttaccgagctgagcgccacatcactgcccgtcataaccgtcagcttgcccccagaacccgccgatctgcctctcccgggacgggctccgtccagttctgatcgtccactgcttagcccaactcaaggccaagagggaccgcaggacaaggccaagaaacgccacagaaaccggtcgttcttgaagcacctggaatcgctacgaaggaaggaaaaatccggttcccagcaggccgagcctaagcattctccagccacatcggaaaaggtgtccaaagcctccagctttaggtcttgtcggggttttttgtccgcagggttctaccgggcgaagaactgggccgctacatccgccggagggagcggggcgaacaccaggaaggcatgggaggcatggcccgtcgcttcatttcgccacccacaatggacccaccgtggcgactgcctggtgcacgttccaggcgatcataagcctggtaccttcccccgctctctgagcatcgagtccctttgtcccgaggacggacacaggctcgctgattggcagcccggcaggcggtggggttgtgagggccggaggggctcgtgcggcagcaccggaagccatgccagcacttacgataacttaccagagctgtatcctgccgagccggtgatggtgggagctgaggcagaagacgaagacgacgaagaatcaggcggctcctacgcccatctggatgatatcctccaacacgtgtggggtttacagcagcgggtcgagctttggtctcgtgccatgtaccctgatctgggccctggagatgaagaagaagaagaagccaccagctctgtagagattgctacagtggaggtgaagtgccaggctgaggcactctcacagatggaagtgccagcccacggcgaaagccccgcttgggcgcaggcagaagtacagccagctgtgcttgctccagctcaagcccccgcggaagccgaaccagtcgcacaggaggaggcagaagcccccgctcccgctcccgcccctgccccagctcaagactcagagcaggaagctcactcaggtggtgagcccaccttcgcatcgagcctgagcgtggaagaggggcatagtatctccgataccgtcgcctcttccagcgagcttgatagttccgggaacagcatgaacgaggcagaagccgctggacctctggccggtctccaagcctcaatgccccgggagagacgggactcaggcgtcggagcttccttgacacgcccatgtaggaagctcagatggcattcctttcagaattctcatcgtcccagcctgaactctgagtcgttagagataaataggcagttcgccggtcagatcaacctactgcacaaggggtcacttctcaggctcaccgccttcatggagaaatacacagtgccccataagcagggatgggtgtggagcatgccaaagtttatgaggagaaacaagacaccagattaccgcgggcagcacgtgtttggcgtacccccgttgattcatgtgcagagaactggtcagcccctgccacagtcaatccaacaggctatgcgctacctacggagccagtgcctcgatcaggtgggaattttccgaaagagtggagtcaaatccagaatccaaaacctcagacagatgaatgagaccagtcccgacaatgtgtgctatgagggacaatctgcttacgacgtggcagatctgttgaagcaatatttcagggacctccccgagcccattttcacctccaagctgacaactacatttttacagatataccagctactgcccaaggatcaatggctggcagctgcccaggcagccacgcttctgttgccggacgagaatcgagaagtgctgcagacactgctgtacttccttagcgatattgcctctgccgaggaaaatcagatgactgccgggaatctggctgtgtgtctggctccctccatttttcatctaaatgtcagtaagaaggacagtccaagtccccgtattaagtccaagcgctctctcattggccggcctggcccgagagatctaagcgacaatatggccgccacgcaaggtttgtcgcatatgatttctgattgcaaaaaattattccaggtgcctcaggatatggtgcttcagctttgctctagctacagcgccgccgaactgagcccccccggaccagctttagcagaactgagacaggctcaggccgctggcgtgtcgctctctctgtatatggaagagaacatccaggacctgcttagagatgcagcagagaggttcaaaggatggatgagtgttcctggaccccagcataccgagctggcctgccgtaaggccccggacggccatccattgcgattgtggaaagcgagtactgaggtcgccgctccacctgccgttgttcttcaccgcgttttaagggagcgggctctttgggacgaagatctgctgcgtgcgcaggtgttagaagcactgatgcccggggtcgaattatatcactatgtaactgatagcatggccccgcacccctgcagagattttgtggtgctgcggatgtggaggtcggacctgccccggggaggctgcctgttagtgagccaaagcctggatcccgagcaaccagtgccggaatctggggtgcgagccttgatgctgaccagccaatacctcatggagccatgcggtttggggagatcacgcctgacacatatatgcagagctgacctccgcggtcgatcccccgattggtataacaaggtgttcggacacctttgtgcaatggaggtggccaagatccgggactcattccctacacttcaggcggcaggacctgaaactaaattgtag

SEQ ID NO: 136313 - DNA, 3072 bp, synthetic construct
  misc_feature 1..3072: note = Description of Artificial Sequence: Synthetic coding sequence
  source 1..3072: mol_type = other DNA
atgactctgaataactgtgcctctatgaagctggaagtccacttccagtccaagcagaacgaagatagtgaggaagaagagcagtgcacgatcagctcccactgggcatttcagcaagaaagcaaatgctggagcccaatgggtagttctgatctcttggcgcccccatcacctggcctgcctgcaacttccagctgcgagtccgttctgaccgaactgtccgcgaccagcctgcccgtgatcacagtgagcctgccacccgaacctgctgatctccccctgccaggaagagctccgtcttccagtgaccgacctttactcagccccactcagggccaggagggtccgcaggacaaagctaagaagagacacagaaataggtccttcctgaagcacctggaaagtttgaggcgaaaggagaagtctggcagtcagcaggcagaacccaagcactctcctgcgactagtgagaaggtctctaaggctagctcctttcggagctgccgggggtttttatcagccggattttaccgcgccaagaattgggccgcaacctcagcaggtgggtccggcgccaatacaagaaaagcttgggaagcgtggccggtcgccagcttcagacacccacagtggacgcacagaggcgattgcttggtccacgttcctggagaccacaagcccgggactttccctaggtcactgagcatcgaaagcctgtgcccagaggatggccaccgactggccgactggcagccaggaaggaggtggggatgcgagggaaggagagggagctgcggctccaccggtagtcatgcttccacctatgacaacctgcctgaactgtaccctgccgagcccgtgatggtaggggccgaggcagaggatgaggatgacgaggagtccggtgggtcatatgcccacctggacgatattttgcagcacgtctggggtctgcagcagcgcgtggaactttggtcccgcgcaatgtaccctgatctgggacccggggatgaagaggaagaggaagcaacctcgagcgtcgaaatcgctacagtagaggtcaagtgtcaggccgaggccctaagccaaatggaagtacctgctcacggcgagtcacctgcatgggctcaggccgaggtccaacctgcagtgctggctccagcacaagcccccgcagaggcggaaccggttgcccaagaggaggcggaagcccccgcgcctgcgcctgcgccagcaccagctcaggactccgagcaggaggcccactcgggcggagagcccacgttcgcctccagcttgtctgttgaggagggtcattcgatctctgatacggtcgcatcgagctccgaactggactcctctggaaattcgatgaatgaggccgaagccgcaggacccctggctggcctccaggcatccatgcctagagaacgaagagattcaggagtgggcgcctccttgaccagaccttgccgcaagctccggtggcattccttccagaattctcatagaccgagcttgaactccgagtctctggagattaataggcagtttgctggccagatcaatcttcttcataaggggtcattactgcgcctaactgcctttatggagaagtatactgtgccgcacaagcaggggtgggtctggtcaatgcccaaattcatgcggaggaacaagacaccagactaccggggacagcacgtgtttggggtgccaccactgatacatgtgcagcgtaccggacagcctcttcctcagtcaatccagcaggctatgagatatttacgtagccagtgcttggatcaggtcgggatcttcaggaagtctggagtgaagagtcgcatccagaatcttaggcagatgaacgagacttctcccgacaatgtctgctatgagggtcagtcagcctatgatgtcgcagatctgctcaaacagtacttccgggacctgccagaaccaatattcactagcaaactgactactaccttcctgcagatataccagctgctccccaaagaccagtggctggcagccgcccaagctgcaaccctattgctgcctgatgaaaaccgtgaagtgttacagactctgctgtactttctgtccgatatcgcaagtgccgaggaaaaccagatgactgccggaaaccttgccgtttgccttgcgccttcaattttccatctaaacgtctccaaaaaagactccccctctccgcgcattaagagtaagcgatcgctgattggtagacccggtccacgggacctgtcggataatatggcagctacccagggtctttctcacatgatatccgattgtaagaagttgttccaggtgccacaggacatggtgctgcagttgtgctcctcctatagtgccgccgagctgagcccccccggccccgcattggctgagctacgccaggcccaggctgcaggcgtctccctttccctttacatggaggagaacatccaggacctgcttagggatgccgctgaaaggtttaaaggatggatgtccgtccccggacctcaacataccgagctggcctgccgaaaggccccagatggccacccattacggctttggaaggcctccactgaagtagctgctcctcctgcagtagtgcttcacagagtgctgcgagagcgagctctgtgggacgaagatctcttgagggcgcaagtattggaagcattaatgcctggagtcgagctataccactacgtgacagacagtatggctccccacccctgtcgggacttcgtagtgctgcgcatgtggcgatccgatctgcctcgcgggggctgcctactggtcagccagtccctggacccagaacagcccgtgcctgaatcaggggtgagagccttaatgctgacgtcccagtacttaatggaaccatgcggcctcggtcgctctcgactgacccacatctgcagagccgacctgcgcggccgctcacctgactggtataacaaagtgttcgggcatctctgcgcgatggaagtcgccaagatcagagacagcttccccacgttgcaggctgctgggcctgagacaaagctgtag

SEQ ID NO: 136314 - DNA, 3312 bp, synthetic construct
  misc_feature 1..3312: note = Description of Artificial Sequence: Synthetic coding sequence
  source 1..3312: mol_type = other DNA
atgcccctgctcgacgtgttttggagttgcttcaggaaggtgaagtgtttccctcttctgcaggtgaagaaaaacgccgaggcagaggcaaagcgcgcctgtgagtggctacaggctaccggcttcccacagtatgtgcagctgtttgaggagggttcctttccccttgacatcggcagcgtgaaaaagaatcacgggttcctagatgaggactctctgggtgcactttgtaggcgactgatgacactgaacaactgtgcgagcatgaagttagaggttcattttcagtctaagcagaacgaggatagtgaagaggaggaacaatgcaccatttcatcccactgggccttccaacaagaatcaaagtgctggtcccccatggggtccagtgacctcttagcccccccttccccaggacttccagccacctcaagttgcgagagcgttctaactgagctcagcgccacaagcctacccgttatcactgtctccctgcctccggagcctgcggacctgccactgccagggcgggcgccatcgagtagcgatcggcccctcctgtcgcctacccaaggacaggagggaccccaggataaagcaaaaaagaggcatagaaataggtcatttcttaaacacctggagtctctaagacggaaagagaaaagtgggagccagcaagccgaaccgaagcactccccagcaactagtgagaaagtttcaaaggcctcatccttcagatcttgccggggcttcctttctgcgggcttttatcgggcaaagaattgggccgcaactagcgctggaggcagcggcgctaatacaagaaaagcgtgggaagcctggcctgtggcttcttttaggcatcctcagtggacccatcgcggcgactgtctcgtgcacgttccgggcgaccataagcccggaacatttccgaggtcgttgtccatcgagtccctctgtcctgaagacggacatcggctggctgactggcaacccggtaggcggtggggctgcgaagggaggagaggctcctgcggatccacaggcagtcacgcaagcacttatgataatctcccagagctttaccctgcggaacctgtcatggttggagctgaggccgaagacgaagatgatgaagaaagcggagggagctacgctcatctggatgatatactgcagcacgtgtggggactgcagcagcgggttgagttgtggagccgtgccatgtaccctgacctgggtccaggagacgaggaagaggaagaggccacctcctccgtggagatcgcaactgtagaagtgaaatgtcaggccgaggccctctcacaaatggaagtgccagctcatggggagtccccggcctgggctcaggccgaagtccagcctgcagtcctggctcctgcgcaggccccggccgaggctgagccagtggcacaggaagaggccgaagcccccgcacccgcccctgcaccagcccctgcccaggattctgaacaggaggcacactccggcggcgaacccacgtttgcgtccagtctgagcgtcgaggaggggcacagtatatctgacacagttgccagctcttctgaacttgatagttctggcaatagcatgaacgaggctgaggccgcaggccctctagccggactgcaggcctcaatgccacgggagaggagggattccggagtcggcgcttcacttactagaccatgtaggaaattgaggtggcactcctttcagaatagtcaccgcccctcccttaacagtgaaagccttgagatcaatcgtcagtttgcgggccaaattaacttgctccacaagggtagtttgctgcgcctgaccgccttcatggaaaagtatactgtgccacacaagcagggctgggtttggtccatgccaaagtttatgagacgcaacaaaacgccagattatcgcggacaacatgtgtttggtgtgccacccttgatccatgtgcaaaggacaggtcagcctcttcctcagtcaatacaacaggcaatgcgatatctgcgttcccagtgcttggatcaggttggcatcttcaggaaatcaggcgtgaagtctaggatacagaatttgcggcagatgaacgagaccagcccagataacgtctgctatgagggccagagcgcatatgatgtcgccgacctgctcaaacagtactttagggatctacccgagcccatctttacctccaagctgactaccacttttttgcaaatttatcagctgctccccaaggaccagtggttggctgccgcacaggccgccacactcctccttcctgacgaaaatagagaggtgctccagacactcctttatttcctgtcagacatagcttccgccgaagaaaatcaaatgaccgccgggaacctggcagtatgtctggctccctccatctttcatctcaatgtgtcgaagaaggactccccctcccctagaatcaagagcaaaagatcactgatcggacgacccggacctagagacctgtctgacaacatggcagccacccagggactcagtcacatgatctccgattgcaaaaaactattccaagtcccacaggacatggtcctgcagctgtgttcatcctattcagccgccgaactttccccacctggacccgctctcgccgagctccggcaagctcaggccgcaggggtttccttgagcctgtacatggaagaaaacattcaggatctcctacgagatgcggctgaaagattcaaagggtggatgagtgttccgggcccccaacatacagaactggcctgtagaaaggcgccagatggccatcctttgcgactctggaaggcctccactgaggttgctgcacctcccgcagtggttctgcacagagtgctcagggaaagagcgctctgggacgaggatttattgagggctcaggtgctggaagctcttatgccaggagtcgagttgtaccattatgtgaccgactctatggcgcctcatccttgtagggactttgtggtgctccggatgtggagatcagatctacccaggggcgggtgccttttagtttcccagtcactggatcctgagcagccagttcctgagtcaggtgtacgggcccttatgttaactagtcaatatttgatggaaccctgcggattaggaaggagtcgattgacacatatctgcagagctgacctgcgcggcagatctcctgattggtataacaaggtatttgggcatctatgcgccatggaagttgctaaaatccgagactccttccctacgttgcaagcagcgggccccgagaccaagctctag

SEQ ID NO: 136315 - DNA, 159 bp, synthetic construct
  misc_feature 1..159: note = Description of Artificial Sequence: Synthetic coding sequence
  source 1..159: mol_type = other DNA
atgccattacttgacgtattctggtcctgcttccgcaaagtcaagtgctttcccctcttgcaggtgaagaagaacgccgaggctgaagctaaaagagcctgcgagtggcttcaggcaacaggcttccctcagtacgtccaattattcgaaggggggtag

SEQ ID NO: 136316 - DNA, 189 bp, synthetic construct
  misc_feature 1..189: note = Description of Artificial Sequence: Synthetic coding sequence
  source 1..189: mol_type = other DNA
atgaaattcctagtgttcgcattcatcctcgccctgatggttagcatgataggagcagacagcagtgaagaaaaattcctccggaggatcggtaggtttggctatggttatggaccttaccagcctgtccccgagcagccattgtaccctcagccctatcagccccagtatcaacagtatacattctag

SEQ ID NO: 136317 - DNA, 159 bp, synthetic construct
  misc_feature 1..159: note = Description of Artificial Sequence: Synthetic coding sequence
  source 1..159: mol_type = other DNA
atgaagtttctggtgttcgcgtttatcttagcgttgatggttagtatgattggggcagacagctccgaagaatacgggtatgggccttaccagccagtgccagaacagccactgtacccacaaccgtatcaaccccaatatcaacagtatacattctag

SEQ ID NO: 136318 - DNA, 843 bp, synthetic construct
  misc_feature 1..843: note = Description of Artificial Sequence: Synthetic coding sequence
  source 1..843: mol_type = other DNA
atgagatggttcctgccctggacactggctgctgtaacagcagcagccgccagtaccgtgttggcaacagcgttatcccctgctccaacgacaatggacttcactccagccccccttgaggacacatccagccgtccacagttttgtaaatggccatgtgagtgccctccatctccccctcgttgtcctctgggagtttctctgattactgacgggtgcgagtgctgtaaaatgtgcgcccagcaacttggcgataattgtactgaagccgcaatctgcgatcctcatcgggggttgtattgcgactactccggagacaggccgcgatacgccattggggtgtgtgcccatgcggtcggtgaggtagaagcttggcatcggaactgtatagcatacacctcgccttggtccccttgtagtacatcttgtggattaggcgtctccactcgcatatcgaacgtcaacgcccaatgctggcctgaacaggaaagcaggctgtgcaacttgcggccttgtgatgtggacattcacacactcattaaagccggcaagaagtgtttagctgtatatcagcctgaggcctcgatgaacttcactcttgcagggtgcatttcgacacggtcataccagcccaagtattgcggggtgtgcatggacaaccggtgttgtatcccttataaaagcaaaacaattgatgtgtcttttcagtgtcccgatggcctgggttttagtaggcaggtcttatggattaacgcctgcttctgtaacctgtcttgccgtaaccccaatgatattttcgcagacttagagtcctaccctgacttctcagagatcgccaattag

SEQ ID NO: 136319 - DNA, 507 bp, synthetic construct
  misc_feature 1..507: note = Description of Artificial Sequence: Synthetic coding sequence
  source 1..507: mol_type = other DNA
atggccaaaacagccatggcgtacaaagaaaagatgaaagaactctccatgttgtcccttatctgctcttgcttttaccccgagcctagaaacatcaatatctacacatatgacgatatggaggtgaagcaaataaataaacgggcatccggccaagctttcgagctcatcctgaagccaccttctcccaaaaaaaaagatttatcgctggaagaaatccaaaagaagctggaagctgcagaggaaaggagaaagagtcaagaggcccaagtcctgaagcagctagctgagaaaagggagcatgagagggaggtgctgcaaaaggccttggaggagaataacaacttctcaaagatggctgaagaaaaactgattctcaaaatggagcagatcaaagaaaatagagaggctaaccttgcagcaataatagagaggctgcaggaaaaagagaggcacgctgccgaggttcggagaaacaaggagctgcaagtcgaattgtcaggctag

SEQ ID NO: 136320 - DNA, 564 bp, synthetic construct
  misc_feature 1..564: note = Description of Artificial Sequence: Synthetic coding sequence
  source 1..564: mol_type = other DNA
atggccaaaaccgccatggcctacaaggaaaaaatgaaagagctgagcatgctatccctgatttgtagctgtttctatccggaaccccgaaatataaatatttacacttacgatgatatggaggtcaagcaaatcaataagcgggcgagcggtcaagcttttgaactcatcctgaagccgccatccccaatatccgaggccccaaggactcttgcgagtcccaagaagaaggacttgagtcttgaagagatccagaagaagctcgaggccgctgaagagcggagaaagtctcaggaggcccaggtcctgaaacagctggccgaaaaaagggaacatgagcgagaggttctccagaaagcactggaggaaaacaacaatttttcaaagatggccgaagaaaagcttatcctaaagatggaacaaatcaaagagaaccgagaggctaatttagccgcaatcattgaacgcttacaggagaagctggtcaagtttatctctagtgagctgaaggagagtattgagtcgcagttcctcgaactccagagggagggggagaaacagtag

SEQ ID NO: 136321 - DNA, 543 bp, synthetic construct
  misc_feature 1..543: note = Description of Artificial Sequence: Synthetic coding sequence
  source 1..543: mol_type = other DNA
atggcatctaccatatcggcctataaggaaaagatgaaggagctgtcagtcctgtccctgatctgttcttgcttctacacccaacctcatccaaacaccgtgtaccaatacggagatatggaggtgaagcagctcgataagcgcgctagtggccagtccttcgaagtgattctgaagtccccatctgacttgtctcccgagtcacctatgctgtctagccctcctaagaaaaaggacaccagcttagaggagttgcagaagagactagaggcagccgaggagcggaggaagactcaggaggcccaggtgctcaaacagctcgctgaacggcgcgagcatgaaagagaggtgctccacaaagctctagaagaaaataataatttctcaaggcaggcagaggagaaacttaactataaaatggaattgtcaaaagaaataagagaggctcacttggccgccctgcgcgagaggttacgagaaaaagagctccacgcagccgaggtacggaggaacaaggagcaaagagaggagatgtcaggctag

SEQ ID NO: 136322 - DNA, 510 bp, synthetic construct
  misc_feature 1..510: note = Description of Artificial Sequence: Synthetic coding sequence
  source 1..510: mol_type = other DNA
atgaaagagctgagcgttctgtcccttatctgcagctgtttttacactcagccacatccgaatacagtttaccaatatggtgacatggaagtcaagcagcttgacaagagagctagcggccagtccttcgaggtcattctgaagagtcccagcgatctctcacccgagtctcctatgctatcatctcctcccaaaaagaaagatacttcgctggaagagcttcagaagcggttggaggccgcagaagagaggcggaaaacacaggaggcacaggttttgaagcagctggccgagagacgcgagcacgagcgagaggtgctgcataaggctctcgaggagaataacaatttctctcgccaggcggaagagaaattaaattacaaaatggaattgagtaaggaaatccgtgaggcccacctggccgcgctccgcgagcgtctgagagagaaagaactgcacgcagccgaagtgcgtaggaataaggagcaacgggaagaaatgtctggttag

SEQ ID NO: 136323 - DNA, 1422 bp, synthetic construct
  misc_feature 1..1422: note = Description of Artificial Sequence: Synthetic coding sequence
  source 1..1422: mol_type = other DNA
atgttcagtgtccaattgtctcttggcgaacagacatgggaaagcgaggggtcatcaatcaagaaggcccaacaggcagtcgcgaataaagctcttacagagtcaactctcccaaaacccgtgcagaaaccaccgaaatcaaatgtcaacaataatcccggctcaatcacacccacagtggagctgaacgggctcgctatgaagcgtggtgaacctgccatttatcggcctcttgatcctaagccattccccaactatagggcaaattacaatttcagagggatgtacaaccagcgctaccattgtcccgtccccaaaatcttctacgtgcagctgacagttggcaacaatgaattttttggcgagggaaaaaccaggcaagccgccagacacaatgctgctatgaaggccttgcaggcactgcagaatgaaccaatcccagaaaggagcccgcaaaacggcgagtctggtaaggatgtggatgacgacaaggacgctaacaaatcagagatctccctggtgtttgaaattgccctgaaaaggaatatgccggtgagttttgaagtcatcaaggaatccggccccccccatatgaagagctttgtcacacgcgtcagcgttggtgagtttagtgccgagggggaaggaaacagcaaaaaactctcaaaaaaacgagcagcaactaccgtcctacaggaattgaaaaagctgccccctctgcccgttgtcgaaaaacccaaactttttttcaaaaaaaggcccaaaacaatcgttaaggctgggcctgaatacggccaggggatgaaccctatttcacggttggcccagattcagcaggctaaaaaggaaaaggagcccgactatgtactgctgtcagagcgcggaatgcctcgtcggagggagtttgtcatgcaagttaaggtcgggaatgaagtcgctaccggtaccggaccaaacaaaaagatcgccaaaaagaacgccgccgaggccatgctgctgcagcttgggtataaagcctctacgaacctgcaggatcagcttgagaagactggcgagaataagggatggtcagggcctaaacccggcttccccgagccaacaaacaacacacccaagggaatcctacacttgagccccgatgtatatcaagaaatggaagcgtctagacataaagtgattagcggcacaacactcgggtacttgtctcccaaggacatgaatcagccttccagttcctttttctctattagtcccacttctaattcctccgccaccattgctcgtgagctcttaatgaatggcaccagctcaacggcggaagccatcggccttaaagggagcagcccgactcccccttgctcacccgtccagcctagcaaacaactcgaatatcttgctcgcattcagggctttcaggtttag

SEQ ID NO: 136324 - DNA, 1515 bp, synthetic construct
  misc_feature 1..1515: note = Description of Artificial Sequence: Synthetic coding sequence
  source 1..1515: mol_type = other DNA
atgaaacggggtgagcctgccatttaccgccctctggacccaaagccattcccaaactatagagcaaactacaacttccgcggaatgtataaccaaaggtatcactgccccgtacccaaaatattctacgtgcagctgacagtgggaaacaacgaattcttcggggagggcaagaccaggcaggcggcgagacataacgctgccatgaaggctcttcaagcgctgcagaatgagccaatccctgagcgaagcccacagaacggcgaatccggtaaggatgtcgatgatgataaagatgctaataagagcgagatctcactcgtattcgaaattgctctcaagagaaatatgcctgtgtcctttgaggtgataaaggaatccggccccccccacatgaagtccttcgtgaccagagtctcagtcggggaattctctgccgagggagaaggcaactctaaaaagctctccaagaagagggctgccaccactgtgctgcaggagctcaagaaactgccccccctcccggtggtagaaaaacccaagctatttttcaagaaacggcctaagactatagtgaaagccggcccggaatacggccaagggatgaatcctatttcaagactggcgcaaattcagcaggccaagaaagagaaggaaccagactatgtcctcctctctgagcgtggcatgcctcgccgcagagaattcgtcatgcaagtcaaggttggtaacgaggtcgcaacagggacaggtcctaataaaaagattgcaaaaaagaatgccgctgaggcaatgctactgcagctcggatataaggcctccacaaaccttcaggaccaattggaaaaaacaggggaaaataagggttggtctggtccaaaacctgggtttcctgaaccgaccaacaatacaccaaaaggcatattgcaccttagtccagatgtgtaccaggagatggaagcaagccgccacaaggtgatttctgggactaccctggggtatttgtctccgaaggacatgaaccagccctcgtcatcatttttctccatcagcccaacatccaactcttcagctactattgcccgggagttactgatgaatgggacatcttcaacggccgaggccattggccttaagggctctagccctactccaccatgctcccctgtgcagccatcaaagcagctcgagtacctcgccagaattcaggggttccaggttcattattgtgatagacagtccggcaaggagtgcgtcacttgtctaacgttggcccccgtgcagatgacattccacgccattggctccagcatcgaggctagccatgaccaggcagcactgtcagcccttaaacagttcagcgaacaggggctggaccccatcgatggcgccatgaatatcgagaagggtagccttgaaaagcaggcgaagcacttgcgggagaaggctgacaataaccaggccccacctggcagtatagctcaagattgcaaaaaaagtaactctgccgtctag

SEQ ID NO: 136325 - DNA, 1197 bp, synthetic construct
  misc_feature 1..1197: note = Description of Artificial Sequence: Synthetic coding sequence
  source 1..1197: mol_type = other DNA
atgaaggccctgcaggctctgcagaacgaacctattcccgaaaggtcaccccagaatggcgaaagtggaaaggatgtggatgacgataaggatgcaaacaaatcagagatatcgctggtgttcgaaattgccttgaaacggaacatgcctgtgagcttcgaggtcatcaaagagtctggacctccacatatgaagagctttgttacacgggtaagcgttggggaattcagtgccgagggagaagggaacagcaagaaattaagcaaaaagcgcgcggcaaccactgttctccaggagctgaagaagcttcccccattgcctgtggttgagaagcccaaactctttttcaagaaaaggcccaagacaatagtaaaagccgggccagaatatgggcaagggatgaatcctatctctcggctggctcaaattcagcaagccaagaaggagaaggaacccgactacgtgctcctgtctgaaagagggatgcctcggagacgggaattcgtgatgcaggttaaggtgggcaacgaggttgctactggcactggcccgaataagaagatcgcaaagaagaatgctgctgaggcaatgctgctccaactgggctacaaggccagcactaatctacaggaccagctggaaaagaccggagagaacaagggatggtccgggcccaagccaggcttccctgagccaaccaataacacgccaaaaggcatactgcacctgagtccggacgtctatcaggagatggaggcaagtcggcataaagtcattagtggcaccacactggggtacctgtcccccaaagacatgaatcagccctcatcttccttcttctcaattagcccaactagtaattcaagtgccaccatcgctagagaattgttaatgaatgggacaagttcaacagccgaggctatagggttgaagggaagcagcccaactcctccctgctccccagttcagccctcaaaacaattagaatacttggctaggattcagggctttcaggctgctctctccgctctgaaacaattctcggaacagggacttgatccgattgacggggcaatgaacatcgagaagggatcccttgagaaacaggccaagcatctgagggaaaaggccgacaacaaccaggccccccccgggtctatcgctcaggattgcaagaagtctaatagtgctgtatag

SEQ ID NO: 136326 - DNA, 1440 bp, synthetic construct
  misc_feature 1..1440: note = Description of Artificial Sequence: Synthetic coding sequence
  source 1..1440: mol_type = other DNA
atgttacagataaaccagatgttctccgtccagttatcactcggagagcaaacttgggagtccgaggggtcatcaattaagaaggcccagcaagctgtcgcaaacaaggcgctgaccgagagcactctcccaaaacctgtgcagaagccacctaaatcaaacgtgaacaataatcccggcagcatcactcccacggtcgagcttaacgggctcgctatgaagagaggagagcctgctatctatcgccccctagacccaaaacctttccctaattatcgcgccaattacaactttcgaggcatgtataaccagaggtaccattgcccagtcccaaagatcttttatgttcaactgacagtcggtaataatgaattcttcggcgagggcaagacaaggcaggccgcgagacacaacgccgccatgaaagccctgcaagccctgcagaatgagcctatccccgaacggagccctcagaatggggagagtgggaaggatgtggatgatgacaaggacgccaataaatctgagatttcattagtcttcgagatcgccctgaaacggaatatgccagtgagcttcgaagttatcaaggagtccggccccccgcacatgaagtccttcgtcactagagttagtgtcggggaattctcagctgaaggcgagggtaacagtaagaagctttctaagaaaagagctgctaccacagttctacaggaactgaagaagttaccccctctccccgtggttgaaaagccaaagctgttttttaaaaaacgccccaaaactattgtgaaagccggccccgagtacgggcaaggcatgaaccctattagcagactcgcccagattcagcaggctaagaaggagaaggagccggactatgtcctactgtctgagagaggaatgcctcgacgaagggaattcgtgatgcaagtgaaagttgggaatgaggtagcaactggtacggggcccaacaaaaaaatagctaaaaagaacgctgctgaagcgatgctcttacagttagggtacaaggcatccaccaatctccaggatcagcttgagaagaccggtgagaataaaggatggtccgggcctaaacctggatttccggaacccactaataatactcccaagggtatccttcacctctcacccgatgtgtaccaggagatggaagccagtcgtcacaaggttatatccggcactacacttggctacctgagcccaaaagatatgaaccagccttcttcttcctttttttcaatatcgcctacatccaactccagcgcgacaatagctcgcgagctcttgatgaacggcactagctctacagctgaagcaataggactgaagggaagcagtccaactcccccttgcagtcccgtccagccatctaagcagttggagtacctggcccgtattcagggctttcaagtgtag

SEQ ID NO: 136327 - DNA, 615 bp, synthetic construct
  misc_feature 1..615: note = Description of Artificial Sequence: Synthetic coding sequence
  source 1..615: mol_type = other DNA
atgctgcaaattaatcagatgttcagtgtccagcttagcttaggggagcagacctgggagtcggagggaagcagcattaaaaaggcacagcaggctgtggccaataaggctttaaccgagtctaccctacccaagcctgtgcagaaaccccctaagtcaaatgtaaacaataatccaggtagcatcactccaactgtagaactgaatggactagccatgaagaggggagagccggccatttataggcccttggaccctaagccattcccgaactatagagccaactataatttccgcgggatgtacaaccagcgataccactgccccgtgcccaagatattctacgtccagctgaccgtggggaacaacgaattttttggagaaggtaaaacccggcaagccgcacggcataatgcggccatgaaggccctccaagcacttcaaaatgagcctatccccgaaaggagtccccaaaatggcgaatccggtaaggatgtagatgacgacaaggatgcaaacaagtctgagatcagcttggtttttgagattgctttaaagaggaatatgccggtgtcctttgaagtcattaaagagtcaggtcctccacatatgtag

SEQ ID NO: 136328 - DNA, 195 bp, synthetic construct
  misc_feature 1..195: note = Description of Artificial Sequence: Synthetic coding sequence
  source 1..195: mol_type = other DNA
atgttgcagataaaccaaatgttcagcgtgcagctaagccttggtgagcagacatgggaatccgaaggctcttctatcaaaaaggcgcaacaggcggtggctaataaggctcttacagagagtacgcttccaaagccagtgcagaagcctcctaaaagcaacgtgaacaataaccccggatcaattaccccctag

SEQ ID NO: 136329 - DNA, 1440 bp, synthetic construct
  misc_feature 1..1440: note = Description of Artificial Sequence: Synthetic coding sequence
  source 1..1440: mol_type = other DNA
atgctacagatcaatcagatgttctctgtgcaactctccctgggtgagcagacctgggagtctgaggggtctagcatcaaaaaggcccaacaagcagttgccaataaggccctcaccgaaagcaccttgccaaagccagtccaaaagccacccaaaagtaatgtcaataataacccggggagtatcacacctaccgtcgagctcaatggcctagccatgaagcgaggtgagcccgccatctaccgaccattagaccccaagccattcccaaattacagagctaactacaatttcagaggcatgtacaatcagagataccattgtccagtccctaaaatcttctacgtccagctcaccgtcggcaataacgaattcttcggcgagggaaaaactcgccaagctgccagacataatgcggctatgaaggcgctacaggccctccaaaatgagcctattccagagcggagcccccaaaatggtgaatcaggtaaagatgtggatgatgacaaagacgctaacaaatccgagatcagtctggtattcgaaatcgctttgaagaggaatatgcctgtgagctttgaagtaatcaaggaatccgggcctcctcacatgaaaagtttcgtgactagagtgtccgtcggcgagtttagcgccgagggagaggggaattcgaaaaagttgtccaagaaaagagccgcgaccacagtcctgcaggaactcaaaaagctcccaccactacctgtcgtggagaagccgaagctatttttcaagaaacgaccaaaaactattgtcaaagcagggcctgagtatggccagggcatgaacccgatctcccgcctagcacagattcagcaagccaagaaggagaaggaaccagattatgtgctgctgagcgagcgggggatgccgagacgccgagagttcgttatgcaggttaaagtgggcaatgaagtggccactggcacggggccaaataaaaaaatcgcaaaaaaaaatgccgctgaggctatgttgctgcagctggggtataaagcatccaccaatctccaggaccagctggaaaagactggagagaataagggatggtctggtccgaaacctgggttcccggagcctacaaataatacacccaaagggattctgcacctttctcctgacgtttaccaagaaatggaggcctcacgccacaaagtaattagcggaacgactctgggatatcttagccctaaagacatgaaccaaccctcgagttctttctttagcataagccccacttctaattcttccgcaacaattgcccgggagctgctgatgaatggtacatcatccaccgccgaggcaattgggcttaagggctcctcccccaccccgccttgctcaccagtacagccatccaagcagctagaataccttgcccgcatccagggattccaggtgtag

SEQ ID NO: 136330 - DNA, 1617 bp, synthetic construct
  misc_feature 1..1617: note = Description of Artificial Sequence: Synthetic coding sequence
  source 1..1617: mol_type = other DNA
atgttgcagattaaccagatgtttagcgtgcagttaagcttaggcgaacagacctgggagtcggaaggatcctcgattaaaaaggcccaacaggccgtggcgaacaaggcactgacagagtccacccttccaaaaccagtccagaagccccccaagagcaacgttaacaataaccccggatcaatcacaccaactgtggagttgaatggcctggctatgaagcgtggggagcccgcgatctatcggccattggaccctaagcctttcccgaattaccgagctaattataatttcaggggaatgtataatcagcggtatcattgccccgttcctaaaattttctatgtgcagcttacagtaggcaataatgagttctttggcgagggaaagacacgccaggctgcacggcacaatgccgcaatgaaagccctgcaagcactgcagaatgagccaatacccgagagaagcccccagaatggtgagagcggcaaggacgtggatgatgacaaggacgccaacaaatccgaaatcagcctagtgtttgaaatcgccctgaagcggaacatgcctgtgtccttcgaggtaattaaggaaagtggtcctccccatatgaagtcctttgtgacacgagtgtctgtgggagagttcagtgccgagggcgagggaaattcgaaaaaactctccaaaaaaagagctgccaccactgtcttgcaagaattgaagaaactgcctccgctgccggtcgtagagaaacctaagctgttttttaagaaacgtcctaagacaatcgtaaaagcagggccagagtacggacagggtatgaatccaatttcaaggctcgctcagatacagcaggccaagaaagaaaaggagcccgactatgtactgctgagcgaacggggtatgcctcgacgcagggagttcgtaatgcaagtgaaagtcggaaacgaggtagcaacaggcactggccctaataagaagatcgccaagaagaatgcagccgaagccatgctgctgcaattaggctataaagcttccacgaacctccaggatcagctcgaaaagacaggcgaaaacaaggggtggtccggcccaaaacctggcttcccagaacccactaataacacacccaagggaatcctgcacctctctccagatgtctaccaagaaatggaggcctcaaggcataaggtcatttctggcacgacgctgggctacctgagtcccaaggacatgaaccagcctagttcgagttttttttccatctcaccaacctcgaactcaagtgccactatcgctagagagctgctaatgaacggaacgtcgagcactgccgaagccatcgggttgaagggatccagccccacccccccatgttccccggtgcagccatccaaacagttagaatacttagctcgcatacagggctttcaggctgcactatcagctctgaagcagtttagcgaacagggactggaccctattgacggagcgatgaatatagagaaaggcagtctggagaaacaggctaagcacctgagggaaaaggccgataacaatcaggcgcccccaggctctattgcccaggactgcaagaagtcgaactccgctgtatag

SEQ ID NO: 136331 - DNA, 318 bp, synthetic construct
  misc_feature 1..318: note = Description of Artificial Sequence: Synthetic coding sequence
  source 1..318: mol_type = other DNA
atgctccagattaaccagatgttctccgtccagctgagtcttggggaacagacttgggagtccgaggggagctcgattaaaaaagctcagcaggccgtggctaacaaagcgttaacagagtctactcttcccaaacccgtgcagaagccaccaaagtccaatgtgaataataaccccggtagcattacgccgactgttgaactgaatggactggccatgaaacgcggtgagcccgcaatatatagacctctggatcccaaaccttttcccaattatagggctaactacaacttcaggggcatgtataatcaaagatag

SEQ ID NO: 136332 - DNA, 1713 bp, synthetic construct
  misc_feature 1..1713: note = Description of Artificial Sequence: Synthetic coding sequence
  source 1..1713: mol_type = other DNA
atggccaacccgaaggagaagacggctatgtgtctagttaacgaacttgctagattcaatcgagttcagccacaatacaaactcttgaatgaacgcggccccgctcatagtaaaatgttctccgttcagctctcgctcggcgaacaaacatgggaatctgagggctccagcatcaaaaaagcccagcaggcagtggcaaacaaggccctcacagagagtactctacctaagcccgtgcagaaaccaccaaaatcaaacgtgaataacaaccccgggagcatcactccgaccgtagagctcaatggcctggctatgaagcggggcgaaccggctatctacaggccactggaccctaagccatttcctaactaccgtgcgaattacaacttcaggggaatgtacaatcaacgctaccattgccctgttcctaaaatcttctatgtgcaactgactgtgggaaacaatgaattttttggagaaggaaaaacccggcaggcagctaggcacaatgcggccatgaaggcattgcaggctctgcagaatgagcccatccccgaaaggtccccgcagaatggagagtctggaaaggatgtcgacgatgataaggatgcaaacaagagcgagatcagcctcgttttcgaaattgcactcaagagaaacatgccagtcagcttcgaagtcatcaaggagagcgggcctcctcatatgaagagctttgtgacccgcgtttcagtgggcgaattctccgccgagggagaggggaactccaaaaaactttccaaaaaaagggcggctactactgttttgcaggagctaaaaaagttacccccacttcccgttgtggaaaaaccgaaattattcttcaagaagaggccgaaaacgattgtgaaggctgggccagagtacggacagggcatgaatcccatcagtcgactcgcccagatccagcaggccaagaaggagaaggagcccgattatgtcctcctctccgagaggggcatgcctcgaagacgagaatttgtgatgcaggtcaaagttgggaatgaagtggcgaccgggactggtccaaataaaaagattgctaaaaaaaacgccgccgaagcgatgctactgcagctaggttataaggcaagcacgaatctgcaagaccagctcgagaaaactggagagaataagggttggtctggtcctaagccgggtttccccgaacctaccaacaacacccccaaaggcatcttacacctctcacctgacgtatatcaggaaatggaggcgtctaggcataaggtcatctcagggaccacactcggctatctgagcccaaaagatatgaaccaaccctcgagttccttcttctcaattagtcccactagcaatagcagcgcgaccattgctcgagagttgcttatgaatggcacctcttctactgccgaggcaattggactaaagggcagttctcctacgccaccctgctctcctgttcagcccagcaagcagctcgagtatttggctaggattcaaggctttcaggctgccctttctgccctgaaacagttctcagagcagggcctggatccaatagatggtgccatgaacatagagaaagggagcctggagaagcaagcaaagcacctaagggagaaagcagacaacaatcaggcccctcctggatccatcgcccaggactgcaagaagtccaactcagctgtgtag

SEQ ID NO: 136333 - DNA, 1044 bp, synthetic construct
  misc_feature 1..1044: note = Description of Artificial Sequence: Synthetic coding sequence
  source 1..1044: mol_type = other DNA
tcactgctcaccaatgacgcatctagtgaaagtatagcttcgtttagcaagcaagaagtgatgtctagcttcctgcccgagggcggatgttacgagctgctgactgtgatcggaaagggattcgaagaccttatgaccgtgaatctcgcgagatacaagccaactggcgaatatgtgaccgtaagacgtattaacttagaagcctgcagcaatgagatggtgaccttcctgcagggagagctgcacgtttccaaactgtttaaccaccccaacattgtgccctacagggctacctttatcgcagataacgagctctgggtcgtgacgtccttcatggcttatgggtcagcaaaggacctgatttgcacacacttcatggacggtatgaatgaactggcaatcgcctacatactgcagggagttcttaaagcacttgattatatacaccatatgggatatgtccacaggtctgtgaaggcctctcacatccttatcagcgtcgacggcaaagtgtacctcagcggcttaaggtccaatctctcaatgatttcccacggccaacgacaacgcgttgtccacgatttcccgaagtactctgtgaaggtactgccttggctgtcccctgaggtgctgcagcaaaatctgcagggttacgatgccaaaagcgatatctattctgttggcatcacagcgtgcgaactggccaacggccacgtgcccttcaaagacatgcctgccactcagatgttgcttgagaagttgaacgggaccgttccttgcttactcgacacctccactattccggccgaggaattgaccatgagccccagccggtcagttgctaacagtggattgtccgattcactgaccacatctacccccagaccctccaatggtgactcaccgtcccacccttaccatcgcaccttcagtccacactttcaccatttcgtcgagcagtgtctccagaggaacccggacgcgcgatatccctgctggcccggcccaggactccgggaaagccgcggatgctctgggggatag

SEQ ID NO: 136334 - DNA, 1296 bp, synthetic construct
  misc_feature 1..1296: note = Description of Artificial Sequence: Synthetic coding sequence
  source 1..1296: mol_type = other DNA
atgtcttttttggtaagtaagcctgaacggattaggcgctgggtgagtgaaaagtttatcgttgagggactgagggatctcgagcttttcggcgagcagccacctggggacactcgcagaaaaacgaatgatgcatcatcagagtctattgcatcattcagtaagcaagaggtgatgagctctttcctgcccgaaggcgggtgctacgagctcctcaccgtgattggcaaaggatttgaggatcttatgactgtcaacttagctaggtacaaacccaccggggaatacgttacagtgagaaggataaatctggaagcctgcagtaatgaaatggtcaccttcctgcagggcgagctgcacgtctctaaactttttaaccatcctaatatcgtgccttatagagccacctttatcgcggacaatgagctgtgggtggtgacaagcttcatggcctacggcagcgcgaaggacctgatatgtacacatttcatggatgggatgaatgagcttgccattgcttacattctgcaaggggtgttaaaagcacttgattacatccaccacatggggtatgtccacaggagcgtcaaggccagtcacatattgatctctgtggatggtaaggtatacttaagcggtctgcgaagtaacctatcaatgattagccacggacaaaggcagcgggtggttcatgatttcccaaagtacagcgtcaaggtgctgccctggctgagtcccgaagtgttacagcaaaatctccagggatacgatgctaagagcgatatttattcagtaggaataaccgcatgtgaactggccaacggtcacgtccccttcaaggatatgcccgccactcagatgctgttggagaagctgaacggaacagtgccctgtttactcgacacgtccacaattccagcggaggagctgaccatgagcccaagccgctccgtggcaaattccggtctgtccgacagtctgacaactagtaccccacggccaagtaacggggattcccccagtcacccctatcataggacattctcgcctcatttccaccattttgttgagcaatgtctgcagcggaatcctgacgcccgcccctccgcctctactctcctgaaccatagcttcttcaaacagattaagagaagggcctccgaagccctgcccgagctgcttagacctgtgacccctattacaaactttgagggatctcagagccaggaccacagtggaatattcggtctcgtgactaatctggaagagctggaggtggatgattgggaattttag

SEQ ID NO: 136335 - DNA, 1122 bp, synthetic construct
  misc_feature 1..1122: note = Description of Artificial Sequence: Synthetic coding sequence
  source 1..1122: mol_type = other DNA
atgagcagcttcctaccagaaggcggttgttatgaactcttaaccgtgattggcaagggctttgaggacctgatgaccgtgaatctcgccagatataaaccaaccggcgagtatgtcactgtccgcaggattaacctcgaggcatgttctaatgagatggtgacattcctgcaaggcgagcttcatgtctctaagctcttcaatcaccccaatatcgttccataccgtgcaaccttcatagctgataatgaactgtgggtggtaacctccttcatggcctacggaagtgcgaaggatctaatctgtactcactttatggatggtatgaacgaactagcaattgcgtacattcttcagggtgtcctgaaggcactggattacatacaccacatgggatatgtgcaccgtagcgttaaagcctcccacattctgatctccgtcgacggcaaggtctacctctccggcctgagaagcaacttaagtatgatttctcacgggcagagacagagagttgtgcatgacttccctaagtatagtgtgaaagtactgccttggctttcccctgaagtcctccagcagaacctccagggttacgacgccaaatctgatatctatagtgtgggtatcacagcctgcgagcttgccaatggccacgtcccttttaaggacatgcccgctacacaaatgctcctggaaaaactaaacggaacagtgccttgcctattggacacgtctaccataccagccgaggaactgacgatgtctccgagcaggagtgtggccaactccggcttgtccgacagcctgaccacttctacgccccgaccaagtaacggagactcgccctcccacccatatcatagaacattcagtccccattttcaccactttgtcgagcaatgtttacaaaggaacccagacgcccggccttccgccagcacgttgctgaaccatagcttttttaaacagattaagaggcgagcctctgaagctttgccagagctcctgaggcctgtcactcctattaccaactttgaggggtctcagtcacaagaccattcaggaatcttcggtctggtgactaacctcgaagaactggaggtcgacgactgggagttttag

SEQ ID NO: 136336 - DNA, 1047 bp, synthetic construct
  misc_feature 1..1047: note = Description of Artificial Sequence: Synthetic coding sequence
  source 1..1047: mol_type = other DNA
atgtccttcctcactaatgacgcaagtagtgaatctattgcctcatttagtaagcaagaagtgatgtcctcctttctcccagagggaggttgttacgaactgcttactgtcatcggaaaagggtttgaagacctgatgacagtcaatctagcaagatacaagccaacgggagagtacgtaactgtacgccgtattaatctcgaggcatgctctaatgaaatggttacattcttgcaaggagagctgcatgtgagcaagctgttcaatcacccaaatatcgtgccttaccgagcgacgttcatagccgacaacgaactttgggtggtgacaagctttatggcctacggtagcgccaaggacctgatttgtacccattttatggatggcatgaacgaactggccatcgcgtacattctgcaaggagtgctgaaagcccttgactacatccaccacatgggctatgtgcatagaagcgtgaaagcatcccatatcctgatcagcgtggacgggaaagtatatctctcggggctgcggtctaacctcagcatgataagtcacggccaacgccagagggtggtgcatgatttccctaagtattccgtgaaggtgctcccatggctgagcccggaagtgctgcagcagaatctgcaggggtacgatgctaaatctgacatctacagtgtcgggatcacggcttgcgagcttgcaaacggtcatgtcccatttaaagacatgcccgccacccagatgcttctcgaaaagcttaatggaacagtgccatgtttgcttgacaccagtacaattccagctgaagaattgaccatgtccccgagcaggtccgtggccaatagcggactgtctgattccctcacaacctctactccccgccccagtaatggggactccccgtcccacccctaccacagaactttcagcccgcatttccaccatttcgtcgagcagtgccttcaacggaatccagacgctcgctacccttgttggccggggcctggcctacgagaaagccgggggtgtagtgggggatag

SEQ ID NO: 136337 - DNA, 900 bp, synthetic construct
  misc_feature 1..900: note = Description of Artificial Sequence: Synthetic coding sequence
  source 1..900: mol_type = other DNA
atgagcttcctagtctccaaacccgagaggatccggcggtgggtgtccgaaaagttcatcgttgaaggcctgagggacctggagctatttgggggcaagggatttgaggacttgatgaccgtcaaccttgcgagatataagcctaccggcgagtatgttaccgtcaggcgtataaacctggaggcctgtagcaacgagatggtgacattcctgcagggcgaactgcacgtcagcaaactctttaaccaccccaacatcgtaccctacagggccacctttattgccgataacgagttgtgggtagtgacctcgtttatggcttacgggtcagccaaggacctgatttgcacacactttatggacggcatgaatgaattggccattgcatacatcttacagggggtgctgaaagctttggattatattcaccacatggggtatgtgcacaggagcgtcaaagcctcccacattctcatatcagtggacggtaaggtgtatctatctggactccgctccaatctttcaatgatttcccacgggcagaggcagcgcgtcgtacacgactttccaaagtattccgtcaaagtcctgccatggctctcaccagaggtccttcagcagaacctgcagggctatgacgctaagtccgacatttactccgtgggcatcactgcatgtgagttagcaaacgggcacgttcccttcaaagacatgcctgctactcagatgctactcgaaaaattaaacggcacggtgccttgcctgctagacacctccactatccctgcggaagagcttacgatgtcaccttcccgctctgtcgctaatagcgggttgtccgactctttaactacatctaccccacgcccctctaacggacccgtgcccgctccatcgtag

SEQ ID NO: 136338 - DNA, 1257 bp, synthetic construct
  misc_feature 1..1257: note = Description of Artificial Sequence: Synthetic coding sequence
  source 1..1257: mol_type = other DNA
atgagccttttagactgcttttgtacttcccgcacgcaggtagagtcactgagaccagagaagcagtccgaaacgtcgatccatcagtacctggtagacgaaccgacgctgtcctggtctcgcccatctactagagcctcggaggttttgtgctccaccaatgtgagtcactatgagctgcaggtcgaaattgggcgaggttttgacaatctgacctctgtgcacttggcaaggcacacaccaaccggaactcttgtcactatcaagataaccaatctggaaaattgcaacgaggagcgcctcaaggcgctgcagaaagccgtcattctatcacacttttttaggcaccctaatattaccacttattggacagtgttcaccgtgggatcctggctttgggtcatatccccttttatggcctatgggtccgctagtcaactgctgcgtacatacttccccgaaggaatgagcgaaactttgataagaaatatactgtttggtgccgtgagaggcctgaactacctgcaccagaatgggtgtatccatcgaagtataaaagcaagccatattctcatatcaggagacgggctggtgaccttgagcggcctgtctcatctgcactcgttggttaagcatgggcagaggcacagggctgtgtatgactttccgcagttctccacatcagttcaaccgtggctatctcctgaacttctccgccaggatctccatggatataatgtcaagtccgacatatatagtgtgggcatcacagcctgcgagctggcgtctgggcaggtgccctttcaggatatgcaccggacacaaatgctcctgcagaagctgaaaggcccaccttacagtcctctggatatctcaatcttcccccagtctgaatcaagaatgaagaacagtcagtcgggtgtggactctggcattggagagagtgtgcttgtgtcctcaggcactcacacggttaactcagataggttgcataccccgtccagcaagactttttcccctgccttcttctcactcgtgcaactgtgcttgcagcaggatcctgagaaaagaccatccgcctccagtctgttgtctcacgttttcttcaaacagatgaaggaggagagtcaggacagtatcctgagcctactcccacctgcttataataagcccagtatatccctgccacctgttttgccatggactgaacccgagtgtgactttcctgacgaaaaggattcatactgggagttttag

SEQ ID NO: 136339 - DNA, 1134 bp, synthetic construct
  misc_feature 1..1134: note = Description of Artificial Sequence: Synthetic coding sequence
  source 1..1134: mol_type = other DNA
atgtctctgcttgactgcttttgtaccagccgcacgcaggtcgagtccctgagacccgagaagcagagtgagacgtccatccatcaatatttggtggatgagcccacactgtcttggagcaggccatctacacgggcatcagaagtgctctgctcaaccaatgtgagccactacgaactgcaggtggagatcgggagaggctttgacaatctaacatccgttcacctggctcgccacacccccacaggtactctggtcaccatcaagataactaacctggagaattgcaatgaggaacgactcaaggctctccagaaagctgttatcttatctcacttttttcggcaccctaatatcaccacctactggaccgtattcactgtgggttcttggttgtgggtaatttctcccttcatggcatacgggagcgctagccagctcttacgcacgtacttccccgagggtatgagtgagaccctcattcgtaacatcctgttcggtgccgtcaggggactcaattatctccatcaaaatgggtgtatccacagaagtattaaagcatcccatatccttattagtggcgacggactcgttaccttgtccggattgtctcacttgcacagcttggtgaaacacggccagcggcacagagccgtgtatgatttcccccagtttagcacctccgtgcaaccttggctaagccccgagctacttagacaggatctgcacgggtacaatgtgaaatccgacatatatagtgtcggaataacagcatgcgaattagccagtggccaggtgcctttccaagatatgcacagaacacaaatgctcctgcagaagctcaagggtcccccatacagccctctggacatatccatttttccacagagtgagtcccggatgaaaaactcccagtcaggcgtggattcagggattggcgagtctgtgctcgtatccagtgggacccatacagttaatagcgaccgtctccacacaccaagcagcaaaaccttttctcccgcattcttttcactggttcagctatgcctgcagcaggatccagaaaagaggccctccgcctcctccctgctcagccatgtcttctttaaacagccttactttgagtttctttag

SEQ ID NO: 136340 - DNA, 843 bp, synthetic construct
  misc_feature 1..843: note = Description of Artificial Sequence: Synthetic coding sequence
  source 1..843: mol_type = other DNA
ctcggctactgcagcgcatcacaattgctccgcacttactttcctgaaggtatgagtgaaacgctcatcaggaatatccttttcggagctgttagaggactgaattacctgcatcagaacggatgtattcaccggtccatcaaggcttctcacatcctcatttctggcgacgggcttgtcaccctgagcggtttgagccatctgcacagtttggtgaaacacggccagaggcacagagctgtgtacgatttcccccagttttccacatcagtgcaaccatggctaagtcctgagctgctccgccaggatctgcacggctacaatgtgaagtcagacatttactcagtgggtattaccgcctgtgagctggcttctgggcaggtgcccttccaggatatgcatagaactcaaatgttgctccagaagttaaagggacctccttattctccactagatataagtatcttcccacagagcgaaagcaggatgaaaaattcccagagtggagtcgacagtgggattggcgagagcgtgcttgtgtcaagcgggacccacactgttaattccgacaggctgcacacaccctccagtaaaacattcagcccagcattcttcagcctggtccagttatgcttacagcaggaccccgaaaaacgaccatctgcatcctcattgctgtcccatgtattttttaaacagatgaaagaggaatctcaggattccatactgagccttttaccacctgcctataataaacccagtattagtcttccccctgtccttccatggactgaaccggagtgtgattttcctgacgagaaggacagttactgggagttctag

SEQ ID NO: 136341 - DNA, 1257 bp, synthetic construct
  misc_feature 1..1257: note = Description of Artificial Sequence: Synthetic coding sequence
  source 1..1257: mol_type = other DNA
atgagtctgctcgactgcttttgcaccagccgaactcaagtggagtccctcagacctgagaaacagtccgaaacctctatccatcagtacctggtggatgagcctaccctatcctggtcccgcccctccacccgcgcttcagaggtgctgtgctctacaaatgtaagccactacgaactgcaagtggaaattggtcgtgggttcgataatcttacttcagtgcacttggctcgccatacacccactggaacccttgtcactattaaaattacgaatcttgagaactgtaatgaagagaggctcaaggccctgcagaaagcagtgattctgagtcactttttccggcaccccaatattaccacttattggaccgtttttacagtaggctcttggctctgggtgatctctccattcatggcctacgggagtgcctctcagctcttgaggacatacttccctgagggcatgtctgaaacccttatccgaaatatcctttttggcgctgttcgtggacttaactatctgcaccagaatggatgtatacacagatctatcaaagctagccacatcttgatctctggcgacggtctggtcacactgagcgggctttcgcatctgcactctcttgttaagcacggccagcggcatagggctgtgtacgactttcctcagttttctacaagtgtgcaaccgtggctcagccctgagctgctgcgtcaagacctccatggttacaacgtaaagtctgacatttactctgtggggatcaccgcttgcgaactggccagcgggcaggtgccctttcaggatatgcatagaacccagatgctcttgcaaaaactcaaaggacctccatattccccgctggatatatcgattttcccacagagcgaaagtcggatgaaaaactcgcagagtggcgtcgattcaggcattggggagtccgtgctggtttccagtggaacgcataccgtgaacagcgaccgactccacactccctctagtaagacattctcaccagcattttttagccttgtccagctctgtcttcaacaagaccccgagaagagacctagtgcctcaagtttgctgtctcacgtcttctttaaacaaatgaaggaagagagccaagattctatacttagcttattgcctccggcctacaacaagccgagtatctcactgccgcccgttctaccctggaccgaacccgagtgcgacttcccagacgaaaaggattcatactgggagttctag

SEQ ID NO: 136342 - DNA, 1260 bp, synthetic construct
  misc_feature 1..1260: note = Description of Artificial Sequence: Synthetic coding sequence
  source 1..1260: mol_type = other DNA
atggagagcatctcaatgatgggaagccccaagagtctgtccgaaacatttctccctaacggtatcaatgggattaaggatgcccggaaagttaccgtaggtgtgatcgggtccggcgattttgcaaagtcattaactattcggctgattaggtgtggataccacgtggtgatcggcagccggaaccctaagttcgcgtccgaattctttccacacgtggttgatgtgacccaccacgaagatgccctgacaaagactaacatcatctttgtggcaatacacagggaacattacaccagcttgtgggacctcagacatctgctcgttgggaaaatcctgatagacgtgtcaaataacatgagaataaatcagtatccagaaagtaacgccgaatacctggcctcactatttcccgattctttaatagtcaagggcttcaatgtagtaagcgcgtgggcactgcagctgggccctaaggacgcgtccaggcaggtttacatttgctctaacaatatacaggcacgacagcaggtgatcgagttggcacggcagttgaattttatacctatagacctcggcagtctgagctccgcaagagaaatcgaaaatctgcctctcaggttgtttacgttgtggcgcggccccgtggtggtcgccatttccttggcaaccttcttttttctgtactctttcgttcgggatgtgattcatccatatgcccgtaatcagcagagcgatttttataagatccctattgaaattgtaaataaaacacttcctatcgtggctatcaccttgctgtccctcgtctacctggccgggctgctagcagcagcataccagctctactacgggaccaagtatagacgttttcccccctggctggaaacatggttacagtgcagaaagcagctagggttgctctctttcttttttgccatggttcatgtggcttactccttatgtctcccaatgcggcggtctgaaaggtatctgtttctcaacatggcttaccaacaggtacacgctaatatcgaaaatagttggaatgaagaggaagtgtggagaatcgagatgtacatctcttttggaataatgtcactgggactccttagtctgctggctgtgaccagcattccgtccgtctccaatgcattgaattggagagaattcagtttcattcagatcttctgttcattcgccgatactcagacagagttagaactggaatttgtgttcctgctgacactcctgctgtag

SEQ ID NO: 136343 - DNA, 1473 bp, synthetic construct
  misc_feature 1..1473: note = Description of Artificial Sequence: Synthetic coding sequence
  source 1..1473: mol_type = other DNA
atggagtcaatcagtatgatgggatctcctaagagcctgtctgagacttttctgcccaatggcatcaacggcataaaagatgccagaaaggtcaccgtaggcgtcattggatctggggattttgccaagagtctcaccataagactgattcgctgcgggtaccacgtagttattggctcccggaacccaaagttcgcaagcgaattttttcctcatgtagtggacgtgacgcatcacgaggacgccctgacaaagacgaatatcatctttgtcgctatccaccgggagcactacacctccctctgggatctcaggcacctgttagtagggaagatcctgatcgacgtgtcgaacaatatgcggattaaccagtaccctgagagtaatgccgaatacctagccagtctgttcccggattcccttattgtaaaaggcttcaacgttgttagcgcctgggcactgcaactgggcccgaaggatgcatcacgacaagtttacatttgctccaataatatccaggctcgacaacaggtgatcgagcttgctcgacagctgaatttcatccccatagacctgggctctttgagctcagccagagagatcgaaaacttgcctctgaggctattcaccctgtggcgagggcccgtcgtcgttgcaataagcttggcgacctttttcttcctgtattccttcgtgagagatgtcatccacccctacgccaggaaccaacagagtgatttttataagatcccgatcgagattgtaaacaagacccttcccatcgtggctatcactttgcttagtcttgtctatcttgcaggactcttggccgcggcataccagttgtattacggcaccaagtatagacggttcccaccctggctggagacctggttacagtgccgaaaacaactgggcctgctcagcttcttctttgccatggttcacgtggcttacagcctatgtctccctatgcgacggagtgagcgctacctgtttttgaacatggcatatcagcaagtgcacgctaatatcgagaactcctggaatgaagaggaggtgtggaggatcgagatgtacatttcctttggcattatgtctctcggtctcctttcgttgctcgccgtaacatccatcccttctgtgtccaacgccttaaactggagggaattcagctttatccaatcgacactgggctacgtggctttattaatttcgacttttcacgtccttatttacggctggaaacgtgctttcgaggaggagtactaccgcttctacactccccctaatttcgttctggctctggtgctgccctctattgtgattctgggcaagataatcctgttcttgccctgtatatccagaaaattaaaacggataaagaagggctgggaaaagtcccagttcctggaagaaggcatggggggcaccatcccacacgtatctccagagagggtaacggtgatgtag

SEQ ID NO: 136344 - DNA, 1473 bp, synthetic construct
  misc_feature 1..1473: note = Description of Artificial Sequence: Synthetic coding sequence
  source 1..1473: mol_type = other DNA
atggaaagcatttctatgatgggtagccctaaatcactgagcgagaccttcttaccaaacggaatcaacgggattaaggatgctcgcaaggttacagtgggggtgattggctctggcgatttcgctaaatccctgacgattaggctgattagatgcggataccacgttgtcatcggcagcagaaaccccaagttcgcatcagagttcttcccccacgttgtggatgtgactcaccacgaggatgcgcttaccaaaactaacatcattttcgttgccatccaccgggaacactacacgtccctctgggacttacggcatttgttggtaggaaaaatcctgatagacgtgtccaataacatgcgcattaatcaatacccagaatcaaacgccgaatacctggccagtctgttcccagattctctcatcgtcaaagggttcaacgttgtctccgcctgggccctgcagcttgggcctaaggatgctagcaggcaggtgtacatctgctcgaacaacattcaggctcgccagcaggtcattgagctggctcgccagctgaacttcatacccatcgaccttggatctctttcctccgctcgggagatcgagaacctccctctgcgtctcttcacgctgtggcgtggacctgtagtggtcgcaattagcctagccaccttcttttttttgtacagcttcgttagagacgtaatccacccgtatgcccggaaccaacagtctgacttctataagattcccattgagattgttaacaagacattaccaattgttgcaataaccctcctgtccttggtctatcttgcagggctcctggctgctgcctatcagctttactacggaaccaagtatcggcgatttccaccatggctggaaacatggcttcagtgtagaaaacagcttggcctcctctccttcttcttcgccatggtgcacgtggcttactctctttgcctaccgatgcgccgttctgaaaggtacttattcttgaacatggcctaccaacaggtgcacgcaaacatagagaatagctggaacgaagaggaggtatggagaattgaaatgtacatttcattcggaataatgtccctggggctactgagccttctggcagttaccagtatccccagcgtgtcaaacgccctaaactggagagagttctctttcatccagagcacgttaggctacgtggccctccttatctccacctttcacgtgttaatctatggctggaaacgtgcattcgaagaggaatactaccggttctatacacctcctaatttcgttctggctcttgtactaccctccattgttatccttgggaaaatcatcctattcctcccatgtatctcaaggaaactcaagagaattaaaaagggctgggaaaagtctcagttcctggaagagggcatgggcggcaccatccctcacgtgagtcctgagagggtcactgtgatgtag

SEQ ID NO: 136345 - DNA, 1473 bp, synthetic construct
  misc_feature 1..1473: note = Description of Artificial Sequence: Synthetic coding sequence
  source 1..1473: mol_type = other DNA
atggaaagcataagcatgatgggtagtcccaaatccctctctgagaccttcctcccaaacgggatcaatggaattaaagacgctcgtaaggttacagttggagtgattgggtccggcgacttcgcgaagtccctgaccatccgcttaattcgctgcgggtatcatgtggtaatagggagcaggaaccccaaattcgcaagtgagttcttcccccacgtcgtagatgtcactcaccatgaggatgctctgacaaaaactaatatcatctttgtcgctatccatcgcgagcactacaccagtctctgggacctccggcatctcctggttggaaaaattctgattgatgtctctaacaacatgcgcatcaaccaataccctgagtcaaatgctgagtacctcgcatcgcttttccctgattccctcatagtgaaagggttcaatgtggtgtcagcctgggcacttcaactaggaccaaaagacgcttctaggcaagtgtacatctgttccaacaacatccaagctcgacagcaggtgattgaactggctcgtcaactaaactttatcccgatcgacctgggctcactgagcagcgcacgcgaaatagagaatctgccattacgcttatttacgctgtggcgcggccccgtggttgtggcgattagcttggccactttcttctttttatactctttcgtcagagacgtcatccacccctacgcaagaaaccagcaatctgacttttataaaatcccaatcgaaattgtgaacaagaccttgccaattgtagcaatcaccctactgtcgttagtgtacctggcaggtcttttggcggcggcgtatcagctttactacggcaccaagtaccgccgctttccaccatggctcgaaacatggctccagtgtcggaagcagctaggtctgcttagcttctttttcgcaatggtgcacgtcgcctatagtctatgccttcctatgaggagaagcgagcgctacttattcctgaacatggcatatcagcaggtccacgccaatatcgagaacagttggaacgaagaagaggtctggcggatagagatgtacatatcatttggaataatgtcccttggactgctctccctgttagccgtgaccagcatcccctcagtttcaaatgccctgaactggcgagaattttccttcatccagtccactctggggtatgtggccctgctgatctctacctttcacgtgctcatctacggttggaaacgcgccttcgaggaggaatactacagattttatactcctccaaacttcgtgctggcgctggttctgccctctatagtgattctggggaaaattattctctttctgccttgtatctcacgtaaactaaaacgaattaagaagggctgggagaagtcccagttcttggaggaggggatggggggtactatcccacatgtgtccccagaaagggtgaccgtgatgtag

SEQ ID NO: 136346 - DNA, 1365 bp, synthetic construct
  misc_feature 1..1365: note = Description of Artificial Sequence: Synthetic coding sequence
  source 1..1365: mol_type = other DNA
atggaatcaatatccatgatgggtagtccaaagtctctgtccgagactttcctcccaaatgggatcaacgggataaaagatgctaggaaagtgaccgtgggcgtcatcggctcaggggatttcgccaagagcttgactatccgattaatccgctgtgggtatcacgttgtaatcggatcgagaaaccccaagtttgcttcagagttctttccacatgtggtcgatgttacgcaccacgaggatgcactgactaaaacgaacattatctttgtggccatccatcgggaacactacacctccctgtgggatcttcgccatttactggttgggaagattctgatcgacgtctctaataatatgcggattaaccaatatccagaaagtaacgccgaatacctcgcgagtctgtttcctgacagtctcatagtgaaagggttcaacgtcgtgtccgcctgggcccttcagctcggccctaaggacgctagtaggcaagtgtacatctgcagtaacaacatccaggctcgacagcaggtgattgaattggcacgacagttgaattttatacccattgaccttggaagtctatccagtgcccgggagatcgagaatttaccattacgactcttcactttatggaggggacccgtggtcgttgccatttcccttgccacatttttcttcttgtacagctttgttagggacgttatccatccatacgcccgtaatcagcagtccgatttttacaaaattcccatcgagattgtcaataaaacactgcccatcgttgcaatcacattgctttcattggtatatttggcaggtctccttgcggctgcataccaactctactatggcacaaagtaccgccgattcccaccttggctggaaacctggcttcaatgtagaaaacagcttgggctcttgtccttcttcttcgcaatggtgcacgtggcctactccctatgcctcccaatgaggcgcagcgaaagatacctatttttaaacatggcataccaacaggtgcacgccaacatcgagaatagctggaacgaagaagaagtgtggcgcatcgagatgtacattagttttggcataatgtcgttgggactcctctccctgctggcagttaccagcataccatctgtgtctaacgcgttgaactggagagaatttagctttatccaatccaccctgggctatgttgctctactgatatccacctttcacgtgttaatatacggctggaagcgcgcctttgaggaggaatactatcgattctatacccccccaaattttgtcctggcactggtgctgccttctatcgtgatactggatctacttcagttgtgtagataccccgactag

SEQ ID NO: 136347 - DNA, 1365 bp, synthetic construct
  misc_feature 1..1365: note = Description of Artificial Sequence: Synthetic coding sequence
  source 1..1365: mol_type = other DNA
atggagtccattagcatgatgggctcaccaaaatccctcagtgagaccttcttgcctaatgggatcaacgggatcaaggatgctagaaaggtgactgtaggcgtgatcggctccggcgatttcgccaagtctctgacgatcaggcttattcgttgcggataccatgttgtgataggtagccggaaccctaagtttgcatccgagttttttccccacgtcgtagatgtgacccatcatgaggatgctctaaccaaaacaaacatcatttttgtggccatccatcgagaacactatacatccctgtgggatctccggcacttgctcgtaggcaagatcctgattgatgtttcaaacaatatgcgcattaaccaataccctgagagcaacgcagagtatctggcatccctatttccagactccctgattgtcaagggtttcaacgtggtgtccgcctgggccctgcagttggggcccaaggacgcttcgagacaggtgtatatctgcagcaacaacattcaggcacgtcagcaggtaatcgagctggcccggcaactgaacttcatcccgattgatttgggcagtctgagtagcgcgcgagagatagagaatctgccactgaggttatttactctttggcgggggcctgtcgtggtcgctatcagcttggccacatttttctttttgtattcatttgtgagagatgttatccatccctacgctaggaatcaacagtcagacttctataaaataccaattgagatagttaataagacattacctatcgtggctattacgctgctgagtttggtgtacctggcaggcctgctggccgctgcttaccagttatactacgggacaaagtaccggcgctttcctccttggctggaaacttggctgcagtgtcgcaagcagcttggactgcttagctttttctttgcaatggtgcacgttgcatacagcttgtgcttgcccatgcgtcgatcagaaaggtacctgtttctgaatatggcctaccagcaggtgcacgcgaacattgaaaattcgtggaacgaagaagaggtttggcggatagaaatgtacatttccttcggtatcatgtcactcggtctgttatctttgctggcggtcacgagtatcccttccgtttcaaacgccctgaattggagggagtttagcttcatacagagtaccctcgggtacgtggccctgctgattagcactttccacgtgttgatttatgggtggaagcgcgctttcgaagaggagtactacagattttacactcctccaaattttgtgttagctttagtgttgccctcaatcgttattttagaccttttacaactgtgtcgctatcctgactag

SEQ ID NO: 136348 - DNA, 1365 bp, synthetic construct
  misc_feature 1..1365: note = Description of Artificial Sequence: Synthetic coding sequence
  source 1..1365: mol_type = other DNA
atggaatcgattagtatgatgggttccccgaagtctctgagcgaaacattcctccccaacggcatcaatggcattaaagacgctcgcaaagtgaccgtaggcgtgatcgggtcaggagatttcgcaaagtcactgactatccgtctcatcagatgcgggtaccacgtggtgattggcagccgaaaccccaaatttgcctctgaatttttccctcatgtggtagatgtgactcaccacgaagacgctctcactaaaaccaatataatttttgttgccatccatagggaacattatacttccctatgggacctgcgccatcttctcgtcggcaagatcctcatcgacgtgagcaataatatgagaattaatcagtaccctgagtccaatgccgagtatctggctagcctcttccccgattctcttattgtgaagggattcaatgttgtctccgcctgggcactacaattggggcctaaggacgctagtaggcaggtgtacatatgttccaacaacatccaggcccgacaacaggtgatcgagctggctcgccagcttaatttcattcctatcgacctcggcagtctgtcaagcgcgcgagagatcgaaaacctgcccctgcggctgttcactctgtggagaggccccgtggtggttgcaatcagtctggccaccttctttttcctttactccttcgtgcgggatgtgattcacccctacgctagaaatcaacaaagcgatttttacaaaattccgatagaaatcgtgaacaagacgttaccgatagttgctatcacactcctttcactggtctaccttgccggcctactggccgccgcctatcagctgtattacggcacaaaataccgcaggtttcctccctggctagagacctggttgcagtgtcggaagcagttaggcctgttgagcttttttttcgcgatggtccacgttgcttattcattgtgcctgccgatgcgtaggagtgaacgctacctgtttttgaacatggcataccagcaggtccatgccaatatcgagaattcttggaatgaggaagaagtatggcggattgaaatgtacataagctttggtatcatgtccctcggcctgctaagcctgttggccgttacttccatcccttccgtaagtaatgcactgaactggagagagttcagctttattcaatccactcttgggtacgtggctctgctgatctcaacttttcacgtcctcatttatggatggaaaagagcatttgaggaggagtattatagattttacacgcccccaaattttgttttggctctggtcctgccttcaattgtgatcttggacttgctgcaactatgtaggtaccccgattag

SEQ ID NO: 136349 - DNA, 267 bp, synthetic construct
  misc_feature 1..267: note = Description of Artificial Sequence: Synthetic coding sequence
  source 1..267: mol_type = other DNA
atggagtccatttcaatgatggggtctcccaagtccctctccgagaccttcttgcccaacggcatcaacggcatcaaggacgcacgcaaagtgactgtcggtgtgataggaagtggggactttgcgaagtccctgacaatcaggttgatccgttgcggctatcacgttgtgatagggagtaggaatccaaagttcgcaagcgaattttttccacatgtcgtggatgtgactcatcacgaagacgccctcacaaaaaccaatatatag

SEQ ID NO: 136350 - DNA, 549 bp, synthetic construct
  misc_feature 1..549: note = Description of Artificial Sequence: Synthetic coding sequence
  source 1..549: mol_type = other DNA
atggagtcgatctctatgatggggagcccgaaatccctctctgagactttcctccccaacgggatcaatggcatcaaagatgcccgtaaagtgaccgtgggtgtcatcgggtccggtgattttgctaaatccctgacaatcaggcttatacgatgcggttatcatgtggtaattgggagcagaaacccaaagtttgcttctgagttttttccccacgtcgtggatgtcacacatcacgaagacgccctgactaaaactaatatcatatttgtagccattcatagagagcactacactagcctttgggatctgcgtcacctcttggtgggcaagattctgattgacgtatccaataacatgcggattaatcagtaccctgagtccaacgccgaatacttggctagccttttccctgatagcctaatcgtgaagggatttaatgttgtctcagcgtgggctctacagctggggcctaaggatgcctctcggcaggtgtatatctgttctaataatatacaggcgcgccaacaggttatcgagctggcctag

SEQ ID NO: 136351 - DNA, 1467 bp, synthetic construct
  misc_feature 1..1467: note = Description of Artificial Sequence: Synthetic coding sequence
  source 1..1467: mol_type = other DNA
atgcccgaggagatggataagccccttatttccctgcacctggtggatagcgattccagcctggctaaagtgcctgatgaggctcccaaggtggggattttgggctccggcgatttcgcgcggtcgctggcaaccaggctggtcgggtctggcttcaaggtggtcgtgggctctcgcaatcctaagcgaacggccaggcttttcccatccgccgcccaagttaccttccaggaggaagcggtgtcttcacctgaagtcatattcgtcgcagtctttcgagagcattacagtagtctgtgttccctctccgaccagctcgctgggaagatactcgtcgacgtatctaaccctaccgagcaggaacacctgcagcaccgtgaaagcaatgcagagtacctcgcctctttgttccctacgtgcaccgtggttaaggcattcaatgtaatctctgcatggactctgcaggctggtcctcgcgacggaaaccggcaggtgccaatctgcggggatcaacctgaggccaagagagcagtgtcagagatggctctggccatgggcttcatgcccgtcgatatgggttccctcgctagtgcttgggaagttgaagccatgccgctgaggcttttacccgcttggaaggtgcctaccctcctagccctgggcctgtttgtttgtttctacgcttacaacttcgtcagggatgtgctacagccatacgtccaggaatcccagaataagtttttcaaactgcctgtgagcgtcgtgaataccaccttgccgtgcgttgcttacgtgctgttgtccctggtgtacctgccaggggtactcgccgccgccctccaactccggcggggtactaaatatcaacggtttcccgactggcttgatcattggctgcagcataggaagcagatcgggctcctcagttttttttgcgcagcactgcatgccttgtatagcttttgtcttcccttgcgtcgcgctcacaggtacgacctcgtaaatctggctgtgaagcaagtcctggccaataaatcacatctgtgggttgaggaagaggtgtggagaatggaaatctatctgtccctgggagtcctggccttaggaacactttctttgcttgctgtcacatcactgcctagcatcgccaattccctcaactggcgagaattttcttttgtccagagcagtctagggtttgtagcccttgtgctgtctacattacataccctgacctatggctggacccgggcctttgaagaaagtcggtacaagttttatctgccacctaccttcactctaactcttcttgtgccgtgcgtggtgatcttagcaaaagccctgttcctcctcccctgcatttcccgtaggctggcaagaatccggcgcggatgggaaagggaaagcacaattaagtttacgctgcccaccgatcacgcgctggcagaaaagacatcccacgtttag

SEQ ID NO: 136352 - DNA, 1467 bp, synthetic construct
  misc_feature 1..1467: note = Description of Artificial Sequence: Synthetic coding sequence
  source 1..1467: mol_type = other DNA
atgcccgaggaaatggataagccgcttatttcccttcacctggtagacagcgattccagtctggccaaagtgccagatgaggcccctaaagttggcattctcgggagtggcgactttgcacgaagcctggcaactcggttggtcggatccgggttcaaagtagttgtcggctcccgtaaccctaagaggaccgcacgccttttccctagcgcagctcaggttacatttcaggaggaggctgtgagttctcctgaggtcatttttgtggcggtgttcagggagcactacagctccctctgttctctctctgaccagctggctgggaaaatactagtggacgtttcaaaccctactgaacaggagcacctgcagcacagagaaagtaatgcggagtacctggccagcttgttccctacctgcaccgtcgtgaaggcttttaacgtcatctccgcatggaccctccaggccggcccaagggatgggaatcggcaagtcccaatttgcggggatcaacctgaggcaaaaagggccgtgtccgaaatggccctggcaatggggtttatgccagtggatatgggctctctcgcctccgcttgggaggttgaggctatgcctctccgtcttcttcctgcttggaaggtcccgacattactggctctgggactgttcgtttgcttctacgcttataactttgtgcgggatgtattacagccctacgtgcaggagtctcaaaataaatttttcaagcttcctgtgagtgtcgtaaatacaacactgccctgtgtggcatacgtgctgctctcacttgtctacctgcccggagtccttgctgcggctcttcaattaaggagagggactaagtatcagaggtttcctgattggttggaccactggctccaacaccgaaagcagattggactgctgagtttcttctgcgcagccttgcatgctttgtattctttttgcttgcccctacgccgagctcacaggtatgacctcgtcaatcttgctgtgaaacaggtgcttgcaaacaaatcacatctctgggttgaggaagaggtctggcggatggagatctacctgagtttaggggtgctcgctctggggaccctgtctcttttagctgtgacatcgctcccctccatcgctaactccctcaattggcgcgagttctcattcgttcaatcctcactggggttcgtcgcattggtactttcaacactccacactttgacttatgggtggactagggcattcgaggaatcaagatacaaattttatttgcctcctaccttcaccctgacccttttggtcccatgcgttgttatcctggcaaaggctttattcttgcttccatgtatatcaaggcggctagcgcgcatacggagagggtgggaacgcgagtctacaattaaatttacactacctacagatcatgcactggcggaaaagacctcccacgtgtag

SEQ ID NO: 136353 - DNA, 1467 bp, synthetic construct
  misc_feature 1..1467: note = Description of Artificial Sequence: Synthetic coding sequence
  source 1..1467: mol_type = other DNA
atgcctgaggaaatggataaaccattgatcagccttcacctcgttgactccgattcatccctggctaaggtgccagatgaagccccgaaagtaggaatcttgggatctggagactttgcccggagccttgccacacggctcgtgggttcgggattcaaagtcgtagtgggttctcgtaaccccaagcgtactgcaaggctgtttccgtcggctgctcaagtcacctttcaagaggaggctgtttcttcccctgaagtgatcttcgtcgccgtttttagggagcactacagtagcctgtgctctctgtctgaccagcttgcaggcaagatactagttgatgttagcaacccaactgagcaggaacacctacagcaccgggagtcaaatgccgaatatcttgcctccctgtttcccacttgcactgtggtcaaagctttcaatgtcatcagcgcctggacgttgcaggctgggcctcgagacgggaacaggcaagttcctatctgcggtgatcaacccgaggccaaaagagccgtttccgaaatggctctggccatgggttttatgcccgttgatatggggagcttggcctcggcttgggaggtggaggcaatgcctttgagattgctcccagcgtggaaggtgccgactctcctggctttgggcctgttcgtgtgcttctatgcatacaactttgtgagggacgtactgcagccttatgtgcaggaaagccagaataagtttttcaaattgccggtgagcgtggtgaatactacccttccttgcgtcgcatacgtgctactgagtctggtctatcttcccggcgttttggcagcagcgttacagctccgaagaggaacaaagtatcaaaggtttcctgattggctcgaccactggttacaacataggaagcagattggtctcctttcctttttctgtgctgctttacatgccctgtatagcttctgcttgccactgagacgtgcacaccgttacgacttagtgaatttagccgttaagcaggtacttgcgaataagagccatctgtgggtggaggaggaggtgtggcggatggagatatatctctctctgggcgttctggccctaggaaccctgtcccttctggcagtgacctccctgccatctattgcaaattctctgaattggagggaattctctttcgtacagagctcacttggcttcgtggcgcttgtcctctctacactgcacacattgacctacggctggaccagagcctttgaggagagccgatataagttttacctgccacccacatttacgctgacactgctggtgccatgcgtcgtgatcctggccaaagctttatttctgctgccgtgcatcagtcgccgcctcgcccggattaggaggggctgggaaagggaaagcacaatcaaattcaccctgcccaccgatcacgcacttgcggaaaaaaccagccacgtgtag

SEQ ID NO: 136354 - DNA, 1467 bp, synthetic construct
  misc_feature 1..1467: note = Description of Artificial Sequence: Synthetic coding sequence
  source 1..1467: mol_type = other DNA
atgcctgaggagatggacaagcccctgatatccctccatctggtggacagcgattcaagcttggcaaaggtccctgacgaagcccctaaagttgggatcttaggatctggagactttgcccgcagcctggccacccggctggtgggtagcgggtttaaagtggtggtcggctcacgcaatccaaaaaggaccgcccgcctcttcccgtccgccgcccaggtcacattccaggaggaggcagtgtctagcccagaagtcatctttgtagctgtgtttagggaacactactcgagtttgtgttccctgtccgatcaattagctggcaagatcctggtagacgtgtccaaccccaccgaacaggaacacctccagcaccgcgagagtaacgctgaatacctggcatctctgttccccacatgcactgttgtcaaggcgttcaacgtcatatctgcctggaccctgcaagcaggaccaagggacggaaaccgacaagtcccaatatgtggggaccaacccgaggctaaacgcgctgttagcgaaatggccttggccatgggatttatgcctgtcgacatgggtagtctggctagtgcctgggaggtggaagcaatgcccttaagattacttccagcctggaaggtcccgacactgctggcgctgggactcttcgtgtgcttctacgcctacaactttgtgagggatgtgctccaaccctacgtgcaagaaagtcagaataaattttttaagctgcccgttagtgttgtgaacactaccttgccctgtgttgcgtatgtgcttctgtctctggtgtacctgcctggggtacttgcagcggctctccaacttcgacgaggaaccaaataccagcgttttccagactggctggatcactggctccagcacaggaagcaaatcggactgctttctttcttctgtgccgccctgcacgctctttattccttctgcctgccactgcggcgcgcccaccggtacgatctggtgaacttggctgtgaagcaggtcttggccaacaaaagccacttgtgggtggaagaagaagtttggcgcatggagatctaccttagcttaggcgtcctggctctgggcactctgtcgttgctggccgtcacgagccttcccagtatcgccaatagtctcaactggagggagttctctttcgttcagtccagcctggggtttgtggctctggtgctgagcaccctgcataccctcacttatggatggactagggcatttgaggagagccgctacaagttctacttgccccctacttttactctgactctgctcgtcccttgtgtggttattctcgctaaggctctgtttctgctgccatgcatttcccgcagactcgcccgaattagacgaggatgggagcgtgagagtaccattaagttcaccctcccaacagatcacgcactagccgagaagacaagccacgtgtag

SEQ ID NO: 136355 - DNA, 1497 bp, synthetic construct
  misc_feature 1..1497: note = Description of Artificial Sequence: Synthetic coding sequence
  source 1..1497: mol_type = other DNA
atgagccatcaaccggcagtagcaaccaaaatgccagaggagatggataagcctctcatcagtttgcatcttgttgatagcgacagcagtctggctaaagtccctgatgaggcccctaaggtgggtattctgggaagcggggactttgcccggagcctggcgactagattagtgggcagtgggtttaaggttgtggtcggcagtcgtaaccccaagaggactgcacgtttatttccctctgccgcgcaggtgacctttcaggaagaagctgtgtcctctcccgaggtgatatttgtcgctgtgttccgtgagcattattcttcgctttgctccctcagtgaccagctagctggaaagattctcgtggacgtgtccaacccaaccgaacaagaacacctgcagcatcgtgaaagtaatgcggagtatttggcttctctttttcccacctgtaccgttgtgaaagccttcaatgtcattagcgcctggactcttcaggccgggccacgcgatggcaacagacaggttccgatatgcggtgaccagcctgaagctaaacgtgcggtgtcagagatggccctggcgatgggttttatgcccgtagacatggggagccttgccagcgcctgggaagtggaggcaatgcctctgcggctgctccccgcctggaaagtgcccacccttttggcactcggtctcttcgtgtgcttttacgcctacaactttgtgagggatgtcctccaaccttacgtgcaagagagccagaataaattcttcaaactgcctgtgtctgtggtcaatactacattgccttgcgtggcatacgtgttactgagcctggtttacctcccaggcgtgctcgccgccgccctgcagctgcggagaggcacaaaatatcagcggttcccagactggctcgaccactggctgcagcatcgcaaacagataggtctgttgtcctttttttgcgctgcactgcatgcgctttactcattttgcctgcctcttaggcgtgcccaccggtatgaccttgtgaacctggccgtcaaacaggtgctcgccaataaatcccatctctgggtcgaggaagaggtctggagaatggaaatatacctatccctgggagtcttggcgctgggaactctgtctcttctcgcggtgactagccttccatcaatcgccaatagcctgaattggcgagaattctccttcgtccagtctagtcttggcttcgtagcgctcgtccttagtaccttgcatacgctcacctacgggtggacgcgcgcctttgaagaatctaggtacaaattctacttacctcccaccttcacgctaacactgctggtgccctgcgtcgttatactggctaaggctctatttctcctcccttgcattagcagaaggctggcacgtatacgcagaggctgggaacgcgaatcgaccatcaagtttactctgccaacggatcatgccttggccgagaaaacgagtcacgtgtag

SEQ ID NO: 136356 - DNA, 1374 bp, synthetic construct
  misc_feature 1..1374: note = Description of Artificial Sequence: Synthetic coding sequence
  source 1..1374: mol_type = other DNA
atgcccgaggaaatggacaagccactgatttcgctgcacctggtggactctgactctagcttggccaaggtgccagatgaagcacccaaggtcgggatcctagggagcggtgactttgcccgaagcctggctacccggctcgtgggttcaggcttcaaggtggtggtcggctctcgcaatccgaaacggacagctagactcttcccatctgccgcacaggtgacttttcaagaggaggcagtgtccagtcccgaagttatctttgtggctgtctttcgggagcactactctagcctctgcagtttaagtgatcagcttgccggcaagattctggtggatgtctccaaccctacggagcaggaacatctccagcatcgagagagcaacgccgaataccttgcatcacttttccccacctgtaccgtggtgaaggcctttaacgtgatcagtgcttggactctacaggccgggcctcgtgatgggaatagacaggtaccaatctgcggggatcagcccgaggcgaaacgggctgtcagcgagatggcactggccatggggtttatgccggtcgacatgggcagcctcgcaagcgcatgggaggtggaggccatgcctcttcggttgctgccagcttggaaggttccgaccctgctggccctgggcctgttcgtctgcttttacgcttacaactttgttagggacgtcctccagccctatgtgcaagaatctcagaataaattttttaaactgcccgtctccgtggtgaacacaaccttaccatgtgtcgcttacgtgctgctttccctggtgtatcttccaggtgtgctggccgcagctctgcagctgagacggggaaccaaataccagcggttccctgactggctcgaccattggcttcagcacaggaagcaaataggcctgctctcctttttctgcgcggcccttcatgcactttacagtttttgcttgcctctccggagagcgcacagatacgacttagttaatctggctgtgaagcaggtactggctaacaaatcacatctctgggtggaggaagaagtgtggcgaatggaaatctatcttagcctcggggttctggcactggggaccctgagcctgctcgctgtcacatccctgcccagtattgctaacagcctgaactggcgcgagttctccttcgttcagtgtgtagccacctcctccgcaggcaatactggttctggcacccgcaggccggagtcacaatctcaggatccccacttgcccgcgccccaccatcagacctcgttcctgggaccacgcagcttctgctgctctctggtcccggtcagcaccccctacgggcaccaggaagacctgagttggaccagatag

SEQ ID NO: 136357 - DNA, 1467 bp, synthetic construct
  misc_feature 1..1467: note = Description of Artificial Sequence: Synthetic coding sequence
  source 1..1467: mol_type = other DNA
atgccggaagagatggataaacctctgatcagcctccatttggtggattcagacagctcgctggcaaaggtgcccgatgaagcgccgaaggtgggaatcctggggtctggagattttgcacggtcactcgccacccggttggtgggctccggttttaaggtagtcgtcggctcacgcaatccgaagaggaccgctcggttatttccttctgccgcccaagttacattccaggaagaggctgtttcgtcacctgaggttattttcgttgccgtgtttagagaacattactcctcattatgttctttgtcggaccagctggcagggaagattcttgtggatgtctcaaaccctacggagcaagagcatctccaacaccgtgagtcaaatgcagagtatctcgcctccctgtttcccacttgcaccgtagtcaaggccttcaacgtgattagtgcctggacattacaggctggcccccgagacgggaatagacaggtgcctatctgtggggaccagcctgaggcaaaaagagccgtgtccgagatggccctggcgatgggcttcatgcccgtggacatggggtctctggcctccgcttgggaggtcgaagccatgcccctgcgtctattgcctgcgtggaaggtaccaactctgttagccctcggtctattcgtttgcttttatgcttacaacttcgttcgggacgttcttcaaccatacgtccaggagtctcagaacaaattctttaaacttcccgtgtctgtcgtcaacactactctgccctgcgttgcgtatgtgctgctcagcctggtctatcttccgggggtgttggctgccgcccttcaactgcggagaggcaccaagtaccaacggttccccgactggttggaccattggctccagcaccggaagcagattggtctcctttccttcttctgcgcggcgcttcatgctctttacagtttttgtttgcccttgcggcgggctcacagatacgacctcgttaatcttgctgtgaaacaggtccttgcaaacaagtcacacctatgggtggaagaagaggtatggagaatggaaatctacttgtcactaggagttcttgccctgggcactctcagcctgctggccgtgaccagcctgccatctatcgctaacagccttaactggcgcgagttcagtttcgtgcagtcaagcctcggcttcgtcgcactggtcctgtccactctacacactttgacctatgggtggactcgcgcgtttgaggaatctaggtacaaattctatttacctcctacattcacactgactttgctcgtgccttgcgttgtaattttggctaaagccctgtttctactcccatgtatcagcaggaggcttgcacgaattcgcagaggatgggagcgggagtctactattaaatttacactacctaccgatcacgctttggcagaaaagaccagccacgtatag

SEQ ID NO: 136358 - DNA, 1374 bp, synthetic construct
  misc_feature 1..1374: note = Description of Artificial Sequence: Synthetic coding sequence
  source 1..1374: mol_type = other DNA
atgccagaggagatggataaacctctcatttctctccatcttgtcgactctgattcctccctggctaaggttccagacgaggctcccaaagttggcattctaggctcaggcgacttcgccagatcactcgctacacgtctcgttgggtcagggtttaaggtcgtggtgggaagtcggaatccaaagagaaccgcgcgattattcccatccgctgctcaggttactttccaggaggaggctgtcagtagccccgaggttattttcgtcgccgtcttccgagaacattactcctctctgtgctccctgtcggatcagttggcaggcaagattctggtggatgtgtctaacccaactgagcaggaacatctgcagcatcgagaaagcaacgccgagtacctggctagcctcttccctacttgcacggttgttaaagcgtttaatgtgattagcgcctggaccctacaagcagggccccgggatggcaacaggcaggtcccaatttgtggtgaccagcctgaggcaaagagagcggtctccgagatggccttggccatgggattcatgcctgttgacatgggctccctggcatcagcgtgggaggtggaagccatgcccctccggctgctccccgcgtggaaggttcccacccttctggcactcggactatttgtctgtttttacgcttacaactttgtgcgggacgtgctgcagccgtacgtgcaggagagccagaacaagttcttcaaactgcccgtgagtgtcgtgaatacgaccctgccctgcgtggcctatgtcctgctgtcccttgtatacctcccaggcgttctggctgccgccctccagctgagacgagggactaaatatcagagatttcctgattggcttgatcactggctccagcacagaaaacagatcgggttgctgagttttttttgcgcagctctacatgcgctgtatagtttttgcctacctttacggcgggctcatcgatatgacctggtaaacctagccgtgaagcaagtcctggccaataaaagccacctgtgggtggaggaagaggtgtggaggatggagatctatctgagtctgggagtcctggcattaggaactttgtccctgctcgctgtgacttccctgccctccatagctaacagcttaaactggcgggagtttagtttcgtacagtgcgtggctacaagttctgcgggcaataccggttccggaacccggagacccgaatcacagagccaggacccccacctgcccgccccgcatcaccagacctctttcctcgggcctcgttctttctgctgcagcctagtgcctgtgtcaactccatacggtcaccaagaggatctgtcatggacaagatag

SEQ ID NO: 136359 - DNA, 432 bp, synthetic construct
  misc_feature 1..432: note = Description of Artificial Sequence: Synthetic coding sequence
  source 1..432: mol_type = other DNA
atggaaatttatctgagtctcggggtgttggctctggggacattgagcctgctggcagtaacttccttgccaagcattgcgaacagtctgaactggagagagttctcttttgtgcaatcaagtctcggcttcgtggcactagtgctgagcacacttcacaccctcacctacggctggacaagagccttcgaggagtccaggtacaaattctatctcccccccacatttaccctcacactgctagtgccctgcgtggtgattctggcaaaggccctttttctcctcccctgtatttcaagacgcttggctcggatacgtaggggatgggagcgggagagcaccataaagttcaccttacctacagaccatgccctgagtccgcttgggttcctgttcctggtagtccagagcggaattactgtctgtaagtag

SEQ ID NO: 136360 - DNA, 852 bp, synthetic construct
  misc_feature 1..852: note = Description of Artificial Sequence: Synthetic coding sequence
  source 1..852: mol_type = other DNA
atggagaagacatgcattgatgccctgcccctgacaatgaattcttccgagaaacaggaaaccgtgtgcatctttggcaccggcgatttcggtaggagcctgggccttaagatgcttcaatgcggctactcagtcgtgttcggatctcggaacccacagaagaccacgttgcttcccagtggagccgaagtgttgtcatacagtgaggccgcgaagaagtcaggaatcatcatcattgctatccaccgtgagcattacgactttctgactgaactgaccgaggtcctgaacggaaaaatcctcgtggacatatccaataatctgaagataaaccagtaccccgagtcaaatgcagaatatttggcccatttggtcccaggagcacatgttgtgaaggcttttaacaccatctccgcctgggctcttcaaagtggtgccctggatgcctctcgccaagcaatcctgaagaaagaaaacccattctctacatcttcagcttggctcagtgactcttacgttgccttagggattctaggtttctttctctttgtcctgttggggataacatcacttccaagcgtctctaatgccgtgaattggcgggaattccgttttgtacagtctaaattgggctatctcacgctcattctttgcacagcccataccctggtgtacgggggcaaaaggttcctgagcccgtctaacctgaggtggtacctccccgcagcttacgtgctgggcttgattatcccttgtactgtgctggtcattaagtttgttctcataatgccctgtgtggataacactctgaccagaattaggcagggttgggaacgcaattccaagcactag

SEQ ID NO: 136361 - DNA, 1380 bp, synthetic construct
  misc_feature 1..1380: note = Description of Artificial Sequence: Synthetic coding sequence
  source 1..1380: mol_type = other DNA
atggagaaaacctgtattgacgctctacccctgaccatgaactcgtctgagaaacaggaaacagtgtgcatcttcggcactggtgactttgggagatcactgggcctgaagatgctccagtgtgggtacagtgtcgttttcggatcacgaaatccacagaaaacaactctgctgcctagcggggctgaggtactgagctattctgaggccgcaaagaagagcggcattatcatcatcgccattcaccgcgagcattacgatttcctcactgagctgacagaagtattgaacggcaagatcctggtggatatctcaaacaacttgaaaattaatcagtatccagaaagcaacgctgaatacctggcccacttagttcctggagcacatgtggtgaaggccttcaatacaatcagcgcttgggcccttcaatctggtgctctggatgcatcaaggcaagtctttgtatgtggaaacgactctaaggccaaacaaagggttatggatattgtacgcaacctgggcttgaccccaatggaccaaggtagcctgatggccgcgaaagaaatcgaaaagtaccccctgcagctttttcccatgtggcggttccctttctacctcagcgcagtactatgcgtgtttctgtttttttactgcgtgatcagggacgtgatttatccttacgtctacgaaaaaaaagataatacgttcagaatggctatttcaatcccaaacaggattttccctatcactgccctgacactcctggctctagtatacctcccaggggtgattgcagctatactccaactgtacagaggaacgaagtaccgccgcttccctgattggctggaccactggatgctctgcagaaaacaactggggctggtcgcattggggttcgcgttcttacacgtactctataccttagtgattccaatcaggtactacgtccgctggcggttgggtaatcttactgtgacacaggcaattttgaaaaaagagaatccctttagcacttcctccgcctggctcagtgacagctacgtcgccttgggaattttaggcttctttctgtttgttctgctgggaattacatcgcttcccagtgtttcaaacgctgtcaattggcgcgagtttagatttgttcagtccaaactgggctacttaacactaatcctttgcacagcgcacactctggtgtatggaggaaagagattcttatcaccaagtaatctacgatggtatctgcccgccgcatatgttcttgggctcatcataccatgcaccgtgctcgttatcaaatttgttctgataatgccctgtgtcgataataccctaacgaggatccgccagggatgggaacgcaatagcaagcactag

SEQ ID NO: 136362 - DNA, 1080 bp, synthetic construct
  misc_feature 1..1080: note = Description of Artificial Sequence: Synthetic coding sequence
  source 1..1080: mol_type = other DNA
atgcctgctcacctcctccaagacgacattagttcttcctacactaccacaaccactattacagccccaccttctcgggtgctgcagaacgggggcgataaacttgagactatgcctctctatttggaagacgacattaggccggatatcaaagacgatatttacgatccaacgtacaaagataaggaggggcctagtccaaaggtcgagtatgtgtggcgcaacataatactaatgtctctcttgcaccttggtgccctctacgggattactctgattcctacctgcaagttctatacctggttgtggggagtgttttattacttcgtgtccgcgctcggcattaccgccggagcacaccggctttggtctcaccgctcatacaaagccagactgccattgcggctgtttctgattatcgctaataccatggccttccaaaacgatgtgtacgagtgggccagagaccatagagcccatcataagttctctgaaacccacgcggacccacataacagcaggcgagggttctttttttcgcacgttggctggctcttggtcagaaagcaccccgcagtcaaagaaaaaggttccacgctcgacctgtcggatctggaggctgaaaagctggtgatgtttcaacggagatactataagccaggcttacttatgatgtgcttcatcctgcccacactggtcccttggtacttctggggggaaacatttcagaatagtgttttcgtggccacctttcttcggtatgcagtggtgcttaatgccacttggctggtgaattccgccgctcacctgttcggatacaggccatacgacaaaaatatctcacctagggagaatatcctcgtgtcactaggcgccgtcggagagggtttccacaattatcaccattctttcccatatgactactctgcctccgagtaccgatggcacattaatttcacaactttttttatagactgtatggcggcactcggcctggcttacgatagaaagaaggtatctaaggcagctatacttgcaaggattaagcggactggagacgggaattacaagagcggttag

SEQ ID NO: 136363 - DNA, 729 bp, synthetic construct
  misc_feature 1..729: note = Description of Artificial Sequence: Synthetic coding sequence
  source 1..729: mol_type = other DNA
atgccagcccatttgctgcaggacgatatctcttcctcctatacaactacaactacaataacagctcccccgagcagggttctgcagaacggtggagataaattagagacaatgcctctctaccttgaggatgatattcgaccagacattaaagatgacatctatgatcctacctataaagataaggaagggcccagtcctaaggttgagtatgtttggcggaacatcatcctgatgtccctcctccatctcggggccctgtacgggattacacttattcccacgtgtaaattctacacctggctttggggagttttctattacttcgtctctgccctcggcatcacagccggagctcaccgtctctggtcccaccggtcctataaggctagactgcccctccgcttattccttattatcgccaataccatggccttccagaatgatgtgtatgaatgggccagagaccatcgggctcaccacaaattctctgaaacgcacgctgaccctcataactcaaggagaggcttcttcttttcccatgtgggttggctcctcgtacgcaaacaccccgccgtgaaagagaaagggtccacactggacctatctgatttagaggcagaaaaactggtgatgttccagcgtcggtactataagcctggactactcatgatgtgctttatcctcccgacactggtgccgtggtatttctggggggaaaccttttag

SEQ ID NO: 136364 - DNA, 813 bp, synthetic construct
  misc_feature 1..813: note = Description of Artificial Sequence: Synthetic coding sequence
  source 1..813: mol_type = other DNA
atggcctgccggccccgttcaccaccccgccaccagtcccggtgcgatggcgatgcctctcccccatcacccgcacggtggagtctaggccgcaaacgcagagctgatggccggcggtggcgtccggaggatgcggaggaggcagagcatagaggggccgagcggaggccagagtcatttactactcccgagggccccaagcctcgttcacgttgctctgactgggctagcgccgtggaggaggacgaaatgcgtacccgcgtcaataaagaaatggccagatacaaacgcaagctgctcataaacgatttcggaagagaacggaaatctagttctgggagcagtgacagtaaggaaagtatgtcgaccgtgcctgcagatttcgaaactgacgaaagtgtcctgatgcgcaggcaaaagcagattaactatggaaagaacactatcgcctatgatagatacattaaggaggtcccacgccatctcaggcagcccggcatccatcccaagactcccaacaagttcaaaaagtacagccgtcggtcctgggatcagcagattaagctctggaaagttgccctccatttttgggaccccccagccgaggagggctgtgatctccaggaaatccaccccgtcgatttagagtccgccgagtcctcttcagaaccacagactagctcacaggatgacttcgatgtgtacagtgggaccccaaccaaggtgcggcatatggatagtcaggtagaggatgagtttgacctggaggcctgcttgactgagccacttcgagacttcagtgctatgtcctag

SEQ ID NO: 136365 - DNA, 5328 bp, synthetic construct
  misc_feature 1..5328: note = Description of Artificial Sequence: Synthetic coding sequence
  source 1..5328: mol_type = other DNA
atggcactcagtctgtggcctctcttacttttgctgctgttgcttcttctcctgagcttcgccgtcaccctggcacctaccggacctcattctctcgatcccggcctcagctttcttaaatccctgctctctacgctggatcaggcgccccagggatctctaagcagaagtcgttttttcacttttctagcaaatatttcctcctctttcgagccgggtaggatgggtgagggtccagtgggtgaaccccctccactgcaaccccctgccctccgcctgcatgatttcctggtcactctgagggggtcccccgattgggagccaatgctggggctcttgggagatatgctcgcactgctgggtcaggagcagacaccaagagattttctggtgcatcaagccggagtcttgggcggactagttgaagtgttgcttggtgctctcgttcccggcggaccgcccacccccaccagaccaccctgcacacgggacggcccaagtgactgcgtgctcgccgccgattggctgccaagcctactgttgcttttggaaggcacaagatggcaggctttagtacaagtgcagccaagcgtggatccgaccaatgcgaccggactggatggccgcgaagcggcaccccattttttgcaaggactgctgggtctgctgacacccaccggcgagctcggctctaaagaggccctttggggagggctgcttcggactgtgggagcaccgctctatgctgctttccaggagggtctgcttagagtcacccactctctgcaggacgaggtgttctctatactgggccagcctgaaccagatactaatggacagtgtcaggggggtaacttgcagcagttgctgctctggggggttagacacaacctgagctgggacgtacaagctttgggattcctgtccggttcacctccccctcctcccgctctcctccactgtttatccaccggcgtgccgcttcctagggccagtcagccatccgcacacatttcaccaaggcaaagacgggccatcacggtggaagccctgtgcgaaaaccatctcggtcccgcacctccgtatagtatctccaatttttccatacatctgctctgccagcacactaaacctgctaccccacagccgcatccttcaactaccgctatttgtcagacagctgtttggtacgcagtgagctgggccccaggtgcgcagggttggctccaggcctgtcatgatcagtttccagacgagttcctggatgctatctgctctaatctctcgttcagcgccctctctggatctaacagacggcttgtgaaacgcctgtgcgccggacttttgccgccccccacctcatgccccgaggggctccccccagtccccctgactccagatattttctgggggtgtttcttggagaatgaaaccctgtgggctgagcgtctgtgcggcgaagcttccctgcaggccgtcccccctagcaaccaggcttgggtgcagcacgtgtgtcagggccccactcctgacgtaactgcctctcctccatgtcatatcggaccgtgcggcgaacgctgcccagacggagggagttttctggtcatggtttgcgcaaatgacactatgtatgaggtgctcgtcccgttctggccctggctggccggacagtgtcgcatcagcagggggggcaacgatacatgctttctcgaaggcctgctgggtcccttgctgccgtcgttgcctcccctcggaccctcccccctctgccttacaccaggcccctttttattaggaatgctctcccaactgcctaggtgccagagcagtgtgcccgctctcgcgcaccctacccggctccactacctgctccggctattgactttcctcctcggcccaggggctggaggcgctgaagctcagggcatgctgggacgggcactcctgctctctagtctgcctgacaattgttccttttgggatgcctttcggcctgaggggcggcggtctgtgctgagaactattggtgagtacctggagcaggatgaggagcagccgaccccctctggctttgagccgaccgtaaacccaagttcggggatctcaaaaatggaacttttggcctgcttctcacccgtcctatgggatctcttacagcgtgagaaatctgtgtgggcgctgcagatactcgttcaggcctatctgcatatgcccccggagaacctccagcagctggtgctgtctgctgaacgtgaggctgctcaaggtttcctaactctgatgctccaaggaaagctgcaggggaagttgcaagtgcccccaagtgaggaacaggccttaggcaggctgaccgcccttctgttgcagagatacccacgcttgacgagtcagttgttcattgatttatctccactcattccatttctggcagtatcggatttgatgaggtttccaccttccctcctggcaaatgatagtgtgctagcagccatcagggactactccccagggatgcggcccgagcagaaggaagccctcgcaaagaggctgttagcgcctgaattgtttggtgaagtgcccgcatggccgcaagaactgctctgggcggttctgccactcctcccccacctgccgctggagaacttcctccagctcagcccacaccagattcaggccctggaggacagttggcctgccgcgggcctcggccctggacatgcccgtcatgttttgcgaagcctcgttaatcagagcgtgcaggatggggaagagcaggtgaggcgcctgggtccgctggcctgttttttatcacccgaggaacttcagagcctggtcccgcttagcgaccccaccggacccgtggagcggggtttgctggaatgcgctgctaacggaactctgtcacccgaaggcagagttgcatacgagcttcttggggtccttcgcagcagtggaggagctgtgttatcacctcgggaacttcgagtgtgggctcccctcttcagtcagctgggattaaggttcctccaggagcttagcgaaccccagctgagagctatgctccctgtgctgcaaggcacaagcgtgacacccgctcaagctgttctactgctcggccgtctgctgccccgacatgacctatccctcgaggagctgtgttccctgcacctcttacttcctggattgagcccccaaacattgcaggcaatcccccgccgggtcctggtcggtgcttgctcatgtttagcccctgagctctctagactctctgcctgccagacagctgctctgctgcagacctttagggtgaaagatggggtgaaaaatatgggcaccaccggggccgggcctgccgtgtgtatcccagggcagcccatccctacgacctggcctgattgcctcttaccccttctgccattgaaattgctccagttggacagcctggctctcttggcaaataggagacgctactgggaactcccatggtctgagcagcaggcccagtttctgtggaaaaaaatgcaagttcctaccaatctgaccctacgaaatctccaggcgctaggcacattagccggtggaatgagctgcgagttcctgcaacagattaacagtatggttgatttcttagaagtcgttcatatgatctatcaattacccacacgagtgcgcggttcccttagagcctgcatctgggcagaattacagaggcggatggccatgcccgagccagaatggaccacagtcggccctgaactaaacggcctggactccaaactgctgctggacctgccaattcagctgatggacaggctcagtaatgagtccatcatgctcgtagttgaactggtccagcgggctcccgagcagctccttgccctcacaccccttcaccaggcagctcttgcagaaagggctctccagaatctcgcccccaaggaaacacccgtgtctggagaagtgcttgaaactctgggccctctagtcggcttcctcggcaccgagagcacgcggcagatcccactacagattctcctttcacacctgtcgcagcttcagggattctgtctgggtgaaacgtttgccacggagctcgggtggctcctgttgcaagaatccgtattggggaaacccgagttgtggtctcaagacgaggtggagcaggcggggcggctagttttcaccctctccacagaagctatctctttgataccacgggaggcactaggcccagaaacattggagaggttgctcgagaaacaacaatcctgggagcaatctcgtgtgggtcagctctgtcgtgagccgcaactcgcggccaagaaagcagccctcgtcgccggagtggtcaggccggcggccgaggacctccctgagcctgtgccaaattgcgccgatgtgcgaggaacctttccagcggcctggtctgctacccaaatagcagagatggagttgagcgattttgaagattgtttgactcttttcgccggtgatcccggactgggccctgaggagttaagggccgccatgggaaaggccaagcagctctggggcccaccccggggatttaggcccgagcagattttgcagttagggagactcctgatcggcctgggagatcgcgagctccaagagttgatcctagtggattggggagtgctgagcacccttgggcaaattgacggctggtcaaccacacaactccgcattgtagtaagtagttttttaagacagagcggtaggcacgtgagccatcttgacttcgtccatctgacagcgttaggatatactctgtgcggcctgagaccggaagaactccaacacatttcaagttgggagttcagccaggccgctttgtttctcgggaccctccacctccagtgtagcgaagagcagttggaggtgctggcccatctgctggttctgcctggcggatttggacccatctccaactggggccccgagatctttaccgagatcggcacaatagcagccggcatacccgatctggctctgtccgccctgctgaggggccagatacagggtgtcacaccgctcgcgatttccgtgatccctccaccgaagttcgcagttgtgtttagcccaattcagctctcttccctgacctcagcacaagccgtggccgtgactcccgagcagatggcttttctgtcacctgaacaacgcagagccgttgcttgggcccagcacgagggcaaagagtcacctgaacaacagggccggagcacagcatgggggcttcaggattggtctagaccgagttggtcgctagttcttacaatttcattccttggacacttactgtag

SEQ ID NO: 136366 - DNA, 1056 bp, synthetic construct
  misc_feature 1..1056: note = Description of Artificial Sequence: Synthetic coding sequence
  source 1..1056: mol_type = other DNA
atggccctgtcactctggccgctgcttcttttactcctgttactgttacttctcagttttgcagtgacactcgctcctacaggtccgcacagcttggatcccgggctgagtttccttaagtctttgctcagcacactcgaccaggccccacaaggatcgctttcacgctctagattctttactttcctggctaacatctcaagctccttcgaaccaggccgcatgggggagggtccggtaggtgaaccccccccccttcagcctcctgcacttcgactccatgactttcttgtgactctaagagggtctcccgattgggagcctatgctggggcttctcggggacatgctggccctgctcgggcaggagcaaactccaagggactttctcgtccatcaggccggcgttctgggagggctggttgaagtgctccttggggccctcgtgcccgggggacctcctaccccgacacagccaccatgcactcgagacggcccttccgactgtgtgctggccgcggattggttgccctcactgttactgttgctggagggtacaagatggcaagccctggtgcaggtgcaaccctccgtggatccgactaacgcaaccgggttggatgggcgtgaggcggcaccacattttctgcagggtctgcttggtttgcttactcctacaggcgagttgggcagcaaagaagctctttggggcgggctcctgcgtaccgttggggcccccctctatgccgccttccaagaaggtttactacgagtgactcacagcctacaggacgaagtattttcaattttgggtcagccggaacctgatacaaacggtcagtgtcaaggcggaaacctgcagcagttgcttctttggggggttagacacaacctctcttgggacgttcaggcactgggctttttgagcggtagtccacctcccccacccgccctgctgcattgtctgtctacaggcgtgcctctgccccgagcatctcagccgagtgcccatatctccccaagacaacgccgcgccataactgtagaggctttgtag

SEQ ID NO: 136367 - DNA, 5328 bp, synthetic construct
  misc_feature 1..5328: note = Description of Artificial Sequence: Synthetic coding sequence
  source 1..5328: mol_type = other DNA
atggccctatctctttggccactgctgctgcttctgttgctcctgctcttgctgtcattcgccgtgaccctggctcctacaggtccccactctctggatcctggcctgagtttcctgaagtccttgctgagcacgctggaccaggctccacagggatctctgtcccggtctagattctttacttttctcgccaacatttcttcctcattcgaaccaggacgcatgggcgagggccccgttggtgagccacccccattacagccgccagccctgcgactccacgatttcctcgtgaccctaagaggttcccctgattgggagcccatgcttgggctcctgggcgacatgctggctctcctgggccaggagcaaaccccacgcgactttctggtgcaccaggcgggagtcctgggaggactagtagaggtattgctgggggcactggtccctggcggcccacccacacctaccagaccaccctgcacccgggatggcccttccgattgtgtgctagccgcagattggctaccaagcttactgcttctgctcgaagggacccgatggcaggcccttgtccaggtacagccctcggttgacccgaccaatgccaccggcctggacgggcgagaagccgctcctcactttttgcaagggttgctcgggttgctgacacctaccggggagctgggttcaaaggaagccctctggggtggactgcttagaaccgttggcgccccactgtacgcggcgttccaagagggtctgcttcgcgtgactcactctctgcaggatgaagtgtttagcattctgggtcagccagaacctgacacgaatggccagtgtcagggagggaacttacaacagctgcttctgtggggtgtccgtcacaatctttcatgggatgtgcaggcacttgggtttttatcaggatctccccccccaccccctgccctgctgcattgtcttagtaccggagttccactaccccgggccagtcagccttccgcccatataagccccaggcagaggcgagccataaccgttgaggcgctctgtgaaaatcatctcgggcctgctccaccctacagtattagtaacttttctatccacttgctttgtcagcataccaagcccgcaaccccacagccccaccccagtacaaccgccatatgtcagaccgcagtctggtacgcagtgtcctgggccccaggcgcgcaaggttggctccaggcctgccacgaccagtttcctgatgaatttctggatgcaatctgttcaaatctgagtttctccgctctgtctggctcaaatcgcagactcgtgaagcgcctgtgcgctggactgctgcccccaccaactagctgtccagaaggcttgccgccagtgcccctgacccccgacatcttctggggctgctttcttgagaacgaaactctatgggcagaacgactgtgtggcgaagcaagtctccaggccgtgccacctagcaaccaggcctgggtgcaacatgtctgccaggggccgaccccagacgtgaccgcatcccccccttgccacatcggcccctgtggggagaggtgtcctgatggggggagcttcctcgttatggtgtgtgccaacgatactatgtacgaggtgttagtccccttctggccatggctggccggacaatgtcgtatttcgagaggggggaatgacacctgtttcctggagggcctgctgggccccctgctgccaagtctgccacccctgggccccagtccactatgtttgacccccggaccatttctcctgggaatgctctcacagctcccacgctgccagtcttccgtgcctgctcttgcccatcctactcgtctgcattacctactgagattgctgacctttctcctcggccccggtgccggcggtgcagaggcgcagggcatgttgggacgtgccctgttgctgtccagtctgcctgataattgttcattttgggacgcatttaggccagaagggcggcggagcgtacttcgaactatcggggaatatctcgaacaggatgaggagcaacccactccgtctggattcgagccaactgtgaacccctcaagcggaatttccaaaatggagctcctggcctgtttttcccccgtgctttgggatcttttacagcgggagaagtctgtgtgggcactgcagattctagttcaagcctacctgcacatgcctccggaaaatttgcaacagttggtgctctccgctgagcgtgaagctgcacagggtttcctgacactgatgcttcagggaaagttgcagggcaagctgcaggtgcctccttccgaggagcaagcacttgggcggctcactgcccttctccttcagcgatatcctagactaacatcccaattgtttatcgatctgtcccctcttatcccattcctcgcagtgtcagatctcatgcgtttccctccctccctacttgcgaatgatagcgttctggcagccatccgagactacagccccggcatgcgccccgaacagaaagaagcacttgccaaacgcctgttggctccagaactattcggggaggttcctgcctggccccaagagctgctctgggccgtcttaccactgctccctcacctgcccctggagaactttttgcagctaagtccacaccaaatccaggcacttgaggacagctggccggcagccggactgggccccggacacgcccgccacgtattacggtcactcgtaaaccagtcagtgcaggatggcgaggagcaggtgcggcgcctgggtcccctggcatgtttcctgtcccccgaagaactgcaatctctggtccccctgtcagacccaacaggccccgtggagaggggactcctcgaatgtgccgcgaacggcactctctcacctgaggggagagtggcctatgagctcctgggagtccttcggtcttctggcggcgccgtgctatctccacgagaactcagagtctgggcaccactgttctcccaactggggcttcgatttctgcaagaactgagtgagcctcaactgcgggcaatgctgcccgtactacagggcacctcagtgactccagcccaggccgtgcttctcctgggaagactgctcccccgtcacgacctgtcactcgaggagctgtgctcattacacctgctgctccccggattatcaccgcagacactgcaggctatccctcgtagggtcctagtcggtgcttgctcctgtctggctcctgagctgagcagactcagtgcctgccaaactgccgccctgctccagaccttcagagtaaaagatggcgtgaaaaatatggggacaaccggggccggccccgctgtatgtatccccgggcagccaattcccaccacctggccagattgcctgctgcccttactgccactgaagctcttgcaactggattctctggccctcctggccaacaggaggagatactgggagttgccctggtcagagcagcaggcccagttcctctggaaaaagatgcaggtcccaacaaacctgacccttcgcaatttgcaggcactaggcaccctggccggtggtatgagctgcgagtttctccaacagataaactccatggtagacttcttggaagtggtccacatgatttaccaactgcctactcgcgtccgcggatctctcagggcctgtatttgggcagaactccagcggcgtatggccatgcccgaacccgagtggaccacagtggggccagaactaaacgggctcgattccaaactgctgttggatctcccaatacagctcatggacaggctgagcaacgaaagtatcatgctcgtggtggagctggttcagcgagctcccgagcagctgctcgctctgacaccccttcaccaggccgctctggccgaacgcgcgttgcagaacctggcacccaaggaaaccccggtgtccggggaagtgctggaaacactcggtcctctggtgggtttcttgggtacggaatccacaaggcaaatcccactgcagatcctcctgtctcacttgagccagctgcagggcttttgtctgggcgagacattcgctaccgagttaggctggctacttctgcaggaaagcgtgctgggcaaaccggaactgtggtcgcaggacgaggttgaacaggccggcagactcgtgttcaccttgtctacagaggccatttccctcatcccccgtgaggccttggggcccgagacactcgagcggctgctagagaaacagcaaagctgggaacagtccagagtcggccagctctgccgcgaacctcaattagctgctaagaaagctgccctcgtcgcaggagttgtgcgtccagcagcagaggacctgccggagccggtccccaattgcgctgacgtgaggggtacgtttcccgcggcttggtcagcaactcaaattgccgagatggagttgtctgactttgaggattgcctcacattgttcgcaggcgatccaggattgggaccagaggaactccgcgcagccatgggaaaagctaagcaactgtggggtccacccaggggcttccgacctgagcagatcttgcaactgggacgcctcctgatcggtcttggcgatagggaattgcaggagttaattctcgtagattggggcgtcctgtccaccctgggacagatcgacgggtggtccactacgcagctgcggatcgtcgtctccagtttcctcagacagagtgggagacacgtgtctcatctcgatttcgtgcatctgacagctctcgggtatacactgtgtggactcagacctgaagaacttcagcacatttcttcttgggaattctcacaagccgctctcttcctgggaacactgcatttgcagtgcagcgaggagcagttggaggtgttagcccatctgttggtgctgcctggaggcttcggaccgattagtaactggggccccgagatattcaccgagattggtaccattgctgctggtatcccagacctcgcacttagcgccttactgagaggtcagatacaaggtgtaactcctctcgccatttccgtaattccccccccgaaattcgctgtcgtctttagtcccatccagctgtctagccttacatccgctcaggccgttgcagttacccctgaacagatggcttttcttagccccgaacagcgaagagccgtggcctgggctcagcacgagggcaaggagagccccgagcagcagggcaggagcacggcgtggggtcttcaggactggtctagaccttcttggagcctcgtattgactattagtttcttaggacacctcttgtag

SEQ ID NO: 136368 - DNA, 1056 bp, synthetic construct
  misc_feature 1..1056: note = Description of Artificial Sequence: Synthetic coding sequence
  source 1..1056: mol_type = other DNA
atggccctgtccctctggcccctgctgctgctgctgctgttgctgcttctccttagctttgctgtgaccctggcccccacaggcccccattctctggatcctgggctcagtttcttgaaatctctgctgtctactttggaccaagctccacagggctccttgagcaggtcaaggtttttcacatttttggctaacatatccagtagtttcgagcccggccgcatgggcgagggccctgtgggggaaccccctcccctgcagccccccgcactgcggctgcacgactttctcgtcaccttgcggggctctcctgactgggaaccaatgctcggcctgcttggagatatgttggccttgttgggacaggagcaaacccccagagattttctcgtacatcaggctggtgttctaggcggcctcgtcgaggttctacttggggctcttgtgccaggaggcccccctacccctacgaggccaccgtgtacacgagatggtccctctgattgtgtcctagcagccgactggctgccctctctgttactacttctggaggggacaagatggcaggccctggtccaggtgcagccaagcgtggaccccaccaacgcgactggcctggatgggcgagaggctgccccacatttcttacaaggactgctcggcttgcttacacccacgggtgaactggggagcaaagaagcactctggggcggcctcctgagaaccgtgggcgcccccctttatgccgccttccaggagggactgttgcgcgtcacccactctctacaagatgaggtgttcagtattcttggccaaccagagcccgacaccaatggtcaatgccaggggggcaatctgcaacagctgctgctttggggggtgcgccacaatttaagttgggacgtgcaggctctcggatttctgagcggcagccccccaccgccaccggccctgctgcactgcctgtccactggggtgccattacctagggcctctcaacccagcgcacacattagcccaagacagaggagggctatcacagtggaggctctgtag

SEQ ID NO: 136369 - DNA, 2100 bp, synthetic construct
  misc_feature 1..2100: note = Description of Artificial Sequence: Synthetic coding sequence
  source 1..2100: mol_type = other DNA
atggcattgtccctgtggcctttgctccttttgcttcttcttttactcttgctgagttttgcggtcacactggccccaacaggaccccacagcttggatccagggttgagtttcctgaagtctctgttaagcacactcgatcaggccccacagggcagcctgagcagaagccggttcttcacatttcttgccaacatctcctcatcctttgagcccgggcgcatgggcgagggcccagtgggcgagccccctcctctccaacctcccgctcttcggctgcacgattttctcgtgactttacgcggaagtcccgattgggagcccatgttgggcctgctgggcgacatgctcgccctgttggggcaggagcaaaccccaagggactttctggttcaccaggcgggagtgctgggcgggctggtcgaggtgttactcggggcattagtgcccggcggccctcccacccccacgcagccgccgtgtacacgggatggaccttcagactgcgtcttggccgcggactggctgcctagcttacttttgctgctggagggtacaagatggcaagccctggtacaggtgcagccatctgttgaccctacaaatgcaaccggactggacggccgggaggcagccccccactttttacaagggcttctcggattgttgactccgaccggcgagctcgggtccaaggaggccctgtgggggggcctgctcagaactgtgggcgctccactctatgctgccttccaggaagggctattacgggtgacacactccctccaggatgaggttttctccattttgggccaacccgaaccagataccaatggacagtgtcagggcgggaacctccaacagctgcttctgtggggagtgcggcacaatcttagctgggatgtgcaggctttaggttttctaagcggaagccctcctcccccaccagcgctgctccactgcctgagcactggcgtgccattacccagagcctcccaacccagcgctcacatctcccctcgccagagacgggctataaccgtggaagctttgtgtgagaaccacctgggcccggccccgccatactcaatttctaacttctcaatccatctcttgtgtcagcacaccaaaccagccactccgcagccccatccaagcactacagccatttgccagactgccgtgtggtacgccgtatcttgggcaccaggtgcacagggatggctccaggcctgccatgaccaattccccgatgagttcctcgacgccatttgcagcaacctgagcttttctgctttgagtggatcaaataggcgcctcgtcaagcgcctctgcgcaggcttgctcccaccacctacaagttgcccagagggacttccaccagtcccactaactccagacatcttctggggatgcttcttggaaaatgagactttatgggcagagcggctctgtggtgaagcttccctgcaagccgtccccccgagtaaccaggcctgggttcagcacgtgtgccagggccccaccccagatgtcaccgccagtcctccatgccatattggcccttgtggggagcgttgtcctgatggtgggtcgttcctcgtgatggtgtgcgcaaacgataccatgtacgaagtgcttgtacccttctggccttggcttgcaggacagtgcagaatcagccgtgggggaaatgacacatgctttctggagggattgctgggccctctcctcccctctctgccccctctgggccccagcccattgtgtctgaccccaggaccatttctgctcggaatgctgagccaattaccccggtgccagtcctcagtccctgcccttgcccatcccacacgacttcattatttgctacgactgctaacattcttgctgggtcccggagcaggtggtgccgaggcccagggcatgctcggtcgggccctgctcctgtccagtctccccgacaactgttcattttgggacgctttcagacccgagggaagacgctccgtgctccgcacaattggcgaatataacaaaatgaggagctcacagccgcaccaggctctgaatccactgtctaccccggccctggtgtag

SEQ ID NO: 136370 - DNA, 3009 bp, synthetic construct
  misc_feature 1..3009: note = Description of Artificial Sequence: Synthetic coding sequence
  source 1..3009: mol_type = other DNA
atggagctgcttgcttgtttttcccccgtgctgtgggatctgctgcagagagagaagagcgtgtgggctctccagatcctggttcaagcctatctgcatatgcctcccgaaaacttgcagcaactggtactctctgccgagagggaagccgcccagggcttcctgacattaatgctgcaggggaagttgcaggggaaactgcaagtgccaccctccgaggagcaggctcttggtcgtttaactgccctgctgcttcagaggtacccccggctcacgagccagcttttcatcgatctttctcccctcattcctttcctggctgtgagtgacctcatgcggtttcctccatctctgctggccaacgattctgtccagcagggataccgaggctctgaggagaacagccttgaggaagacaaggggttgcgaccaatgactcctaggtccctggcagcaatccgcgactacagccccggtatgagaccggaacagaaagaggccctcgcaaaaaggctgctggcccccgagctctttggcgaggtacctgcatggcctcaagagctgctctgggccgtgctgcccctgctcccccacctccctctggagaactttctgcagctctctccccatcaaatccaagcactggaagatagctggccagcggcgggacttggtcccggccacgccagacatgtcctgagatctctagtgaatcagtcggttcaggatggagaagaacaggtacggcgactgggcccactggcatgttttctgtcgcccgaggagttgcagtccttagtcccactgagtgatcctacagggccagttgagaggggtcttcttgaatgcgctgctaacggcactctatcccccgagggaagggtggcatacgaattgcttggagtattgcgctctagcggtggcgctgtactgtctccgcgggaacttcgcgtgtgggccccccttttctcgcagttgggactgaggttcctccaggaactgtcagagccccagctcagggccatgctgccagtgctccagggaacgagcgtgacaccggcccaagccgtgctgctgctcggacgtctgctgccccggcatgacctcctccagctggactctcttgcgttgctggccaaccggagaaggtattgggagctgccttggagtgagcaacaggcacaatttttgtggaagaagatgcaggtgccaaccaatctcaccctccgaaatctgcaagcactgggaactctggccggaggcatgagctgtgaattcctgcagcagattaatagtatggtcgattttctcgaggtggtgcatatgatataccagctgccaactcgcgttagggggagccttcgcgcctgcatatgggccgagttgcagaggcggatggccatgccagagcccgagtggaccactgtcggacctgagttgaatggcctggattcgaagctgctccttgatcttcccatccagctaatggatcggctgtctaacgagtctatcatgctggtagtggaactcgtacagagggcacccgaacagttgcttgccctgactcctcttcaccaggctgcactggctgagagggccttgcagaatctcgcaccgaaggagaccccagtcagtggtgaggtccttgagactttggggcctttagtgggtttcctgggtacagaatccacacgccaaatccctctgcagatcttgctttctcacctttcccaactgcagggcttttgtttaggagagacatttgctacagaactcgggtggctgctgctgcaggagtctgtcctgggtaaaccggagctgtggtcccaggacgaagtggagcaggccggacgcttggtgtttacgctgtcaacggaggcgatctcgcttatccccagagaagcactaggtccagaaaccttagagcgcctgctggagaaacagcagtcctgggaacaaagtcgtgtcgggcagctctgtagagaaccgcagctggccgccaagaaggctgcgttggtagctggcgtggtccgtcccgcggcagaagacttaccggaaccggtccctaattgcgcagatgtaagaggtacattcccagcggcctggagtgcaacccagattgctgagatggaactcagcgacttcgaggattgtctcaccctatttgccggtgacccggggctgggcccagaggaactgagagcagccatgggaaaagctaaacagctttgggggccacccagggggtttcgacctgagcagatccttcaattgggccggctgctcattggtctcggggaccgcgagctgcaggaactgatactggtggactggggggttctcagtactttagggcaaatcgatgggtggtctaccacacagttacgaattgttgtgagcagctttcttaggcagtcagggcgccacgttagtcacctggattttgtgcatctgaccgcgctgggttatactctgtgcggcctaagaccggaagaactgcagcacatcagtagctgggagttttcccaggccgctctcttcttaggcacattgcatctgcagtgctcggaagagcaacttgaggttttggctcatctacttgtgttaccagggggattcggccccatatccaactgggggcccgaaattttcacagaaatcgggactattgcggcaggcattcctgatttagcactttccgctttattgcgagggcaaatacagggagttacaccgctggctatctctgtgatacctcctcctaagtttgccgtggtgttttctcccatacagctgtcaagtcttacatccgcacaggcagtggctgtcactcccgaacagatggcttttctgtccccagaacagagacgtgcagtggcctgggcccagcatgaaggcaaggagtctccagagcagcaaggccgctccactgcctggggcctgcaggactggtctcgaccctcatggtctctggttctgaccatttcttttctcggccatctactgtag

SEQ ID NO: 136371 - DNA, 1890 bp, synthetic construct
  misc_feature 1..1890: note = Description of Artificial Sequence: Synthetic coding sequence
  source 1..1890: mol_type = other DNA
atgttcagagatcaagtcggcgtgttggcagggtggtttaaggggtggaacgagtgtgagcagactgtcgcgctcctttcactcttgaagcgcgtgagccagacccaggctcgctttcttcagctctgcctggaacattccttagcagattgtgctgagctccacgtgctggaacgcgaggctaattccccaggtataatcaaccagtggcaacaggagtcaaaggataaggtcatctcactgttgctgacacacttgcctttgctgaagcctggaaacctggatgcaaaggtcgaatatatgaaattgttgccaaagatattggctcacagtatcgagcataaccaacacatagaagagtctaggcaactcctttcttacgcgctgatccatccagccacctctttagaggacagatctgctctggctatgtggttaaatcatttagaggatcgaacgtcaactagttttggagggcagaaccgcggacggtccgacagcgtggattatggccagacacattattatcatcagcgacaaaactccgatgacaaattgaacggctggcagaatagccgagattctgggatttgcatcaacgcctcaaattggcaagacaaaagcatgggatgtgaaaatgggcatgtgccgctgtacagcagctcgtcggtccccacaactattaataccatagggacttctacttctacgaacgtgcccgcatggcttaagtcactccgcctccataagtatgccgcccttttctcacagatgacctatgaggagatgatggccttaacagaatgtcaattggaagctcagaacgtgactaaaggggctcgccacaagattgtgattagtatccaaaaactcaaagaaaggcaaaatttgcttaagagcctggagagggacatcatcgagggtggcagcctaagaattcccctgcaggaattgcaccagatgatcctgaccccgattaaagcatactcatctccgtctactacccctgaagctcggaggagggaacctcaagctccacgacagccttcccttatgggacctgaaagccaaagcccagattgtaaagatggggccgccgccaccggagctaccgccacacccagcgcaggggccagtgggggcttgcagccgcaccaactgtcatcctgcgatggcgaattagctgtggcgcccctgcccgagggggacctgcctggacaatttacccgcgtgatgggcaaggtgtgtacccaactactggtttccagaccagatgaagaaaacatcagctcgtacctgcagctcatagacaaatgcttgatccacgaagctttcaccgaaacccagaagaagcggctcctgagctggaagcagcaagttcaaaagctgtttcggagtttcccccgcaagacactgttggacattagcggatacagacagcaaaggaatcggggctttggccaaagtaattccctccctactgccgggagtgtgggcggaggaatgggcaggagaaacccaagacagtaccagataccctctaggaatgttccatcagccaggctgggactgctcggcacctccggtttcgtctcatccaaccaaaggaatacaacggccactccaaccatcatgaaacagggccggcagaacctgtggttcgccaatcccggaggtagcaactccatgcctagcaggactcattcctctgtgcagaggacccggagcctccctgtccacactagcccccaaaatatgctgatgtttcagcaacccgaatttcagctgcccgttaccgagccagacatcaataatcgattggagtcactgtgtctctcaatgactgaacacgccttgggtgacggcgtggatcgcaccagcaccatttag

SEQ ID NO: 136372 - DNA, 1893 bp, synthetic construct
  misc_feature 1..1893: note = Description of Artificial Sequence: Synthetic coding sequence
  source 1..1893: mol_type = other DNA
atgatgtttcgggaccaggttggggttcttgcggggtggtttaagggatggaacgagtgtgagcagacagttgcactgctctcactacttaagagagttagccagacccaggcccggtttctccagctttgtttagaacactccttagcagactgtgcagagctgcacgtgctcgaaagagaagcaaattctccaggcattatcaatcaatggcaacaggaatccaaagacaaggtgatttcactccttctcactcatttgcctctacttaaacccggcaacctcgatgccaaagtggagtacatgaaattactgccaaagatcttagcccattccattgagcacaaccagcacatagaggagtccagacagctactgtcttacgccctgatccaccccgcaacgtcacttgaggatcggagtgcattggccatgtggctgaatcatctcgaagacaggacctctacttcgttcggtggacagaatcgggggcgctcagactcagtggattacggccagactcattactaccatcagcgtcagaattcagacgataaactcaatggctggcagaactccagagattcagggatttgcatcaatgcctccaattggcaagacaaaagtatggggtgtgaaaatggccatgtgcctttatatagttcatcttcggtgccaaccactattaatacaattgggacctcaacctccacaaacgtgccagcctggctcaagagcttaagacttcacaaatatgccgccctcttttctcagatgacgtatgaggaaatgatggccctcaccgaatgtcaactggaggcacagaatgtaactaagggagccagacataagatagtgatctccattcagaagctcaaggaaaggcagaatctcttgaaaagtctagagcgtgatataatcgaaggggggagcctgcgcatccccttgcaggagctgcatcaaatgattctgactccgattaaagcctattctagcccgagtaccactccagaggcccggcgccgcgagccgcaggcccccagacaacctagccttatggggccagagagccagtctcccgactgcaaagatggtgcagctgccactggtgctactgccaccccatccgctggggcatcaggagggctgcaaccccatcagctgagtagttgcgacggggagctcgcggtggcaccgttaccggaaggggacttgcccgggcagtttactagggtcatgggtaaggtctgcactcagctcctggtgtcccgacctgacgaagagaacattagttcatatctccaactgattgacaagtgtctcatacacgaggcgtttaccgaaacccagaagaaaagactcttgtcctggaaacagcaggtgcagaaactgtttcgctccttcccccgtaaaactctgctggacatctcaggatatcgacagcagaggaaccgcggtttcggacagtctaacagtcttcccaccgccggttcggtaggaggcggtatgggcagacggaaccctcgacagtatcagatcccatctaggaacgtgccttccgccagactgggcttgctggggacttcaggcttcgtgtccagtaatcagcggaatactacagcaacaccaactataatgaaacaaggtcgccagaacctctggtttgctaacccaggaggcagtaatagcatgccctcccgcacacacagtagtgtgcagcggacaaggtctctacctgtacacacctcccctcagaatatgcttatgtttcagcagccggagttccagctccccgtgacagagccagacatcaataatcgactggagtctctctgcctgtctatgactgagcatgctctcggcgacggtgtagaccgcacctctactatctag

SEQ ID NO: 136373 - DNA, 2154 bp, synthetic construct
  misc_feature 1..2154: note = Description of Artificial Sequence: Synthetic coding sequence
  source 1..2154: mol_type = other DNA
atgtttcgcgaccaagttggcgtgcttgcaggttggttcaagggttggaacgagtgcgagcagacagttgccctcctgagtctgctcaagcgcgtttcccagacacaggcccggtttctccaactctgccttgaacactccctcgccgattgcgccgagctccacgtgttggagagggaagcaaatagccctggcatcattaatcagtggcagcaggagtcaaaagataaggtgatctcactactgctcactcacctgccattactgaaacccggcaacctagacgctaaggtggaatacatgaagctgctgccgaaaattctggcgcactccattgaacacaatcagcacattgaagaaagtcgacagttactgtcatacgctctgattcaccctgccacgagcttggaagatcggtctgccctcgccatgtggctgaaccatctcgaggacaggacctccacaagcttcgggggtcagaaccgaggccgttcagacagcgtggattacggccagacccactactaccaccaacgccagaatagcgatgacaagttaaatggctggcagaactcgagagattccggcatttgtataaacgcaagcaactggcaggacaagagtatgggatgcgagaatggccatgtgccattatactcttcctcttccgtgcccacaaccatcaatactatcggaacttctacatctacaatcctgtctggccaagcgcaccactcccctttgaaaaggtccgtctcactgacgccccccatgaatgttcctaatcagcccttaggtcacggatggatgagccacgaagatctcagagcacggggccctcagtgcctcccatccgatcatgctcccttgagcccacagtccagcgtggcaagctccggaagcggcgggtccgagcacttggaagatcagaccacggccagaaacacattccaagaggaaggcagcggaatgaaagacgtgcccgcctggttgaaatcactccgtctacacaagtacgctgcactgttttcccaaatgacttacgaggagatgatggcactaacagagtgccagctggaagcccaaaacgttactaagggcgccagacataagatcgtgatcagcatccagaagcttaaggaacggcaaaacttgctcaagtcccttgagcgcgacattatagaaggaggaagtctgaggattccgctccaagagcttcatcagatgattctgacacccatcaaagcctactcttctccaagtaccacacccgaggcccgtcgacgcgagccacaagctcccaggcagccaagccttatgggccctgagtcacagagtcctgattgcaaagacggagcggctgcaaccggcgctactgccacgccctccgccggtgctagcggggggctgcaaccacaccagttgagcagctgcgatggcgaactggccgtggctcccctgccggagggcgatctgcctggccagtttactcgggtcatggggaaggtgtgtacacagctgctggtgtcgcggccagatgaggaaaatatctccagctatcttcagctgattgacaaatgcctgattcacgaggcgtttaccgaaacacagaagaagagattgctatcatggaaacaacaggttcagaagctcttccgctcttttccgcggaagacccttctcgacatcagcggctatcgccaacagcgtaaccgcgggtttggccagtccaactcccttccgactgctggaagcgtggggggaggtatggggagaaggaacccacgacagtaccagataccatccaggaatgtaccgagtgctagattgggtctcctcggaacgtcggggttcgtgtcatcgaatcaaaggaataccacagcaactccaactataatgaagcagggcaggcagaatttgtggtttgcaaatcccggagggtccaactccatgcccagtaggacccattcatccgtccagcgaacaaggtcattaccagtgcacaccagccctcaaaatatgcttatgtttcaacagcccgaattccagctgcctgtcacggagccagacatcaataaccgtctggaatctctgtgtctgtccatgaccgaacacgctctcggcgacggagtggatcgcacctccactatatag

SEQ ID NO: 136374 - DNA, 2157 bp, synthetic construct
  misc_feature 1..2157: note = Description of Artificial Sequence: Synthetic coding sequence
  source 1..2157: mol_type = other DNA
atgatgtttagagatcaggtgggagtgttggcagggtggtttaaagggtggaatgagtgcgagcagactgttgcgctgctatccttgctgaaacgggtttctcaaactcaggccaggtttctgcagctttgcctggagcattcactggctgactgcgctgagctccacgtgttggagagggaggcgaacagcccgggtataattaaccagtggcagcaagagtcaaaggacaaggtgatttccctgttgcttacccatctccccctccttaaacccggcaatctcgatgctaaggtggaatacatgaagttactgcctaagatcctcgctcatagtatcgaacacaatcagcatatcgaagaatctcgccagctcctgtcgtatgcactcatccatcccgcgactagtctggaggatcgctcggcactcgcgatgtggctaaaccatttggaggatcgcacttccacatcttttggcgggcagaatagggggcggtccgactctgtggactatggccagacccactattaccaccaaagacagaattcggacgataaattgaacggatggcagaatagcagggattctgggatctgtataaacgcctctaactggcaagacaaaagcatgggatgcgaaaatggccacgtgcctttgtattcaagctcctccgtgcccacgactataaacaccattggcacttcaacctccaccatcctgtcggggcaagctcatcactcacccctgaaacgctctgtgagcctgacccctcctatgaatgtgcctaatcagccgctggggcatggctggatgagccacgaagatctgcgcgcccgtgggcctcagtgcctgccctcagatcacgcgccactcagccctcagagttccgtggccagctctggatccggaggctctgagcacttagaggatcagacaacagcacgcaatacattccaggaagagggatccggcatgaaagacgtgcctgcttggctgaagagcctgcgcctgcataagtatgcggcactctttagtcagatgacttatgaagagatgatggccctgactgaatgtcagctcgaagctcagaatgtgactaagggggcacggcacaagattgtgatttcaattcagaaacttaaagagaggcagaatctcctcaaatccctggagcgtgacattatcgaaggggggtcactgaggatcccattgcaggagctgcaccagatgattttaaccccaataaaagcttatagttccccctctacgacccctgaagcgagaagacgagagccccaggcgcctcgacagccctccctgatgggacccgaatcacagtcccccgactgcaaggatggggcggcagctacgggggccactgcaacaccctctgcgggcgcctcaggcggtctgcagccccaccagctgagttcgtgtgatggtgaactagccgtggctccactccctgaaggagacctgccgggtcagtttacccgcgtgatgggcaaagtttgcactcagctcctggtgtccagacctgacgaggagaacatatcctcttacctgcaacttatagataagtgtctaattcacgaagcgttcactgagacacagaagaaacggctgcttagttggaagcagcaagtacaaaaactattcaggtctttcccaagaaaaaccctgttggacatatccggttacaggcaacagcgaaatagaggcttcggtcagtccaattctttgccgacggctgggtccgtcgggggaggcatgggccgtagaaaccctagacaataccagatcccatcaaggaatgtgccctccgcacgactgggattgttagggacaagtgggtttgtatcgtccaaccaacggaataccaccgccacacccacgattatgaagcaaggacgccagaatttgtggtttgctaaccctggaggaagtaattctatgccatcccggacacacagttccgtccagagaacccgcagtctgcctgtgcatacttcaccccagaatatgctcatgtttcagcaaccggaatttcagctgccagtgacagagccggatatcaacaacaggcttgagagtctctgcctgtccatgaccgagcacgctctgggcgatggcgtggatcgcacatctaccatttag

SEQ ID NO: 136375 - DNA, 2157 bp, synthetic construct
  misc_feature 1..2157: note = Description of Artificial Sequence: Synthetic coding sequence
  source 1..2157: mol_type = other DNA
atgatgtttagagatcaagtgggagtgctggccggctggttcaagggttggaatgagtgcgagcagactgtggcactgctgtccctcttgaagagggtctcccaaacacaagctagattcctacagttgtgtctggaacactccttggcagattgcgccgagctccacgttctggagagagaagccaattctcccggtatcatcaaccagtggcagcaggaatccaaggacaaggtgatctccctgctgctcacgcacctaccactgctgaagccaggaaatttggatgctaaagtggaatatatgaagctccttcccaaaattctggcccattctatagagcacaatcagcacattgaggaatcccgccagctattgtcctatgcactcatccatcccgctaccagtctggaggacagaagtgctctcgctatgtggctgaatcatctcgaagaccgaacgagcacgagctttgggggccagaaccgaggcagaagtgactccgtggattacggacagacccactactaccaccagcggcagaacagcgacgacaagctgaatgggtggcagaactcccgcgactctgggatctgtatcaatgcctctaactggcaggacaaatccatggggtgcgagaatggtcatgtgcccctgtacagtagctctagtgtgcctacaaccataaacactataggtacaagtacgtccacaatcctctcagggcaggcccaccattccccattaaagagatccgtatctctcaccccaccgatgaacgtccctaaccaacctcttggacatggctggatgtctcatgaggatttgcgagcgcgaggtccccagtgcttgccttcggaccacgctcctctgagcccacaatcaagcgttgcatcttccgggagcggaggatcagagcatctcgaagaccagaccaccgctcgaaacacattccaggaggaaggatccgggatgaaagatgttcccgcgtggctgaagagcctcagactgcacaagtacgcagctctgttctcccagatgacgtacgaggaaatgatggcacttacagagtgccagctcgaggcccagaatgtgaccaagggggctagacataagatcgttatcagcattcaaaagctgaaagagagacagaatctgcttaagtccctggagcgggacatcatcgaaggaggcagcctgcgcatcccactgcaggaactgcaccagatgatattgacgccaatcaaggcttactccagcccatcaactacaccagaggccaggagacgtgagcctcaggcaccaaggcagccctccctcatgggtccagagtcccaaagccctgattgtaaagacggggcagctgccaccggggcgacggcaactccctctgcaggtgcttcaggaggcctgcagcctcatcagctgtcatcctgtgacggcgaactcgctgtagcccccttaccagagggggacctccctgggcagtttacaagggtaatgggtaaagtgtgtacacaactcctggtctcacgaccagacgaagagaacattagtagctaccttcaactgatagacaagtgcctgatacatgaggccttcaccgagactcagaagaaacgcttgttgtcttggaaacagcaggttcagaagctcttcagaagcttcccgagaaaaaccctgctggatatatctgggtatcgccagcagaggaaccggggcttcggccaaagcaatagcctgccgaccgctggcagtgtaggcggtggcatgggcaggagaaacccccgacagtatcagattccaagtagaaacgtgccttcagcacgcctcggactactgggcacttccgggttcgtctcttcaaatcagcgtaacacaactgccacaccgacgattatgaagcagggacgccaaaacctttggttcgccaacccgggaggcagtaatagcatgccttcccgcactcattcttctgtccagagaactcgctcgttgccagtccatactagcccacagaatatgttaatgttccagcaacccgaatttcagctacccgtaacagagccagatatcaataaccggctggaatctctgtgtttgtccatgactgaacacgccttaggagacggagtggaccgcacctccactatctag

SEQ ID NO: 136376 - DNA, 1038 bp, synthetic construct
  misc_feature 1..1038: note = Description of Artificial Sequence: Synthetic coding sequence
  source 1..1038: mol_type = other DNA
atgattctgacccctattaaagcctattcatctcctagtaccactccggaggcccgccggcgtgagcctcaagcacctcgccagccctctctgatgggccctgagagtcagagccccgactgcaaagatggagctgcggctaccggcgctacagcgactccgagtgctggagcttccggaggtctgcagccacatcaactctcctcttgtgacggggagctcgccgtagcacctcttcctgaaggcgatctgcccggacagttcactagagtgatggggaaagtctgtactcagctgctcgtatcccggccagatgaagagaatatctccagctatctgcaactgattgataaatgcctgatacatgaggccttcactgaaacacagaaaaagcgccttctgtcatggaagcagcaggtacagaaattgttccgatcttttccaagaaaaactctcttagatattagcggatacaggcagcagcgtaacagaggattcggacagtctaactcgctgccgacagcaggatctgtgggggggggcatgggccggcgcaatcctaggcagtaccagattccatcccggaacgtcccctctgctcgactggggctgcttgggacatctggctttgttagttccaaccagcggaatacaacggccactccgactatcatgaagcagggtcggcagaatctctggtttgcgaatcctggggggagcaatagtatgccgagccgaacccactcctcagtgcagaggactcgctcactaccagttcacacatccccacagaatatgctcatgttccagcagccaggcagccaggtgcactcaggtctgtgtcttacggatttaagggggtggctttcattgagcggagctccatctatgcccgctctaactgtccccaaatcgtctcagggcgaattccaactgcctgtaactgaacctgatatcaacaatagactggagtcgctgtgtctgtctatgaccgaacacgccttgggcgacggggtggatcgcacctcgaccatttag

SEQ ID NO: 136377 - DNA, 981 bp, synthetic construct
  misc_feature 1..981: note = Description of Artificial Sequence: Synthetic coding sequence
  source 1..981: mol_type = other DNA
atggccggacccaaccagctttgcatcaggcgctggacaactaaacatgttgctgtttggctcaaagacgagggattcttcgagtacgtagatattctctgtaacaagcaccgtttagatggcatcacactgttgaccctcacagaatacgaccttcggagtcccccactggaaatcaaggtcttgggagacatcaaacgcctcatgttaagcgttcggaagttacaaaaaatccacatcgacgtgttagaggagatgggatacaatagcgactctcctatgggttctatgacgccgtttatcagtgctctccagtccaccgactggctgtgtaatggggagctttcccacgattgcgacggccctattacagatctgaactctgatcagtatcagtacatgaacggcaagaataagcattcagtgcggcgcctagacccggaatactggaaaacgattctgtcatgcatctacgtgttcattgtttttgggtttacatctttcattatggtgatcgtgcatgagagagtacccgacatgcagacttacccccccctacccgacatcttccttgatagcgtacccaggatcccttgggcttttgctatgactgaagtatgcgggatgatcctgtgctacatttggctgctcgtgcttctgctccataaacacagaagcatcttactgaggcggctctgctcccttatggggacagtgtttctactcaggtgctttaccatgttcgttaccagcttgagcgtaccaggccaacatctgcaatgtaccggtaagatttacggaagcgtctgggaaaaactgcaccgcgcctttgccatttggtccgggttcgggatgaccctaactggagtacacacttgtggagactacatgttttcaggccatacggtcgtgctcacaatgctcaacttctttgtgaccgaatgcaagtacttgttctcagcctcgatgaggattcgttag

SEQ ID NO: 136378 - DNA, 1437 bp, synthetic construct
  misc_feature 1..1437: note = Description of Artificial Sequence: Synthetic coding sequence
  source 1..1437: mol_type = other DNA
atgcctgcgagatctcgccaccggccacgtctccacagcggaagtcccccccgcgcgcccccccccccccttgaagcacttcatagtggcgaggcaggcagagctccagatagcgacggcgggtctgatgcagactcagaagtgggacctggctctcctacccgtaccgctgaggctgcagaggaagagatggccggccccaaccagctctgtatccggagatggacaactaaacatgtggctgtgtggctcaaagatgaggggtttttcgagtacgtggacatcctctgcaacaaacaccggctcgacgggataactctgttaacattaacggaatacgaccttaggtcaccgccactcgagatcaaggttctgggagatattaaacgacttatgctcagcgtgagaaagttgcagaagatccacatcgatgtcttagaggagatgggctacaattcggacagtccaatggggtctatgaccccgttcattagcgccttgcagagcacagattggctatgcaatggtgaactgagccatgattgcgatgggcccatcacagatctgaattctgaccagtaccaatatatgaacggaaaaaataaacattctgtgcggcggctagatcccgagtactggaagaccattcttagctgtatctatgttttcatcgtgttcggattcacaagctttataatggttattgtccacgagcgcgtccccgacatgcaaacataccccccacttcccgatatttttctcgattctgtgccccggatcccctgggcctttgctatgactgaggtgtgcggaatgatcctgtgctacatttggctactcgtcttgttgctccacaagcaccgcagcattctcctgagacggctctgcagtctgatgggcaccgtgtttcttctccggtgctttacaatgtttgtgactagtctctcagttcctggacagcacctccagtgcaccgggaaaatctacggaagtgtttgggaaaagctgcacagagcttttgccatatggtccggctttggcatgaccctgactggggtacacacatgcggcgattacatgttcagcggccataccgtcgttctcacgatgttaaatttttttgtgacggaatatactcccaggtcatggaattttctccatactttgagctgggtgctgaatttatttggcatcttctttatcttggccgctcacgagcattactccatcgacgtgttcatcgcattttatatcacaacacggctcttcctctattatcacactctcgccaacacacgcgcatatcaacagtctcggcgggcacgaatctggttccccatgttctccttttttgagtgcaatgtcaatggtactgtgccgaacgaatactgctggccttttagcaaaccagccataatgaagagactcattggctag

SEQ ID NO: 136379 - DNA, 765 bp, synthetic construct
  misc_feature 1..765: note = Description of Artificial Sequence: Synthetic coding sequence
  source 1..765: mol_type = other DNA
atggccggcccgaaccagctgtgcattaggagatggacgaccaagcacgtagccgtgtggctcaaggacgaggggttttttgagtacgtcgatatcctgtgtaacaaacacagactggacggcatcacactcttgacgttaactgaatatgatctgagaagccctcctctggaaatcaaagtcctgggggacattaaaaggctgatgttatctgtgagaaagctccagaagatccatatcgatgtcctcgaagaaatgggctataactctgacagcccgatgggttcaatgactccattcatcagcgcactgcaaagtactgactggctctgtaacggcgaactgtcacatgattgcgatggacccatcaccgacctgaacagcgaccagtaccaatacatgaatggcaagaataagcacagcgttagacgcctggacccggaatactggaagacaatcttgagttgcatatatgttttcatagtttttgggttcacctcattcattatggtgatcgtccacgagagggtgcccgatatgcagacttacccccctctgcctgatatctttttggattctgtgccgagaatcccctgggctttcgctatgaccgaagtatgtgggatgatcctgtgttatatctggctgcttgtgttgctgctccacaaacataggtcaatcctattgagacggttgtgttcactgatggggactgtgttcctgcttcggtgcttcacaatgttcgtcacttctctgtccgtgtag

SEQ ID NO: 136380 - DNA, 1248 bp, synthetic construct
  misc_feature 1..1248: note = Description of Artificial Sequence: Synthetic coding sequence
  source 1..1248: mol_type = other DNA
atggctggaccgaaccagttgtgtatccggcgatggacaaccaagcatgtcgctgtgtggttgaaggatgaaggctttttcgaatatgtcgacattctttgtaacaagcatcgattggatggaatcactctactaacacttaccgaatacgacctcagatcgcccccattggagatcaaagtcctcggggatatcaagagactcatgctatcagtccggaaattgcagaagatccatatagacgtgctggaagagatgggttacaactccgactcccccatgggctctatgacccctttcattagtgcgctgcaatccactgactggttatgcaatggagagctctctcatgactgcgatggtcctatcactgatctaaattccgaccagtaccaatatatgaacggtaagaacaagcacagcgttagaaggcttgacccggagtattggaaaacgattttgtcttgcatatacgtgtttatcgtgttcggctttacttccttcattatggtgattgttcacgagagagtgccggatatgcagacctatccacctttgcctgacattttcctggactccgtcccccggatcccttgggcttttgctatgacggaagtctgcggaatgatcttgtgctacatttggctgctggtcctcctgcttcacaagcatagaagtattctgctgcgtaggttgtgctccctcatgggcaccgtcttcctacttaggtgcttcacaatgtttgtcaccagccttagcgtgcccggccagcacctccagtgcaccggtaaaatttatggttccgtttgggaaaagctgcatagagcctttgctatatggtctggctttggaatgaccctgaccggcgtgcacacctgtggcgattacatgttctctggccataccgtagtgttaactatgcttaatttcttcgtgactgagtacacgccacggagctggaattttctccatacactgagctgggttctcaacctcttcggcatcttttttatactggctgcacacgagcactattccattgacgtgttcatagcattctatatcactactcgcctgtttctctactaccatactttagccaatacaagagcgtaccagcagagtcggcgagcccgcatatggttcccaatgttctccttcttcgagtgcaacgtcaacgggacagtcccaaatgaatactgctggccattctctaagccagcaattatgaaaaggcttatcgggtag

SEQ ID NO: 136381 - DNA, 4770 bp, synthetic construct
  misc_feature 1..4770: note = Description of Artificial Sequence: Synthetic coding sequence
  source 1..4770: mol_type = other DNA
atggccaaacagctcaatcttcccgaaaacactgacgactggacgaaagaggatgtgaatcaatggctcgaaagtcacaagatcgaccaaaaacaccgcgagatcctgacggaacaggatgttaatggagccgtcctgaagtggttaaagaaagagcatcttgtcgacatgggcatcactcacgggccagctattcagatagaagaactattcaaggaactgaggaaaacagccatagaagactctattcagacaagcaagatgggcaagcctagcaagaacgcaccaaaagatcagactgtatcacagaaggagcgcagagaaacctcgaaacagaagcagaaggggaaagagaacccggatatggcaaaccctagcgccatgtcaacgactgcaaaggggtctaagtctctgaaagtagagctgattgaggacaagattgactacacgaaagagcgccaaccctctatcgatctcacttgtgtatcttaccctttcgacgaattctccaatccctacagatataaacttgacttttcgttacagcccgagacaggcccggggaacctgatcgatcctatccatgagtttaaagctttcacaaacactgctactgccaccgaggaagacgtcaagatgaagttctctaatgaagtctttcgtttcgcctctgcctgcatgaactcgagaaccaacggtacaatccacttcggtgtcaaggacaaacctcatgggaaaatagtgggtatcaaggtcacaaatgacacaaaggaggctctgatcaaccattttaacttgatgatcaataagtatttcgaggaccatcaggttcagcaagccaaaaagtgtattagggagccccggtttgtggaggtcctgctgccgaactcaaccttatctgacaggtttgtgattgaagtcgatataatccctcagttttccgaatgtcagtacgactatttccagatcaagatgcagaattacaacaataagatttgggaacagtctaaaaagttttccctctttgttcgggacgggacatcctccaaggatattacaaagaataaggtagattttagagctttcaaagcagatttcaaaacattggccgagtcccgaaaggccgccgaagaaaaattccgggccaaaaccaataaaaaagaaagggagggccctaaattagtaaagctgctaacaggcaatcaagacctactggacaacagctattatgaacagtacattttggtaacgaacaagtgccatccggaccagacgaaacacctggattttctgaaggaaattaagtggttcgctgtcttagagttcgaccctgagagcaatattaacggcgtggtgaaggcctacaaggagtcccgggtagcaaatctgcattttccaagcgtgtacgtggaacaaaaaacaacccccaacgaaacaatctcaacactcaatttataccatcagccaagctggatattctgtaatggtcggttggacctggattccgaaaagtacaaacctttcgatccctcttcgtggcaaagggaaagagcaagtgatgtgaggaagctaataagtttcctgacgcacgaggacatcatgcccaggggaaaatttctggtagtttttttgctgctgtcgtccgtggatgacccaagggatccccttatcgagacattctgcgcgttttaccaagacttaaaggggatggagaatatcctgtgtatctgtgttcatccacacatttttcagggatggaaagatctcctcgaagcccggttgataaaacaccaggatgagatttccagtcagtgcatcagcgcattatcgctggaagaaattaacgggacaattctcaagctcaagagtgtgacccagagtagcaagaggctgctgcccagcatagggctgtccaccgtgttgttgaagaaggaagaagacatcatgacagcactcgaaattatttgcgagaacgagtgcgaagggactctcttggaaaaggataaaaacaaattcctcgagtttaaggctagtaaagaagaagatttctatcgtggaggaaaagtatcttggtggaacttttatttctcttcagagtcctattcttccccttttgtgaagagagacaaatatgagaggttggaagctatgatccagaattgtgccgattctagcaaacctacctcaaccaagataatccacctgtatcatcatccaggatgtgggggaactactctggctatgcacatcctgtgggagctgcggaagaagttccgctgcgcggttttgaagaacaaaaccgtcgatttctcagagatcggcgagcaagttacttccctgattacatacggcgctatgaacagacaggagtatgtccccgtacttctgctggtggacgattttgaggaacaggacaacgtgtacctgttgcagtattccattcagacagccatcgccaagaagtacattcgatacgagaagccacttgtgattatactgaattgtatgcggtcacagaatccagagaagagcgcacgcatccctgacagtattgctgtaattcagcaactttcaccgaaagaacagagggccttcgagctgaagttgaaggagatcaaggaacagcataaaaacttcgaggacttctatagttttatgatcatgaaaactaacttcaataaagaatatattgagaatgtggtgcgcaatattctgaaagggcagaatattttcacaaaagaggcaaaactgttcagctttctcgctctcctgaattcttatgttcctgatactacaatctctctctctcagtgtgaaaagtttttggggattggaaataaaaaagcattttggggaaccgagaagttcgaagacaagatgggaacgtattcaacgatcctgattaagacagaagtaattgaatgtgggaactactgtggcgtccggatcatacattcactgattgccgagttttccctagaggaattgaagaaatcgtatcatttgaataagtcacagatcatgctggatatgttaactgagaacttgttcttcgacactggaatgggtaaatccaaatttctgcaggatatgcataccttgcttctgaccagacatcgagacgaacatgagggtgagacagggaactggttcagcccatttattgaggctctgcacaaagacgagggcaacgaagcagtcgaagctgtgttattggagtccatccataggtttaatcccaatgccttcatctgccaggctctcgcacgacatttctacattaaaaaaaaagatttcggtaacgcgttaaactgggcaaagcaggctaaaattatcgagcctgacaacagttatatatcagacaccctcgggcaggtgtacaagagtaaaatacggtggtggattgaggagaacggaggaaatggaaacatctccgtggatgatctaatagcgttacttgatttggctgagcatgcctcatcagccttcaaggaaagccagcagcaatccgaggaccgagagtatgaggtgaaggagaggctctatcccaagagcaagaggaggtatgatacttataatatcgcggggtaccagggcgaaattgaggtcggcctctacaccatccaaatacttcagctaatccccttctttgacaacaaaaatgaactatctaagcgctacatggttaatttcgtgtctggctcttccgacataccaggcgaccctaacaatgaatacaaactggccctcaagaactatatcccgtacttgacgaaattaaaattttcactgaaaaagtccttcgacttcttcgacgaatatttcgtgttactcaagcctcgcaacaacatcaaacagaatgaagaggcaaaaacgcgtcgcaaggttgccggatactttaagaagtacgtcgatatcttctgcctcctcgaagagagccagaataacacagggctgggcagtaagttttcagagccccttcaggtcgaaaggtgtcgacggaacttggtggcccttaaagcagacaagttcagtgggttacttgagtacctgatcaaatcccaggaggatgcaatatctactatgaaatgcatcgtgaacgagtacaccttcctattagaacagtgtaccgtgaagatacaaagcaaggagaaactgaactttattctggctaacattatcttgtcatgtattcagccgacatcccggctcgtgaaacccgtagaaaaactcaaagaccagcttagggaagtgttacagccgattggccttacctatcagttctctgagccttactttctcgcttcgctccttttctggcctgagaatcagcagttggatcaacattcagagcagatgaaggagtacgctcaggccctgaagaattcttttaaaggccagtataaacacatgcacagaaccaagcaaccaattgcttattttttcctcggcaaaggcaagcgacttgaacgcctggtacacaaggggaagatcgaccagtgttttaaaaagaccccagatattaacagcctttggcagtcgggcgacgtttggaaagaggaaaaggtccaggaactgctgctcagactccagggcagagctgaaaacaactgtctgtacattgagtatgggatcaacgaaaaaatcaccatcccaataactccggcctttctgggccagctccggtcggggcggagcattgaaaaggtctctttctatctgggcttctcaatcggcggcccactagcttacgatattgagattgtctag

SEQ ID NO: 136382 - DNA, 3852 bp, synthetic construct
  misc_feature 1..3852: note = Description of Artificial Sequence: Synthetic coding sequence
  source 1..3852: mol_type = other DNA
atggccaaacaattgaatcttcctgaaaacactgacgattggacaaaggaagacgtgaaccagtggctagaatcccataaaatagaccagaagcacagagagattcttacagagcaggacgtgaatggagccgtgttaaagtggttgaaaaaggagcaccttgtagacatgggtattacacacggacccgctatccagatcgaggagctgttcaaagagctgagaaagacagccatcgaggactctattcagaccagcaagatgggcaagccctcaaagaacgccccaaaagaccagactgtcagccagaaggagcgcagagagacctcaaagcaaaagcaaaaaggaaaggaaaaccccgacatggcgaacccgtctgccatgtccaccaccgcaaaagggagcaagtcgcttaaggtcgagttaatcgaggataaaatagactacaccaaggagcgccagccatccatcgacctgacttgtgtctcatacccttttgacgagttttctaacccatacaggtataaattggacttctccctccaaccagaaaccggccctggcaatttgatcgaccccattcacgaatttaaagctttcactaacacggccacagccactgaagaggatgtgaaaatgaaatttagtaatgaagtattcagattcgctagtgcctgcatgaactccagaaccaatggtactattcatttcggagtcaaggataagccccatggaaagatcgtgggcattaaggttaccaacgatacaaaggaagccctaatcaaccattttaatctcatgatcaataaatacttcgaggaccaccaggtgcagcaggcaaagaagtgcatcagggagccaaggttcgtggaggtcttactccccaattctacgctcagcgatcgttttgttattgaggttgatattatcccccagttttcagaatgtcaatatgactactttcagattaagatgcagaactataacaacaaaatttgggaacagagcaaaaagttttccctgttcgtgcgagacggcacaagcagcaaagacatcaccaaaaataaggtagacttcagagcctttaaagccgatttcaaaacccttgccgagtctaggaaggccgctgaggagaagttcagggccaagaccaataaaaaggaacgagagggccccaaattagttaaattgcttaccggtaatcaggatctgttggacaatagttattacgagcagtatatcctggttacaaataagtgccaccctgaccaaaccaaacatcttgacttcctgaaggagatcaagtggtttgccgtcctggaattcgaccccgagtctaatatcaatggtgtggtgaaggcttacaaggagagcagggtggctaatttgcatttcccatctgtgtatgttgaacagaaaacaacccccaatgagacaatatctaccctcaatctgtaccatcagcctagttggattttctgcaatgggaggctggatctcgattccgaaaagtacaaaccgtttgacccgtcgtcgtggcagagagagcgggcctccgacgtccgcaaactgatcagcttcctaacacacgaggatattatgccccgcgggaagttcctggtggtttttctcctcctgtccagcgttgatgacccgcgggatccgctgatagaaactttctgcgccttctatcaagatctgaagggaatggaaaatatcctgtgtatctgcgtacaccctcatattttccagggttggaaagatctactggaggcacgattgatcaagcaccaggatgaaatcagctcacaatgcatctcagctctatcacttgaggagattaacggcactattctcaaattaaagtctgtgacacaatcctctaagaggctgctgccgtctatcggtctatcgacagtgctgttgaagaaggaagaggacattatgacagctcttgagatcatatgcgagaacgagtgcgaaggaactctgttggaaaaagacaagaacaagttcttggaatttaaggcctccaaagaggaagatttttaccgaggcggaaaggtgtcatggtggaatttttacttttccagcgaatcatattcaagtcctttcgtgaaacgagacaagtacgagcgactggaggccatgattcagaactgtgcagatagcagcaaaccaacgtctacaaagatcatccacctctaccaccaccccggatgtggtgggacaaccctggcaatgcacatactctgggagcttagaaaaaaatttcgctgtgccgttctgaagaataagactgtcgacttttccgagataggcgaacaggttacaagtcttattacctatggtgcaatgaaccgccaggaatacgttccagtgctcttgctcgtggacgattttgaggagcaggataatgtttacctgctgcagtatagtatacagacagcgatcgctaaaaagtatattagatatgagaagcccttggtgattatcttgaactgtatgagatctcaaaaccccgagaaatctgcaaggattcccgactccatcgcggtaatccagcagttgtcacctaaagagcagagggcctttgagctgaaacttaaggaaatcaaggagcagcataagaacttcgaggacttctatagtttcatgattatgaagaccaacttcaacaaggagtatattgagaatgtggttcggaacattcttaaggggcagaacatctttaccaaagaggcaaaactcttcagttttctggccttactgaattcatacgtgccagacacgacaatttctctttcacagtgcgagaagtttctgggtatcggcaacaaaaaagccttttggggcactgaaaagtttgaggacaaaatggggacatactctactatcctaatcaagacagaggtcatcgaatgtggaaattactgtggcgtacgcatcattcactctcttatcgccgagttctctctggaggagttgaagaaatcataccatctcaataagtcgcagattatgctggatatgcttactgaaaatctcttttttgacactggcatgggcaagtccaagtttttacaggatatgcacaccctactactgacacgacaccgggacgagcacgaaggcgagacaggcaattggttctctccattcattgaggctctccataaggacgagggcaatgaggcagtcgaagcagtgcttctggagtccatccaccgcttcaacccgaacgcattcatttgtcaggccctggcgcgacacttctatataaaaaaaaaggactttggcaatgctttgaattgggccaaacaagccaagatcatcgaacctgataatagttatattagcgatactctgggccaggtatataagtctaaaatcagatggtggatcgaggaaaatggcggcaatggaaacatcagtgtggatgacttgatcgccttgctggatctcgcagaacatgctagctctgcctttaaggagagccagcagcaatccgaggacagggaatacgaagtgaaggagagactttaccctaaatccaaacgaaggtacgatacctataatatcgctgggtaccaaggagaaattgaagttggcctttatactatccagattctccagttgatcccattctttgataataaaaacgaactgagtaagagatatatggtcaatttcgtgtctggcagctcagacatccctggtgaccctaacaacgagtacaaactagctctgaagaactatattccatacctgactaaattaaagttttcgttgaaaaaatcatttgactttttcgatgaatactttgtgttgcttaaacctaggaacaactag

SEQ ID NO: 136383 - DNA, 4755 bp, synthetic construct
  misc_feature 1..4755: note = Description of Artificial Sequence: Synthetic coding sequence
  source 1..4755: mol_type = other DNA
atgtctaagcaagtgtctctgccagagatgatcaaggactggacaaaggagcatgttaagaaatgggtgaacgaggatcttaagatcaacgagcagtatggacagattctcttgtcggaggaagtcactggcctggtgcttcaggagctgaccgagaaggaccttgttgagatgggtcttccttgggggcccgcgttgctgatcaagcgctcatataacaaattgaattccaaaagccctgagtccgacaaccacgaccctgggcagttggataattctaagccgtctaagacggagcatcagaagaatcccaagcacactaagaaggaggaggagaatagcatgagtagcaacatcgactacgaccctcgcgaaatccgcgacattaagcaggaagaaagtattctgatgaaggaaaatgtgcttgatgaggtggctaatgccaaacataagaagaagggcaaattaaagcctgaacagctaacctgtatgccctaccctttcgaccagttccacgactctcatcgatacatcgagcactatacactgcaacctgagactggcgcacttaacttaattgatcccattcacgagttcaaggcactcactaatactgaaactgcaaccgaagtggatattaaaatgaaattctccaacgaagtgtttcgcttcgcctcagcttgtatgaatagccgcactaatggtacgatccacttcggtgttaaggataaacctcacggggagatagtgggggtcaagatcacgtcaaaggcggcctttatcgaccattttaacgtgatgatcaaaaagtatttcgaagagagtgagattaacgaggccaaaaaatgtattagggaaccccggttcgttgaagtgctgctccagaacaatactcctagtgatcgatttgtgatcgaagtcgatactatcccaaagcacagtatttgtaacgacaagtatttctatattcagatgcagatttgtaaagataaaatatggaaacaaaaccagaatttgagcctcttcgtcagggagggagcttccagcagggacatactagcgaatagcaaacaaagagacgtggactttaaggcctttctccagaatcttaagagcctcgtggcaagccgcaaggaagcggaggaagaatatggaatgaaagcaatgaaaaaagagtctgagggcctcaagcttgttaagctcctcattggaaatagagattcgctggacaatagctattacgactggtatatcctcgttacaaacaagtgccacccaaaccaaatcaaacacctcgatttcctaaaggaaattaagtggtttgccgtcttggagttcgatcctgaaagtatgatcaatggcgtcgtgaaggcctataaggagagcagggtggccaatctgcactttcccaatcaatacgaagacaaaactaccaacatgtgggagaagatctccactctcaatttgtaccagcagcccagctggatcttctgcaatggtcgcagcgacctgaagtcggaaacttacaaacctctggaacctcatctgtggcaacgggaaagggcgagcgaagttcggaagctgatcctgttcttgaccgatgaaaatattatgacaagaggcaagtttttagtcgttttcctgctccttagttccgtggagtctccaggggaccctctgattgagactttctgggccttttaccaggcgttaaagggaatggagaacatgctttgcatttcagttaattctcacatttaccagcggtggaaagatctgctgcagacccgcatgaagatggaggatgagctcactaaccactccatttctacactgaacatcgagttggttaactccacaattctgaagctaaaaagcgtaaccaggagttcgcgccgatttctgcccgctcgcggcagctcaagtgtgattctcgaaaaaaagaaagaggacgtgttgaccgccctggagatcctctgcgagaacgagtgcactgagactgacattgagaaagataaaagcaaatttctcgaatttaaaaagagtaaggaggagcacttttaccgaggtggcaaggtgagctggtggaacttttacttctcaagtgaaaactactccagcgactttgtcaaacgagattcatacgaaaagctgaaagatttaattcactgttgggcagagagcccaaaacccatattcgcgaagataataaatctgtaccaccatccaggttgcggagggactaccctcgccatgcacgtgctttgggacttgaagaagaactttcgctgcgccgtgctgaagaacaaaaccacagatttcgcagagatcgcagagcaggtgatcaatctggtcacctaccgcgctaaaagccaccaggattatatcccagtcctgctgctggttgacgatttcgaggagcaggaaaacgtgtactttctgcagaatgccattcatagcgtgttggccgaaaaagaccttaggtatgagaagaccttagttatcatcctgaattgtatgaggtcgaggaatcctgacgaatctgccaaactggccgactcaatcgcgttgaactatcagctgagctccaaggaacaacgtgcctttggtgccaagcttaaggagatcgagaaacagcacaagaattgcgagaatttctacagcttcatgattatgaagtccaacttcgatgagacctacatcgagaacgttgtccgcaatatcctcaagggccaggatgtcgactctaaagaagcacagctcatctcctttctggcactgctctcaagctacgtaacagattccacgattagtgtgagtcagtgtgagatctttctgggaattatttacaccagtacaccatgggagccggagtcactggaagacaagatgggaacgtacagtaccttacttattaaaacagaggtcgcagagtacggccgttacacgggagttcgaataattcaccctcttatcgctctgtattgcctgaaagagcttgaaaggtcatatcaccttgataaatgtcagatagcgctgaatatcctcgaggaaaatctgttctacgactccggcatcggccgtgacaagttccagcacgatgtgcaaaccttgctgctcacacgccaacggaaggtttatggcgatgagactgacaccctttttagccctctgatggaggcgctgcagaacaaggacattgaaaaggtcctatctgcgggatccaggcggttcccgcagaatgcattcatctgtcaagccttagctcggcacttctatattaaggagaaagactttaacacagctctggactgggcccgacaggccaagatgaaggccccaaaaaatagctacattagcgatacattgggccaggtatacaagtcagagattaaatggtggctggatggaaacaagaattgtcgtagcatcaccgtgaacgatctgacccacttgctcgaggccgctgagaaggcatccagagcttttaaggagtcccaaaggcagacagatagcaagaactatgaaaccgaaaactggtccccccagaagtcacagagaaggtacgacatgtataacacagcctgtttcttaggagagatcgaagtgggtttgtacacaatccagattctgcagcttacacccttttttcacaaggaaaatgagctttcaaaaaagcatatggtgcagtttctatcaggcaagtggacgattccgcctgatccacgcaacgagtgttatctcgccctcagcaaattcacctcccacctgaagaatctgcagagcgatctgaagagatgttttgactttttcatagattacatggtccttcttaaaatgcgttatacccagaaggagattgcagagattatgctctccaaaaaggtctcacggtgtttcaggaaatacaccgaacttttttgccatctggacccctgtctgctacagagcaaagagtcacagctacttcaggaggagaactgtcgaaagaagctagaagccctgagggccgatcgcttcgctggactgctcgaatacctgaacccaaactacaaggacgccacaacgatggagtctatcgttaacgagtatgccttcctgctgcagcaaaactcaaagaagcctatgacgaacgagaagcaaaatagcattcttgcaaacattatcctcagctgcctgaagccaaattccaaactaattcagcctctgacaactctaaagaagcaactccgagaggtgttacaattcgtggggctttctcaccagtatcccggtccctatttcctggcttgcctcctcttttggccagagaatcaggagctggaccaggatagcaagttaattgagaagtatgttagttctctcaataggagctttagaggccaatacaagagaatgtgcaggagcaagcaagccagcactctgttttaccttggcaaacggaaaggcttgaacagtattgtgcataaggctaagatagagcaatacttcgacaaagcccaaaacaccaactcactctggcattccggggacgtctggaagaagaatgaagtgaaagatctactgaggaggctgacgggacaggcagaaggaaagcttattagcgtcgagtatgggaccgaggaaaagatcaaaatcccagttatcagtgtatatagcggacctctgcggagcggtcgtaacatcgagcgtgtcagcttttacttggggttctctatagaaggaccgcttgcttacgacattgaagttatttag

SEQ ID NO: 136384 - DNA, 1221 bp, synthetic construct
  misc_feature 1..1221: note = Description of Artificial Sequence: Synthetic coding sequence
  source 1..1221: mol_type = other DNA
atgtcaaagcaggtgtcgcttcctgaaatgatcaaggactggacaaaggaacacgtgaagaagtgggttaatgaggatcttaagattaacgagcagtacggccagattctactgtccgaagaagttaccggtctcgtgcttcaggagctaactgagaaagacctggttgaaatgggcttgccgtggggcccagctctgctcatcaagagatcgtacaacaagctgaactcgaagtcgccagaatcagataatcacgaccctggtcagcttgacaactcgaagccctcaaaaacagagcatcagaagaacccaaaacataccaagaaagaggaggagaatagtatgtcatccaatatcgattatgatcctagagagattagagacattaagcaggaagagtctatcctgatgaaggagaacgtgttagatgaggtcgcaaacgcgaagcacaaaaagaaactggaggccctgcgcgcagatcgtttcgctggattgcttgagtatctaaaccctaactataaggacgccacgacaatggaaagcattgtgaatgaatacgcattccttctacagcaaaacagcaagaaacctatgacaaacgaaaaacaaaattccatcctggcaaacataattctgtcctgcctcaagcccaactcgaagctaattcagcccctgacaacacttaaaaaacaattgcgggaggtgcttcagttcgtaggcttgagtcaccagtaccccggtccatattttcttgcatgcttgctgttctggccggagaaccaggaactagatcaggacagcaaactcattgagaaatatgttagtagtctgaatcgctccttccggggccagtacaaaaggatgtgccgctccaaacaggcctctactctgttttacttgggaaaacggaagggtctgaactctatcgtgcataaggcaaaaattgaacagtactttgacaaagctcagaacactaatagcctgtggcacagtggagacgtgtggaagaagaatgaggtgaaagatcttcttagacggctcacaggccaggccgaaggtaagctgatatctgtggaatatggaacagaagaaaagatcaaaattcccgtgatctccgtgtactccggccctctgcgtagcggccgcaacattgaacgggtctccttctatctgggattctccatagaagggccgttagcatacgacattgaggtcatctag

SEQ ID NO: 136385 - DNA, 4755 bp, synthetic construct
  misc_feature 1..4755: note = Description of Artificial Sequence: Synthetic coding sequence
  source 1..4755: mol_type = other DNA
atgtccaagcaggtgtccctccctgagatgattaaggactggactaaagagcatgttaaaaagtgggttaacgaagatttgaaaattaatgaacagtacgggcagatcctgctttccgaagaggtcaccggtcttgttctgcaggaacttaccgagaaggacctggtggagatgggtttgccatggggtcccgctctgctaatcaagcgctcttacaacaaattaaactccaagtctcctgagagcgataatcacgaccctgggcaactggacaactccaagccctccaaaacagagcatcagaagaatcctaagcacacgaagaaagaggaagaaaactccatgtcaagcaatatcgattatgacccccgggaaattcgtgacatcaaacaggaagaaagcatcctgatgaaggagaacgttcttgacgaggtcgccaacgccaagcacaagaaaaagggcaagttaaagccagagcagctaacttgcatgccctacccttttgaccagttccatgacagccacagatacattgagcactatacgctgcaacccgagacaggcgccctgaacctcatcgatccaatacacgagtttaaggccctgaccaacacggagactgctactgaggttgatattaagatgaaattcagtaacgaagtctttcggttcgcatctgcatgcatgaactcaaggaccaacgggaccattcactttggggttaaggacaaacctcacggtgagattgtcggggtgaaaattactagtaaagctgcgttcatcgaccactttaatgtcatgattaaaaagtactttgaagaatcggaaattaacgaagctaagaagtgcattcgagagcctcgattcgtagaggtgctcttgcagaacaacactccatcagacaggttcgtgatcgaggtggacactattcctaagcattctatatgcaatgacaaatacttttatattcagatgcagatctgtaaggataaaatctggaagcagaatcaaaatttgtcattgttcgtccgtgaaggcgcatcgtcccgcgatatcctggcgaactcgaagcagcgcgacgttgattttaaggcctttctgcagaacctcaaaagtctcgtagcaagtaggaaggaggccgaggaagagtacggcatgaaggcaatgaagaaagagtcagagggactgaaactggtcaagctgctcatcggcaatagggacagtttggataactcttactacgattggtacatccttgtcacaaacaaatgccacccaaaccagattaaacacctcgacttcttaaaggaaataaaatggtttgcagtgctagagttcgaccctgagagcatgatcaatggagtagtcaaagcatacaaggagagcagggtagctaatcttcacttcccaaatcaatatgaagataagacaaccaacatgtgggaaaagatctccaccctgaacctttaccagcaaccctcatggatcttctgtaatgggcggtccgatctgaagtcagagacatacaaacccctggagccccacttgtggcagcgagaaagggcaagtgaggtacgaaaattaatcctgttcctgaccgacgaaaatattatgacacggggtaagtttcttgtagtgtttctcctgctgagctccgtcgaatccccaggggaccctttaatcgagaccttctgggccttctaccaggcactaaaaggcatggaaaatatgctctgcatttctgttaatagccatatttaccagagatggaaggacctgctacaaacaaggatgaaaatggaggacgagctgaccaaccactctatcagcacactgaatattgaattggttaatagtaccattttgaaactgaaaagcgtcaccaggtccagcagacggttcctgccagcccggggtagctcctccgtcatacttgagaaaaaaaaagaggatgttcttactgccttagagattctctgtgagaatgaatgtacggagacagatatcgaaaaggacaaaagcaaattcctggagttcaagaagtcaaaggaggaacacttctatagaggtggcaaagtgagctggtggaatttttatttcagtagtgagaactattctagcgacttcgtgaaaagggacagttatgaaaaactgaaagacctaatccattgttgggcagagtcgccaaagccaatctttgccaaaattatcaatctgtaccatcaccccggttgtggaggcacgacgctggctatgcatgtattgtgggatctgaaaaaaaactttcggtgtgctgttctgaaaaacaagaccacggactttgctgaaatcgcagaacaggttattaatttagtaacttatcgtgccaaaagtcaccaagactacatccccgtcctgctgctggtagacgactttgaagagcaggagaacgtatacttcctccagaatgccatacactccgtgctggcggagaaggacctgcggtatgaaaaaacactggtgatcatactgaattgcatgcgttcccggaaccccgatgagagtgcaaaacttgcagacagcatcgcactcaattaccaactgtcgtcgaaagaacagcgtgccttcggcgccaagttgaaagagatcgagaagcagcacaaaaattgcgagaacttctatagtttcatgatcatgaagagtaacttcgacgaaacttatatagaaaacgtcgtccgcaacatactgaaggggcaagacgtggatagcaaggaggcacagcttattagcttcctagctctgctgtcttcctacgtcaccgactccacgattagcgtgtcccagtgtgagatttttctcggtatcatctacactagcacaccatgggagccggagtccctggaggacaagatgggaacttattcgacactgctgatcaagaccgaggtagcagagtacgggaggtatactggggtgcggataattcatcctttaatagccctgtactgcctaaaggagctggaacgcagctaccaccttgataaatgtcagatcgccttgaatatcctagaggagaacttattttacgactcgggaataggccgggataagttccagcacgatgtacagactttacttcttaccaggcaaagaaaagtgtacggagatgagacagacactctgttctctccacttatggaggcattacagaataaagacatagagaaagtgctaagcgctggttcccggagatttccccagaatgccttcatttgccaagctctggccagacacttctacatcaaggagaaggattttaataccgcactcgactgggctagacaggctaagatgaaagcaccgaaaaacagctacatttcagatacccttggacaagtgtataaatccgagatcaaatggtggctcgacggcaacaaaaactgcaggtcaattactgtcaatgatctgactcaccttttggaagccgccgagaaggccagtagagcttttaaagaatcccagcgtcagaccgattccaagaattacgaaaccgagaactggtccccgcagaagtcccagcgaagatacgacatgtacaatacagcgtgttttctaggagaaatcgaggtgggactttatactatccagatcctgcagcttactcctttctttcacaaggagaatgagctgagcaaaaagcacatggtgcaatttctgtctgggaagtggactatcccaccagaccctcgtaacgaatgctaccttgccctgagcaaatttacttcacatcttaagaatctccagagtgatttgaagaggtgtttcgacttcttcatcgactatatggtgttgctgaagatgcgctatactcagaaggaaatcgccgagatcatgcttagcaagaaagttagcaggtgttttcgcaagtatacagaacttttctgccacctggacccttgcttactgcagtcaaaggagtctcagttactgcaagaagaaaactgtagaaagaagcttgaggcacttagagccgacaggttcgccggcttgctggaatatttaaacccaaactataaagatgccaccaccatggagtccattgtcaacgaatatgcttttcttctccaacagaacagcaagaagccaatgactaatgagaagcagaacagtattcttgccaatatcatcctgtcttgcctcaagcctaacagcaagcttatccagcccctgaccactctgaagaaacaactccgtgaggtgttgcagtttgtgggcctgagccaccagtacccagggccatactttctggcctgtctgctcttttggcccgaaaaccaggagctcgatcaagacagcaagttgatagaaaaatatgtatcatcactgaaccgctcctttaggggccagtacaagcgtatgtgtaggtcaaagcaggcctccacacttttttatttgggaaagagaaaggggctgaatagcatagttcataaagctaagattgagcagtatttcgacaaggcacagaatactaatagcctctggcattccggtgatgtatggaaaaagaacgaagtgaaagatcttctgcgtcgcctgacgggccaggcggagggcaagcttatctccgttgagtacggcactgaggaaaagatcaagattccggtcatttctgtgtatagcggcccattgaggagcggccgaaacatcgagcgcgtgtcattctatttgggcttctctatcgagggaccactggcatacgacatcgaggttatctag

SEQ ID NO: 136386 - DNA, 213 bp, synthetic construct
  misc_feature 1..213: note = Description of Artificial Sequence: Synthetic coding sequence
  source 1..213: mol_type = other DNA
atgtcgaagcaggtgtctttgcctgaaatgattaaagactggaccaaggaacacgtaaagaaatgggttaacgaagacttgaagattaatgaacagtatggccagattctgctgagcgaggaagttaccggactggttctgcaggaacttacggaaaaggaccttgtggaaatgggactgccttgggggcccgcattactgatcaagcgctag

SEQ ID NO: 136387 - DNA, 4755 bp, synthetic construct
  misc_feature 1..4755: note = Description of Artificial Sequence: Synthetic coding sequence
  source 1..4755: mol_type = other DNA
atgtccaagcaggtgagcctgccagaaatgattaaggattggaccaaagagcacgtgaagaaatgggttaacgaagacttaaaaataaacgagcagtacggccagattttgctctcggaagaagtaactggtctggtgctgcaggaactaactgagaaggatctggtcgagatgggcctaccctggggtcccgctcttctgattaagaggtcttacaataagttaaactccaaatcccccgaatccgataatcacgatcctggccaattggacaattccaagccgtctaagacggagcaccagaaaaaccccaagcacactaaaaaagaagaggagaatagcatgtcaagcaacatcgactatgatcctagggaaatccgcgacataaaacaagaagaatccatcctcatgaaagaaaacgtgttagatgaggtggccaacgccaagcacaagaagaagggtaagctgaagccagaacagctcacatgcatgccttatcccttcgaccagtttcatgacagccatagatatatcgaacactacacactccagccggagaccggcgcactgaatctgattgacccaattcacgaatttaaggctctgacaaacacagagacagccacggaagtggatatcaaaatgaagttctcaaatgaggtcttccgctttgccagtgcctgcatgaatagccgcacaaatgggaccatccattttggcgtcaaggataagccccacggagaaatcgttggagtcaagatcacctccaaagcggctttcattgatcactttaacgtcatgatcaaaaagtattttgaggaaagcgagatcaacgaagctaaaaagtgtatcagggaaccaagatttgtggaggtcctacttcaaaacaatacgccatccgatcgatttgttattgaggtggataccattcccaaacattccatttgcaatgataagtatttctatatccagatgcagatctgtaaagacaagatatggaaacagaaccaaaacttatctctttttgtgagagagggcgcctcgtcccgagacatccttgccaattcgaagcagcgggacgttgatttcaaagctttcctgcaaaacttaaagtccttggtggccagcagaaaggaagccgaagaggagtatggaatgaaagccatgaagaaagagtccgagggccttaagttggtgaagctcctgattggtaacagggattccctcgacaattcatactatgattggtacatactagtgactaataaatgccatcctaaccaaattaagcacttggatttcctaaaggaaatcaaatggttcgccgtgttggaatttgaccccgaatcaatgatcaatggtgtggtaaaagcttacaaggagagccgagtagcgaacctacacttcccgaaccaatacgaggacaaaaccactaacatgtgggaaaagatttccacgttgaatctgtatcagcagccctcttggattttttgcaacggccgctctgacttgaagtctgaaacctacaaacccctcgaaccacacctatggcagagggaaagagctagcgaggttaggaaattgatcctttttttgactgatgagaacataatgacccgcggcaaattccttgttgtttttctgctgttatcttctgttgaatcacctggagacccactgattgagactttctgggccttctaccaggccctgaagggaatggagaacatgttatgcatatccgtgaattctcatatttaccagcgatggaaagatctcctgcaaacccgcatgaagatggaggatgagttaaccaatcactccatcagcacactgaatatagagctggtgaactccaccatcctgaagcttaaatctgtgacccgctctagccgcagattcttgcctgcccgcggcagttcttccgttatactggaaaagaaaaaggaagacgtcctgaccgcactggagatcctgtgcgagaacgagtgcacggaaaccgacattgaaaaagataagagcaagttcttagagtttaagaaaagcaaggaggaacatttctaccgcggaggaaaggtgagctggtggaatttttacttctctagtgaaaactactcctcagatttcgtaaagcgcgactcttatgaaaagcttaaagatctgatccactgttgggcagagtccccgaaacctatcttcgccaagattatcaacctataccaccatcccggctgtggaggaacaactcttgcgatgcatgtgctctgggatctcaaaaagaatttcagatgcgctgtgctaaagaataaaacgaccgactttgcggaaatcgccgagcaggtcattaacctcgtgacctaccgagccaaatcccaccaggattatatccccgtgctgctgctggtcgatgattttgaagaacaagaaaacgtctacttcctacagaatgctatccattctgtcctggctgaaaaggacctgcgttatgagaagacactggtgatcatcctcaactgcatgcgcagtagaaaccccgacgagtccgcaaagctggcagacagtatcgcactgaattaccagctttcatccaaagaacagcgtgcattcggcgctaaactgaaagaaattgagaaacagcacaagaactgtgagaacttctactcgttcatgatcatgaaatccaactttgacgagacatatatcgagaacgttgttcgcaacattctcaaggggcaggacgtggattctaaagaggcgcaactcatctcctttctggccctcctgtcgtcttacgtgacagacagcacaattagtgtatcgcagtgcgaaatatttctgggcatcatctatacgagtacaccttgggagcccgaaagtcttgaggataagatggggacgtactcaactctcctaattaagacagaagtagcagagtatggccgctacactggggtgaggatcatacatccccttatcgctctatattgtctgaaagaactggagcgaagctaccatctggataagtgtcagatcgccctcaatatccttgaggaaaatttattctacgattccgggatcggcagggataagtttcagcatgacgtgcagacactactgctgaccagacaaagaaaggtgtatggagacgagaccgacactttgttttccccccttatggaagcccttcagaacaaagacatagagaaagtattgtcggcaggaagtagacggtttccacaaaatgcattcatctgccaggctcttgctaggcacttctatattaaggagaaagatttcaacaccgcgcttgattgggctcgccaggcaaagatgaaggctcccaagaactcttatattagcgataccctcggccaggtctacaaaagcgagattaagtggtggcttgatggtaataaaaattgccgatccatcaccgtcaacgacttgactcacctcttggaggcagcagagaaggctagcagagctttcaaggaatctcagcgacagaccgacagtaagaactacgagaccgagaactggtcaccccagaaatcccagcgtagatatgacatgtataacacggcctgcttcctaggagagatcgaagttgggctgtatactattcagatcctgcagctgacaccattttttcacaaggagaatgagctttctaagaagcacatggtgcaattcctcagcggaaagtggaccattccgcctgacccaaggaacgaatgctacctcgcactaagcaaatttacatctcacttaaaaaatctccaatctgacctaaaacggtgtttcgatttcttcatcgactacatggtattactgaagatgcgatatactcagaaagagattgcagaaattatgctttctaagaaagtcagccgctgcttcaggaaatataccgagctcttttgccacttggacccctgcctgctgcagagcaaggagagccaactgctgcaggaagagaattgccgcaaaaagcttgaggccctgagggctgaccgcttcgcgggcctgctcgagtacctgaaccctaactataaggacgctacaacgatggagtccattgtgaacgagtacgccttcctgcttcaacaaaactccaagaagccaatgaccaacgaaaaacagaattctatcctcgccaacattatcctatcctgcctaaagcctaactccaagctgatccagcccctgactacactgaaaaaacaactcagagaggtcctgcagtttgtcggactgtctcatcagtatcctggaccatactttctggcctgcctgctgttttggccagagaatcaggaactcgatcaggatagcaaactgattgagaagtacgtctcttcccttaataggagctttaggggccagtataagagaatgtgccgaagtaagcaggcctccactcttttctaccttggcaaaaggaaaggactaaactctatcgttcacaaagccaaaattgagcaatatttcgacaaggctcagaacactaactcactgtggcacagcggagacgtgtggaaaaagaacgaagttaaggacctgctgcgtaggctgaccgggcaggccgagggcaagctcatttctgtagagtacggaactgaggagaagataaagatccccgtgatttcagtttactccggaccgctcaggagcgggagaaacatagaacgtgtatctttctatctcggattttcaattgaggggcccctggcctatgatatcgaagtaatttag

SEQ ID NO: 136388 - DNA, 213 bp, synthetic construct
  misc_feature 1..213: note = Description of Artificial Sequence: Synthetic coding sequence
  source 1..213: mol_type = other DNA
atgagtaaacaggtgagcttgccagagatgatcaaagattggacgaaggaacatgttaaaaaatgggtgaacgaagacctgaagatcaacgagcaatacggtcaaattctgctgtcagaagaagtgactggactggtattgcaagaactcaccgagaaagacctggtcgaaatgggcctgccctggggtcccgccttacttatcaagaggtag

SEQ ID NO: 136389 - DNA, 213 bp, synthetic construct
  misc_feature 1..213: note = Description of Artificial Sequence: Synthetic coding sequence
  source 1..213: mol_type = other DNA
atgagcaaacaggtctcgctgcctgaaatgatcaaagactggacgaaggaacacgtgaaaaagtgggtgaatgaggacttgaaaattaacgaacagtatgggcagattctcctgtctgaggaggttactggactggttctacaggagttaaccgagaaagatcttgtagagatgggactgccgtggggacctgccctccttattaagcgatag

SEQ ID NO: 136390 - DNA, 213 bp, synthetic construct
  misc_feature 1..213: note = Description of Artificial Sequence: Synthetic coding sequence
  source 1..213: mol_type = other DNA
atgagcaagcaggttagtctgcccgaaatgatcaaggactggaccaaggaacatgtcaaaaaatgggttaacgaagatctgaaaataaatgagcagtatggacaaattctcctgtcagaggaagtcactggactggtgttgcaggagctcaccgaaaaagatctcgtggagatgggcctgccttggggcccagcgctgcttatcaaacgctag

SEQ ID NO: 136391 - DNA, 957 bp, synthetic construct
  misc_feature 1..957: note = Description of Artificial Sequence: Synthetic coding sequence
  source 1..957: mol_type = other DNA
atggcgccatgggccgaagcggagcacagtgctctgaatccactgcgcgccgtgtggctgaccctgacggcggcattcctgctaacactgctgcttcaacttttgccacccggtctgctgccggggtgtgccatcttccaggacctgattaggtacggaaaaacaaaatgcggagaaccaagcaggcctgctgcttgcagggccttcgatgtgccaaagcggtacttcagccatttttacattatcagcgtgctttggaacgggttccttctctggtgtctaacacaaagtttgtttctgggcgccccattccccagctggctgcatgggttgctgcgtatcctgggtgccgcccagtttcaggggggcgagctggctttgtcagcattcctggtcttagtgttcctctggctgcactccctccggaggctttttgaatgtttatacgtctccgtgttctccaatgtgatgattcacgtggtgcagtactgctttggcttagtctactatgttcttgttggactgaccgtcctctctcaagtacccatggatggccgtaatgcatacattaccggaaagaatctcctcatgcaggcgcgttggtttcacatccttggtatgatgatgttcatatggtcgtccgctcaccagtacaaatgccacgtcatcctgggcaatctgcgcaagaacaaggccggcgtggtgattcactgcaaccacaggatcccttttggcgattggtttgagtacgtctcttctcccaactacctggccgagctgatgatctatgtgagtatggccgttacattcggatttcacaacttaacctggtggcttgtggtgacaaacgtcttttttaaccaagccctcagtgctttcctgtcgcaccaattctataagagcaagtttgtctcttatcccaagcatagaaaggcattcttaccgtttctcttctag

SEQ ID NO: 136392 - DNA, 711 bp, synthetic construct
  misc_feature 1..711: note = Description of Artificial Sequence: Synthetic coding sequence
  source 1..711: mol_type = other DNA
atgacacgctgccccgccggacaggcagaagtcgagatggcagagctgtacgtaaaaccaggaaataaagaacggggctggaatgacccgcctcagttttcgtacggactccagacacaggcgggcggaccccgtcggtcacttctcacaaagagggtcgccgcaccgcaggatggctccccccgtgtacccgcctccgagaccagccctggacccccccccatgggcccaccacctccgagcagtaaggccccccgatccccacccgtgggatcaggcccagctagcggcgtcgaaccaacatcattcccagtggaaagcgaggctgtgatggaggatgtgctccgcccacttgagcaggcgctggaagactgcagagggcacacaaggaagcaagtgtgtgacgacatctccaggagattggcactgctgcaggaacaatgggccggaggtaaacttagtataccagtcaagaaaagaatggcgctgttggtccaggaattgtcctcacatcgctgggatgccgccgacgatattcacaggtctctgatggtagaccacgtcactgaagtttctcagtggatggtaggtgtaaaaaggctgattgccgaaaaaaggagcctatttagcgaggaggctgccaatgaagagaaatctgccgctaccgcggaaaaaaatcacaccatcccaggatttcaacaagcttcctag

SEQ ID NO: 136393 - DNA, 681 bp, synthetic construct
  misc_feature 1..681: note = Description of Artificial Sequence: Synthetic coding sequence
  source 1..681: mol_type = other DNA
atggaaggttgcgtctcgaacttgatggtctgtaaccttgcatactctggtaagctggaggaactaaaagaaagtatcctggctgacaaatccctagccacacgcacagaccaggattctcggactgcactgcactgggcttgttccgctggacataccgagatcgtggagttccttttgcagttgggtgtcccagtgaacgacaaagatgacgcaggatggtccccactgcatatagcagctagtgccggtagagacgagatcgtcaaagcccttctgggcaaaggtgcacaggtaaacgcagtgaatcagaacggctgcaccccattgcactatgcggcctcaaagaacaggcacgagattgctgtgatgttgttggaaggaggagctaaccccgacgccaaagatcactacgaagcaacagctatgcatcgggcagccgcaaaggggaatttgaagatgatccatattctcctttactacaaagcatcaacaaatattcaggataccgaggggaacactcctctgcatcttgcctgtgacgaggaacgggtcgaggaagccaagctgttagtgtcccagggggcctctatctatatcgaaaacaaggaggagaagactccactccaagtcgcgaagggaggacttggcttgatcctgaagaggatggtggagggatag

SEQ ID NO: 136394 - DNA, 780 bp, synthetic construct
  misc_feature 1..780: note = Description of Artificial Sequence: Synthetic coding sequence
  source 1..780: mol_type = other DNA
atggcgactgcaacaggcgtggcggaagaaagacttctcgctgctctagcttacctacagtgtgccgtgggttgtgctgtgtttgctagaaaccgccagactaattccgtttacggccgccatgctctgccgagtcaccgcctaagggtgcccgccagagctgcttgggtagtccaagagttgccgagcttggcgctacccctgtaccagtacgcgagcgagagtgcgccaagactccggtcagctccaaactgtattttgcttgccatgtttctcgtccattatgggcatcgctgtctgatttatccatttctcatgaggggcggcaagcctatgccgctcttggcttgcaccatggcaatcatgttctgtacctgcaacgggtacttacaaagccggtacctctcacactgcgccgtgtacgctgacgactgggtgaccgacccccgttttctgataggttttggcctgtggttgaccgggatgctgatcaacattcactcagaccacattctcagaaacctgcggaagcccggcgacaccggctataaaattcctagggggggactatttgagtatgttacagcggccaactattttggcgaaattatggagtggtgcggctacgccctcgcctcttggagcgttcagggcgcggcttttgctttcttcaccttctgcttcctcagcggccgtgcaaaggaacatcatgagtggtatcttagaaagtttgaggaatatcccaagtttcgtaaaattatcattccttttctgttctag

SEQ ID NO: 136395 - DNA, 585 bp, synthetic construct
  misc_feature 1..585: note = Description of Artificial Sequence: Synthetic coding sequence
  source 1..585: mol_type = other DNA
atggaacacgctgcccagccctggagatggcaacggagaagagggtggcgacgctccgcgtgctggcctagaagtcccacttgctcagctccctgggccgcacgctcttcccgcgccatcgttagaagaactcaatgcacagccgctacacggtgtcccgccacgggttctgaatgtagacgggggccaccaggctggtgtcggagttgccctcggtggccatgccgcagtacttccacaccagcttccccccctagagtgagcgccgctaggccaacagctagtagctggccttgctccagtagcactaccggaatcggaaacgtgggcatgcaagcccttgccgtgtgtctacatcctaagtgtcagcccatggtcccaattgtctgcccagacctgaatcacgacagcaaaactcaacgagaaatagctggcattcgctgctcatattcactgctggggaacactgccgccagccgaaggataccaacttccttgatgactcaacatctgaacgcacacctgctggccaatacctgttttgcagtaaatcagtacgaggtatttttgggagtccttgcctag

SEQ ID NO: 136396 - DNA, 639 bp, synthetic construct
  misc_feature 1..639: note = Description of Artificial Sequence: Synthetic coding sequence
  source 1..639: mol_type = other DNA
atggaacacgctgcacagccttggcgctggcagcgcagacgagggtggcgccggtctgcctgctggccaaggtccccaacctgttctgccccttgggctgcgcgctcttctagagccattgtccgtagaacgcagtgtaccgccgcaaccagatgccccgccaccggctctgagtgtcggagaggccccccggggtggtgtagaagctgtccacgctggccctgtaggtcgactagtacccccgcatccccccctagagtcagcgctgccagacctacagcttcatcatggccgtgctccagctctacaacagggatcgggttcggcttgtggcttaccggcatgttgatcaacattcacagcgaccatattcttcgtaatctgcgcaaacctggggacaccggttacaaaattcctagagggggcctcttcgaatatgtcacagctgctaattacttcggggagatcatggagtggtgtggttatgctcttgccagctggtccgtgcagggcgcagctttcgcctttttcacattttgcttcctttccgggagagccaaagagcaccacgagtggtatctaaggaagtttgaggaataccccaaattcagaaaaatcattatcccctttcttttttag

SEQ ID NO: 136397 - DNA, 858 bp, synthetic construct
  misc_feature 1..858: note = Description of Artificial Sequence: Synthetic coding sequence
  source 1..858: mol_type = other DNA
atgctgctggcaacctttaaactctgcgcagggtctagctacagacatatgaggaatatgaaggggttgcggcagcaggctgtgatggcgatttcccaggaattaaacaggcgcgctttaggcggaccaaccccatccacttggattaaccaggtccgacgcagaagcagtctgttgggctcccgtctcgaggagaccctttattccgaccaggaattggcctatctgcaacagggcgaagaggcaatgcagaaagctctgggcattctcagcaaccaggaaggctggaagaaagagtcccaacaggataacggggacaaggttatgagcaaggtggtgccagacgtgggcaaggtgtttcgactggaggtggtagtcgatcagcccatggagcggctctacgaggagctggtggagcggatggaggctatgggtgagtggaacccgaacgtgaaagaaatcaaggtgttacaaaaaatcggcaaggacaccttcattactcatgagctggccgccgaggctgctggcaatctggtggggcctagagattttgtgtctgtccgttgtgccaagagacgaggctccacgtgtgtcctagccggcatggccacagacttcggcaatatgcccgagcagaaaggagtcattagagccgagcatggtcccacatgtatggtgctgcatcccttggccggctcaccgtcaaagactaagctaacctggttgctgtccattgacctcaagggctggctacctaagtctatcataaatcaggtcttatcccaaacacaggtagactttgccaaccacctccggaaacggttggagtcccaccctgccagcgaggctcgatgttag

SEQ ID NO: 136398 - DNA, 744 bp, synthetic construct
  misc_feature 1..744: note = Description of Artificial Sequence: Synthetic coding sequence
  source 1..744: mol_type = other DNA
atgctactggccacatttaagctgtgcgctgggtcttcctatcggcacatgcgaaacatgaagggaagcagacttgaagaaacgttatattctgaccaggaattggcctacctccagcagggtgaggaggccatgcagaaagccttagggatcttatctaatcaggagggttggaagaaagaatcgcagcaggataatggcgataaggttatgtcgaaggtggtgcctgatgtcggaaaagtttttaggctggaggtggtcgttgatcaacctatggaacgtctgtatgaagagctggtcgagcggatggaggctatgggagagtggaatcccaacgttaaagagatcaaggttctccagaaaatcggcaaggatactttcatcactcacgagctggccgctgaagcagcaggaaatctggtcggccctcgtgactttgtgtctgttcgatgcgcaaagcggcggggaagcacttgtgtcctcgcagggatggctactgattttgggaacatgcctgaacagaagggcgtcattagggctgaacacggccccacctgtatggtgctacatcctctggcggggtccccttctaaaacaaagctcacatggttgctgtctatcgacctcaaaggctggctccccaagtctataattaatcaggtgttgagtcagacccaagtggatttcgctaatcacctgaggaagagattggaatctcatccggcatcggaagctcgctgctag

SEQ ID NO: 136399 - DNA, 969 bp, synthetic construct
  misc_feature 1..969: note = Description of Artificial Sequence: Synthetic coding sequence
  source 1..969: mol_type = other DNA
atgtcgtccagcccatgggagcccgccacgctgcgaagagtctttgtcgtgggagtcggtatgaccaagtttgtgaagcccggtgctgagaactcccgtgattaccctgacttagccgaagaagccggcaagaaagccctggctgatgcacagataccttattctgcagtagatcaagcttgcgtcggctacgtgttcggggtggctgaatgcgtgttagctctcggctttgaaaagatgtcaaaggggagtcttggcatcaagtttagcgatcggacaatcccaaccgataaacatgtagatctcttaatcaataagtacgggttaagcgcccatcctgttgcaccacagatgttcggatacgctggtaaagaacacatggagaagtacggcaccaagattgagcattttgcgaagattggatggaaaaatcataaacactccgtgaacaatccatacagccaattccaggatgaatacagcctggacgaggtgatggcaagcaaggaagtgttcgatttcctgaccattttgcagtgctgtcctactagcgatggtgccgctgccgcaatcctggcaagcgaggcatttgtgcagaaatatgggctgcaatcaaaggccgtggagatcctggcccaggaaatgatgactgacctccctagcagctttgaggagaaatctatcataaaaatggtagggttcgatatgtcaaaggaggcagctcggaagtgctacgagaagtctggacttactcccaatgacatagatgtaattgagctgcatgactgtttctcgaccaacgagctcctgacctatgaggcccttggactctgcccggaaggtcaaggtgcaacacttgtggatagaggcgacaatacatatggggggaagtgggttattaacccctcggggggcctgatctctaaggggcacccattgggtgcaacaggtggccattcttgcagctag

SEQ ID NO: 136400 - DNA, 1644 bp, synthetic construct
  misc_feature 1..1644: note = Description of Artificial Sequence: Synthetic coding sequence
  source 1..1644: mol_type = other DNA
atgagcagctccccctgggagccagcaacactgcggcgagtgttcgtcgttggagtggggatgaccaaatttgtcaagcctggtgcagagaacagtcgagactacccagacctggccgaggaagctggtaagaaagctttagcagatgctcaaatcccctactccgcggtagatcaggcctgcgtcgggtacgtctttggagacagtacgtgtgggcagcgcgccatctatcattctctgggcatgaccggtatacctattatcaatgtgaacaacaactgtgccactggatctacagccctgtttatggccaggcagctgatccaagggggtgtagctgaatgcgtactggccttgggcttcgaaaagatgagcaaaggaagtctgggtatcaagttcagtgatagaacgatccccactgataaacacgtggatctgctgatcaataaatatgggttgagtgcccatccagtagccccccaaatgttcgggtacgccggcaaggagcacatggaaaagtacggaacaaaaattgagcactttgctaagatcggatggaagaaccacaaacattccgtgaacaacccttactctcagttccaagacgaatattcactagatgaagtgatggcctcaaaagaggtttttgattttcttacgattctgcagtgctgccctacctcggacggagccgcagccgccatcctcgccagcgaggccttcgtgcagaaatacgggcttcagtccaaggctgtggaaatactcgcacaggaaatgatgactgatcttccttcttcgttcgaggagaagtcaataattaaaatggtggggttcgacatgagtaaagaggccgcccgcaaatgctacgaaaagagcggactaacaccaaatgacatagacgtcatcgaacttcacgattgcttcagcacgaacgagttgttgacgtacgaggctctgggattgtgtcccgagggtcagggagccacccttgttgaccgcggggacaacacctacggtggtaaatgggttataaacccttccggaggactcatatccaaaggccatcccctgggagcgaccggactagctcagtgtgcagagctttgctggcagctgaggggggaggccggcaaaagacaggtccctggcgccaaagtggccctgcagcataatctaggcataggcggagccgtggtggttaccctgtataagatgggttttcctgaggccgcttcgtcctttcgcacacaccagatcgaggcagtgcctacatcatctgcatcagatggtttcaaggccaaccttgtgtttaaggaaatcgaaaagaaactggaggaggagggcgaacagttcgttaagaagattggtgggatcttcgcctttaaggtgaaggatggaccaggtggcaaggaggccacctgggtggtggacgtcaaaaacggcaaagggtccgtcctgcccaacagcgataaaaaggctgattgcacaatcactatggccgacagcgactttctcgccctaatgaccggcaagatgaacccacagtcagcgttctttcagggtaaactgaagatcacaggaaacatggggttggccatgaagctgcagaatctacagctccagcctggcaacgccaagctgtag

SEQ ID NO: 136401 - DNA, 1572 bp, synthetic construct
  misc_feature 1..1572: note = Description of Artificial Sequence: Synthetic coding sequence
  source 1..1572: mol_type = other DNA
atgtccagcagtccttgggagccagcgaccctgaggagagtcttcgtggtgggggtgggtatgactaagtttgtgaagcccggggccgaaaactcacgggactatccagatctagcagaagaagctggcgactccacctgtggccagagagccatataccactcactggggatgaccggtataccgattatcaacgtgaacaacaactgcgccaccggctcaacagctttgttcatggcaagacaattgatacaaggtggcgtcgccgagtgtgtactggccttgggtttcgagaaaatgagtaagggcagccttggcatcaagttcagcgatcgaacaattccaacagacaagcacgtggatttgctaatcaacaagtatggcttatcagctcatccagtggctcctcagatgttcggttatgctggaaaagaacatatggagaaatacgggacaaagatcgagcacttcgcaaagatcggctggaaaaaccataagcattccgtcaacaatccttatagtcagtttcaggacgaatattccttagatgaagtgatggcctccaaagaggtttttgatttcctgactatcctgcagtgctgtccgacatccgacggggctgcagccgctattctggcgagtgaagcctttgtgcagaagtacgggctccagtccaaagcggtggagattctcgcccaggagatgatgacagacctcccgtctagcttcgaggagaaaagcattattaaaatggtaggattcgatatgtccaaggaagccgcaaggaagtgctacgaaaagtctggtctcacacccaatgatatcgatgtgatcgaactccatgactgtttctccacaaacgagttgctgacgtatgaagccctagggctctgtccagagggccagggtgccacccttgttgaccggggagataatacctatggcggaaagtgggttattaacccatccggaggtctgatcagcaaaggtcatcctctcggggctacgggcctcgcccaatgcgccgaactctgttggcagttgcggggcgaggctggcaagaggcaggtcccgggcgccaaggtggcattgcaacataatcttggcatcggtggggccgttgtggtcaccctgtacaagatggggtttcccgaggcagcaagtagttttagaacccaccagatagaggccgtgcctactagcagtgccagtgacggctttaaggctaacctggtgtttaaggaaatcgagaagaagctggaggaggagggcgagcagttcgtcaaaaaaattggcggcatctttgctttcaaagttaaagacggccctgggggcaaagaagccacatgggtggtcgacgtgaagaacggcaagggatccgtattacccaatagcgataagaaggctgattgtacaattaccatggccgactccgatttcctggctctgatgacaggcaagatgaatccccaaagtgccttttttcaagggaagctgaaaataactggaaatatggggcttgccatgaagttacagaatctgcagctccagccgggcaatgccaaattgtag

SEQ ID NO: 136402 - DNA, 180 bp, synthetic construct
  misc_feature 1..180: note = Description of Artificial Sequence: Synthetic coding sequence
  source 1..180: mol_type = other DNA
atgggatttccagaagccgcgtcttcatttcgcactcaccagatcgaagccgtgcctacctctagcgcatcagatggctttaaggccaatctagtctttaaagaaatcgagaagaagctggaagagattaggcgtttaacagctcaatctcaatggctgacacagacttcatggctgtag

SEQ ID NO: 136403 - DNA, 423 bp, synthetic construct
  misc_feature 1..423: note = Description of Artificial Sequence: Synthetic coding sequence
  source 1..423: mol_type = other DNA
atggggttccccgaagccgcacggacccaccagatcgaagctgtacctacaagctctgcttctgatgggtttaaagccaatctcgtgtttaaggagattgagaagaagctcgaagaagagggcgagcagtttgtcaagaagatcggcgggatttttgccttcaaggttaaagacggcccaggcggaaaagaagctacttgggtagttgatgtcaaaaatggaaagggctctgtgctccccaattcagataagaaagcggattgcaccatcacaatggccgacagcgatttcctggccctcatgaccggtaaaatgaatccccagtccgccttttttcagggcaagctgaagatcacgggcaatatgggcctggccatgaaactccagaatctgcagttacaaccagggaatgcgaagttgtag

SEQ ID NO: 136404 - DNA, 432 bp, synthetic construct
  misc_feature 1..432: note = Description of Artificial Sequence: Synthetic coding sequence
  source 1..432: mol_type = other DNA
atgggtttccctgaggccgcgtccagcttccggacacaccaaattgaagcagttccgacctcttcagcgtcagacgggtttaaggcgaacttggtctttaaagagattgaaaaaaaactagaagaagaaggagagcagtttgttaaaaagattggcggaatcttcgcattcaaggtaaaagatggaccaggcggaaaggaagcaacttgggtcgtggatgtgaaaaacggaaaagggtctgtgctaccaaattccgacaagaaggctgactgcacgattaccatggctgactctgatttcttagctctgatgaccggcaagatgaaccctcagtcagcatttttccaggggaagctcaagatcaccggcaacatgggtttggccatgaaactccagaacctccaacttcaacctggaaatgccaaactgtag

SEQ ID NO: 136405 - DNA, 180 bp, synthetic construct
  misc_feature 1..180: note = Description of Artificial Sequence: Synthetic coding sequence
  source 1..180: mol_type = other DNA
atgggtttccccgaggctgccagcagctttagaacccaccagatcgaggcggtgcccacctctagcgccagtgatggcttcaaggctaacctagttttcaaagagattgaaaagaagcttgaagagatacggcgactgaccgctcaaagtcaatggttgacccaaacgtcatggttgtag

SEQ ID NO: 136406 - DNA, 1401 bp, synthetic construct
  misc_feature 1..1401: note = Description of Artificial Sequence: Synthetic coding sequence
  source 1..1401: mol_type = other DNA
atgacaggtatacccataataaacgtgaataacaactgtgcaaccgggtctactgcccttttcatggcccgccagcttattcagggtggagtggccgagtgcgtgcttgcactcggcttcgagaagatgagcaagggctccctcggcattaaattctctgaccgcacgattcccactgacaagcatgtggatctacttatcaacaaatacgggctgtccgcgcacccggtcgcacctcaaatgttcggatatgctggcaaagaacatatggagaaatatggaacaaagatcgaacatttcgctaaaattggatggaagaaccacaagcattccgttaacaacccctattctcaatttcaggatgagtattccctggacgaggttatggcaagcaaagaagttttcgattttctcacaatcttgcagtgctgtcccactagtgacggcgcggccgcggcaatactcgcatcagaggcctttgtgcagaaatatggattgcaatcaaaggcggttgaaattctggcgcaggaaatgatgaccgacctgccctctagttttgaggagaagtctattataaagatggtggggtttgatatgagtaaggaggcagctcggaaatgctatgaaaagagcggactgacccccaatgatatcgacgtgatcgaactgcatgactgtttttcaacgaacgagctgctcacttacgaagccctcggactttgtcctgagggccagggggctaccctcgtagaccgcggtgataatacttatggggggaaatgggtcatcaatccgtccgggggtttgattagcaaagggcaccccctgggcgccacagggttagctcagtgcgccgaactctgttggcagttgcggggggaagcgggcaagcggcaagtgcctggagccaaggtcgcactccaacacaacttagggataggtggcgctgtagtggtaacattgtataaaatgggttttcctgaggctgcttcttcgtttagaactcaccagatcgaagcggttcctacatcatccgcttctgatggcttcaaagccaacctggtctttaaagagatcgagaagaagctggaagaggagggagaacaattcgtgaaaaaaattggtggcatctttgcctttaaggtgaaagacggccctggtgggaaggaggctacatgggtcgtagatgtcaagaacggtaagggcagcgtactgcccaacagtgataaaaaagcggattgtacaatcactatggctgattccgacttccttgctttaatgaccggcaagatgaacccacaatcggcctttttccagggaaaactgaaaatcacgggtaatatgggactcgcaatgaaactgcagaaccttcaactgcagcctggtaacgcaaaactgtag

SEQ ID NO: 136407 - DNA, 1512 bp, synthetic construct
  misc_feature 1..1512: note = Description of Artificial Sequence: Synthetic coding sequence
  source 1..1512: mol_type = other DNA
atgtccagctcaccttgggagcctgctaccctgcgcagagtttttgtggtgggcgtgggcatgacaaaatttgtcaagcctggtgccgaaaactctcgcgattaccctgatctggctgaggaggctgggaagaaggccttagctgacgctcagatcccatatagcgccgtggatcaggcctgcgtgggctacgtgttcggtgtggctgagtgtgtcctggctctgggtttcgagaaaatgagcaaggggagcttgggaatcaagtttagtgataggaccattcccaccgacaaacacgtggatctcctgatcaacaaatatggcctctctgctcatcctgtcgctccacaaatgtttggatacgctgggaaggaacacatggaaaaatatggtacaaaaatcgaacattttgccaagattggatggaaaaaccacaagcactccgtcaataatccctatagccagtttcaggacgaatattcgctcgacgaggtcatggcgtccaaggaagtatttgactttttgacaatcctccagtgttgtcctacttccgatggagctgccgctgccatcctggctagcgaggcattcgtgcaaaaatacgggctgcaaagtaaggccgttgagatactagcccaggagatgatgaccgatctcccctccagctttgaagagaagtccattatcaagatggtgggtttcgatatgtccaaggaagcagccagaaagtgctatgaaaaatctggcctcactcccaatgacattgatgtcatagagcttcacgattgctttagtactaatgagctcttaacgtacgaagccctggggctctgtcctgaagggcagggtgccaccttagtggaccgtggagataatacttacgggggcaagtgggtaatcaacccgagcggggggcttatatccaaaggacaccccctgggcgcaaccggtttagcccagtgtgctgaattgtgctggcagctgcgcggcgaagcaggtaagcgccaggtgcctggggctaaggtggccctgcagcacaatctcggaattggaggagccgtcgtagtgacattgtacaaaatgggatttcccgaagccgcctcctcctttcgtacgcaccagattgaggctgtgcccacgagcagcgcctctgatgggttcaaggccaacctcgtgttcaaagaaatcgagaaaaagctagaagaggagggcgagcagtttgttaagaaaatcgggggcatttttgctttcaaggtcaaggatggcccaggaggcaaagaggcgacctgggtagtcgacgtgaaaaacggcaagggttctgtgctgccaaacagcgataagaaagctgactgcacaattaccatggccgacagtgatttcctggccctgatgactggaaagatgaatcctcaaagtgcgttcttccaaggtaaactcaagatcacagggaacatgggcctggcaatgaagcttcagaatctgcaattgcagccaggcaacgctaagctgtag

SEQ ID NO: 136408 - DNA, 1653 bp, synthetic construct
  misc_feature 1..1653: note = Description of Artificial Sequence: Synthetic coding sequence
  source 1..1653: mol_type = other DNA
atggtgggcgaggaaaaaatgagcctcagaaacagactgagcaaatctcgagagaacccagaagaagacgaagaccaacggaaccccgccaaagaatccctcgaaaccccttctaacgggaggatagacataaagcaattgatcgcgaaaaagatcaaactcaccgctgaagcagaggagctaaagccatttttcatgaaagaagtgggatcacactttgacgatttcgtgaccaatctgattgaaaaaagcgcttctttagacaatggcggctgtgcactcactacattctctgtactcgaaggggagaaaaataaccatcgcgcgaaggatctaagggcccctcccgagcagggcaagatcttcatcgcccgaaggtctctgctggacgagctcctggaagtcgaccatattcgcactatttaccacatgtttattgcgctactcatacttttcatcttatccaccctcgtcgtggattacatcgatgaggggaggctggtgctggaatttagccttctgagctacgcgtttggcaaatttcctaccgtcgtgtggacttggtggatcatgttcttaagcacatttagtgtcccgtatttcctcttccagcattgggccaccggatactcaaagagctctcatcctctcatccgcagtctgtttcacggttttctgttcatgatctttcagataggggttctcggatttggccccacatatgttgtgctagcctatacactaccaccggcttcccggtttattataatctttgagcagatcagatttgtgatgaaggcacatagtttcgtccgcgagaacgtgcccagagtgctgaatagtgccaaggagaagtcctctacagtgcctattccaaccgtcaaccagtacttatacttcctctttgcacctaccctgatatatagagactcgtacccacggaaccctactgtgcggtggggctatgtagcaatgaaattcgcacaagtgtttggatgttttttctatgtatactatatcttcgagagattgtgtgcccccctcttccggaacataaagcaggagccctttagcgccagagtgctggtcttgtgcgtatttaactccatactgccaggcgtccttatcctgttcctcactttctttgcctttttgcattgttggctcaacgctttcgctgaaatgctgcgattcggggaccgaatgttctataaagattggtggaattccacgtcgtattccaactactataggacctggaatgtcgtggtgcacgattggctgtattactatgcttacaaggatttcttgtggttcttctccaaaaggttcaagagcgcagccatgctggccgtgtttgccgtcagtgctgtcgttcatgaatacgcgttagctgtttgtcttagctttttctatcccgtcttgttcgtcctgtttatgttcttcggcatggctttcaacttcatagtgaacgatagcaggaagaagccaatttggaacgtcctaatgtggacgagcctgttcctgggaaacggggtgctactgtgtttctactctcaggaatggtacgcaagacaacactgcccccttaaaaatcccacttttctggactacgtgaggcctaggtcatggacctgtagatacgtgttctag

SEQ ID NO: 136409 - DNA, 783 bp, synthetic construct
  misc_feature 1..783: note = Description of Artificial Sequence: Synthetic coding sequence
  source 1..783: mol_type = other DNA
atggttggagaagaaaaaatgtccctgaggaaccgactctctaaatcccgagaaaacccagaggaagacgaggatcagaggaaccccgcaaaagagagcctggagacccctagtaatggacgaatagacatcaagcagctcatcgctaagaagattaagctgaccgccgaagcagaagagttaaaacccttttttatgaaggaggtggggagccacttcgacgatttcgttactaacctaattgagaagagtgccagtctggataatggggggtgtgcattgacaacgttttccgtgctggaaggcgagaagaacaaccacagagcgaaagacttgcgggctcctcccgagcagggcaagattttcattgctagacggtccctcctcgatgagctgctggaggttgatcatattaggactatttatcatatgttcattgcccttctgatcctcttcatcctgtcaaccctggtggtggattacatcgacgaaggtcgattggtcctggagttctcccttctttcttatgccttcggaaaattccccactgtggtgtggacctggtggatcatgttcctgagcacattcagtgtgccctattttctgtttcagcactgggccactggttatagtaagagcagccatccactgatccggtccctgttccacggctttctgtttatgattttccagatcggagtgctcggctttggccccacatacgtggtccttgcttataccctgcccccagcctctaggttcattataatctttgagcaatag

SEQ ID NO: 136410 - DNA, 861 bp, synthetic construct
  misc_feature 1..861: note = Description of Artificial Sequence: Synthetic coding sequence
  source 1..861: mol_type = other DNA
atgaaggcccatagttttgtgcgcgagaatgtgcctcgcgtgcttaactctgcaaaagaaaaaagctcaaccgtccccatcccaaccgtaaaccaatacctctactttctgttcgcacctactctgatatatcgggattcttacccaagaaaccccacagtacggtgggggtacgtcgctatgaagtttgcccaggtgtttggctgctttttttacgtctactacatcttcgagcgtctctgtgcccccctgttccgaaatatcaagcaggaaccttttagcgctcgtgtcttggtcctatgtgtgttcaatagtatcttgcccggcgtgctcattctgtttctcacttttttcgccttcttgcattgttggctgaacgcatttgccgagatgttgagatttggtgaccgcatgttttacaaggactggtggaattctactagctacagtaactactatcgcacttggaacgtggttgtccatgattggctgtattattatgcctataaggattttctttggttttttagtaagcgttttaagtccgccgccatgttagccgtgtttgcagtctctgccgtcgtgcatgagtatgctctggcagtgtgtctctccttcttctaccccgtgctgtttgttctcttcatgtttttcggaatggcttttaactttatagtgaatgattcgcgtaagaaaccgatttggaacgttttgatgtggacgtccctgtttctgggcaacggcgtgctcctctgtttctactctcaggagtggtacgctcgccagcactgccctctgaaaaatcccacatttctggattacgtcaggcctcggtcctggacctgtaggtatgtgttttag

SEQ ID NO: 136411 - DNA, 1458 bp, synthetic construct
  misc_feature 1..1458: note = Description of Artificial Sequence: Synthetic coding sequence
  source 1..1458: mol_type = other DNA
atgaaagaagtgggctcccatttcgatgacttcgtgaccaatctcatcgagaaaagcgcgtcactggacaacgggggctgcgcactgacaaccttctctgtcctcgaaggtgagaaaaacaaccatagggcaaaagacctgcgagccccacccgagcaggggaaaattttcatagccaggagaagtctgctggatgagttgctagaagtggaccacattcggacaatctatcatatgttcatcgctcttctgatcttgtttattctctcaactttggtcgtggattacattgacgagggcagactggtgttggagttttcactgctgtcttacgctttcggcaagtttcctaccgtggtttggacttggtggataatgtttctgtccacctttagtgtgccctattttttattccaacactgggcaacgggctattcgaagagcagccacccattaatccgaagcctctttcacggttttttattcatgatctttcagattggagtgctcggctttggcccgacatatgtggtcctggcttataccctgccacccgcaagtcggtttataattatatttgaacagattcgctttgtgatgaaggctcattctttcgtcagggagaacgttcctagagtccttaactctgccaaggagaaatcatctactgtccctatccccaccgtgaaccagtatctgtattttctatttgctcctacactcatttatagagacagctatccccggaatcctactgtacgctggggatacgttgcaatgaagtttgcacaagtgttcgggtgttttttttacgtgtattatatttttgaacggttgtgtgcccccttattccgaaatataaaacaggagcccttcagtgccagggttcttgttctttgcgtctttaacagtatacttcccggagtccttatactgtttcttacctttttcgcctttctacactgctggcttaacgccttcgctgagatgctccgcttcggagaccgcatgttctacaaggactggtggaactctacgagctatagcaactactacagaacctggaacgtagtcgtgcacgactggttgtattactacgcatataaggatttcctgtggtttttttccaaacggtttaagagtgccgcgatgctggccgtgtttgcagtgtcggccgtggtgcacgagtatgcgctggcagtctgcctgtccttcttttatccagtgctctttgttctgtttatgttcttcgggatggcgttcaattttatcgtgaacgacagcaggaaaaaaccaatttggaacgtactgatgtggacatccctgttcttgggcaatggggtgctgctgtgtttctacagccaagaatggtacgcccggcagcattgccccctgaagaatccaacttttttggactacgtgcgcccgcgaagctggacctgtcgctacgtgttttag

SEQ ID NO: 136412 - DNA, 1479 bp, synthetic construct
  misc_feature 1..1479: note = Description of Artificial Sequence: Synthetic coding sequence
  source 1..1479: mol_type = other DNA
atggaactgaagccatttttcatgaaggaggtgggttcacatttcgacgacttcgtcacaaatctgatcgaaaagtctgcatcacttgacaacggtggctgcgcgttaactacattctcagtccttgagggagagaagaataatcacagagcgaaagatttacgagcgcccccagagcaaggtaagatattcatcgctcggcgaagcctcctggacgaactgttagaagtggaccatattaggactatttatcatatgttcatcgccctcctcatcctctttattctatccacgctcgtagtcgactacatcgatgagggcagactggttctggaattcagcttgctgagctatgctttcgggaagttcccaaccgttgtttggacctggtggattatgtttctgagcacattttcagtgccctactttctgttccagcattgggccactggttattctaaatctagccacccactgatcagaagtctgtttcacggtttcttgtttatgatttttcagatcggggtcctgggctttggacccacttacgttgtccttgcttatacactgcccccagcctccaggttcattatcatattcgaacaaatccggttcgtgatgaaagcccacagcttcgtccgggaaaacgttcctcgagtcttaaattccgctaaagaaaaatcctctactgtgcctattcctaccgtcaaccagtacctgtacttcctcttcgcgccaactctcatttacagggacagctacccaaggaaccccactgttcgatgggggtacgtggcgatgaagtttgcccaggtgtttggctgtttcttttacgtctactacatttttgaaaggttgtgtgctccgctattcagaaatattaagcaggagcctttctcagcccgcgtgttggtgctgtgcgtcttcaactcgatcctgcccggcgtgttaatcctgttcctgacttttttcgccttcttacactgttggctgaatgccttcgctgagatgttgaggtttggtgaccggatgttttataaagattggtggaacagtacatcctactcaaattattacagaacctggaatgtggtggtccacgactggttatactattacgcctacaaagattttttgtggttcttcagcaagcgcttcaagtcggcagcaatgctggcagtttttgccgtaagcgcagtcgtccacgaatacgccctggctgtatgcctcagcttcttctatccggtcctgttcgtgctctttatgttctttggcatggcattcaattttattgtgaatgacagtcggaagaagcctatttggaatgttttgatgtggacgagcctgttcctaggcaatggtgtcctgctttgcttttactcccaggagtggtatgcccgtcagcattgtcctctcaagaatccgacttttcttgactacgtgagaccccgtagttggacttgtaggtatgttttctag

SEQ ID NO: 136413 - DNA, 1569 bp, synthetic construct
  misc_feature 1..1569: note = Description of Artificial Sequence: Synthetic coding sequence
  source 1..1569: mol_type = other DNA
atggaaccaggaggggctagactccgattacagcgtaccgagggcctaggaggggaacgagaaagacagccctgcggggatggcaatacagagacgcaccgcgcacctgatctcgtccagtggacaagacatatggaggcagtcaaggcacagctcctcgagcaggcgcaagggcagttgcgcgaactcctcgatcgcgctatgagggaggctatccagtcttatccatctcaggacaaaccactgccccccccgccccccgggagtttgtcacgaacccaagagccatctcttggcaagcagaaggtgttcataattaggaagagcctactggacgaactcatggaagtccagcatttccggacaatttaccacatgtttattgccgggctttgtgtgttcattatcagtactttggctatcgatttcattgacgaaggcaggctgctcttggaattcgatctcctcatcttttcatttggccagttaccactggccctggtgacatgggtgccaatgttcctttccacactgctggctccctatcaagctttacgactctgggcgagagggacatggactcaggccactggcctgggttgtgccctgttagccgcacatgcagttgtgctttgcgcattgcctgtacacgtcgccgtagaacaccagctgcccccggcttcccgttgtgtcctggtctttgagcaggtcagatttctgatgaaatcatactccttcttgcgggaagccgtcccaggtacgctgcgggcaagaaggggagagggaattcaagcccccagcttctcctcttatttatactttctattttgccccacactaatttatcgagaaacctatcctagaacgccttacgtccgttggaattatgtggccaagaactttgcacaggctttaggttgtgtgttgtacgcgtgcttcatcctgggacggctgtgcgtccccgttttcgcaaacatgtctcgggaaccctttagtacccgggctctcgtgttaagcatcttgcatgcaacgctgcctggtattttcatgctcttgctcatttttttcgcctttctgcattgttggctgaacgcttttgctgagatgcttcggttcggggatcgcatgttttaccgtgactggtggaattccacttcgttcagcaattactacagaacttggaacgtggtggtccatgactggctctattcgtatgtgtatcaggacggcctgcgcctcctgggcgctagagccagaggagtcgctatgctaggagttttcttggtgagcgccgtagctcatgagtacatattttgtttcgtgctgggatttttctaccctgtaatgctcattctcttcctggtcattggtggcatgctgaatttcatgatgcatgatcagcgaaccggcccagcttggaatgtgctgatgtggacgatgctgtttttggggcagggaattcaggtcagtttatactgccaggagtggtatgcacgacgccactgccctctgccccaagcaactttttggggcttagtaacacctcgttcatggagttgccatacgtag

SEQ ID NO: 136414 - DNA, 3426 bp, synthetic construct
  misc_feature 1..3426: note = Description of Artificial Sequence: Synthetic coding sequence
  source 1..3426: mol_type = other DNA
atggatgacagcggagaactgggcggactggaaacaatggaaacactcaccgagctgggtgacgagttgactctaggcgatattgacgagatgctccagttcgtctctaatcaggtgggtgaattccctgatcttttctccgagcaattgtgcagcagctttccaggaagcggcggtagcggcagttccagcggcagctctggatcatcaagctcctcttccaacggtagaggttctagcagtggggctgtagacccctcggtgcagcgttccttcacacaggttaccttgccttcctttagcccatcggcagccagtcctcaggcacctaccctacaggtcaaagtgtcccctacttctgtgccgaccaccccccgagccacacccatccttcagcctcgtcctcaaccacagccccagccacaaactcagctccagcaacagaccgtcatgatcactccgacatttagcacgaccccacaaacaagaatcatacaacagcccctcatttaccagaatgccgctacgtcgttccaggtgttgcagccccaggtgcagagcttagttacctcgtcgcaggtgcagcccgtgaccattcaacagcaggtccagaccgtccaggcacagagagttctgactcaaacagctaacggtactctccagacactcgcacctgcaactgtacagacagtggctgcacctcaggtgcagcaggtacctgtgctcgtgcaaccccagatcatcaagaccgactccctggtgttgaccacactcaagacagatggctctcctgtaatggccgcagtgcaaaatccagccctgaccgcacttaccacccccattcaaactgcagccctacaggtgcctacacttgtggggtcatcgggcacaatcctgacaaccatgcccgtgatgatgggccaggagaaggtgcccatcaaacaagttcccggaggggtgaagcagctagagccgcctaaggagggcgagcgccgcacgacacacaatataatcgaaaaacggtaccggtcctccattaatgataaaattattgagctgaaagaccttgtgatgggtacagacgctaagatgcacaaatccggggtgctgcgaaaggcgatcgattacatcaagtacctccagcaggtgaaccacaagctgcgacaagagaacatggtactgaaacttgcaaatcagaagaataagctactgaagggcatcgacctgggatcattggtggataacgaggtagatctcaaaattgaggattttaatcagaacgttctgttaatgtcgcctcctgctagtgatagtggctcgcaggccgggttttcaccgtacagtattgacagcgagcctggctcgcccctgctggacgacgccaaggtgaaggacgaacccgatagcccccctgtcgcactgggcatggtcgacaggagccggatcctgctttgtgtgctgacgtttttgtgcctgtccttcaatccgcttacctcgctcctacaatggggtggtgctcacgacagtgatcagcacccccatagcggctcaggaaggtccgtcctgtccttcgaatccggttccggaggttggttcgactggatgatgccaaccctcttgctgtggctggtcaatggagtgatcgttttgtctgtattcgttaagctcctggtgcatggagagcctgttattcgcccccacagcaggagcagcgtgaccttttggagacaccgtaaacaagccgacctggacctagctcgaggagactttgccgctgccgctggaaacctccaaacctgcttagccgtactcggacgtgctttacctacgtccaggttagacttggcttgcagtctctcttggaacgtgatcaggtacagtcttcaaaagctgcggctagtccggtggctcttgaagaaggtcttccagtgccgtcgtgccaccccagccacagaggctggattcgaagatgaggcgaagacgagtgccagggacgctgccctggcttatcatagactgcaccagctacacatcacaggtaaactgccagccgggtctgcctgtagcgacgttcacatggctctgtgcgccgttaacctggccgagtgtgcagaggagaagatcccaccatccaccctcgtcgaaattcatctgacagcagcgatggggctaaaaacacgatgcgggggaaaactcgggttcctggcctcctacttcctgtcgcgagcccaatcactttgtggcccagagcacagcgctgtgcccgactccctccgctggttgtgtcatccacttggccaaaaattcttcatggagaggtcttggtccgtgaagtcggcggcaaaagagagcctgtattgtgcccagcgtaatcccgcggaccctatcgctcaggtccaccaggccttctgtaaaaatttgcttgagcgagcgatcgagtctctcgttaaaccacaggccaaaaagaaagcgggggatcaagaagaggagtcttgtgaattttccagcgctctggaatacctgaagctgcttcacagcttcgtcgatagcgtgggcgtcatgtcgcccccactgtcacgtagtagcgtcctaaagagtgctctggggcctgatatcatctgcagatggtggacaagtgctattactgtggccatttcttggttgcagggggacgatgctgccgtgagatctcactttaccaaggtcgaacggataccaaaagccctggaagtcactgaaagccccctcgtgaaggccatcttccatgcttgccgggctatgcacgcctccctcccagggaaagcggacggacagcaatccagcttttgtcactgcgaacgcgcatcaggtcacctctggtcctcactcaacgtgtcaggggccacgagtgacccagccctcaaccatgtggtgcaactgctgacttgcgacctgctgctgagtctgaggaccgcactatggcagaagcaagcatccgcgagccaggccgttggcgagacgtaccacgcaagcggagctgagttggccggatttcagcgggatctgggttcactgaggcgactggcacactcattcaggcctgcttaccgtaaagtgtttttgcacgaggctacggttagacttatggccggtgcatccccgacgagaacacaccagttgttagagcatagtctccgcagaagaacaacccagtccactaagcatggggaggttgacgcctggcctggccagcgggagcgcgcgacagccattctgttggcctgcaggcacctgcccttgtcattcctttcctcgcctggccaaagggccgtcttgctggctgaggctgccagaactctggaaaaggtgggcgatagacgcagctgtaacgactgccagcaaatgattgttaagttgggcggcggcactgcaattgccgcttcgtag

SEQ ID NO: 136415 - DNA, 2055 bp, synthetic construct
  misc_feature 1..2055: note = Description of Artificial Sequence: Synthetic coding sequence
  source 1..2055: mol_type = other DNA
atggacgacagcggagaactgggcggcttggagaccatggaaactctgactgagctcggggatgagctaacactaggtgacatcgacgagatgctgcagtttgtttccaatcaggtgggcgagtttccagacctgttcagtgagcagctgtgctcatctttcccgggttctgggggtagcggatctagcagcgggagttccggcagttcttcctccagtagcaatggccgcggttcctctagtggtgcagtggaccctagcgttcaacgaagtttcacacaggtgaccttaccctccttctcacccagtgccgcctccccgcaagctcctacacttcaggtgaaggtttctcccacgagcgtgccaactacccctcgcgcaacgccgattctccaaccccggcctcaacctcagcctcagcctcagacacagttgcaacaacaaacagtaatgatcaccccgaccttctctaccactccgcagaccaggataatccaacaaccccttatctaccaaaatgctgccaccagtttccaggtgttacagcctcaggtgcagtcattagtgacctcatcacaagttcaacccgtaaccattcagcagcaagttcagactgtccaggcccagcgagttctgacccaaactgctaacggcaccctccagacactggctcctgctacagtgcagacagtcgctgcacctcaagttcaacaggtgcccgtgttagtgcagccacaaatcattaaaacagattcacttgtacttactacgctgaaaaccgatgggtctcctgtgatggctgccgtgcagaatccggccctgaccgcactgactaccccaatccagaccgcagctcttcaggtgccgacccttgtagggtcttctggtaccatcttaaccactatgcctgttatgatgggtcaagagaaggtgccaattaaacaggtacctggtggagtcaaacagctggaaccccccaaggagggggagaggcgcacaacccataatattatcgagaaaaggtatcggagcagcattaacgataaaatcatagagctgaaagatttagtcatgggcaccgatgcgaagatgcataagagcggcgtgctccggaaagcgatcgattacatcaagtatctgcagcaggtcaatcataaacttcggcaagaaaacatggtgctgaagttagccaatcaaaaaaacaaactactcaaagggatcgatctgggatcgctggtcgacaacgaggtcgacttgaagattgaggatttcaaccagaatgtgctgttgatgagcccccccgcttcagacagtggatctcaagctgggtttagtccttactctattgattctgagcccggatcaccattgctcgatgacgctaaggtgaaggatgagccagactcaccgcctgtggcccttggtatggtcgaccggtccaggatcctgctgtgtgtgttaaccttcctgtgcctgagttttaaccccttgaccagcctgctccaatgggggggcgcccacgactccgatcagcatccccactccggtagcggacgctccgtgctatccttcgaaagtggctcaggcggctggttcgattggatgatgcccactctgctgctgtggttggtcaatggtgtgattgtactatctgtgtttgtcaaactgttagtccacggggaacccgtgataaggcctcactcacgcagcagtgtgactttctggcgtcaccggaagcaggccgacctggacctggcaagaggcgtctatgggaagaagtccggggcaacccatagtatagaggaggaactcaacatccacatctcgagaggaactcggacccgaaccctccttagctctagaaggttttgctcttgctgtagacaacctaccaacctgcccgggagtttcggccctggaacagctcacctgccgcccgggcccggtctacaacccctgctggagagggacccactgcagcctgctgaggcgacccccggcgccctagcggcgcaagagtcactgccggtccccgctggacatgcatcgcactag

SEQ ID NO: 136416 - DNA, 3309 bp, synthetic construct
  misc_feature 1..3309: note = Description of Artificial Sequence: Synthetic coding sequence
  source 1..3309: mol_type = other DNA
atggacgatagcggagagctcggggggttggagacaatggaaactttgacagaactgggagacgagctgactctgggggatattgacgagatgctgcagttcgtgagcaatcaggtcggagagtttcctgaccttttttccgagcaattgtgttctagctttcccgggagcggcggaagtggatcgagctccggctccagtggaagcagttcgagctcaagcaacggtcgaggctcttcgagcggcgccgtcgacccatccgtacagcgaagtttcacacaagtaacactgccttctttctctcccagcgctgcgtccccccaggcccccacactgcaggtcaaagtgtcgccaactagtgtgccaaccacgcctagagcaacaccaatcctccagccaagaccacagcctcagccgcaacctcaaacccaactgcagcagcaaacggtcatgatcacacccacttttagcaccacaccccaaactagaatcattcagcagcctcttatttatcaaaacgcagccacctcgtttcaagtgctgcagccacaggttcagtcgttggtgacatcaagtcaagtgcagccggtcacaatccaacaacaagtccagactgtccaggcacaaagggttctcactcagaccgcaaatggcacgctgcaaaccctagccccagctactgtgcagaccgttgcagctccgcaagtgcagcaagtgcctgtgctggtccagccccaaattataaagacagactctttggtccttacgaccctaaagacagacgggtcaccagtgatggccgcagtccaaaaccctgcactgacagcacttaccacccccattcagacagccgctttgcaggtgcctacgctggttggctcctctggaacaatcttgacgaccatgcccgtgatgatggggcaagagaaggtgcccattaagcaggttcccggtggcgtgaaacaactggaacctcctaaagagggggaacgcaggactactcacaacattattgaaaaacgttatagatcaagtataaatgacaagatcattgaactcaaggacctagttatggggactgacgcgaagatgcacaaatccggggtgctgaggaaggcaattgactacatcaagtacctgcagcaagtcaaccacaaattgcggcaggaaaacatggtgctgaagctggccaaccagaaaaacaaactacttaagggcattgatctcggaagccttgtggataatgaagtcgacctcaagatagaagactttaaccaaaacgttcttttaatgtccccccctgcaagcgactcgggatcccaggccgggttctctccatactccatagattccgagcctggttcccctctgctggacgacgccaaagttaaagatgagcccgatagtcctcccgtcgctttgggcatggtggaccggtctaggattcttctgtgtgtcttaacattcctgtgtctctcctttaatcctctcacatcgctcctgcagtgggggggagcacatgacagcgaccaacaccctcactctgggtctggccgaagtgtgctctccttcgagtctggatccggaggctggttcgattggatgatgcccacactcctgctatggcttgttaacggcgtgatcgtcctgagtgtatttgtgaagctgctcgttcatggtgaaccagttatccggccgcattctagatcatcagttactttttggcgccatagaaagcaagccgatcttgacctggcaaggggcgacttcgccgccgctgcgggtaatttacagacatgtctggcagtgttaggacgggctctgccgacaagtcggttggatttagcttgttcgctgtcctggaatgttattagatattctcttcagaagcttcgcctcgtacgatggctcttgaagaaggtgtttcagtgccgccgagcaactccagctactgaggccggctttgaagacgaggccaagacaagtgcccgggacgccgctctggcataccacagactacaccagctgcacattaccggtaaactgcctgcaggttccgcatgctccgatgtccacatggccctgtgcgcagtgaacctcgccgaatgcgccgaggaaaaaatcccaccttcaaccctcgttgagatccacctaaccgccgctatggggctcaaaaccagatgtggggggaagttaggtttcctcgccagctattttctcagtcgtgctcaaagtctctgcggacctgagcattccgctgtgcccgacagcctccgatggttgtgtcacccactgggccaaaaatttttcatggagcgatcgtggtcagtcaagtcagcagcaaaggaatcactatattgtgcgcagcgtaatcctgctgatcccatcgcacaggttcatcaagcgttttgcaagaatctactggagcgagccatagaaagtttagtgaagcctcaggccaagaagaaggctggagatcaggaagaagagtcctgcgagttttcttctgccctagagtatctgaagctgctgcactcctttgtcgattctgtgggcgtcatgtctccccccctgtcacgaagctccgtgctcaagagtgcattagggccagacatcatatgtagatggtggacatctgccatcaccgtggcaataagttggctgcaaggcgatgatgccgcggtccgaagtcacttcaccaaagtcgagagaatcccgaaagccttagaagtcacagaaagtcccttagtgaaggccattttccacgcttgtagggccatgcacgccagtcttccaggcaaagcagatggacagcagagctcattctgtcactgtgagagagccagtggacacctttggtcctccttaaatgttagcggtgccacaagcgaccccgcgctgaatcatgtggtgcagctccttacctgtgatctgctgctgtccctccggacagcgttgtggcagaagcaagcaagtgcctctcaggccgtgggagaaacatatcacgccagcggagcagagctcgccggatttcaacgtgacctgggctctcttaggaggctggctcacagcttcaggcctgcttatcgtaaagtattcctacatgaagctacagtgagactgatggccggggcttctcccacccgaacgcaccaactgctggagcacagcctgcgccggagaacaacacagtcaacaaaacatggagaggttgatgcttggcccgggcaacgggaacgcgccaccgccattctgcttgcgtgccgacacctgcctctgtccttcctcccatgcctccagccctcctag

SEQ ID NO: 136417 - DNA, 648 bp, synthetic construct
  misc_feature 1..648: note = Description of Artificial Sequence: Synthetic coding sequence
  source 1..648: mol_type = other DNA
atgcacgccagtctgcccggaaaggccgacggccagcaatcctccttctgtcactgtgagagagcttcgggtcacttatggtcatctctaaacgtgagcggagccacaagtgaccccgcccttaaccatgtagttcagctcctgacatgtgatctgctattgtcattacgtaccgccctctggcagaaacaggcaagcgctagccaggccgtgggggaaacctatcatgccagcggagctgaactcgccggcttccagcgcgacctcggtagcttgagacgactggcccattcctttcgcccagcatacaggaaagtgtttctgcacgaagccactgttcgtcttatggccggtgcaagtcccacacggactcaccagttactggaacacagcttgcgccgacgaacaacacagagtacgaagcacggggaggttgacgcctggccgggtcagagggagcgcgcaactgctattttgcttgcctgtaggcacctcccattaagctttctttcaagcccaggtcaaagggccgtgctgctagctgaggccgcgcgcacactcgagaaagtaggggacagacgctcatgtaatgattgccagcagatgattgtgaaactgggcggcgggacggccattgccgcctcctag

SEQ ID NO: 136418 - DNA, 900 bp, synthetic construct
  misc_feature 1..900: note = Description of Artificial Sequence: Synthetic coding sequence
  source 1..900: mol_type = other DNA
atggatcttgtgctaagggtggctgattattactttttcactccttacgtgtatccagctacgtggccagaagacgatatattccggcaagctatctctctgctgatcgtaaccaacgtgggcgcctacatcctttacttcttctgtgcaacactgtcatactacttcgtgtttgaccatgccctgatgaagcacccgcaattcctaaagaaccaagtacgacgggagataaagttcacagtgcaagccctgccatggatctccatcttgacagtagccttgtttttgctggagattcgcggatactcgaaactccacgatgaccttggcgaattcccatatggcctctttgagttggtggtttcaattattagctttctgttcttcacggatatgttcatctactggatccatcgcggtttacaccaccggctcgtctacaaaaggttgcacaaacctcaccacatctggaagataccaacccccttcgcctcacacgctttccatcccatagacggctttcttcaaagcctaccttaccatatttacccatttatctttcccctgcacaaggtggtgtaccttagcctttacatcttggtgaatatctggaccatcagtatccacgacggcgacttcagggtgcctcagatcctgcagccatttatcaatggttcggctcaccacactgaccaccacatgttcttcgactacaactatgggcagtatttcacactttgggatcgaatcggcggatcatttaagaacccaagctcctttgagggtaagggacctcttagttacgttaaagaaatgaccgaagggaaaaggagttctcactcaggcaatggttgcaagaacgagaaactttttaacggcgaatttacaaagaccgagtag

SEQ ID NO: 136419 - DNA, 900 bp, synthetic construct
  misc_feature 1..900: note = Description of Artificial Sequence: Synthetic coding sequence
  source 1..900: mol_type = other DNA
atggacctggtcctgcgagtggccgactactattttttcacaccatatgtgtaccccgctacgtggccagaagacgacatttttcgtcaggccatttctctgctaatagtgacaaacgtcggcgcatatatcctgtacttcttctgcgccacgttaagttactacttcgtgtttgaccacgcactgatgaagcatcctcagtttctgaagaaccaggttcgccgggaaatcaagtttactgtccaagccctgccatggatctccattttgacggtagccttattcctattggaaattcgaggctacagcaagctgcacgacgacctcggcgagttcccttacggcctgttcgaactggtggtcagcattattagtttcctatttttcaccgacatgttcatttactggatccacagaggactgcatcatagactggtgtataagagactgcacaagccacatcacatctggaagatcccaaccccctttgcaagccatgcattccaccctattgacggattcctgcagagcttaccctaccacatatacccttttatatttcctctgcacaaagtggtgtacctgtccctgtatatacttgtgaacatctggactatatcaattcacgatggggatttcagagtgccacaaattctgcagccgtttatcaacggaagcgcacaccacacagatcaccacatgttcttcgattacaattacggccagtacttcactctctgggacaggatcggtggctcctttaagaaccctagctcgttcgagggtaaggggccacttagctacgttaaggaaatgacagaggggaagcggagctctcattccggaaacggttgcaagaatgaaaaactctttaatggggaatttaccaaaacagagtag

SEQ ID NO: 136420 - DNA, 192 bp, synthetic construct
  misc_feature 1..192: note = Description of Artificial Sequence: Synthetic coding sequence
  source 1..192: mol_type = other DNA
atggagggggccggcgctggctcagggtttcgtaaggagctagtgagcaggcttctgcatctgcactttaaagatgataagacaaaggaggcagccgtgcggggggtgagacaggctcaagccgaagatgccctcagggttgacgtggatcaattggaaaaagtattaccacagttgctgctcgacttctag

SEQ ID NO: 136421 - DNA, 246 bp, synthetic construct
  misc_feature 1..246: note = Description of Artificial Sequence: Synthetic coding sequence
  source 1..246: mol_type = other DNA
atggagggcgcgggagcgggatctggattccgcaaggagctggtttcccgtctgttacacctgcattttaaagatgataaaactaaggtctcgggggacgccctgcagctcatggttgagctgctgaaagtcttcgttgtggaagcagccgttcgaggggtgcgccaggcacaggccgaggacgccctccgggttgacgttgaccagctcgaaaaagtcctcccccagctcttactagacttctag

SEQ ID NO: 136422 - DNA, 2121 bp, synthetic construct
  misc_feature 1..2121: note = Description of Artificial Sequence: Synthetic coding sequence
  source 1..2121: mol_type = other DNA
atgggcggcaagggagggggggatacccggggtcccgtcctttttccctgtcagctggcacaggctctcagtccccgcagagcctttccccgcgagctcaaagagaaaggacagagaatgagtagccaacccgctggtaatcaaacttctcctggggccaccgaagactactcttatggttcgtggtatatcgatgagcctcaaggaggcgaggagctgcagcccgagggggaagtgccaagctgtcacaccagcattccgccagggctgtatcacgcctgcttagccagtttatcaatcctggtgttgctgctactggccatgctagttaggcgtagacagttgtggccggattgtgtccgaggtagacctggcttgccctctcctgtggatttcctcgctggagataggcctcgggctgtgcccgctgcagtcttcatggttctgcttagctctctctgtctgttgctacccgacgaggacgctctgcccttcctgactcttgctagcgcaccatcccaggatggaaagaccgaggccccgaggggcgcatggaagatcctggggttattttattacgcagccctctattacccgctggctgcttgcgccaccgcgggtcatacagccgcacaccttctcggatccactcttagttgggcacacctgggggtgcaggtttggcagagggccgagtgcccacaggttccaaaaatatataagtactactcccttctggcttcccttcctcttttactcggcttaggcttcctctctttatggtatcccgtccagctggtcaggtctttcagtaggcgcactggcgcaggatcaaaaggactgcagtcctcatatagtgaggagtatctacgcaatctgttatgccgcaaaaagctcgggagtagttaccacacctcaaagcacgggtttctctcctgggcacgggtctgcctgcgccattgtatctacaccccccagcctgggtttcatctgcccctgaaactcgtccttagcgcgacactgacaggaaccgccatttaccaggtcgccctgctgctgctggtcggagttgtccccacaatccagaaagtacgcgctggtgttactaccgatgtctcttatctgctagccggatttggcatcgtcttaagtgaagacaaacaggaggttgttgagttggtaaaacaccacttatgggcgctcgaggtgtgctatatatctgccctggtcctctcatgtctgctgacctttctcgtgctgatgcgcagcttagtgacgcataggaccaatttgagggctctccacagaggagctgcgctggatttgtcgcctttacaccgatccccccatccctcacgacaggcaatcttttgttggatgagcttctccgcatatcaaactgccttcatttgcttgggactcttggtccagcagattatcttttttctcggaaccaccgctctggctttcctggttctcatgcccgtgctgcatgggaggaatctactgctgttcaggtctctcgaatcgagctggccattttggttgaccctggccctggccgtgatcctccagaatatggcggcccactgggtatttctcgagacccacgacggacatccccagctgacaaaccggcgggttctatatgccgccacattcctcctgtttcccctgaatgtgcttgttggagccatggtcgccacatggagagtgctgctttctgccctctacaacgcgattcacttgggacagatggatctaagcttgctccccccacgggcagccactcttgaccctgggtactatacctatcgtaactttttgaagatcgaggtgtcgcagagccaccctgcaatgaccgctttctgcagtctgctcctgcaggcccagtctttactcccgaggaccatggccgcacctcaggacagcctgagacctggcgaggaggacgagggtatgcagctactccagacgaaagactcaatggccaagggagctaggcctggggccagccgcggacgggcgcgttggggactcgcgtacacgctacttcacaatccaaccctgcaggtgttccgcaaaacagctttacttggcgcaaacggtgctcaaccatag

SEQ ID NO: 136423 - DNA, 2004 bp, synthetic construct
  misc_feature 1..2004: note = Description of Artificial Sequence: Synthetic coding sequence
  source 1..2004: mol_type = other DNA
atgtcctcccagccggccggcaatcagacctcacccggggctacggaggattattcctacggctcctggtatatagacgagcctcagggaggggaagaactgcagcctgaaggagaggtgccgtcatgtcacacatccatccctcctggcctgtaccacgcttgtttagcttcattgtctattcttgtgcttctacttctagccatgctcgttcggcgacgccaactctggccagactgtgtgcgcggcaggcctggcctgccatcccctgtggacttcttggcgggggaccggcccagggccgtcccagccgcagtgttcatggtgctgctcagttcactttgtctgcttctccctgacgaagatgccctgccttttcttacactggcctctgccccttctcaggatggcaaaacagaggcacctcggggcgcctggaagatcctgggcctgttctattatgcagccctgtattatccactggcagcctgtgcgactgcggggcacaccgccgcccatctcctgggttccactttgtcctgggcccacctgggcgttcaggtctggcagagagccgaatgcccccaggtgcccaagatatacaagtactactcactgctcgccagcctgcctttgctactcggcttaggatttttgtccctgtggtatcctgtgcagcttgtcaggagcttctccaggaggacgggggcaggctcaaagggcctgcaatcgtcttacagcgaggaatacttgagaaatctattatgccgcaagaagctggggagtagctaccatacatctaaacatggattcttaagttgggcacgcgtgtgtctgcgccattgtatttacacaccgcaacccgggtttcatcttccactgaaactggtgctttcagctactctcactggaaccgccatctaccaagtcgcactgctacttctggtgggcgtcgtgcccactatccagaaggtaagggcaggagtgactacagatgtctcctacctcctggcaggtttcggcattgtgctcagcgaggacaaacaggaggttgtggaactcgtgaaacatcacctgtgggcattagaggtgtgctacatctctgcgctagtgctgagctgcctcctcacctttcttgtgcttatgaggtcccttgtgacgcacaggaccaacttaagagcgctccacaggggggcagcattggatctcagtccccttcatcgaagtccacatccctctaggcaagccattttttgctggatgagttttagcgcgtaccaaaccgcctttatttgccttggactgctcgttcagcagatcatcttctttcttggcactaccgcccttgcgttcttggtcttgatgccggtactgcacgggagaaatctgctcctatttcggagtctggaatcctcatggccgttctggctgacattagccctagcagtcattctgcaaaatatggccgcccattgggtgtttctcgagacccatgatggacacccacagctcactaacagacgggtgctctatgctgcaacctttctgctgttccctttgaatgtgctcgtgggagccatggtggctacctggcgggtcctgctgagcgccctgtacaacgccatacaccttggccaaatggatctttctctgcttccacccagagccgccactctcgacccaggttactacacctaccgtaattttctgaagattgaagtttcacagtcccatcctgctatgaccgctttttgcagtctcttgcttcaggcccagagtctcctgccacgcacaatggccgccccacaagacagtctcagacccggcgaagaggacgaaggaatgcagctgttgcaaacaaaggacagcatggcaaaaggggcccggcccggcgcctctagaggcagagcgcgctggggattagcttacacactgttacacaacccgactctccaggtgtttcgcaagaccgccctgctcggtgcgaacggggcgcagccatag

SEQ ID NO: 136424 - DNA, 2004 bp, synthetic construct
  misc_feature 1..2004: note = Description of Artificial Sequence: Synthetic coding sequence
  source 1..2004: mol_type = other DNA
atgagtagccagccggcggggaatcagacctctcccggggcgactgaggactattcctatggttcatggtacattgatgaaccccaggggggcgaagagctccagcccgaaggggaagtgccaagctgtcacacaagcatcccccccggactgtaccacgcctgtttagcctctttatctatcctggtcctgcttctgttggccatgttagtgagacgtaggcagctgtggccagattgcgtgcgtggaaggcccgggctcccttctccggtggatttcctggcaggagacagacctcgagcggtgccggccgctgttttcatggtgttgctcagcagtctgtgtttactcttaccagatgaggacgccttacctttccttaccctggcgagcgccccatcccaggacggcaagacagaggctccgcgaggggcttggaaaatcctcggactgttctattacgctgccctgtattatcctctggccgcttgtgcaactgccggacacaccgcagcccaccttctgggctctacactgagctgggcccatctcggtgtgcaggtgtggcaaagggccgagtgcccacaggtgcccaagatttacaagtactattctctgttggcgtccctcccattactgctcggcttggggttcctgtcactatggtacccagtccaactggtccgttccttctcccgccgaacaggggctgggagcaaaggactgcagtcatcctattctgaggaatacctgagaaacctgctatgtaggaaaaaactgggtagcagctaccacacttccaagcacggttttttgtcctgggccagggtgtgtctgagacattgcatttacactccccagccgggttttcaccttccgctaaaactggtactgtctgccactttgactgggactgctatctaccaagttgccttactccttctagtgggagtggtgccaactatccagaaggttcgggccggggtcaccaccgatgtgtcctatcttctggccggcttcggtatagtgctgagcgaggataaacaggaagtggtcgaacttgtgaaacatcacttatgggctttggaagtctgctacatctctgcacttgtgttatcctgtcttctgacattcctagtgctgatgcgctcactagtaacccatagaacgaacttaagggccctgcaccgaggtgctgcactcgacctctcccccctccatagatccccacatccttccaggcaggcaattttctgttggatgtcatttagcgcataccagaccgccttcatttgccttggcctcctcgtccagcaaatcattttctttcttgggaccacagctctcgctttcctcgtcctgatgccagtgctacatggccggaacctattactcttccgcagcctggagtccagttggcctttttggcttacgttggctctcgctgtgatcctccagaacatggccgctcattgggtgtttctcgagactcacgacgggcatcctcagttaacaaacaggcgggtgttgtacgcagctaccttcctactattccctcttaatgtactggttggtgctatggttgccacttggagagttctcctttctgccctttacaacgccatacacttggggcaaatggacttgtctttgctgccccctagggctgctactttggacccaggatactacacctaccgaaactttttaaagattgaggtgagccagtcacatcccgccatgacagctttctgctctcttctgttgcaagcacagtccctgctgccgcgtacaatggcagccccccaggattctctgcggccaggggaggaggacgagggaatgcagctgcttcagaccaaagattctatggcgaagggtgctagacccggtgcatctcgcggcagagcaagatggggactcgcctataccctgcttcataaccccactctccaggtgttccgcaagacagcccttttaggggccaatggagcccagccctag

SEQ ID NO: 136425 - DNA, 1800 bp, synthetic construct
  misc_feature 1..1800: note = Description of Artificial Sequence: Synthetic coding sequence
  source 1..1800: mol_type = other DNA
atgctggttcgaaggagacagctatggccagactgtgtgaggggtcggccaggcctgcccagcccggtagatttcttggccggagacagaccccgggcagtccccgcagctgttttcatggttctcctctcgtccctgtgtctgctcctgccagacgaagatgcactgccattcctcaccctcgcatccgccccatcacaagatggtaagactgaagcgccacgcggcgcttggaaaatcctgggcttattttattacgcagctctgtactatccactagctgcctgtgctactgcaggccatactgctgcccatctgttaggctctacactgagctgggctcacctcggcgtccaggtttggcagcgggcagaatgcccccaggtccctaaaatctataagtactattctttactggccagccttcccttattgctggggttgggcttcctgtccctgtggtatccagtgcagcttgtgcggtccttctcacggagaactggcgcaggaagcaagggactgcagtcaagctacagcgaagagtacttgcgaaatctcttgtgcagaaagaaactgggcagcagctaccacaccagcaagcacggttttctctcgtgggctcgagtctgcctcagacattgtatctatacaccacagcccgggttccacctcccactgaaattggtgctctcagcgacccttaccgggaccgccatctaccaggtagcacttctgctgcttgtcggcgtagttcccaccatccaaaaagtgagggccggtgttactacggatgtatcttatctgttggccggatttggtatagtgctcagcgaggataagcaggaagtcgtcgagcttgttaagcaccacttatgggcgctggaagtctgctacattagcgctctggtgcttagttgtctcctgaccttcctggttctgatgcggtctcttgtcacacacaggactaatttacgtgcgctccaccgaggagccgctctggatcttagccctcttcaccgctccccacacccgtccaggcaggctattttctgttggatgagttttagcgcgtatcagactgccttcatctgcctggggctgctcgtgcaacaaatcatcttttttctggggaccaccgctttggcctttttagtgttgatgcccgtactgcatggtaggaacttactgctgttccggtccctggagtcctcttggcctttctggctgaccctagccctggcagtcatcttacaaaatatggcggctcattgggttttcctggaaactcacgacggccaccctcagcttactaaccgccgcgtgctgtacgccgcaaccttcctcttgttccctctaaatgttcttgttggggccatggtggccacctggcgtgtgctgctgtccgcactttacaatgccatccacttgggccagatggatctcagcctgctcccaccgcgcgcagctactttggaccctggatattacacttacaggaatttcctgaaaattgaagtgagtcagagtcacccagcaatgaccgccttctgctctcttctgctgcaggcccaaagcctacttccgcggaccatggctgcaccacaagatagtttacgtccaggggaagaagacgaaggcatgcagctcctgcaaacgaaggactcaatggcaaaaggcgcacgccccggcgcgagtcgaggacgtgcacgttggggtcttgcttacacactgctgcacaaccccaccctgcaagtgtttcgcaaaacggctcttttgggggcaaacggcgcgcagccctag

SEQ ID NO: 136426 - DNA, 1977 bp, synthetic construct
  misc_feature 1..1977: note = Description of Artificial Sequence: Synthetic coding sequence
  source 1..1977: mol_type = other DNA
atgtcgtctcagcctgccggaaatcagacaagtcctggcgctacagaggattatagctatgggtcatggtatattgatgagccccagggcggtgaggagctgcagccagagggggaggtaccgtcttgccacacatccatcccccccggcctgtaccacgcctgtctggcaagcctctctatcctggtcctgctgcttttggcgatgctggtccgacgcaggcagttgtggcctgactgtgtgagaggccggcccgggctgccccggcctcgagccgtacctgccgctgtgtttatggtactcttaagctccctgtgcctgcttctcccagacgaggatgcccttccttttctgactcttgcttccgcgccgagccaggacggaaagaccgaggcccccaggggcgcctggaagatcctgggcctcttctattacgccgctttgtactaccccttggccgcttgtgctaccgctggccatactgccgcccatctgcttggctcaaccctgagttgggcgcatctgggggtccaggtctggcaacgggccgagtgcccccaagtacccaagatttacaagtattattccctgctggcgtctttgcctctgctcctgggacttgggtttctgtctctgtggtaccccgtccagctcgtgcgttcattctctcgcagaactggtgcgggttctaaaggactccagagctcttattcagaggagtacctaaggaatctgttatgccggaaaaagctgggcagctcctaccatacctctaagcacgggttcctcagttgggcgcgggtatgcttaagacactgcatctatactccgcagccaggatttcatttaccattgaaactggtgttatcagctacactcaccggtacggcaatctaccaggtcgccctccttcttttggtcggtgtggtgcccacaatccaaaaggtccgcgcgggagtgacaactgacgttagctacctcctggcaggctttggaatagttctgagcgaggacaagcaggaagtcgtcgagctggtgaaacaccacctctgggctttagaagtttgctatatttctgctctggtgctctcttgtctcctgacttttttggttcttatgcggagcctcgtgactcaccgaactaatttgcgtgctttgcatcgcggagccgcgctcgatctgtccccactacatcgatcccctcatccatccagacaggcgatcttttgctggatgtctttctctgcttatcagaccgcttttatctgcctgggactgctggtgcagcagattattttctttctgggaacaactgcactcgcatttctcgtgctaatgcccgttctccatgggagaaatctgcttttgttcagaagtctggaaagctcttggccattctggctgaccttagcactcgccgttatactgcagaacatggcagcacattgggttttccttgagacccacgacggacacccccagctgacaaaccggagagtcttgtacgcagctacattccttctgttcccattaaatgtgttggtcggcgcgatggtcgccacctggcgcgtgttactgtcagctttgtacaacgcaattcacttaggacagatggatttgtccctcctgccccctcgcgccgccactcttgacccaggatattacacttaccgcaacttcctgaaaattgaggtgtcacagtctcatcccgctatgaccgctttctgttccctgcttctgcaggcccaatctctgctgcctaggacaatggctgctccccaggactccctaagacccggagaagaggatgaaggaatgcaactgctgcagacaaaagattccatggcaaagggcgcgaggccaggtgcgagccgtgggcgcgctcgttggggcctggcatacacattattgcataatcctacattacaggttttccgaaagacggccctgctgggggccaatggcgctcagccctag

SEQ ID NO: 136427 - DNA, 480 bp, synthetic construct
  misc_feature 1..480: note = Description of Artificial Sequence: Synthetic coding sequence
  source 1..480: mol_type = other DNA
atgtcctcacagcctgccggtaatcaaacctctccaggagctaccgaagactattcctatggaagctggtacatcgatgaaccccagggaggggaggaactgcagccggagggggaggtgccctcatgccacacatcaattcctcctggtctctatcatgcctgcttggcatccttaagtatcttggttctgctgcttctcgcaatgctggtaaggcgcaggcaactatggcccgactgcgtcaggggtagacctggcctgccatctcctgtagatttcctcgcaggagatcggccccgggctgttcctgccgccgtgttcatggtgcttctctcttctctctgtctgctacttccagacgaggatgcgctgccattccttacgcttgcttccgcacctagccaggatggaaagactgaggccccccgagggaacctgcccaagataaccgagttgcggctggttagagcctggatctag

SEQ ID NO: 136428 - DNA, 2121 bp, synthetic construct
  misc_feature 1..2121: note = Description of Artificial Sequence: Synthetic coding sequence
  source 1..2121: mol_type = other DNA
atgggggggaaggggggtggggacacgcggggcccagttctcttcccttgccagctggcccaggccctcagcccaagaagggcgtttccccgcgagctgaaagaaaaaggccagagaatgtcttcccagcccgcaggaaatcagaccagcccaggggccacagaggactactcctatggcagttggtacatcgatgagccacagggtggcgaggagctgcagcccgaaggtgaagtgcccagttgtcacacgagcattccccccgggctgtaccacgcgtgtctcgcaagcttgtcaatcctggtgctgttactgctcgcaatgctggtgaggcgcaggcagttgtggcccgattgtgtacgtgggaggcccggtttgccttctcctgtggacttcctggcaggggatcggccccgagccgttcctgcagccgtctttatggtgctgctgtcctctttgtgccttctattgcctgacgaggacgctctcccgtttttgaccctggcctcagccccatctcaggacggaaaaacagaggccccaagaggcgcctggaagatattggggcttttttactacgctgccctttactatccactggcagcctgtgctaccgctggtcatacggcagcacatctgcttgggtcaacactgagctgggcccacctaggagtccaggtttggcagcgcgccgaatgtccgcaggtacccaagatttataaatattactctttgctggccagtctcccgctgcttcttggactggggtttctttccttgtggtatccagtccagctggttcgctcctttagcaggaggaccggggcaggttctaaagggctgcagagttcttatagtgaagagtacctgcggaatcttctctgtcgcaagaagcttggttcttcttatcacacgtccaaacatgggtttctgtcctgggcgagggtttgcttgaggcattgcatctatactccgcagccgggatttcacttgcctttgaagttagtcctgtcagccaccttgacaggaaccgcaatctatcaagtggccctgcttctgctggtgggagtagtcccaacaatacagaaggtcagagctggtgtgacgaccgacgtgagctacctcctcgctggcttcgggatcgtcctctcagaagacaaacaggaagttgttgaactggtgaaacaccatctatgggctctggaggtgtgctacattagtgccctcgtcctctcatgtttgctgacattcctggtgctgatgcgcagccttgtgacccatagaactaatttgagggcattgcaccgcggcgcagcactggatctgagtcctcttcacaggtcacctcaccccagtaggcaagccattttctgctggatgtcattttctgcctatcagactgctttcatctgcctgggtctgctggtccagcagattatattctttctgggtactaccgctctcgcctttctcgtacttatgcctgtgcttcatgggcgaaatctcctgctctttcggtcgctcgagtcaagctggcccttctggctgaccttagccctggcagttatcctacagaatatggctgctcactgggttttcctggagacccacgatgggcaccctcagttaacgaatagacgggtgctctacgcagccacgtttctcctgtttccactgaatgtgcttgtgggtgcaatggtagccacttggcgggttctcttatccgccctgtacaatgcgatccacctgggacagatggacctgagcctgctcccgccgagggcagccacgttagatccggggtactatacctacaggaatttcttaaagatcgaggtgtcacagtcccacccagcaatgaccgcattttgctcgcttttactgcaggcccagtctctgttgccaagaaccatggccgccccgcaagactcactgagaccaggagaggaggatgaaggaatgcagctcctccaaaccaaggattccatggccaaaggggcacggccaggggccagcagggggcgggctcggtggggtctggcctatacgctgctccacaaccccactcttcaagtatttcggaaaacggccttattgggggcgaatggagctcaaccctag

SEQ ID NO: 136429 - DNA, 2115 bp, synthetic construct
  misc_feature 1..2115: note = Description of Artificial Sequence: Synthetic coding sequence
  source 1..2115: mol_type = other DNA
atgcagatccggctcctgagagcagagctggttgtaccactgtggcagttcattaggcagtggccaccagggtcagatggctgggggcaaatggaggagaagggacagaggatgtcatcacagccggccggaaaccagacaagtcctggagcaactgaggattacagctatggctcgtggtacatcgatgagcctcagggtggtgaagaactgcagcctgaaggagaggtcccttcctgccacacgagtatcccacctgggttgtaccatgcttgtttggctagcctttccatcctggttctgctacttctggcaatgctagtgcgccgccggcaactgtggcccgactgcgtcagaggcaggcccggactgccttcacccgtggatttcctggctggagatcgcccaagagccgtgcccgcggccgtgttcatggtgctgctgtccagtctgtgtctgctgctcccggacgaggacgccctgccattcctgaccctggcctccgccccaagtcaggatggcaagaccgaagctcccaggggagcttggaaaatcctcggacttttctactatgccgctctgtactacccgctggcggcctgcgccaccgcaggacacacagcagcgcatctcctaggctccacattgagctgggcacatctcggagtacaagtctggcagagggccgagtgtccacaggtgcctaagatttacaagtattatagcctcctggccagcctgcctctgctattaggcctagggtttctcagcctgtggtatcccgtccagctagttcgcagcttctccagaaggaccggcgcaggaagcaagggactccagtcatcttacagcgaagaatatcttagaaatctgctgtgtcgtaagaagcttggcagcagctaccacacctccaagcatgggttcttatcttgggcacgggtgtgccttaggcactgcatctacactcctcagccaggtttccatcttccactgaagttggtactgtcggccacgttgaccggaacagctatctaccaagtggccctccttcttcttgtgggtgtcgtacccacaatccagaaggtaagagccggcgtgacgactgacgtatcatatctgcttgccggcttcgggattgtcttaagcgaggacaagcaggaggtagttgagttagtgaagcaccatctttgggcgcttgaggtgtgttacatttcagccctggtgctcagctgtctactgacattccttgtcttaatgcgctcgctggtgacacatcggacgaatctcagggccttgcacagaggcgcagctctggacctctctccattacacagatctccccacccatcacgccaagcaatcttctgttggatgtccttctccgcatatcagacggctttcatttgcctcggcctcctggtgcagcagataattttttttctcgggaccacagccctcgctttccttgtactgatgcccgtcctgcacggacgaaacttgctgctgttccgctcactggagtcctcatggcctttctggctcacactcgcacttgccgttattctacagaatatggccgcgcactgggtttttcttgagacgcacgacgggcacccccaacttaccaacaggagagtgctgtacgccgccactttccttttattcccgctgaatgtattggttggggctatggtggccacctggcgggtgctgctgtccgccctgtacaacgccattcacctggggcagatggaccttagcttgctgccgcctagggcagcgacactggatccaggttactatacctacaggaatttcctgaagatcgaagtcagccaatcacaccccgccatgaccgccttctgttctttgctcctgcaggctcaatcattgctccccaggacaatggccgcacctcaagattcactcagacctggggaggaagatgagggaatgcagctgcttcaaactaaagactctatggccaaaggggctcgtccaggcgctagcagggggcgcgctaggtggggcctggcctatactctcctgcataatcctacactgcaagtattcagaaaaactgccctcctcggagcaaatggcgcccagccgtag

SEQ ID NO: 136430 - DNA, 1674 bp, synthetic construct
  misc_feature 1..1674: note = Description of Artificial Sequence: Synthetic coding sequence
  source 1..1674: mol_type = other DNA
atggccgcaggaaccagcatgtcacccgatgaggacgcgctgccctttctgaccctggcatctgcccctagtcaggacggtaagacagaggctcctaggggcgcttggaaaatattgggcctcttctattatgcagccctgtattaccctctcgcagcctgtgctaccgcaggccatacggctgctcacctgttggggtcaaccctgtcttgggcacacctaggggtccaggtttggcagcgagctgagtgtccccaagtgcctaaaatttataagtactatagcctgttggctagccttcccctcctgctgggcctgggcttcctgtctttgtggtacccagtccagctcgttaggtccttttcacgtcgcacgggtgcgggaagtaaaggcctgcagtcctcctactctgaagagtatcttagaaacttgctgtgcagaaaaaaactaggatctagttatcatacttccaagcacgggttcttgtcctgggccagagtgtgcctccggcattgcatctacactccacaacccggcttccatctgccacttaaactggtgctctcagcaactcttaccggaactgcaatctatcaggtcgccctgctcctcctggtgggggtggtccccactatccagaaggtgcgcgcaggcgtgacgactgacgtgagctatcttctcgcagggtttgggattgtgcttagtgaggacaagcaggaagtagtcgagctggtgaagcaccatctgtgggccttggaggtttgttacatttctgccctagttctgtcgtgcctgctgacctttctcgtgctcatgagatcacttgtgacccataggactaacttgcgtgccctccaccgcggggcagccctcgatctctccccacttcacaggtcgccacatccgagccgacaggccattttctgctggatgtcattctcagcttaccaaactgccttcatctgcttgggccttctggtgcaacaaattatcttctttcttggtactaccgcactagcctttttggtgcttatgccagtccttcacggaagaaacctgctattatttagatccctggagtcctcttggcccttttggttgacactggcccttgccgttattctgcaaaacatggcagcccattgggttttcctggagacacacgatggacaccctcaactcaccaaccgtcgcgtgctgtatgcggcaacttttctgcttttcccgctgaatgtgctggttggcgcgatggtggcgacatggcgcgtgctgctttcagctttgtacaacgctattcatctcggccagatggacttgagcctcctgcccccgagagccgctactctcgacccaggctattacacgtaccggaacttcctaaagatcgaggtctcccagtcccaccccgcaatgactgccttctgtagtctactcctgcaggcacaatccctattgccgcgtacaatggccgcgccgcaggactctctaagacccggggaggaggatgaggggatgcagttacttcaaaccaaggatagtatggctaagggagcgcgcccaggggccagcagaggacgcgctcgttgggggttggcgtatacactgttgcacaacccaacgctccaggtatttcgcaaaactgctttactgggtgcgaacggcgcgcagccctag

SEQ ID NO: 136431 - DNA, 1431 bp, synthetic construct
  misc_feature 1..1431: note = Description of Artificial Sequence: Synthetic coding sequence
  source 1..1431: mol_type = other DNA
atggggaagttgagactgcaggaaatttataaatattacagcctactagcgtccctccctctgctcctggggctcggtttcttgagcctgtggtatcctgtgcagctggtgcgctcctttagccggagaaccggggctggatccaagggactgcagagcagctactccgaagaataccttcggaatttgctgtgccgtaaaaagcttggatcctcttaccacacatcaaaacacgggttcttatcatgggcacgcgtgtgtctgagacactgcatctacactccacagcctggctttcacttaccgttaaagcttgtcctatccgccaccctcactggcacagcaatctaccaggtagccctattgcttttggtcggagtggtgccgacaatccagaaggtaagagctggtgtgactacggatgtgtcctacctgctagccggattcggaatcgttctctcagaagataagcaagaggtagtcgagttggtcaagcatcatttgtgggccctggaggtctgttacatcagtgcattggtgctgtcatgcttgctgacgtttctggtgcttatgcggtcactggttacccacaggaccaacctgcgcgccttacacagaggggccgctcttgaccttagcccgctccaccgctcgccacacccaagccgccaggctatcttttgctggatgtctttttccgcctaccaaaccgcatttatctgtctggggctgctggtccagcagataatcttcttcctgggtacaactgcactggccttcctggtccttatgcccgtcctgcacggccgaaatttgctgctgttccggtctctggaatcctcctggcccttctggctgacactcgccttagctgttattctgcaaaacatggccgcccattgggtgttcctcgaaacgcatgacgggcacccccagttgacgaatcgacgcgtcctatatgctgcaacctttttgctgttccctttgaatgtgctagtcggggctatggtagctacttggcgggtgttgctgagcgcactatataatgccatccacctcggacagatggacctaagcttacttccaccccgagcagccaccttagatccaggctactatacctataggaattttctgaaaattgaagtatcacagagccaccccgctatgacggctttctgttcacttttgctgcaggcgcagtccctgctgccgcggactatggctgccccacaggactcgctgcggccaggcgaggaagatgaggggatgcagctgctccagaccaaggattcaatggctaagggagccagacctggtgcctcccggggcagagcccgctggggcctggcctacacccttctccataatcccacgctgcaggtgtttagaaagactgccttgttgggagcgaacggcgcccagccctag

SEQ ID NO: 136432 - DNA, 993 bp, synthetic construct
  misc_feature 1..993: note = Description of Artificial Sequence: Synthetic coding sequence
  source 1..993: mol_type = other DNA
atgggcaaaatcgacgtggacaagatcttgttcttcaaccaagagatccgcctctggcagctgataatggcaacacctgaagagaacagtaatcctcatgaccgggcaacaccccagctccctgctcagttgcaagaactggagcacagagtagcccgaagacgcctcagtcaggctagacatagagctacactcgccgccctctttaataatctgcggaagactgtttattctcagtcagatcttattgcaagtaagtggcaggtgctgaataaggccaaatctcacatacccgagctcgagcagaccctggacaacctgcttaaactcaaagccagtttcaacctcgaggatgggcatgcttcctccctggaggaagtgaaaaaagaatacgccagcatgtactcaggcaacgattcgttcccacaaaatggaagctctccgtggtacctaaacttttataaacagactatggacctgttgactgggagtgggatcattaccccgcaggaagcggcactaccaatcgtgagtgcagcgattagccacctctggcagaacctgtcagaggaacgaaaggcatcgctgagacaagcttgggcccagaagcaccggggacccgcaacactggctgaggcttgtcgggagcctgcttgcgccgaagggagcgtcaaggattccggagtggacagtcagggtgcttcatgttccttggtgtccaccccagaggaaatccttttcgaagacgcctttgatgttgcaagcttcctggataagtcggaggtaccttccacctcgagtagcagctctgtgctggctagctgtaatcctgaaaatccagaggaaaagtttcaactgtatatgcagattataaatttttttaaggggttaagttgcgcaaatacgcaggtgaaacaagaggctagctttcctgttgacgaagagatgatcatgctgcagtgtactgagacattcgacgatgaggacttgtag

SEQ ID NO: 136433 - DNA, 882 bp, synthetic construct
  misc_feature 1..882: note = Description of Artificial Sequence: Synthetic coding sequence
  source 1..882: mol_type = other DNA
atgggctttcctgctgcagctcttctgtgtgcactgtgttgtggcctgctcgcacccgccgcacgggctgggtacagcgaggagcgttgcagctggagagggagcgggttaacacaagagcctggatctgtgggccagctggcactggcctgcgccgaaggagccgtggagtggctctatcctgccggggcactccgcctgaccctgggcggcccagaccctcgagcgagacctggcatcgcgtgtctgaggcctgtgagaccattcgcaggcgcccaggtgttcgctgagcgcgcgggaggggctcttgaactcctcctcgctgaaggacccggtcctgcagggggcagatgcgtacgctggggccctagagaacgccgggccctgttcctgcaggccacacctcaccaggatatatcacgacgggtcgccgccttccggttcgagctgcgagaggacgggcgacccgagttaccaccccaggcgcacgggttgggcgtagacggggcatgtaggccctgctcagacgcagagctgcttctcgcagcctgtacttcggattttgtgatacacggcatcatccacggagtgacacacgacgtggagttgcaagagtcggtcatcaccgtcgtggcagctcgggtattacgccagaccccacctctgtttcaggccggaaggtctggggatcagggtcttactagtatccggacccccctccgctgcggagtccatcccggccccggcaccttcctgttcatgggatggagtcggttcggcgaggcccgcctgggttgtgccccaagattccaagagttccgacgcgcgtatgaggccgcgcgcgctgcccacctgcacccatgcgaggtggctctgcactag

SEQ ID NO: 136434 - DNA, 1197 bp, synthetic construct
  misc_feature 1..1197: note = Description of Artificial Sequence: Synthetic coding sequence
  source 1..1197: mol_type = other DNA
atgctcgggcgctctggttaccgtgccctgcccctgggggattttgatcgatttcagcagtcgtcctttggtttcctgggatcgcagaaaggctgtctgagtcctgagcgcggcggcgttggtaccggtgcagatgtgcctcagtcttggcctagttgtttgtgtcatggattgatatctttcctgggatttctgcttctgttagtgaccttccctatctccggctggtttgcattgaagatagtgccaacatacgaaaggatgatcgtttttaggttgggtaggataagaaccccgcaggggcccgggatggtgctgctcttgccattcattgatagctttcagcgcgtcgacctgagaacacgggctttcaatgtgcccccatgtaaactggcctctaaggacggagcagtgctgtccgtgggcgctgacgttcaatttagaatatgggaccccgtcctgagcgtcatgacagtgaaggatctgaacacggccacaaggatgaccgcccagaatgctatgaccaaagctttactcaagcgccctttgcgtgagatccagatggaaaagctgaaaatctcagaccaacttctcctggaaatcaatgatgtcacgagagcttggggccttgaagtggacagagttgagctcgccgtcgaggccgtgctacagcctccacaggattcaccagccgggcccaatcttgattctaccttacagcagctagccctccacttcctcggggggagtatgaacagcatggctggcggcgctccaagtcccggaccagccgatacagttgagatggtgtctgaagtcgagccccctgcgcctcaagttggggcccgcagctcccctaagcaaccactggcagaaggtctgttgactgccttgcagccctttctgtcagaagccctcgtgtcacaagtaggagcttgctatcaatttaatgtcgttctcccatccgggactcagtctgcttattttttggacctcacaaccgggcgggggcgggtgggccacggagtcccagatggaattcccgacgttgtggtcgaaatggcagaggcagacctgcgggccttgctttgccgcgagttaagacctctcggggcctacatgagtggcaggctgaaggtgaagggagacttggctatggcaatgaaactggaagcagttctgcgggccctcaagtag

SEQ ID NO: 136435 - DNA, 1047 bp, synthetic construct
  misc_feature 1..1047: note = Description of Artificial Sequence: Synthetic coding sequence
  source 1..1047: mol_type = other DNA
atgcttggcagaagcggttatcgggcactccccctcggcgattttgacagatttcagcagtcctcctttggcttcctaggttcacagaaaggctgtctcagtccggaaaggggcggggtggggactggggccgatgtgcctcaatcgtggccctcttgcttatgccacgggttgatctcctttctgggcttcctgttgctgctcgtgacctttcccatctctggttggtttgccctgaagctggcttctaaagatggcgcggtgctgtcggtcggagccgacgttcagtttaggatctgggacccggttctgagcgtgatgaccgtcaaggatttaaatacagcaactcggatgacggcgcagaacgccatgacgaaagctttgttgaaacgtccacttcgcgagatccagatggagaagctgaaaatttctgatcagctgctactcgaaatcaacgacgtgacaagagcatggggtctggaggttgatcgagtagagctggctgtagaagccgtgttgcagccgccacaagactctcctgcaggaccgaaccttgattcaaccctccaacaattagccctacacttcctaggaggatcgatgaattccatggccggaggcgcgccctctcctgggcctgcagatactgtggagatggtgagcgaagtcgagccgcctgcaccacaagtcggcgccagaagctccccaaagcagcctctggctgagggcctcttgacagccctgcagccattcctgtctgaggcactggtctcccaagtcggcgcatgctaccagtttaacgtggtacttcccagcgggacccaaagcgcctactttctcgatctcacaaccggcagaggacgggtagggcatggagtcccagatggtatcccggacgtcgtggtggagatggccgaagccgatctcagggcccttttatgccgggaattgaggccccttggtgcctacatgagcggtcgcttgaaagtgaagggagatcttgccatggcgatgaagttggaagccgttctccgtgctctaaagtag

SEQ ID NO: 136436 - DNA, 984 bp, synthetic construct
  misc_feature 1..984: note = Description of Artificial Sequence: Synthetic coding sequence
  source 1..984: mol_type = other DNA
atgctggggagatctggctatcgagctctgccccttggagacttcgaccgattccagcaaagttcctttgggtttctaggcagccagaaagggtgcctgtcaccagagagagggggagtgggcaccggggccgatgtcccacaatcctggcctagttgcctttgtcatggcctgatttctttcttgggctttcttctgttgctggtgacttttcctatctcagggtggttcgccttgaagatcgttcccacgtacgaacggatgattgtgttccggctcggccggatcagaacccctcaggggccgggaatggttttactcctgccatttattgattccttccagcgcgtggacttgagaactagagcctttaacgtgcccccctgtaagctggcatcgaaggatggggccgttctttctgtgggggcggacgttcagttcaggatttgggaccctgtgttatccgtgatgactgtgaaagacctaaatactgctacgagaatgactgcacagaatgctatgacaaaggcactgctcaaaagaccacttcgcgaaatacagatggagaaactgaagatctccgatcagcttctcctcgagatcaatgatgtcactagggcatggggactcgaggtggatcgcgtggagctcgctgttgaggctgtcctgcagccaccccaggattcgcccgcggggccaaacctcgactctacactgcagcaactggcactgcactttctgggcgggtctatgaattctatggctgggggcgccccttctccgggaccaggccgcggccgtgtcggacatggagttccagacggaattcccgacgttgtggtagaaatggcagaagccgacctcagagcccttctgtgccgcgagctgagacctcttggcgcttacatgtcaggccgactcaaagtgaaaggtgaccttgcaatggccatgaaacttgaggcagtcctgcgggccttaaaatag

SEQ ID NO: 136437 - DNA, 1068 bp, synthetic construct
  misc_feature 1..1068: note = Description of Artificial Sequence: Synthetic coding sequence
  source 1..1068: mol_type = other DNA
atgccagacgttccacagtcctggccatcctgcctctgccacggactcatttcattcctgggttttctcctgctcttggtcacgttccctatcagcggctggtttgctttgaagatcgtccccacttacgaaagaatgatagtatttcgccttggcagaatccgaactccccaaggacccggtatggtgctcttactccctttcattgactcatttcagagagtggacctccgcacccgagccttcaacgtacctccatgcaagctagcaagtaaagatggagcagtactgtctgtgggcgccgacgtccagttcagaatctgggatcctgtcctttccgtaatgaccgtaaaggacttgaacacagccactagaatgacggcccagaatgccatgacaaaagccctgctcaagcgccctctaagggaaatccaaatggagaagcttaagataagcgaccagctgttactggaaatcaatgacgtgacaagggcatggggattagaggtcgaccgggtcgaattggccgtcgaggcggtcctccaacctcctcaggattcccccgccggacctaacctagattctaccctgcagcaactcgccctccatttcttaggcggctcgatgaacagcatggctggcggcgctccttcgcctggccctgacaccgtggagatggtcagcgaggtcgaaccacccgctccacaggtaggggcccggtcttccccaaagcagcccctcgcagagggtttactgacagccctgcaaccattcctgtcagaggcattggtgagtcaggttggcgcctgttaccagttcaatgtggtactgccctctggcacccaatccgcttactttctggacctgacaacaggtaggggacgcgttggccacggcgtcccagacggaattccagatgtggtggtggaaatggccgaagcagatttacgagcactgctatgcagggagctccgccctctgggagcctacatgtccgggaggctcaaagtgaagggagatctggctatggcaatgaaattggaagcagtgcttcgggccctcaagtag

SEQ ID NO: 136438 - DNA, 933 bp, synthetic construct
  misc_feature 1..933: note = Description of Artificial Sequence: Synthetic coding sequence
  source 1..933: mol_type = other DNA
atgatagtgtttcgtctgggtagaattcgcacacctcagggcccaggaatggttcttctgcttccattcattgactccttccaacgcgtggacctcagaacgcgagctttcaatgtgccaccttgtaaattggcctcaaaggacggcgccgtgttaagcgtgggcgcggacgtgcaatttagaatctgggaccccgtgctgtcggtaatgactgttaaggatttgaacacagctacaaggatgaccgcccagaacgctatgacaaaggccctgttgaaacgcccccttcgggagatacagatggaaaagctcaaaatttcagatcagttactgctggaaatcaatgacgtgaccagggcctgggggctggaggttgacagggtggagctggctgtggaagccgtgttacagccacctcaggactcccctgcagggccgaacttggactctactctgcaacagttagccctccatttcctgggtgggtctatgaactcgatggcagggggcgctccttctccaggaccagacactgtggagatggtctccgaggtggaaccgcctgctccacaggtaggagcacgatctagcccaaagcagccgctcgccgaaggactattaactgctctgcagccttttctgtccgaggctctggttagtcaggtaggcgcttgctatcagttcaacgtggtactgccatcagggacccagtccgcatattttctggacttgacaaccggcagaggacgtgtggggcatggtgtccccgatggtatccccgacgttgtggtggagatggccgaggccgatctcagagccctgctgtgcagagagttaaggcccctgggcgcttacatgtcaggaagattgaaagtcaaaggcgatctggcgatggccatgaagttggaggcagttctcagggcgctcaaatag

SEQ ID NO: 136439 - DNA, 1044 bp, synthetic construct
  misc_feature 1..1044: note = Description of Artificial Sequence: Synthetic coding sequence
  source 1..1044: mol_type = other DNA
atgctaggcaggagcggctaccgggctctcccactgggcgacttcgacaggtttcagcaatccagcttcggattcctgggatcccagaagggctgcctctcaccagaacgagggggtgtgggcaccggcgccgacgtgcctcagtcctggcctagttgcctgtgccatggactgataagtttcctgggctttctgctgcttctggtgactttccccattagcggatggttcgcccttaaactcgcatcaaaggatggcgcagtgctgtccgttggagccgatgtgcaatttaggatatgggatcctgttttgtccgtgatgacagttaaggaccttaacaccgctacaagaatgaccgcacagaacgccatgactaaggcactcttgaagcgtccactgcgcgagatccagatggagaaacttaagatttctgatcagctgctgctggaaataaatgacgtcacgagggcttgggggctggaggtggaccgcgtggagctcgccgtggaagccgtgctccaaccgcctcaggattccccagccggaccaaatttggattccaccctgcagcagctcgcgctgcattttctgggagggtccatgaactccatggccggtggggctcctagccctggaccagacactgtcgagatggtcagcgaggtggaacctcctgcccctcaggtgggagctcggtcaagtcccaagcagccattggctgaaggccttctcaccgcattgcagcccttcctatccgaagcacttgtgtcccaggtcggggcgtgctaccaatttaatgtggtcctgccatcggggacacagtcagcttacttcctcgaccttacgacagggagaggccgcgtggggcacggcgttccggatgggattcccgatgtcgtcgtggagatggccgaagcggacctgagagctctcttgtgtagggaattgcgacctctcggggcctatatgtctggcaggttgaaagttaaaggggacctggcaatggccatgaaattggaggccgttctgagagcactcaaatag

SEQ ID NO: 136440 - DNA, 1071 bp, synthetic construct
  misc_feature 1..1071: note = Description of Artificial Sequence: Synthetic coding sequence
  source 1..1071: mol_type = other DNA
atgctcgcaagagccgctcggggaaccggtgcgctccttcttcgtgggagtctcctcgcatccggacgcgctccccgccgtgcatcatctggcctgcctaggaatacggtggtgctgtttgttccacagcaggaggcatgggtcgtcgagagaatgggccgcttccacaggattctcgagcctggcttgaatatattgattccagtattggacaggatccgttatgtgcagtccttgaaagaaatcgtgatcaatgtcccagagcagtccgccgtgacattggacaatgtgacgctgcagatcgatggcgtgctgtacctgcgcatcatggatccttacaaggcctcttatggtgtggaagacccagagtacgcagtaactcaactggctcagaccaccatgcggagcgaactgggaaaactctcacttgacaaagtgtttcgcgaacgagagtctctcaatgccagcatcgttgacgctattaaccaggccgctgattgctgggggatccgctgtcttaggtacgagatcaaagatatccatgtaccacctagggtgaaggaaagcatgcagatgcaggtggaagcagaacgtcggaaacgcgccactgttctggaatcagagggtacccgggagagcgcaattaacgtggcagagggtaaaaagcaggcccaaatcttagcgtccgaggccgagaaggctgaacagataaaccaggccgcgggggaagcttctgctgtcctggcgaaagcaaaggccaaggcagaggcgatacgtatcctcgcagcggccctcacccagcataacggcgacgctgctgccagcttgacggtggcagagcaatacgtgagtgcattttctaaacttgccaaagactcaaacactattctgctcccctctaacccgggcgacgtaacctctatggtggcacaggccatgggtgtatacggtgcgctgactaaggctcctgtacccgggacacctgattcgctgtcttccgggtcgtctagggacgttcagggcacagacgcgagcttggatgaagaactggacagagtaaagatgtcatag

SEQ ID NO: 136441 - DNA, 936 bp, synthetic construct
  misc_feature 1..936: note = Description of Artificial Sequence: Synthetic coding sequence
  source 1..936: mol_type = other DNA
atgttggctagagccgctcggggtaccggtgccttgttgttgcgcggaagtctgctggcatctggtagggcccccaggcgggcctcatcagggctgcctagaaacactgttgtcctgtttgttccacagcaggaagcttgggtcgtcgaaaggatgggtcggtttcatcggatactggagcccggactgaatattctcatccccgtcctggaccgaataagatacgtgcagtctttaaaagaaattgtgattaacgttcccgaacagtccgcagtcacgctcgacaacgtaaccctccagattgatggggttctgtacctgaggataatggacccgtacaaagcttcttatggagtagaagacccagaatacgctgtgacccaattagcccaaacgacaatgcgatcagagctgggtaagctcagcctggataaggtgtttagagtggaggctgaacgcagaaagagggcaacagtactggaaagcgaaggaaccagggaaagtgcaattaacgtggcagagggtaaaaagcaggcccagatactggcgtcggaggccgaaaaggccgaacagatcaaccaggcggccggggaggcttcggcagtgcttgcaaaagctaaagccaaggcggaagcaatcaggattctagctgcagcgttgacccagcataacggcgacgctgcggcgtcattgaccgttgccgagcagtatgtctcagctttcagcaaactggctaaggacagtaatacgatcctgctcccgtcaaaccccggtgatgtgacttccatggtcgcccaggcgatgggggtttacggcgcattaaccaaagccccagtacccggaactccagactccctgtccagtggatcatccagagatgtccagggaactgacgcctcactcgacgaggaattggaccgggttaagatgtcatag

SEQ ID NO: 136442 - DNA, 876 bp, synthetic construct
  misc_feature 1..876: note = Description of Artificial Sequence: Synthetic coding sequence
  source 1..876: mol_type = other DNA
atggactcacgtgtgagtagccccgagaagcaggacaaagagaatttcgtgggcgtcaacaataagaggctgggagtgtgcggctggattttattctccctctccttcctcctggtgatcattacctttccaatttctatctggatgtgcctaaaaatcatcaaagagtatgaacgagccgtagtgttccgcttgggtcgtattcaagcagacaaggccaagggcccaggactaatcttggtcctgccttgcatcgatgtgttcgtgaaagttgatcttcggacagttacgtgcaatattcccccccaagagatattgaccagggactcagtgactactcaggtggatggtgtcgtctattataggatctatagtgcagtttctgcagtggcgaacgtcaacgatgtgcaccaggccacattcctgcttgctcagactacattaagaaacgtcctagggactcaaacattgtcacaaatactggctgggcgtgaagaaattgcacacagcattcagaccttacttgatgacgcaacagaactctgggggattagagtggctagggtggaaataaaggacgtgagaatacctgtgcaactgcaaaggagcatggcggcggaagcagaagcgactcgcgaggccagagcaaaagtgctagccgcagaaggtgaaatgaatgcttccaagtccctgaaatcggcctccatggtgcttgcagaatcaccaatcgccttacagctccggtacctgcaaacactttctacagtcgcaacagagaaaaacagcaccatcgttttcccactgccaatgaatattcttgagggaattgggggcgtaagttacgacaaccataagaagctgccaaacaaagcctag

SEQ ID NO: 136443 - DNA, 849 bp, synthetic construct
  misc_feature 1..849: note = Description of Artificial Sequence: Synthetic coding sequence
  source 1..849: mol_type = other DNA
atgaactcccgaggtgagttggtgggagtgaacaataaacggctcggagtgtgtggatggatcctgttctcgttgtctttcctgctggtaattataacctttcctattagtatttggatgtgtctgaaaatcatcaaggaatacgagagagccgtagtgttcagactgggccgcattcaagccgataaagctaagggacctggtctgatccttgtccttccatgtatcgatgtctttgtaaaagtagacctgcgcaccgtaacttgtaacatcccgcctcaggaaatcctcaccagggattccgtgaccacccaggtcgacggggtggtttattatcggatttactccgccgtttccgctgtggcaaatgttaatgacgtccaccaggctacattcctcctggcccagacgacgcttcggaacgtcttgggaacacagacactctcccagatcctggcaggtcgagaggagatcgcacactcgattcagacccttctggatgacgccactgagctctggggcatccgagtggcgagagtggagatcaaagacgttagaatcccggtacagcttcagcgatcaatggccgcagaggccgaagcgacaagggaggcacgagcgaaggtcctggcggccgaaggcgagatgaatgctagcaagtctctgaagtcagccagtatggtgctggcagaatcgccaatcgcacttcagctgcggtacctgcagactctgtctacagtcgccaccgaaaagaatagcacaatcgtgtttccgcttcccatgaatattctcgaggggattggcggagtttcctacgataaccacaagaaactgcctaacaaggcctag

SEQ ID NO: 136444 - DNA, 2970 bp, synthetic construct
  misc_feature 1..2970: note = Description of Artificial Sequence: Synthetic coding sequence
  source 1..2970: mol_type = other DNA
atggcacgccctgtgcagctagcccccggctctctggccttggtgttgtgccggctggaagcacaaaaggcagctggagcagctgaggaacctgggggtagagccgtttttcgtgcttttcgaagggctaacgcaagatgcttctggaatgcacgactggcacgggccgccagccggctggcgtttcagggctggctccggcggggcgtacttctcgtaagagcgccccccgcttgcctgcaggtactccgcgatgcctggcgcagacgagcactgcgtccgccccgcggctttcggattcgtgcagtcggggatgtgtttccagttcagatgaatcccattacgcaaagccagtttgtgccactaggtgaagtgctgtgttgcgctatctccgatatgaacacagcccagattgtggtcactcaggagagcctgctggaacgcttgatgaagcactatcctggaatagccatccccagcgaagacatactctatactacgcttggaacactgataaaggagaggaagatctatcacaccggggagggatattttatcgttacccctcagacatacttcatcacgaacacgaccacgcaggagaacaaacgtatgctgccatctgacgaatcccgactcatgcccgcatctatgacatacctagtatccatggagtcatgtgccgaaagcgcacaggaaaacgcagcaccgatcagccattgccagtcctgtcagtgctttcgcgacatgcatacccaagacgtgcaagaggcccccgtcgccgccgaggttacccgtaaatcccacagaggtctcggtgagagcgtgtcgtgggtccaaaatggtgctgtgtctgtctctgctgaacaccacatctgtgagtctacgaagcctctcccttatacaagggataaagaaaagggcaagaagttcggattctccctgctctggaggtccctttcccgaaaagagaagccaaaaaccgagcactcctccttctcggcccagtttccccccgaagagtggcccgtacgcgatgaggatgatcttgataatatcccaagggacgttgagcacgagatcataaagcgtattaatccaatacttaccgtggataacttgatcaagcatacggtgttgatgcaaaaatatgaagaacaaaagaaatataatagccagggaactagtaccgatatgctgaccataggtcataaatatccatccaaggaaggcgtaaagaagagacagggcctcagtgctaaaccccagggtcagggacacagccgaagggataggcataaggctagaaaccagggttcagaattccagcctggctcaattcgactggaaaagcatcccaaattgcccgctacacaacccatccccaggataaaatcaccaaatgaaatggtcgggcagaaacctctaggcgagataacaaccgtgctgggctcacacctcatttataagaagcgcatctccaaccccttccagggcctctcacaccggggtagtaccatttccaagggacacaagatccagaagacaagtgatttgaaaccatcacagacgggaccgaaagaaaagccctttcagaagcccaggagcttggacagttccaggatttttgacggcaaagccaaggaaccttatgctgaacagcccaacgacaaaatggaggccgagtcaatctacattaacgatcctacagtgaagcctattaatgatgactttcgtggccacctattctctcatccacagcagtctatgctgcagaacgacggaaagtgctgcccctttatggagagcatgttgaggtatgaggtctacgggggcgaaaatgaggtcatccctgaagtgctgcgtaagtctcattcccatttcgacaaactcggcgaaaccaaacagacaccccactccctgccatccaggggagcctcctttagcgacagaaccccatccgcctgtagactggtggacaacactatccaccagttccaaaacctggggttacttgactacccagtgggggtgaacccattgcggcaggcagcacgccaggataaagactccgaagaactactgcggaagggattcgtccaggatgcagaaacgacatccctggagaacgagcagctgtcaaacgacgatcaggctttgtaccagaacgaagtggaggatgatgatggagcatgttcgagcctgtatctggaggaagatgatatttcagagaacgatgatctgcgtcaaatgctccctggccatagccaatattctttcacaggcggatcacaggggaaccacctcggcaagcagaaagtgatcgaaagaagtcttaccgagtataatagtaccatggaaagagtcgagtcccaggtgttgaagaggaacgagtgctataagcccacgggcctgcatgcaacccccggggagtcacaggagcccaacctatcagccgaaagctgcggattgaactccggagctcagtttggattcaattacgaggaggaaccaagcgtggctaaatgcgtgcaggctagtgcccctgccgatgagagaatctttgattactactctgcccggaaggcctcattcgaagctgaagttatccaggataccatcggcgacaccggaaaaaagcccgctagttggtcccagtcccctcagaatcaggagatgcggaagcacttcccacagaaatttcaactcttcaatacctctcacatgcccgttctggcacaggacgtgcagtacgagcacagccaccttgagggcactgaaaaccatagcatggcaggagactctggcattgattcacctcggacacagtctctgggcagcaataattccgtcatcctggatggcctcaaaagacgacagaacttcctccaaaatgtggagggaactaagagctcgcagcctctcacttctaattccctcttgcccctgacccccgtcattaacgtgtag

SEQ ID NO: 136445 - DNA, 510 bp, synthetic construct
  misc_feature 1..510: note = Description of Artificial Sequence: Synthetic coding sequence
  source 1..510: mol_type = other DNA
atggccaggcccgtccagctggcacccggtagcctggctctcgtattgtgtcggttggaagcacagaaggcagccggcgctgctgaagagcctgggggaagggcagtgttccgggcttttcggcgcgcaaacgcccgatgtttctggaacgcgcgtctcgcaagagcggcaagccggctggccttccaaggatggctgcgacggggcgtgttactcgtcagagctccccctgcttgtcttcaggtcctccgtgatgcttggcgtcgaagggcccttcgcccaccccggggttttagaattcgtgccgtcggagacgtattcccagtacagatgaatccaatcacacagtcacagtttgtgccactgggcgaagttctgtgctgcgctatctccgatatgaataccgcacaaattgtcgtcacacaagagagcctcttagaaaggctgatgaaacattaccccggacaccgggtttgggatctgattatacagtcgttctggatggactag

SEQ ID NO: 136446 - DNA, 684 bp, synthetic construct
  misc_feature 1..684: note = Description of Artificial Sequence: Synthetic coding sequence
  source 1..684: mol_type = other DNA
atggccaggcccgttcagctggctcctggatctctggccctggttttatgtcgactagaggcgcagaaagcggcgggggccgcagaggaacctggcgggagggccgtgttcagagccttcagacgggccaatgccagatgcttttggaacgctcgcctggctcgtgccgcttctcgcctggcctttcagggctggctcaggagaggcgtactgctagtgcgcgcaccccccgcgtgtcttcaggtgctgcgagacgcttggcggagacgtgccttacggccaccaagaggctttcggatccgtgctgtaggtgatgtcttcccagtgcagatgaaccccataacccagagccaattcgtgcccctcggcgaggtgctctgttgcgctattagcgacatgaacaccgcacagatcgtggttacccaggagtcgctactcgaacgactgatgaagcattatcccgggattgcaattccatccgaggacattctgtacacaacacttggaactctaatcaaagagagaaagatttaccacaccggggagggctatttcattgttacaccacagacctactttatcacaaacactaccactcaagagaataagaggatgttgcccagcgatgagtcaaggttgatgccagcttcaatgacctacttggatactgagtctggcatttag

SEQ ID NO: 136447 - DNA, 2970 bp, synthetic construct
  misc_feature 1..2970: note = Description of Artificial Sequence: Synthetic coding sequence
  source 1..2970: mol_type = other DNA
atggctaggccagtccagcttgccccaggtagtctggcattggtgctttgcagactggaggcccagaaggctgcaggcgccgccgaggaacccggtgggagggctgttttccgagcctttagaagggcaaatgcaaggtgtttctggaatgcccgcctggctcgggccgcttcaaggctggcattccagggttggttacgccgaggcgtgcttctggttagggctccacctgcctgcctacaggtgctgcgcgacgcttggcgtaggcgtgccctgcgcccaccccgcggcttccggatacgggccgtcggcgacgtgtttccggtgcagatgaatccgatcactcaaagtcaatttgtgcccctgggagaggtgctctgctgtgctattagcgacatgaatacagcccagatagtggtgacacaggagtctttgctagaaaggctgatgaagcactaccctggtattgctattccttctgaagatatcttgtatacaaccctcggcactctgattaaggagcgtaagatctatcacaccggcgagggatactttatcgtcacgccacagacctatttcatcactaatacaacaacccaggaaaataagaggatgttgccaagtgatgaatctaggcttatgccagcctccatgacatacctcgtgagcatggagtcctgcgccgagtccgcccaggagaacgctgcacctatctctcattgccagtcatgccagtgttttcgtgacatgcatacacaggacgtgcaggaagccccagtcgctgcagaagtcacacgcaagagtcatcgcggcctgggggaatccgtgtcctgggtgcagaacggagctgtaagcgtgtccgctgaacaccacatctgtgagtccaccaagccgctgccgtatacaagggacaaggagaagggcaagaagttcggcttctcactgttgtggcgctcattatcccgcaaagagaagcccaagaccgagcactcttccttcagtgctcaattcccccctgaggaatggccagtgcgggacgaagatgatctggataatattccgcgagatgttgaacacgaaattattaagcgcattaatcctattctcactgtagacaacctaattaagcacacagtgctgatgcaaaaatacgaagaacaaaagaagtacaacagccaggggaccagcactgatatgctcacgatcgggcataagtaccctagcaaggagggtgtcaagaaaagacagggactctccgcaaaaccccagggccagggccactcccgcagggaccgccacaaagcacgcaaccagggcagcgagttccagcccggaagtattagattggagaaacaccctaaattgccagcaactcagccaatccctaggattaagtctcccaatgagatggtcggtcagaaaccactgggggagatcaccacagtcctcggctcgcacctcatttacaagaaacgcatttcaaatcctttccagggcctgtcccacagaggcagtacaatcagcaaagggcataagatccagaaaacaagtgatctcaaaccttcacagacaggtcccaaggaaaagcctttccagaaaccccgctctctggactccagtagaatctttgatggcaaggccaaggaaccctacgccgaacaacccaatgacaaaatggaggcggagagcatttatatcaacgacccgacagtgaaacctatcaacgatgactttcgaggccacctgttctcccacccccaacaaagcatgctgcaaaatgacggtaagtgctgcccatttatggaaagtatgcttagatacgaagtctacgggggtgaaaacgaggttatacctgaagtgcttaggaagtcacacagccatttcgacaagctgggagaaaccaagcagaccccccactccttacctagccgtggcgcatcctttagcgatcgcacacccagtgcatgccggctggtggacaacaccatccaccagtttcagaacctggggctcctggattaccccgttggggtgaacccactgagacaggccgcaagacaggataaggattctgaggaactgctaaggaagggtttcgtacaggatgccgagaccacctcactggagaacgaacagctgtctaacgacgaccaggcactttaccagaatgaagtggaagacgatgatggtgcttgctcgagcttgtacttagaggaggacgacatatcggaaaatgatgacttgcgacagatgctccctggacacagtcaatattcgtttacaggggggagtcagggtaaccacttgggtaaacaaaaagtgatcgagcgctccctaactgaatacaacagcacaatggaaagggtcgagagccaggtcctcaagcgaaatgaatgttataagccaactggcctgcacgcaacgcccggagagagccaggagcccaatctgagcgccgaaagctgcggattaaattctggcgcccagttcggctttaattacgaagaggaaccctcagttgcaaagtgtgtccaggcctcagccccagctgatgagcggatctttgattactatagcgcccgcaaagctagctttgaggccgaagtgatccaggacacgatcggcgacactggaaagaaaccagcctcctggagtcagtctccccagaatcaagaaatgcggaagcatttcccacagaaatttcagctgtttaacacttcacacatgcctgttctcgcacaggatgtgcagtacgagcactcccacctagagggaaccgagaatcatagtatggccggtgatagcgggatcgacagccctcgtacacagtctttaggatccaacaactcggtgattcttgatgggctcaaaagaaggcagaactttctccagaatgtcgaaggaacaaagagctcacagcctctcacctcaaatagcctgctccctttgaccccagtaattaatgtgtag

SEQ ID NO: 136448 - DNA, 2640 bp, synthetic construct
  misc_feature 1..2640: note = Description of Artificial Sequence: Synthetic coding sequence
  source 1..2640: mol_type = other DNA
atgaacccaattacacagtcccagtttgtgccccttggagaagtcctgtgctgcgccatcagtgatatgaacacagctcagatcgtggtcacccaggaatccctgctggagcggctcatgaaacattatccagggatcgccatcccctctgaggatatcctctacactaccctgggaacactgataaaggagcggaaaatctaccataccggagaaggctatttcatcgttacaccccagacctatttcattactaatacgactacacaagagaacaagagaatgttaccttccgacgaatcccgtctgatgcctgcatcaatgacatatttggtttccatggagtcttgtgccgaaagtgcccaggaaaatgcagctcccattagccattgccagtcctgtcaatgttttcgggacatgcacactcaggacgtccaagaagcccccgtggctgcagaagtcaccaggaaatcgcaccgcggcttaggagaaagtgttagctgggtccagaatggcgccgttagcgtgtccgcagaacaccatatctgcgaaagtacgaagccattgccgtatacacgggataaagagaaggggaagaagttcggattctccctcttgtggaggagtttgagccgcaaagaaaagcctaagaccgaacactcgtcattttccgctcagttccccccagaggagtggccagtccgggacgaggacgatctcgacaatattccacgggacgttgagcatgaaattataaagcggatcaacccgatcctgactgtagacaacctcatcaagcacactgtgctgatgcagaaatacgaagaacaaaaaaaatacaactctcagggaacctctaccgatatgttgaccattgggcataagtatccatccaaggaaggcgtgaagaagaggcagggcctgagtgctaagccccagggacagggccattcacgccgcgataggcacaaggcgaggaaccagggctccgaatttcagcctggtagtattcgcctggaaaagcatcccaaactgcccgctacccagcctataccaagaatcaagtcgccaaacgagatggtgggccaaaagcccctaggggagatcaccacagtactgggcagtcatctgatttataagaagcgaataagtaatccctttcagggtctgtcacatcgcgggagtaccatttcaaaggggcacaagatccagaaaaccagtgatctgaaaccgagccaaacaggcccaaaggagaaacccttccagaaacctaggtcactggacagctcccggatttttgacggcaaggccaaggaaccatacgcagaacagcctaacgacaagatggaggctgagtcaatttacattaatgacccgaccgtgaagccgatcaacgatgacttccggggacacctgttttcccacccccagcagtcaatgctgcagaacgacggcaaatgttgcccgtttatggaaagtatgctcagatatgaagtgtacgggggggaaaacgaggtcatccctgaggtccttcgcaaatcccattctcattttgacaagttgggagaaacaaaacagactcctcactctttgccatctcgcggtgcctccttttcagatagaacacccagcgcatgtaggctggtagacaacacaattcaccaatttcaaaacctgggtcttcttgactatcccgtcggggtcaaccccctgagacaagccgccagacaggataaggacagtgaggaactgctgaggaaaggctttgtgcaagacgccgagacgacatccttggagaacgagcaattgtctaatgacgaccaagcgctgtatcagaacgaggtggaggatgacgatggggcttgttcaagcctgtacctggaagaggacgatatctccgagaacgacgatctgcgccaaatgctacccggacactcccagtattctttcactgggggaagccaaggaaatcatttaggtaaacagaaggttatagagcgatccctcactgagtacaactccactatggaaagagtcgagtcccaggtgctgaagaggaatgaatgctataaacctaccggcttacacgccacacccggggagagccaggagccaaatctctcagctgaatcatgtggactgaactctggcgcacaatttgggtttaactatgaagaggagccctccgtggccaaatgcgtgcaggccagtgcacccgcggatgaacggatcttcgattattactcagccagaaaagcttccttcgaagcagaggtaattcaggacaccatcggcgacactggaaagaaaccggcctcctggagccagagcccccagaaccaggaaatgcgtaagcatttccctcagaagttccaattgtttaatacctcccatatgccagttttagcccaagacgttcaatatgagcactcccacctggaaggaacggaaaatcactccatggccggagacagtgggatagattccccccgtacccaaagtctcggctcaaacaacagtgtgatattagacgggcttaaacggcgccagaactttctccaaaatgtcgagggcactaaatctagccagcccttgacttcgaattccctgttgcctctgacaccagtcataaatgtatag

SEQ ID NO: 136449 - DNA, 4179 bp, synthetic construct
  misc_feature 1..4179: note = Description of Artificial Sequence: Synthetic coding sequence
  source 1..4179: mol_type = other DNA
atggttgaacctggccaggatcttctgctcgctgccctgagtgagagtggcatcagcccaaacgacctgtttgatatcgatggcggggacgccggcctggcaaccccaatgcctacaccctccgtgcagcagtcagtgcccctatctgcccttgaattgggactggaaaccgaagcagctgtgcctgtgaaacaagagcccgaaaccgtaccgacacctgccctccttaacgtgcgtcagcccccctcaacgacgacctttgtcctgaatcagatcaaccacctacctcctttgggcagcaccatcgtcatgacaaaaacccccccggtgacaaccaatagacagacaattaccctgactaagttcattcaaacaacagcctccacccggccaagtgtaagcgctcccactgttaggaatgcaatgacctccgcgccttcaaaagaccaggtacagctgaaggacttgctcaaaaacaattctctcaacgaacttatgaagcttaaaccaccggccaatatcgcacagcccgtggccactgccgccaccgatgtgtctaacgggaccgtgaagaaggagtccagcaataaggagggcgctcgcatgtggatcaacgacatgaagatgagaagtttctctcccacaatgaaagtgccagtggtaaaggaggacgatgagcctgaggaagaggatgaagaggaaatgggacacgctgagacgtacgccgagtacatgcccatcaagcttaagataggactccgacatcccgatgccgttgtagagacaagcagtctttcgtcagtgaccccgccggacgtctggtacaagacaagtattagcgaagagacaatagacaacggttggctatccgctctccagctagaggcaattacttatgcggctcagcagcacgagaccttcttacctaacggcgaccgcgctggcttcctcattggggatggcgctggcgtggggaaaggacggaccattgctggcataatttatgagaattatctgcttagccgcaagagggcactttggttctccgttagcaacgacctcaaatacgatgccgaacgcgacctgagggacattggggcgaagaatatccttgtgcattctctgaacaagtttaaatacggaaagattagtagtaaacataatggttcggtcaaaaaaggcgtcatctttgcaacctactcttccctgattggcgagagccagtctggtgggaaatacaagacccggttgaaacagctgttacactggtgcggcgatgatttcgacggggtgatcgtgttcgacgaatgccataaagccaagaacctctgtccagtcggcagctcgaagccaaccaagaccggactggctgtgctcgagctacagaacaagttgcccaaggctcgggtcgtgtatgctagtgccaccggcgcatccgagccaaggaatatggcctacatgaaccgcttgggcatttggggggagggaacaccgtttcgggaattctcagatttcatccaggctgtcgaaaggagaggcgtgggggctatggaaattgtggctatggacatgaagttacgtggaatgtacattgctagacaactgtcctttactggtgtaacctttaaaattgaggaagtgctgctgtcccagtcctatgtgaagatgtataacaaagccgtgaaactctgggtcattgccagagagcggtttcagcaggctgctgatctgattgatgctgagcagcgtatgaaaaagagtatgtggggtcagttctggtctgctcaccagcgcttctttaaatatctttgtatcgcatccaaggtgaagagggtagtccagttggctcgggaagagataaaaaatggcaaatgcgtggttattggattgcagagtaccggagaagcccggactctcgaggctctagaagaaggaggcggtgagcttaatgattttgtgtcaactgctaaaggtgtactgcagtctctgatcgagaaacattttcctgcccccgatcggaaaaagctctattccctactcgggattgacttgactgctcccagcaataattcaagcccaagggacagtccatgcaaggagaacaaaataaagaaaagaaaaggagaggagataacacgggaagctaagaaagcgcgcaaggtcggcggtttgacaggctcctcaagcgacgattcaggaagcgagagtgacgccagcgacaacgaggaatctgactatgaatcttcgaagaatatgtcatccggggatgatgacgactttaaccccttcctagacgagagcaatgaggacgatgaaaatgacccttggctgatacgcaaagatcacaagaaaaacaaagagaagaagaaaaaaaagtctattgatccagattccattcaatccgccctgctggcgtcagggttgggtagcaaacgaccctccttcagctccactccggttatctcgccagctcccaattccacaccagccaactcgaatactaattcaaatagtagcttgatcacaagccaggatgccgttgagcgagcgcagcagatgaagaaagatcttctcgacaagctggaaaagctggcagaggatttaccccccaataccctagatgagctgattgatgagctgggcggccccgaaaatgtcgccgaaatgaccggaagaaaaggaagagtggtgtccaatgacgatggcagtataagctatgaatccaggtctgaactggacgtccccgtggaaatcctgaatataactgaaaagcagagatttatggacggtgacaaaaatatagctattatctccgaagctgcaagtagcggaatttctttacaggccgacagaagggcgaaaaaccagaggcgccgcgttcatatgacactagaactgccttggagtgccgatcgggcaattcagcagttcgggaggacccaccgaagtaatcaggtcacagcccccgagtatgtgttcctgattagtgagcttgccggtgagcagcgctttgccagtatcgtggctaagcgcctggaaagtctgggggccttgacccacggggaccgtagagcgactgagtctagagatctctcgcggttcaatttcgacaacaagtatggtaggaatgccctcgagatcgtaatgaaatctattgttaatctggattccccgatggtcagccccccccccgactacccaggggagttctttaaggatgtccggcagggtctgatcggtgtgggtttgattaatgtggaagatagatcagggattctcaccttggacaaagactataataacatcggtaaatttttaaatcggatccttggcatggaggtccaccagcagaacgcactttttcagtactttgcggacacactaactgcagttgtgcaaaacgccaagaagaatggccgctacgatatggggatcctagacctggggagcggagatgaaaaagtgagaaagagcgacgtgaagaagtttctgacacctggctattctacttcagggcatgtggaactttacaccatcagtgtagaacgaggaatgtcctgggaggaggctacaaaaatctgggcagagttaaccggcccagacgacggcttttatctgagtctccagatacggaataataagaagacagccatcctagtcaaagaagttaacccaaagaagaaactgtttcttgtgtacaggcccaatactgggaagcagcttaagttggagatctatgcagatcttaaaaaaaagtataagaaggtagtttccgacgatgccctcatgcattggctggatcaatataactcaagtgctgacacttgcacccacgcttactggaggggcaactgtaagaaggcatccttgggcctggtatgcgagatcggcctgcgctgccgcacctactacgtgttgtgtggttcagttctgagtgtgtggacgaaggtggaaggggtactcgcttctgtctcaggtactaatgtgaaaatgcagatcgtcagactcaggaccgaggatgggcaaaggatcgtgggtttgatcattcccgccaactgcgttagtcctctggtaaatctgctgtccaccagtgatcagtctcagcaacttgcagttcaacagaagcaattgtggcagcagcaccatccacagagcatcacaaacctgtccaatgcctag

SEQ ID NO: 136450 - DNA, 4182 bp, synthetic construct
  misc_feature 1..4182: note = Description of Artificial Sequence: Synthetic coding sequence
  source 1..4182: mol_type = other DNA
atggtcgagcccgggcaggacctgctgttggctgccctgtctgagtctggaataagccccaatgacctgttcgatatcgacggaggagatgccggattggccacgcccatgccaacaccctcagtccagcagagcgtcccattatcagccctggagttgggcttagaaaccgaagcagcagttcctgtgaaacaggagccggagactgtgccgactcctgccttgctcaacgtccggcagcagcccccctctacaacgacgttcgtacttaaccagatcaaccacctgcctccacttggctcgaccatcgttatgacaaagactccaccagtgactactaatcgccaaactataaccttgaccaaattcattcagaccacagcttctactcgcccaagcgttagcgcacctactgtcagaaacgccatgacttccgccccctctaaggatcaggttcagctgaaagatcttttaaagaataacagtttgaatgagctgatgaaactcaaaccaccagctaatatagcccaacctgtggctacagctgctacagatgtcagcaacgggactgtgaaaaaagaatccagcaacaaagagggagccaggatgtggatcaatgacatgaagatgcgatcattcagccctaccatgaaagtgcctgtggtgaaagaagacgatgaacctgaggaggaggacgaagaagagatgggccatgcagagacatatgccgaatatatgcctattaagttgaagataggccttagacacccggatgccgttgtcgagacctccagcttaagttccgtgacaccaccagatgtctggtataagacttcgattagcgaggaaaccatcgataacggctggctctcggctctgcagctcgaagcaattacctacgctgcccagcagcacgagacgtttctgccaaacggcgaccgagcaggcttcctcatcggggacggagccggcgtgggcaagggtagaaccatcgcaggtattatctatgagaattacttactgagtcgaaagcgcgctctctggttcagcgtatctaacgatctgaaatatgatgcagagagggacctccgggacattggagcaaagaacattctggttcactcactgaataaatttaaatacggtaagatctcaagcaaacataacgggtcagtgaagaagggcgtgatctttgcaacttacagctctctgattggcgagtcccagtcgggcgggaagtacaaaaccagactaaaacagctgctgcattggtgcggagatgacttcgatggggtgattgtgtttgatgagtgtcacaaggcaaagaacctttgtcccgtgggcagttccaagcctaccaagaccggtctcgccgtcctggagttgcagaataagctgcccaaggcccgcgtagtgtacgcatcagccactggagcatccgaacctcgaaatatggcttacatgaacaggcttggaatatggggagaggggaccccattccgagaattttctgactttatccaggcagtggagcgcaggggagttggggccatggaaatcgtggcaatggatatgaagctgcggggcatgtacatcgcacgacagttgtcttttacaggggtcaccttcaagatcgaagaggttttactgtcgcaaagctatgtcaagatgtataacaaggcagtcaagctatgggtgatcgcccgtgagaggtttcagcaggctgccgatctgattgacgctgagcaacggatgaaaaagagcatgtgggggcagttttggtccgctcatcagcgctttttcaagtatctatgcatagccagtaaggtgaaacgggtggtgcagttggcaagggaagagattaaaaacgggaaatgtgtggttataggcctgcagtccactggagaagcgcgtaccttggaagctctcgaagaggggggtggggaactcaatgattttgtgagcacagcaaaaggtgtcctacagtctctgatcgagaagcattttcccgcaccggaccgcaaaaagctgtattctttgctcggcattgacctaacagcccccagcaataactcaagcccacgagattccccatgtaaggagaacaagatcaaaaagagaaaaggtgaagaaatcaccagggaagccaagaaggcccggaaagttggagggctgaccggctcgtccagcgacgacagcggcagtgagtcagacgccagcgataacgaggagtccgactacgaaagcagcaaaaacatgtccagtggcgatgacgacgatttcaacccgttcttggacgagagtaacgaagacgacgagaatgatccctggctcattagaaaggatcacaagaaaaacaaggagaagaaaaagaagaagtcaatcgacccagattccatccagtcagccctattggctagcggcctggggagcaagagaccctcttttagcagcactccagtgatctccccagcaccgaatagcacaccggctaatagtaatacgaatagcaattctagccttattacatctcaggacgcagttgaaagagcccaacaaatgaagaaggacctgctcgacaagttggagaaactggcagaggatctcccacctaacaccctcgatgaactgatagatgagctcggggggcccgagaatgtcgcagagatgacggggagaaagggaagagttgtcagcaatgatgacggctcgataagctatgagtcccggtccgaactcgacgtgcctgttgaaatactcaacatcacagagaagcagagattcatggacggcgataagaatattgcaatcatctccgaagcagcttcatcaggcatctcattgcaggccgataggagggccaaaaaccagcgacgccgagtccacatgacactggagctgccttggtccgccgatcgggccattcagcagtttggcaggacacatcgatcaaatcaggttacagcccccgaatacgtgttcctgataagtgaacttgcaggggagcaaagatttgcatctatcgtggccaagcgacttgagtcactcggagctctgactcacggcgatcggagagcaacggaaagtcgtgatctgtctcgttttaactttgataacaaatatggaaggaacgctcttgagatcgtgatgaagagtatcgtgaacctcgactcacccatggtgtcacctccgcctgactatcccggcgaattctttaaggacgtgcgacagggccttatcggggtgggacttattaacgtggaggacagatcaggtattcttacattggacaaggattacaacaacatcggaaagttcctcaaccggatcctcggtatggaggttcaccagcagaatgctctgttccaatacttcgctgatactttaacagccgtagtgcaaaacgcaaaaaagaacggacggtacgatatgggaatcttagatctgggctctggtgacgagaaggtgcggaaatctgatgtcaagaagttccttacacccggttactctacatcaggccacgtggagctttatacaattagtgtggagagaggaatgtcctgggaagaggcaactaaaatttgggctgagttaactgggccagacgacgggttctatcttagcctgcagatcaggaataacaaaaaaaccgctatactggttaaggaggttaatcctaagaaaaaactgttcttggtgtatcgcccaaatacgggaaagcaattgaagctcgagatctacgccgacctgaaaaaaaagtacaagaaggtcgtgtcggatgacgcgctgatgcactggctggaccagtacaattcttcagccgatacctgcacgcacgcttattggagagggaattgtaaaaaggcatcccttgggctggtgtgtgagatcggcctccgttgcagaacctattacgtgctgtgcggctccgtgctgagcgtgtggaccaaggtggagggcgtactagcatcggtcagcggtactaatgttaagatgcaaatcgtgcgcctacgcactgaggatgggcaaagaattgtgggcctgattatccctgccaattgtgtaagtcctcttgtgaatttgctgagtaccagcgaccagtcccagcaacttgccgtccagcagaaacagttatggcagcaacaccatccgcagagtatcacaaacttatctaacgcttag

SEQ ID NO: 136451 - DNA, 2199 bp, synthetic construct
  misc_feature 1..2199: note = Description of Artificial Sequence: Synthetic coding sequence
  source 1..2199: mol_type = other DNA
atggtagagcctgggcaagacttgctgttggcagccctgagtgaatctgggattagtccaaatgacctcttcgacatcgacggtggcgacgcaggactggccacgcctatgccaacgccttccgtgcagcagagcgttccactgtcagccctggagctggggttggaaaccgaggccgccgtgccagtgaaacaagaacccgaaactgtacccacacctgcgctgctcaatgtgaggcagcctccgtctacaaccacctttgtgttgaatcagataaaccatctgccccccttaggcagcacaatcgttatgacaaaaacaccaccagtcaccaccaaccgccagaccattaccctgaccaaatttatccagactacagctagtacacgccctagtgtttcggctcctacagtgaggaacgccatgacgtccgctccctcaaaagaccaggtgcaactgaaagacctgctgaagaacaacagccttaatgaactgatgaagctgaagccgcccgctaacattgcacagcctgtggccacagcagccactgacgtctcaaacggaaccgtaaaaaaggagagttctaacaaagaaggcgcacgaatgtggatcaacgatatgaagatgcggagttttagtcccaccatgaaagtgcccgttgtaaaagaggacgacgaacccgaggaagaagacgaggaggaaatgggccacgcggagacgtacgcagaatatatgcccattaagcttaagatcggtctccgccatcccgatgctgtcgttgagacttcctccctctcttcagtgactccgcctgatgtgtggtacaagacttctatctcagaagaaacgattgataacggctggctgtctgctttacagctggaggccattacctacgccgctcagcagcacgaaacctttctgcccaatggcgatcgggccgggtttctgatcggagacggggcaggagtagggaaaggcaggacgattgccggcatcatttacgaaaactacctgttgagccggaagagggctctctggttttctgttagtaacgatttgaaatacgatgcagagcgcgacctgcgggacataggtgccaagaacattctggtccactcattgaataaattcaagtatggaaaaatctcctctaaacacaacggttccgtaaagaagggtgtgatattcgctacttattcttctctgatcggcgagtcacaatcaggtgggaagtataaaaccagattgaaacagctgttgcactggtgcggtgacgactttgatggcgtgatcgtcttcgacgaatgtcataaggccaaaaacctatgcccggttggcagttccaagcccaccaagaccgggttggcggtccttgagctgcaaaataagctgccaaaagcacgggtggtttacgcctctgcaacaggggcttccgagcctcgaaacatggcctatatgaaccggttggggatttggggggaaggcacacctttccgcgaattctcagatttcattcaggcagtggaaaggcggggcgtcggggccatggagatcgtggcgatggatatgaaactgcgggggatgtatattgcccgacagctgtccttcactggggtgacatttaagattgaggaagtgctcttgagccagtcgtacgttaagatgtacaataaggcagtaaagctttgggtaatcgcccgagaacgatttcagcaagctgcagatctgatagatgcagaacaacggatgaaaaagtcaatgtggggacaattttggagcgcccaccagcggttcttcaagtacttatgcatcgcttcgaaggttaagagggtggtccaactggcaagggaagagatcaagaatggaaaatgcgtggtgattggactgcaatctacgggcgaggctcgcacattggaggctctggaggagggcggtggtgaactgaacgacttcgtgtctaccgctaaaggagtgttgcaatctcttattgagaaacactttcccgcccccgacagaaagaaactgtattccctgctcggcattgatctgactgccccgagtaacaactcctcgcctcgagatagcccctgtaaggagaataaaatcaaaaagcgtaagggagaggaaattacaagagaagcaaagaaggctaggaagatgtctttgatgcgtatgatgaagatggtctctagctag

SEQ ID NO: 136452 - DNA, 1632 bp, synthetic construct
  misc_feature 1..1632: note = Description of Artificial Sequence: Synthetic coding sequence
  source 1..1632: mol_type = other DNA
atggagcaggtcaacgaactcaaagaaaagggtaacaaggctttgtcggtggggaatattgacgacgcactgcagtgctatagcgaggccatcaagctggaccctcacaatcacgttctctactccaaccggagcgctgcctatgccaaaaaaggggactaccagaaggcctatgaggatgggtgtaagaccgtggacctgaaaccagactggggaaaggggtacagccgtaaggcggccgcgctggaatttctgaatcggtttgaggaggccaagaggacgtatgaggagggattgaagcacgaagctaacaacccacagctgaaggaaggtctccagaacatggaggctcgattggcagaacggaagttcatgaacccgttcaatatgcctaacctgtatcagaagttagaatcagacccgagaacaagaacgctcctgagcgaccctacatatcgtgaactaattgagcaactccgtaataagccctctgatctgggaacgaagctgcaggatccgaggattatgaccaccttgtccgtcctcttaggcgtggacctgggcagtatggatgaggaggaagaaatagccacacctcccccccctccaccacctaaaaaggagaccaaacctgagccaatggaggaggatttgccagagaataaaaaacaggcccttaaggaaaaagaattgggtaacgatgcctataaaaagaaggattttgacactgcgctgaagcattacgacaaagccaaagagcttgaccccactaatatgacatacattaccaaccaagcagctgtgtatttcgagaagggggactacaataaatgccgggagctgtgtgagaaggccatcgaggtgggcagggaaaacagagaagattacaggcagattgctaaagcatatgcacgtattgggaacagctactttaaagaggagaaatacaaggacgccatccacttctacaacaagtctctagctgaacataggactcccgacgttctgaagaagtgccagcaagccgaaaagattctgaaggaacaggagcgcctagcttatatcaatccggacctagcattggaagaaaagaataaaggaaatgagtgtttccaaaaaggggattaccctcaggcaatgaaacattatacagaagctattaaaagaaaccccaaagacgccaagttgtattccaaccgggcagcttgttacactaaactgttggagtttcagctggcccttaaggactgcgaagagtgtatccagctggagcctacattcataaaaggttatactcgcaaagcagccgcactggaggctatgaaggattacactaaagcaatggatgtatatcagaaggccctcgatcttgactcaagctgcaaggaagctgcagatggatatcagcgctgcatgatggctcagtacaacagacacgactcgcccgaggatgtaaagagaagagccatggccgaccccgaagtgcagcagatcatgagtgatcctgccatgcggctgatccttgaacaaatgcaaaaggaccctcaggccctctctgagcacctgaagaacccggtcattgctcagaagatacagaagcttatggacgtgggattgatcgccattcgatag

SEQ ID NO: 136453 - DNA, 1359 bp, synthetic construct
  misc_feature 1..1359: note = Description of Artificial Sequence: Synthetic coding sequence
  source 1..1359: mol_type = other DNA
atgaacagacagctggtgaacattctgaccgctttgtttgctttcttcctcgaaactaatcattttcgtaccgcgttttgtaaagatcatgatagcagatcgggcaaacagcccagccagaccctgagcccatccgactttttagacaaactgatgggaaggaccagtggttacgacgccaggatacgtccaaatttcaaaggcccgccagtgaatgtgacgtgtaacatattcatcaacagctttgggagtgtaacagaaaccactatggactaccgcgttaatattttcctgcgtcaacagtggaacgatagtcggcttgcctattccgagtacccagacgacagcctggacctggacccgagtatgctcgatagcatctggaagcctgacctgtttttcgcgaacgaaaaaggcgccaattttcacgatgtcactaccgataacaagctactgcgcatctcaaaaaacggtaaggtgttatactccataagactgacccttaccttatcttgcccaatggacctgaagaacttccctatggacgtccagacctgtacgatgcagttggaatccttcggctataccatgaatgacttaatatttgaatggttaagcgatggccctgtccaggtggccgaaggtctgacgctgcctcaatttatcttgaaggaggagaaagagctgggctattgcacaaaacactacaataccggaaagttcacatgtattgaagtcaagtttcacttggagcgccagatgggctactacttaattcagatgtatattccttcgctccttattgttatactgtcctgggtttccttctggataaacatggatgctgctcctgcaagagtggctttgggtataacaacagtgctaaccatgacaacccagtcatcagggtctcgggcgtctttgccaaaagtctcctacgttaaagcaatagacatttggatggcggtatgcctgttatttgtcttcgctgccctcctggaatacgccgctgttaacttcgtttcaagacagcataaagagttccttaggctgagaaggcggcaaaaacgacagaacaaggaagaagatgtcacccgcgagtctagatttaacttctccgggtacggcatgggccactgcttgcaggtgaaggatggtaccgctgtgaaggccaccccagcaaatcccctcccacaaccgcccaaggacggagatgcgatcaaaaagaagttcgttgatagggctaagaggatcgatacgatatctagggctgcgttccctttggctttcttaatctttaatatcttttactggataacctataaaattatccgccacgaagatgtgcacaaaaagtag

SEQ ID NO: 136454 - DNA, 3489 bp, synthetic construct
  misc_feature 1..3489: note = Description of Artificial Sequence: Synthetic coding sequence
  source 1..3489: mol_type = other DNA
atgaatgggcatcatcagcaaaatggtgttgaaaatatgatgctcttcgaagtggtgaagatgggaaagtctgctatgcagtctgttgtggatgattggattgagtcatataaacacgacagggatatcgcgctcctggaccttataaatttttttatccagtgtagcggatgtaaaggcgtcgtgaccgctgaaatgttcagacacatgcaaaatagcgaaatcattagaaagatgactgaagagtttgatgaggattcgggggattaccctttgaccatggccggccctcaatggaagaaatttaaatccagcttctgcgagtttattggcgtgctggtgagacaatgccagtatagcattatatacgacgagtatatgatggatacggtgatctccctcttaacaggactttccgatagccaggtgagagctttccgacataccagcacgctcgctgccatgaagctgatgaccgcccttgtaaacgtggcgctgaacctgagtattaatatggataatacccaacggcagtacgaggccgaacgaaacaagatgattggaaagagagctaacgaacgcctcgagctgctcctgcagaagaggaaggaactccaggagaaccaggatgaaattgagaacatgatgaacgcgatctttaaaggcgtttttgttcaccggtacagagacgctatcgcggaaatcagagctatctgtattgaggagataggaatctggatgaaaatgtactctgacgctttcttgaatgattcgtacctgaaatatgtgggatggactatgcatgataagcaaggcgaggtgaggctgaagtgtttgacagcccttcaggggctgtactataacaaggagcttaattcgaaattggaactcttcacctctcgctttaaggatcgcatcgtctccatgactctggacaaggagtacgatgttgccgttcaggctatcaagctcctgacgcttgtgctccagtcttcagaggaagttctcactgctgaggattgcgaaaacgtctaccatttggtctattctgcgcacaggcctgtcgccgtcgcagcaggagagtttctgtacaaaaagctcttttctagacgcgatcctgaggaagatggaatgatgaaacgtcgaggacgccaaggtcctaatgccaatctggttaagactctagtgttcttttttctggaaagcgaactgcacgagcatgccgcctacttagttgactccatgtgggattgtgcgacagaacttctgaaagactgggaatgcatgaactcgttgctgctggaggagcctctctcaggagaagaggcattgaccgatcgccaagagtcagctctaattgagattatgttatgtaccatcaggcaggcagccgagtgccacccaccggttggcagaggcactgggaaacgcgttctcaccgccaaagagaagaagacccagcttgacgacagaaccaaaattacggagctttttgccgtcgccttgccacagctattggccaaatactctgtggacgccgagaaagtcaccaatttgctgcagttaccgcagtactttgacctggagatctacacgacaggacgactagagaaacatctggacgccttgcttcgccagatccggaatatcgttgaaaaacacaccgatacggacgttctggaggcctgctcaaaaacctatcacgcactgtgtaatgaggagttcacaatatttaatagagtcgacatcagtcggtcgcagcttatcgacgagctcgcagataaattcaaccgcttgctggaggattttctgcaggagggcgaggaacccgacgaagacgatgcctaccaagtgctttctactctcaagcggattactgcctttcacaatgcacatgacctgtcgaagtgggatttattcgcttgtaactacaagctccttaagactggaattgaaaacggcgatatgcccgagcagatcgtgatccacgccctgcagtgtacacattacgtcatcctctggcagctcgctaaaatcaccgaatcttccagcacaaaagaagacctgctgcgcctgaagaaacagatgcgagtgttttgccagatctgtcagcattacttaaccaatgtgaacaccactgtgaaggagcaggcatttaccattctttgtgatattctcatgattttcagtcatcagatcatgagtggtggaagagatatgcttgaacctttggtgtacactccagactccagcttacagtccgagctgctctcgtttattttggatcatgtgtttatcgaacaggacgatgacaataatagcgcggacggccagcaggaggacgaagcttctaagatagaggccctgcataagcgacgtaatctcctagcagctttttgcaagctgatcgtgtatacagtggtggaaatgaatacggctgccgacatctttaaacaatacatgaaatactataatgattatggggatatcattaaggagacgatgtcaaagactcgccagattgacaagatacagtgcgccaagactttgattttgagtctccagcagctgttcaacgaaatgatccaggaaaacggctacaacttcgaccgcagtagttctacctttagtggcatcaaggaactggccaggagattcgctctaacgtttggactggatcagctgaaaacccgtgaagcaatcgcaatgctacataaggacggaatagaattcgccttcaaggaaccgaacccccagggggagtcccatcccccattgaacctcgctttcctggatattctcagtgagttcagcagcaaattactccgccaggataagcgcacagtgtatgtttacctggaaaagtttatgactttccagatgagtcttcgccgggaggacgtgtggctgccgctgatgagttaccgcaattcccttcttgcagggggcgatgatgataccatgtctgtgatttcaggtatatctagtcgcggcagcactgtgcgttccaaaaagagtaaacctagtacaggtaaacgcaaggtggtggaagggatgcagttgagtctgactgaagagagctcatcttccgatagcatgtggctcagtcgcgagcagacactccacacccctgttatgatgcagacgccgcaactgacatctacaatcatgcgagaacccaagcggctaaggcccgaagactcctttatgtcagtttatcctatgcagactgaacatcaccagaccccattggattataaccggcggggtaccagcctgatggaagacgatgaggagcctatcgtcgaggacgtcatgatgagctctgaggggcgcattgaagacttaaacgaggggatggattttgatacaatggatattgatctccctccttctaaaaaccggagagaacgaacggagctgaagccagactttttcgatcctgcctcaatcatggacgaaagtgttctcggcgtctccatgttttag

SEQ ID NO: 136455 - DNA, 3696 bp, synthetic construct
  misc_feature 1..3696: note = Description of Artificial Sequence: Synthetic coding sequence
  source 1..3696: mol_type = other DNA
atgattgctgctccagaaatcccgacagacttcaaccttctgcaggagtcagagacccactttagctccgatacagattttgaggatatcgaaggtaagaaccagaagcagggcaaaggaaagacctgcaaaaaggggaaaaaaggccccgccgagaagggaaagggaggaaatggcggagggaaacctccctctggcccaaatcggatgaatggacaccatcagcagaacggggtggaaaacatgatgcttttcgaggtcgttaagatggggaaatccgcgatgcagtccgtcgttgatgactggatagagtcatacaagcatgacagagacattgctcttctggatctgatcaatttctttatccagtgctctgggtgcaagggcgtggtcacagcagagatgttccgccacatgcagaatagtgaaatcattagaaagatgacagaggagtttgacgaagatagcggtgactatccactgaccatggcgggtcctcagtggaagaaatttaaatcttcattttgtgaatttatcggggtgttggtcagacaatgtcaatattcaattatttatgacgagtacatgatggataccgtcatctcactactgacaggcttatctgactctcaggtgcgcgccttccgtcatacttccacactggccgcaatgaagctcatgactgccctcgtgaatgtggccctgaacctctccattaatatggacaatacacagaggcagtacgaggcggagcggaataagatgattggaaaacgcgcaaatgagcgccttgagctgctcctacagaagcgcaaggagctgcaggaaaatcaggacgaaattgaaaatatgatgaatgcaatattcaaaggagtgttcgtccatcgctacagggacgctattgccgaaattcgcgccatatgtattgaggagatcggcatttggatgaagatgtacagcgacgcgtttctcaacgacagttatcttaagtacgtcggttggacaatgcacgacaaacagggcgaggtgcgccttaagtgtctgaccgccctgcagggactgtattataataaggagctgaacagtaagctcgaactgttcacaagcaggttcaaagaccgaatagtcagcatgacactggataaggagtacgacgtcgccgtccaggctatcaagctgctgactctagtgttgcaaagtagcgaggaggtacttacggccgaggactgcgaaaacgtgtatcatttggtgtatagtgcccataggcctgtcgccgtcgctgccggcgagttcctgtacaagaaactcttctctaggagggacccagaagaagatggcatgatgaaacgaagaggccgtcaaggtccaaatgctaatttggttaagacattggtgtttttctttctggaatctgaactccatgaacatgctgcttatttggtggattcaatgtgggactgtgccaccgagttactgaaagactgggaatgcatgaactcacttctgctggaggagccactaagcggcgaggaagccctgacagatcgtcaagagtccgcactaatcgaaataatgttgtgcaccatccggcaggccgccgagtgtcatccgcccgtagggcgcggaaccggcaaaagggtgcttaccgctaaggagaaaaagactcagttggacgatcgaacaaagattacagaactttttgccgtggcactgccacagcttctcgctaaatatagcgtggatgcagagaaagtgacaaatcttctgcagctccctcagtattttgaccttgagatttatactaccgggcggctggaaaagcacctggatgccttactccgacagattcgaaatatcgtagagaaacacactgatacagacgtgctagaggcatgttctaagacctaccacgccctctgtaacgaagaatttactatttttaatcgagtggatatctccagaagccagctgattgatgagcttgccgacaaattcaatcgcctgctcgaggatttcttgcaggaaggcgaagaaccggacgaggacgacgcttatcaggtgctctctacgctcaaaaggattacagcgttccacaacgctcacgatttatccaaatgggacctattcgcctgtaattacaaacttctgaagactggtatagagaatggagacatgcccgagcagatcgttatacacgccctccaatgcacccattacgtaatcctgtggcagctggctaagatcactgagtcttcgagcactaaggaagatttattacgtcttaaaaaacaaatgcgtgttttttgtcaaatatgtcagcactatcttacgaatgttaatacaacggtgaaggaacaggcctttacgatactttgtgacatcttaatgatcttctctcaccagatcatgagtggagggcgcgacatgctcgaacccttagtgtatacccctgatagctccttgcaatccgaattgctcagctttattctggaccacgtctttattgagcaggatgatgacaataattcagcagatggtcaacaagaagacgaggcgtccaagatcgaggcactgcacaaaagacgaaatttgcttgcagccttctgtaaactcatagtgtataccgtcgtagaaatgaacactgccgccgatattttcaagcaatacatgaagtattacaatgactatggggacattatcaaggagacaatgtcaaagactcggcagatcgacaagatccaatgcgctaaaactttgatcctttccctgcagcagttattcaacgagatgattcaggagaatggctacaatttcgatcgatcttccagcacatttagtggtataaaggagcttgcacggcgtttcgccttaacttttggactggaccaactgaaaacccgagaggctatcgctatgctgcacaaggatgggatcgaatttgctttcaaagaacctaacccgcaaggcgagtcacaccctcccctgaacttggcattcttggacattcttagtgagttctcttccaaactgctccggcaggacaagcgcacagtatacgtttatctggaaaaattcatgactttccagatgtcactgcggcgggaggatgtctggttgccattgatgtcttaccggaactccctgctagccggcggggatgacgacacaatgagcgtcatatcgggcattagtagtagggggtcaaccgtgcgttccaagaagtctaagccgtcaacaggaaaaagaaaggtggtggagggaatgcagttgtcattaaccgaggagagctcatcttctgatagcatgtggctgagcagagaacagactctgcataccccggtaatgatgcagactccccagttgaccagtactattatgagggagccaaaacgattgcgacccgaagattcattcatgtccgtctacccaatgcagaccgagcaccatcagacccccctcgattacaacagacgaggcactagcttaatggaagacgacgaagaacctatcgtggaggacgtgatgatgtccagtgagggccgtatcgaggacctgaacgaaggcatggacttcgatacaatggatatagatcttcccccgagcaagaaccggagagagagaacggagctcaaaccagactttttcgaccccgcttccatcatggacgagagcgttctgggggtctccatgttttag

SEQ ID NO: 136456 - DNA, 3807 bp, synthetic construct
  misc_feature 1..3807: note = Description of Artificial Sequence: Synthetic coding sequence
  source 1..3807: mol_type = other DNA
atgatcgctgcccctgagattccaaccgactttaacctgttgcaggagtctgagacccatttttcttcggatacggattttgaggacattgaagggaaaaaccagaagcagggcaaaggaaagacctgtaagaaaggaaaaaaaggacctgcagagaaaggaaaaggagggaacgggggtggaaaacctccctcgggcccgaatagaatgaacggacatcaccagcaaaacggggtggagaatatgatgctatttgaagtggttaagatgggcaaatcagctatgcagtccgttgtggacgattggattgagtcttacaagcatgatcgagatattgcactgctggatctcatcaatttcttcattcagtgtagtgggtgtaagggagtcgtgactgccgagatgttccggcacatgcagaattccgaaattattcgcaaaatgaccgaggaatttgacgaagacagtggagattacccacttaccatggccggcccccagtggaagaagttcaaaagttctttctgtgagttcatcggtgtgttagtccgccagtgccagtattctatcatctatgatgaatatatgatggataccgtgatttccttacttacgggtctgtcagactcacaggtgagagctttccgacacaccagcacattggccgccatgaagctaatgactgcgttagtgaatgtggcactgaacctctccattaatatggataatacacaaagacagtatgaagccgagcgaaataagatgatcgggaaaagagcgaatgagcggttggagttgctcttgcagaaaagaaaagaattacaggagaatcaggatgaaatcgagaacatgatgaatgcaatatttaagggagtttttgtgcatcggtaccgggacgcaatagctgaaattcgggccatctgcatcgaagagattggcatatggatgaagatgtactcggatgccttccttaacgactcctatctcaaatatgttggttggaccatgcacgataagcagggagaggttcggctgaagtgcctgactgcgctgcagggactgtattataacaaggagctcaactctaaattggaactgtttacttctaggtttaaagaccgcatcgtgtccatgaccttggataaagaatatgatgtggcagttcaggccattaaacttctgacactcgtactacagtcttctgaggaggtactaacagcagaagactgcgagaatgtctatcacctggtttactcagcacaccgccccgtcgccgtagcagcaggagaattcttgtacaagaaattattcagtcggagagatcctgaggaggatgggatgatgaagcgaagaggccggcaagggccaaatgctaacctggtgaaaacactcgtttttttctttctggaatccgaactgcatgagcacgcggcttacctggtcgactccatgtgggactgcgctaccgaactgttaaaagattgggagtgtatgaatagtctgctcctggaggagcccctgagtggagaagaagccctgactgataggcaagagtcagccctcattgagatcatgttgtgcaccattcgccaggccgcggagtgtcaccctcctgtaggaagaggcaccggtaagcgagtgctgaccgctaaggaaaagaaaacgcagctggatgacagaactaaaatcaccgagctgtttgccgttgctttaccacagcttttagcaaagtattctgttgatgccgaaaaggtgactaacctgctgcagctgccacagtatttcgatctggagatttatacgactggacgcctggagaagcatctagacgccctgctgcgccagattcgcaacattgtcgagaagcataccgacacagatgtactggaggcctgttcgaagacatatcacgccctgtgcaacgaggagttcaccatctttaatcgagtggacatcagccgctctcagttgattgacgaattggccgacaaatttaataggctcttggaggatttcctgcaggaaggggaggagccagacgaggatgacgcctaccaggtgctgtctaccctgaaacggattaccgcattccacaacgcccacgatctgtccaagtgggatctttttgcctgtaattacaagctactcaagactggcattgaaaacggagatatgcctgagcagatcgtgatccacgctttgcaatgcactcactacgtgatcctttggcaactggcgaagatcacagagtctagctccacaaaggaagatcttctgcggctcaaaaaacagatgagagttttttgtcagatatgccaacactatctgaccaacgtgaacaccactgtgaaggaacaagctttcacgatcctctgtgacatcctgatgatcttttcacatcagatcatgtcaggcggacgggatatgctggagcccctggtgtatacaccagactcaagtctacagtctgagcttctctcttttatcctggaccacgtctttattgaacaggatgatgacaacaatagcgccgatggccagcaggaagacgaggcctccaagatcgaagcgctgcacaaaaggcggaacctcctggcagctttctgcaagctcatcgtgtacacagtagtggaaatgaacactgcagcagatatttttaagcagtacatgaagtactacaacgattatggcgacatcatcaaggaaacaatgagcaaaacccggcagatcgacaagatacagtgcgccaaaacactgatcctttctctccagcagctatttaatgagatgatccaagagaacggatataattttgatcgctctagcagcaccttcagcggaatcaaggaactcgcacgcagattcgccctgactttcgggctggatcagctcaaaacacgagaagccattgccatgttgcataaagacggaattgaatttgcgttcaaggagcctaatccccaaggcgagagccatccccctttgaacttagcgttcctggacatactcagcgaatttagctcaaaattgctgcgtcaggataaacgaacagtgtatgtctacctggaaaaattcatgacctttcagatgtcgctgagacgcgaagatgtgtggctgccgctgatgtcatataggaattctctcctcgccggaggggatgacgacaccatgtcagtcatctcaggaatcagctcccgcggctcgacagtcagatctaagaagagcaagccttctacaggcaagcggaaggtggttgagggaatgcagctgtccttgacagaagaatccagcagtagtgactcaatgtggctctcccgggaacagacactacacactccagtcatgatgcaaacccctcagttaacatctaccatcatgagagaacccaagagactgagaccggaggactcctttatgagcgtgtatcccatgcagaccgagcatcatcagactcctctggactacaatacgcaggttacctggatgctcgcccagaggcaacaggaagaggctcgccagcaacaggagagggccgccatgagttacgtgaagctcaggaccaacctccagcatgcaattcgcaggggcactagtttaatggaggacgacgaagagcctattgtggaagatgtaatgatgagttccgagggacgcatcgaggatcttaacgagggtatggacttcgatacaatggatatcgacctgccaccaagtaagaataggcgggagcggacagaacttaagcccgactttttcgaccccgcttccattatggatgagtcagtcttaggtgtctccatgttctag

SEQ ID NO: 136457 - DNA, 3696 bp, synthetic construct
  misc_feature 1..3696: note = Description of Artificial Sequence: Synthetic coding sequence
  source 1..3696: mol_type = other DNA
atgatcgccgcgcccgagattccaactgactttaacctgcttcaggaaagcgagacccacttcagctctgacacggactttgaagacatcgagggaaaaaaccaaaaacaaggtaagggaaaaacatgtaagaagggcaagaaaggaccagcagagaaaggcaaaggaggtaatggggggggcaaaccaccctctggacctaacagaatgaacggacaccatcagcagaatggggtggaaaatatgatgttgtttgaagttgtgaaaatgggaaagtccgcgatgcaatccgtcgtggacgactggatagaatcgtataaacatgatcgggacatcgccctgctagacctgataaacttcttcatccagtgcagcgggtgtaagggggttgtgaccgctgaaatgtttagacacatgcagaattctgaaatcattcggaaaatgacggaagaatttgatgaagactcaggcgactatccactcactatggcaggtccacagtggaagaaatttaagtcttccttctgcgaatttattggtgttctcgtgagacagtgtcagtactccattatctacgacgagtatatgatggacaccgtcatttcattactcaccggtctcagtgactcccaggtacgggcctttagacatacatctaccctggctgccatgaaactgatgaccgcactggttaacgtggcacttaatctgtccatcaatatggacaacacccaacgccagtatgaagccgaacgtaataaaatgatcgggaagcgcgcgaatgagcggcttgagctgctcctccagaaacgcaaagagctccaggagaaccaggacgaaattgagaatatgatgaatgctatttttaaaggtgtgtttgtccaccgttacagagacgctatcgctgagatccgtgccatatgtatcgaggagataggaatctggatgaagatgtattccgatgcctttctgaatgattcgtacctaaagtatgtggggtggactatgcacgataaacagggcgaggtacgtctgaagtgcctgacagctctccagggcctgtactacaacaaagaactgaactcaaagttagaactgttcacttcaagattcaaagatcgtatagtgtccatgacgcttgacaaggaatacgacgtggccgttcaggcgatcaaactgctgactttggtgctccagtcttcagaggaggtcctaactgcagaggactgcgagaacgtgtaccacttagtttatagcgcccatagaccagtggccgtggccgctggagagtttctgtataagaagctcttcagcaggcgggacccagaagaagatggtatgatgaaaaggagagggagacagggtcccaatgcaaaccttgtgaagaccttagtatttttttttttggaaagcgaattacatgagcacgcggcatatcttgtagacagtatgtgggactgtgctaccgaattgctgaaagactgggagtgcatgaactctctgctgctcgaagagcctctcagcggagaggaagcacttactgaccgccaagagagcgctctaattgagatcatgttgtgtaccatccgacaagccgcagaatgtcaccctccagttggccgggggaccggcaagcgcgttctgacggccaaggagaaaaagacacagctggacgacaggactaaaattaccgagctcttcgcagtggctctccctcaattgctcgccaagtacagcgtggatgcagagaaagtcacaaatctcctccaactccctcagtacttcgacctggagatctacaccaccggccggcttgagaagcacctggatgcactgctgcgccagatcagaaatattgtagagaaacataccgacactgatgttctcgaagcctgttctaaaacgtatcacgcattgtgcaatgaggagtttacgatcttcaatagggtggatatctcccgaagccaacttatagatgaactggctgataagtttaatcgtctgctggaggactttctgcaggagggggaagagccagatgaggacgatgcgtaccaggtcctgtcgacccttaagcgaattaccgctttccataacgcccatgacctgtcaaaatgggatctattcgcctgtaattacaaactgctgaagaccggcatcgagaacggcgatatgcccgagcagatcgtcattcacgctctgcaatgtacccattatgtcattctgtggcagcttgccaagattaccgagagcagtagcactaaagaggacctgttacggctaaagaagcaaatgcgcgtgttttgtcagatttgccagcattacctgactaacgtgaacaccacagtgaaagagcaagcattcactatcctttgcgatatcttgatgatcttttcacatcagattatgtcaggcggccgcgatatgttagaaccgctcgtctataccccggatagttccctccagagcgaacttctctcttttatattggatcatgtgttcatcgagcaggacgatgacaacaactctgcggacgggcaacaggaagatgaggcgagtaagattgaagccttacacaagcgcagaaatctgctggccgcattctgtaaactcattgtgtacactgtagtggagatgaacacggccgcagatatctttaaacagtacatgaaatattacaacgattacggagacattattaaagagaccatgagtaagacacgacagatcgacaagatccagtgtgctaagaccctaattctcagtttgcagcagctcttcaacgaaatgatccaggagaacggttacaattttgataggagctccagcaccttcagtggcattaaagaactggcacgtagattcgcactcacctttggactggaccaactcaaaacaagggaggccattgccatgctgcacaaggacggcatcgaatttgcgttcaaggaacctaaccctcagggggagagccaccctccactcaacctggccttcctggacattctttctgagttttcatcgaagttattgcgtcaggacaagaggaccgtgtatgtataccttgagaagttcatgacattccaaatgagtcttagacgggaagacgtatggctgcccttgatgtcctaccggaattctttgctggccggtggagacgacgataccatgagtgttatctctggcatcagttcaagaggaagtactgtcagatccaaaaagtctaaaccgagtacagggaagcgaaaagtggtggaaggtatgcagctatctctgaccgaagagtctagctcgagtgactcaatgtggctgagccgtgagcagacactacacacacctgtgatgatgcaaacaccccagctgacctcaacaattatgcgagagcctaagcgactgcggcccgaggactcgttcatgtccgtttaccccatgcagacagaacatcatcagactccattagattacaacaggcgaggtacatcactgatggaagatgatgaggagccaattgtagaggatgttatgatgagcagcgagggcagaattgaggacctgaatgaggggatggactttgacacaatggatattgatctgccgccctccaaaaatcgccgagaacggactgagctgaagcccgatttctttgacccggccagcatcatggatgagtctgtattaggagtgagcatgttctag

SEQ ID NO: 136458 - DNA, 3696 bp, synthetic construct
  misc_feature 1..3696: note = Description of Artificial Sequence: Synthetic coding sequence
  source 1..3696: mol_type = other DNA
atgatagcagccccagaaatccctacggactttaatcttctgcaggagtctgaaactcactttagctctgataccgacttcgaggacattgagggtaaaaaccagaagcagggtaaggggaaaacttgtaagaagggcaaaaagggtcccgccgagaagggtaagggaggaaacggaggaggcaaacccccaagtggccccaaccgcatgaatggccatcatcaacagaatggagttgagaatatgatgctctttgaagtcgttaagatgggtaaatccgccatgcagtccgtggtggacgattggatagaatcttataagcacgatcgagatatcgcactgcttgatttaattaacttttttatacagtgctctggatgcaagggtgtcgtgacagcagaaatgtttcgacatatgcagaactcagaaatcatccggaaaatgaccgaagagtttgatgaggatagcggggactaccccctgacaatggccggaccccaatggaagaagtttaagagctccttctgtgagtttattggagtcctcgtaagacagtgtcagtacagcattatctatgacgaatacatgatggacacagtaattagcttgctgaccggtctgtctgattcccaggtgcgcgcctttcggcatacctcaacattggccgctatgaaactcatgactgcactggtcaatgttgcactgaacttaagtatcaatatggacaacacacagcgccagtacgaggctgagagaaataagatgatcggtaaacgcgcaaatgagaggctcgagctgttgctgcaaaagaggaaggagttgcaggagaatcaagatgaaattgagaacatgatgaatgccatattcaagggcgtgtttgtgcatcgttacagggacgcaattgccgagatccgcgccatttgcatcgaagagatcggaatctggatgaaaatgtattccgatgcattcctgaatgacagctatcttaaatacgtcgggtggacgatgcatgacaaacagggtgaggtgcgactgaaatgtctcaccgccttgcagggcttatattataacaaagaattgaattcgaagcttgagctcttcaccagccggttcaaggaccgaattgtgagcatgacattagacaaagaatatgacgtcgccgtccaggctataaagttgctcacacttgtgctgcaatcatcagaggaagtgctaactgccgaggattgcgagaatgtctatcacctcgtgtactccgcgcatcgaccagtggctgtcgccgctggggaatttctgtacaagaagctgttctcgcgcagggatccggaagaggacggcatgatgaaacgacgtggccggcagggacctaacgccaacctcgtgaagacactcgttttctttttcctggagagtgaactacacgagcatgctgcctatctggtggactcaatgtgggactgcgcgacggagctgttaaaagactgggaatgcatgaacagcctactattggaggagcctctctctggcgaggaggctctaacagatcgccaagagagtgcactcattgagatcatgctatgcaccatcaggcaagccgcagagtgccacccccctgttggcagggggacaggcaagcgcgtcctgaccgctaaggaaaagaagacccagctggatgatagaactaagataaccgagttgttcgctgtggcgttgccccaactgttggccaaatactcagtggacgctgagaaagtaacaaacttgctgcagcttcctcaatattttgacctggagatttatacaacaggccgtctcgagaagcacctcgatgccctgctccgtcagattcgaaatattgtagagaagcacactgacacggatgtgctggaagcctgttcaaagacttaccatgctctttgtaacgaggaattcacaatcttcaacagagtggacatatcccggtcacaactgattgacgagttggccgataagttcaacagattgctagaagattttctccaggagggtgaggaacccgatgaggacgacgcttaccaggtgttaagcacgcttaagcggattacagccttccataatgctcatgatctgtccaagtgggatctgttcgcgtgtaactataaacttttgaagacgggtattgagaatggcgatatgccagagcagattgtcattcacgctctacagtgtactcactatgtcatcctgtggcagttggcaaaaatcacggagtcctcttccacaaaagaagacctactgagactgaaaaaacagatgcgggtcttctgccagatctgtcagcattacctgaccaatgtcaatacaactgtgaaagagcaggctttcactatactctgcgacatcctaatgatcttcagccatcagatcatgagcggagggagagacatgcttgagcccctggtgtacacacccgactcaagcctgcagagcgagctcttgagcttcatactggaccacgtctttatagaacaggacgatgataacaatagtgcggacggtcaacaggaggacgaagcgtccaagatcgaggcactgcacaaaagacgtaatctcctggcagccttttgcaagctcatcgtatacaccgtggtggaaatgaatacggcggcagacatcttcaagcaatatatgaaatactataatgattacggcgacatcatcaaagaaaccatgagcaagacgagacagattgacaagatacaatgcgcaaaaaccctcattctctccttgcagcagctgtttaatgagatgatccaggaaaacggctacaattttgacaggtctagcagcactttcagtgggatcaaggagctcgctaggcgttttgccctgacctttgggctggaccagttaaagacaagagaagctatagccatgctccataaggatggcatcgagtttgctttcaaagaaccaaacccccaaggcgagtctcatcccccattgaatctagcctttctggatattcttagcgagttctccagcaaattgttgagacaggataagcggaccgtctacgtttaccttgaaaagtttatgactttccagatgtcattgaggcgggaagatgtgtggttaccactgatgtcgtaccgaaacagccttctggccggaggcgatgacgacactatgtccgtgattagcggaatctcctctcggggaagcaccgtccggtcgaaaaagagcaagccttcaactgggaagaggaaggtcgttgagggaatgcagctcagccttaccgaagagtcaagctctagcgacagcatgtggctgtcacgcgagcagaccctgcatacaccagtgatgatgcagacccctcagctgacctccaccattatgcgggagccaaaaagactaagacccgaagatagctttatgtccgtgtatccgatgcagaccgaacaccaccagaccccacttgactacaaccgtcgaggcacctccctcatggaagatgatgaagaacctattgtcgaagatgtcatgatgtcttcagaggggcgaatagaggatctgaacgaaggcatggatttcgacactatggatatcgatttgccccccagtaaaaaccgccgggaaaggactgaactcaaaccggatttctttgatcctgccagtatcatggacgagagcgtgctcggcgtgtctatgttctag

SEQ ID NO: 136459 - DNA, 213 bp, synthetic construct
  misc_feature 1..213: note = Description of Artificial Sequence: Synthetic coding sequence
  source 1..213: mol_type = other DNA
atgatcgcggccccggagattcccacagattttaacttgctccaggaaagcgaaacccacttctcaagcgatacggacttcgaggatatagaagggaaaaaccagaagcagggcaaaggaaaaacttgtaagaagggaaagaagggccccgccgaaaaaggcaaaggggggaacggcggagggaagcccccctcaggcccaaatcggatgtag

SEQ ID NO: 136460 - DNA, 348 bp, synthetic construct
  misc_feature 1..348: note = Description of Artificial Sequence: Synthetic coding sequence
  source 1..348: mol_type = other DNA
atgattgctgccccagagatcccaactgactttaatctgttgcaggagtccgagactcacttctcgtctgatacagacttcgaggacattgagggtaagaatcaaaagcagggaaagggaaagacatgcaaaaaagggaaaaaggggcctgcggaaaaaggtaagggaggtaacggtggcggcaagccaccgagcggacctaatagaatgaacggccaccatcaacaaaatggagtggaaaatatgatgctgtttgaggttgtgaagatgggaaagtcggccatgcaatcagtcgtggacgactggatcgaatcgtacaagcacgacagggatattgctctgctgtag

SEQ ID NO: 136461 - DNA, 510 bp, synthetic construct
  misc_feature 1..510: note = Description of Artificial Sequence: Synthetic coding sequence
  source 1..510: mol_type = other DNA
atgattgctgcccccgaaatcccaaccgatttcaacttattgcaggagtccgaaacacattttagtagcgatactgattttgaggatatcgagggcaagaaccagaaacaggggaaagggaagacttgcaaaaagggcaagaagggtcccgccgaaaaggggaaaggggggaatggaggcggaaaaccaccttccggaccaaacagaatgaacggccatcaccagcagaatggcgtggaaaatatgatgctttttgaggtcgtcaagatggggaaaagcgctatgcagagtgtggtcgatgactggattgaatcgtacaagcatgaccgcgacatagcccttctggacctaattaacttttttatccagtgctccgggtgcaagggcgtcgtcaccgcagagatgttccggcacatgcaaaacagcgaaatcattcggaagatgacagaggaatttgacgaggattctggcgattacccattaacaatggcaggaccccagtggaaatag

SEQ ID NO: 136462 - DNA, 465 bp, synthetic construct
  misc_feature 1..465: note = Description of Artificial Sequence: Synthetic coding sequence
  source 1..465: mol_type = other DNA
atgatcgcagcccccgagatacccaccgacttcaatctgctccaggagagtgagacccactttagtagtgatacagactttgaggacatcgagggtaaaaaccaaaagcagggaaaaggcaaaacctgcaagaaaggtaagaaagggcccgccgaaaagggcaaaggaggtaacgggggtggcaaacccccctcaggtcccaacagaatgaacggccaccaccaacaaaacggcgtggagaacatgatgctgtttgaggtggtcaaaatgggcaagtccgccatgcagtcggtggttgacgactggatcgagtcttacaagcatgaccgagatatcgcactcctggatctcatcaactttttcatccaatgcagcgggtgcaaaggagttgttactgctgagatgtttcgccatatgcagaatagcgagatcatcagaaaaatgactgaggagtttgatgagtag

SEQ ID NO: 136463 - DNA, 627 bp, synthetic construct
  misc_feature 1..627: note = Description of Artificial Sequence: Synthetic coding sequence
  source 1..627: mol_type = other DNA
atgattgcagcccccgaaatcccaaccgactttaacctcctccaagagtcagagacacactttagctctgacactgatttcgaagacatagagggtaagaatcagaaacagggcaaaggaaagacatgtaagaaggggaaaaaaggccctgcagagaagggcaagggaggcaacggaggtggcaaaccgccatccggtccgaacagaatgaacggacatcaccaacagaatggagttgagaatatgatgttatttgaggtggttaagatgggcaaatccgccatgcagagcgtggttgatgactggatcgagtcttataagcatgatagggatatcgccttactggatctgattaatttcttcatccagtgttcaggctgcaagggcgtcgttacagccgaaatgtttcgtcacatgcagaattcagagataattaggaaaatgacagaggagttcgacgaagactcgggagattaccctcttaccatggccggaccccagtggaaaaagttcaagtcctccttttgtgaattcatcggcgtgcttgttaggcagtgtcagtacagtatcatctacgatgaatatatgatggataccgtgatctcacttcttacaggcttgtcttag

SEQ ID NO: 136464 - DNA, 1647 bp, synthetic construct
  misc_feature 1..1647: note = Description of Artificial Sequence: Synthetic coding sequence
  source 1..1647: mol_type = other DNA
atgattgcagcccccgagattccaacagactttaatctgctccaggagagtgagacccatttctcatcagataccgacttcgaggatattgagggaaagaatcaaaagcaggggaaagggaaaacatgtaaaaagggtaaaaaaggaccagccgaaaaaggaaaaggaggcaatggtggaggcaaacctcccagtggcccaaatcgcatgaatggacatcaccagcaaaacggagtggagaacatgatgcttttcgaggtcgtaaaaatgggtaagtctgccatgcagtcggtggtcgatgattggatagagtcatacaagcacgatcgcgatatcgccttgctcgacctgatcaacttctttatccagtgctctggatgcaagggtgttgtgacagcggaaatgtttcggcacatgcagaacagtgaaattattagaaaaatgactgaggaattcgacgaggattcgggggattaccctctgacgatggccgggccacaatggaaaaagttcaagtcgtccttctgtgagtttatcggggttctcgtgcggcagtgccagtacagtatcatttacgatgagtatatgatggataccgtgatctcgctcctaaccgggctctcagatagtcaggtccgagcctttcgtcatacatctacgctggctgccatgaaattgatgacagctctggtgaatgtcgcactaaacctcagtattaacatggacaacactcagaggcaatatgaagcagagcgaaataagatgattggtaaaagagccaacgagaggttggagctgctcctgcagaaacggaaagaactacaggaaaaccaggatgagatcgagaacatgatgaacgcaattttcaagggtgtgtttgtgcaccggtatcgggacgcaattgctgagatccgcgcaatctgtatcgaggaaataggcatttggatgaagatgtacagcgacgcattccttaacgattcatatctgaagtacgtcggatggacaatgcatgacaaacagggggaagtgagattgaagtgccttacagccttacaaggactctactacaacaaggagctgaacagcaaactagaacttttcaccagccggtttaaggacagaatcgtgtctatgacacttgacaaggaatatgacgtcgccgtccaggccattaagctcctgaccctcgtgctgcagtcctccgaagaagtgctcacagcagaggactgcgaaaacgtgtatcatttggtatactccgcacacaggcccgtggctgttgctgccggagagtttctctataaaaagctattctcccgccgcgatcccgaggaagacggaatgatgaaaagacggggcaggcagggtccaaacgcaaatctggtgaagacactggtgttcttcttcttggagtctgagctgcacgagcatgccgcatatctggttgatagcatgtgggattgcgccacagagctactgaaggactgggagtgcatgaattctctcttgctggaggaaccactctccggggaagaggcactgacggatcggcaggaatctgccctcattgagatcatgctgtgcaccatacgacaggccgccgaatgtcatccccccgtgggccgtggaaccggtaagagggttctctag

SEQ ID NO: 136465 - DNA, 123 bp, synthetic construct
  misc_feature 1..123: note = Description of Artificial Sequence: Synthetic coding sequence
  source 1..123: mol_type = other DNA
atgatagcggcccctgagatcccgacagactttaatctgctacaggaatccgagactcacttctcttcggacactgacttcgaagacattgaggggaagaatcagaaacagggtaaggggtag

SEQ ID NO: 136466 - DNA, 3678 bp, synthetic construct
  misc_feature 1..3678: note = Description of Artificial Sequence: Synthetic coding sequence
  source 1..3678: mol_type = other DNA
atgtcttctccgcttcaaagggcggttggcgacactaagagagccctgtctgcttcatcgagcagtagcgcaagtctgccttttgatgaccgcgactccaatcacactagtgaaggaaatggcgattccttgctggctgacgaggacacagatttcgaagattctcttaaccgcaacgtgaagaagcgcgccgccaaacggcccccgaagacgacaccagtagctaagcatcccaagaagggctccagagtggtacacaggcattcaagaaagcaatccgagcctcctgccaatgacctgtttaatgccgttaaggccgcaaagtccgatatgcaatccctcgtggacgagtggctggattcctataagcaggatcaggatgctgggttcttggagctggtcaattttttcatccagagctgcgggtgtaagggcatcgtgacgcccgagatgtttaaaaagatgagcaatagtgagattatccagcacctgaccgaacagtttaatgaagattctggggattatcctctcattgctcctggcccatcttggaagaaatttcagggttccttttgtgaatttgtaagaactctggtgtgccagtgccagtactctctgctgtacgatggatttccaatggacgacctgatttctttgttgacaggcctcagtgactcacaggttagagctttcagacatacttctaccctcgccgcaatgaagttgatgacctctctggtgaaggtagccctccagctgtctgtgcaccaagataataaccagcggcagtatgaggcagaaaggaataaagggcccggacagcgagcccccgaacgtctggagtctctcctggagaaacggaaggagttacaagaacatcaggaggaaattgaaggcatgatgaatgcattattcagaggtgtcttcgtccatcgctaccgggatgtactgccagagattagagccatctgtattgaagagattggttgctggatgcagagctactctacctctttcctgactgactcgtacctgaaatatatcggatggaccctacatgacaagcaccgcgaggtgaggctgaaatgcgtgaaggccctcaaggggttgtatggcaaccgcgacctgactacccggctagaactcttcacgtcaaggttcaaggacagaatggtgagcatggtgatggatcgtgagtacgatgtcgcagtcgaggcagtgcgtctcctgatcttgatcttaaagaatatggagggcgtgctcacagatgctgattgtgaatcagtttaccctgtcgtctatgcctcccaccgggggctggcctctgcagccggagaattcttgtactggaagctgttttacccagaatgtgaaatccgcatgatgggaggccgggaacagcgtcagagccccggtgcacagagaacctttttccagctgttgttatccttcttcgtggaaagcgagttacatgaccatgccgcatacctggtggattcattgtgggattgcgcaggagccagattgaaagactgggaaggtttgacatccctgctgctggagaaagaccaaaacctcggcgacgttcaagaaagcactcttattgagattttagtaagttccgctcgacaggcatccgaaggccaccctccggtggggcgcgtcacagggagaaaagggctcacatctaaagagagaaaaacacaggccgatgacagagtgaaattgacagaacaccttatccctctgctgcctcagctcctagccaagttttctgcagatgctgaaaaagttacccccctcctgcaactgctctcgtgtttcgatctgcatatttattgtactggccggctggagaaacatctcgagctgtttctgcagcagctgcaggaagtggttgttaaacatgcagagcccgccgtgctcgaggcaggagcccacgctttgtatctcctgtgcaacccggagttcacgtttttcagcagggccgacttcgcccgatcgcagctggtggatctactaactgatcggttccagcaagaattagaagaacttctccagagctcttttctggatgaagacgaggtgtataacctggctgccactttaaagcgcctctcagctttctacaacacgcacgatttgactcgatgggaactttacgagccttgctgccagctccttcagaaggctgttgatacaggcgaagtgcctcaccaggtcatcctgcccgccctgacactggtatacttctcaatcctttggactttgactcacatcagcaagagcgatgcctcgcagaaacagttgagctccctgcgagatcgaatggtggcattttgcgagctgtgtcagagttgcttgagcgacgtggatactgagatccaggagcaagcttttgtgctgttaagcgatctcctgcttatcttttcgccacagatgatagtcggtggccgcgattttctgcgccctctggtgtttttccccgaagctaccttgcagtccgagttagcttcctttttaatggatcacgtgttcatccagccaggcgacctgggttccggggactcacaggaagatcacctgcagattgaacggctgcatcagcgacggcgcctcctagctgggttttgcaagctgctgctatatggagttctggagatggatgctgcctccgacgtcttcaaacattataacaaattttataatgactacggggatattattaaggaaactctgactagagctaggcaaatcgataggtctcactgcagtcggattctcctgttatccttgaaacagctctacactgaacttctccaggagcacggcccccaggggctaaatgagctccctgcgtttatcgagatgagggaccttgctcggaggtttgccctgagcttcggtccacagcagctgcagaacagagatctggttgtaatgcttcacaaagagggcattcagttctctcttagcgagctgcctccagctgggagctcaaaccaaccccccaatctagcctttctggaactgctgagtgagttttcaccgaggctgttccaccaggacaaacagctcctcctgtcgtatctcgagaagtgcctacagcatgttagccaggcccccgggcacccctggggccccgtgaccacgtattgtcacagtctttccccggtggaaaacactgcagagaccagccctcaagtcctgccgtctagcaagagaaggagagtcgagggacccgcaaaaccgaatcgggaggatgtgagctctagccaggaagaatcccttcagcttaattccatcccccccacccctactctgacttccacagctgtgaagagccgacagccactttggggccttaaagagatggaggaagaggatggaagtgagctggatttcgcacaggggcaaccagttgccggtactgaacgaagccggtttctgggcccgcaatactttcagactcctcataacccttccgggccgggactcgggaatcaattaatgcgattgagtctgatggaagaagacgaggaggaggagctcgagatccaggacgagagcaatgaggaacgccaggataccgacatgcaggcaagctcctactccagtacaagtgagcgtggactcgaccttctcgattccactgagttggatattgaggacttttag

SEQ ID NO: 136467 - DNA, 2667 bp, synthetic construct
  misc_feature 1..2667: note = Description of Artificial Sequence: Synthetic coding sequence
  source 1..2667: mol_type = other DNA
atgtccagccccctgcagcgtgccgtgggagatacaaagcgggcactgtctgccagtagcagctcgtctgcttctctgcctttcgatgaccgagactctaatcataccagcgagggcaacggagacagtctgttggcagatgaagataccgacttcgaggatagtctcaaccgcaatgtcaaaaagagggccgccaaacgccctccaaaaacaaccccagtggccaagcaccctaagaagggttcaagagtggttcatcgccacagcagaaagcagagcgaacccccagctaacgacttgtttaatgcagttaaggcagccaagtccgatatgcaaagcttggttgacgagtggttggattcctataagcaggatcaggatgcaggttttctggaactcgttaacttctttattcagtcatgtggatgtaaggggattgttactcctgagatgttcaaaaagatgtctaactcagaaatcatccaacatctgactgaacagttcaacgagatggatgacctgattagtcttctaaccggcctgtctgactcgcaggtacgggcattccgccacacctcaacgctcgcagccatgaagcttatgaccagtctggtcaaggttgccctgcagctgagcgtccatcaggataacaaccagcggcagtatgaggccgagcgcaataagggacctgggcagagggcaccagaacgcctcgaatccctactggaaaagcgaaaagaacttcaggagcatcaggaggagatcgagggcatgatgaacgcattatttcgcggagtgttcgttcaccggtatagggatgtattgcctgaaatcagggcaatttgcatagaagagattgggtgttggatgcagagctattcaacctcctttctgacagattcctatctaaagtatattggctggaccctgcacgataagcatcgagaagtacggctgaagtgcgtgaaagccttgaagggcctgtatggcaaccgcgacctgacaacgagactagagctcttcacaagcaggtttaaagaccgcatggtgagcatggtcatggatagagaatacgatgtggcagtggaagctgtgcgcctcttaattctgatcctcaagaacatggagggagttctaaccgatgcagattgcgagagtgtctaccctgtcgtctatgcaagccatcggggactggcctctgcggccggtgaatttctatattggaaactgttttaccctgaatgcgagatacgtatgatgggcggcagggaacagagacagtccccaggagcccagcggactttctttcaacttctgctgagtttcttcgtcgagagcgagctgcatgaccacgccgcctacctcgttgactcactatgggactgcgctggcgccagacttaaagactgggagggcctgacctcactcttactcgaaaaagaccagaacctgggcgatgtacaggagagtacattgatcgagatcctggtgtcctccgcccgacaggcctctgaaggccaccctccggtcggacgggtgacggggaggaaggggctcacgagtaaggagagaaagactcaagccgatgatagagtgaagctgactgaacatttgataccactgctgccccagcttctcgcgaagttcagcgctgacgcagagaaggtgacaccactcctgcagttgttgtcatgtttcgatttgcacatttactgcactggacgccttgaaaaacatctggagctgtttctgcagcaattgcaggaagtcgtcgtaaagcacgccgaaccggctgttcttgaggccggcgcacacgccctgtacctgctgtgtaatcctgagttcacattcttctcgagggcagactttgctagatctcagcttgtggacttattaactgatcgcttccagcaagagctggaagagctgctccagtcttcctttctggatgaggatgaggtctacaacttggctgcaaccctcaagaggctcagtgctttctacaatacacacgacctcacccgctgggagctctatgaaccctgttgtcagctgttgcagaaggccgtggatactggcgaggtcccccatcaggttatccttcccgccctgactctggtgtattttagcattctctggactctcacgcattcccttagcccagtagagaacactgccgaaacttctccacaggttctgccatcaagtaagcgacggagagtggagggcccggcaaagccgaatcgagaggacgtgagctcctcccaggaagaatccctgcagctgaactctatccctccgacgcctacgcttacatctaccgctgtgaaaagtaggcagcccctgtggggcctgaaagaaatggaggaagaggacggttccgagctggattttgcccaaggacaaccagtggcaggaacagaacgttccaggtttttggggcctcaatatttccagactccacacaacccttcaggacctggcctgggaaaccagcttatgcggctatcactgatggaggaagacgaggaagaggagctggaaatccaggacgagtctaacgaggagagacaggatactgacatgcaggccagttcttactccagcacttccgaacgcggccttgacctgctagacagtaccgaactcgacatcgaggacttttag

SEQ ID NO: 136468 - DNA, 789 bp, synthetic construct
  misc_feature 1..789: note = Description of Artificial Sequence: Synthetic coding sequence
  source 1..789: mol_type = other DNA
atgttgcacaaagagggaattcagttcagtctgtcggagctgccccctgccggaagcagcaatcagcctcccaacttggctttcctcgagctcctctccgaattctccccgaggctgttccaccaggataaacaattactcctgtcctatctggagaagtgtcttcaacatgtttctcaggcaccaggtcacccctggggtcccgtgacaacctactgtcactctctctcaccagtcgaaaacaccgcagaaacttccccccaggtcctacctagctcaaagcgtagacgtgttgagggacctgctaagcccaacagggaggatgtgagtagctcacaggaagagtcgctgcagttaaactccattcctcctactcctacgctgactagtacggccgttaagtctcggcagccgctatggggcctgaaggagatggaggaagaggatggtagtgagctggatttcgcgcagggatcccaacctgtcgctgggaccgagaggtccagatttttgggtcctcagtatttccagacaccacataacccaagcggtcccggtctggggaaccagctgatgagactgagtttaatggaggaagatgaggaagaagaacttgagattcaggacgaatcgaatgaggaacgccaggataccgatatgcaagcttctagttactcgagtacttcagagagaggcctcgacctgcttgattctactgagcttgacatagaaatcaccgagagtctgccactgctagggaagtcaccccacccttacaattcccggtag

SEQ ID NO: 136469 - DNA, 438 bp, synthetic construct
  misc_feature 1..438: note = Description of Artificial Sequence: Synthetic coding sequence
  source 1..438: mol_type = other DNA
atgtcatctcccctgcagagggcagtaggagacaccaaacgcgccctgagcgcctcaagcagctcttctgctagcctcccttttgatgaccgcgacagcaatcatacttccgagggaaacggagacagcttgctagccgacgaagatactgatttcgaggatagtctaaacagaaatgtcaagaaacgtgccgctaagcgcccacctaaaaccactcccgttgcaaaacatccaaaaaaaggaagccgggtcgtccacagacacagccgcaagcagagtgagcctcctgctaatgatctcttcaatgccgttaaggctgcaaagtccgacatgcaaagccttgtggatgagtggctcgactcctataaacaggaccaggacgccggcttcctcgaattggtgaacttttttatacaatcttgtgggtgcaagggctag

SEQ ID NO: 136470 - DNA, 339 bp, synthetic construct
  misc_feature 1..339: note = Description of Artificial Sequence: Synthetic coding sequence
  source 1..339: mol_type = other DNA
atgtccagcccattacagagggcagtgggggacacaaagcgagctttaagcgcttctagtagttcctctgcaagcctgccgttcgatgacagggatagtaaccatacctctgaaggtaacggggacagccttttagccgatgaggatactgatttcgaggactcattgaataggaacgttaaaaaacgcgccgctaaaagaccgcctaaaactacccccgtagcaaaacatccgaaaaaaggttctcgcgttgtgcatcgccacagccggaagcaatctgagccgcctgcaaatgacctgtttaatgctgtgaaggcagctaaatcagacatgcagtag

SEQ ID NO: 136471 - DNA, 3678 bp, synthetic construct
  misc_feature 1..3678: note = Description of Artificial Sequence: Synthetic coding sequence
  source 1..3678: mol_type = other DNA
atgtcctctcccctccaaagagccgtgggggacactaagagagccctgtccgcctcatcctcttccagcgcaagtcttcccttcgacgatcgggacagcaaccataccagtgaggggaacggtgattccctcctagcagacgaagataccgattttgaggactcactgaacagaaatgtgaagaagagagctgccaagcgccctcccaagaccacccctgtggccaagcacccaaaaaaaggaagcagagtggttcatcgtcatagcaggaagcagagcgaaccaccagccaacgatctgttcaacgctgtcaaggcagccaaaagtgatatgcagtccctggtcgacgaatggttggactcttacaagcaggaccaggacgcaggcttcttagaattggtgaacttttttatccagtcctgcgggtgtaaaggaatcgttacccctgaaatgtttaaaaagatgtccaactccgagattatccagcaccttacagaacagttcaacgaggacagtggggactatccactgatcgctccaggaccctcttggaaaaaatttcagggaagcttctgtgagttcgtgcgcacactcgtctgccagtgccaatattcattgctgtacgatgggttcccgatggacgacctgatcagcctgctgacgggattaagcgactcccaggtgcgcgcctttcggcacactagtactctggcagccatgaagctgatgacctctttggtgaaagtcgctctgcagctgtcggttcaccaagataacaatcaacgccagtatgaagcagaacgcaataaaggccccggacagcgggctccggagagacttgaaagcttactggagaaaaggaaggagctccaggaacaccaggaagaaatcgagggtatgatgaatgctcttttccgcggggtgttcgtgcaccggtacagggatgtcttgcctgaaatcagggctatatgcattgaggaaattggatgctggatgcagagttacagcaccagttttttgacagactcatatctcaagtacattggatggacgctgcacgacaagcaccgcgaagtgcgcttgaaatgtgtgaaagcactgaaaggcctctatggcaacagggacctgacaacaagactggaattgtttacgagccgtttcaaggaccggatggtgtccatggtaatggatcgtgagtacgacgtagccgttgaggcggtccgtctgctgattctgatcctgaagaatatggagggtgttcttacggacgctgattgcgagagcgtctatcctgtcgtctatgcatcccatagagggttggcgtccgcagctggtgaatttctttattggaaactattttacccagagtgcgagattagaatgatgggggggcgcgaacagagacagtctcctggagcgcaaaggacattttttcagctcctcctgtcgtttttcgtggaatctgaactgcatgaccatgccgcctacctggtggacagcctttgggactgcgcaggggcgcggctgaaagactgggaggggctgacctccctgctgctggagaaggaccagaatctaggggatgttcaagaatccactttgatcgaaatactggtgtcatccgcccggcaagcttctgaaggacatccccctgtcggcagggtgactggtagaaagggactcacttccaaagaacgcaaaacccaggcggacgacagagtcaaactaaccgagcacctgattcccctcctaccccaactgctggccaaattcagtgcagatgctgagaaggtgaccccactgcttcagctcttatcctgctttgacctgcacatatactgtactgggcggttagaaaaacatcttgagctcttcctgcagcaattacaggaagttgtagttaaacatgctgagcctgcagttctggaggcaggggcacatgccctgtaccttctttgcaatccagaattcacatttttctcccgcgcagatttcgcgcgcagccagctggtagatttgttaaccgatagattccagcaggagcttgaagagctgctgcaatcctcttttcttgacgaggatgaggtgtacaacctcgccgccacactaaagaggctctccgccttctacaacacacacgacttgactaggtgggagctttatgaaccttgctgccagttgctgcaaaaggctgtggacaccggtgaagttccccaccaggtgattcttccagcattgactcttgtatatttttcgattctgtggactctgacacatatctctaagtcagacgcatctcagaagcaactctccagcctgagggacaggatggttgccttctgcgagctctgtcagtcctgtctcagtgatgtggacacagaaatccaggagcaagcattcgtacttttgagcgatctcctcctcatcttttcccctcagatgattgtgggaggccgcgactttctgcgccccctggtgttcttcccggaggccaccctccaatctgagctggcctcattcttaatggaccatgtgttcattcagccgggcgacttgggatcgggggatagtcaggaggatcacctccagattgagcggctgcatcaaaggaggagacttctagctggcttctgcaagctgctgttatacggcgtcctagaaatggacgcggcttccgatgtgttcaagcattataacaaattttataatgactatggtgacatcataaaggagacgctcaccagagcccggcagatcgaccggagtcactgttcccgcatcttgcttctttccctgaaacagttgtacaccgagcttctgcaggagcatggtccccaaggcttgaatgaacttcctgccttcatcgagatgcgggacttggctcggcgcttcgcattgagcttcgggccccagcagctgcagaacagggacctcgtggtcatgctgcataaagaggggattcagttcagtctgagcgaactcccgcccgccgggtcctccaaccagcctcccaacctagccttcctggagctcctgtccgagttttctccccgtctgtttcatcaggataaacaactcctgttgagctatctggagaagtgcctacagcacgtcagccaggcacctggacacccttggggaccggtcacgacttattgtcactccctgtcaccagtcgaaaacacagccgagacgagtccgcaggtgctcccgagttctaagcgaaggcgtgtagagggacctgccaagcccaatcgcgaagacgtgtcttcgtcccaggaggagtctctacagcttaatagcatccctcccaccccgaccctgaccagtaccgccgtcaagtcacgacaacctctctggggcctcaaggagatggaggaagaggatggctctgagctggattttgctcagggtcagcccgtggcgggaaccgaacggtccaggtttctgggacctcaatacttccagaccccacataatccctccggcccagggcttggcaatcagctgatgaggctcagcttgatggaggaggatgaagaggaagagctagagatccaggacgagtctaatgaagagcggcaagataccgacatgcaggcctcctcctattcaagtactagtgagcgaggcctggacctcctcgacagcacagagctagacattgaggatttctag

SEQ ID NO: 136472 - DNA, 567 bp, synthetic construct
  misc_feature 1..567: note = Description of Artificial Sequence: Synthetic coding sequence
  source 1..567: mol_type = other DNA
atgagtagccccttgcagagggctgtaggggatacgaaacgcgccctgtcggccagctcttctagctctgcatccctgccttttgacgacagggatagcaaccatacgagtgaaggcaatggtgatagcctccttgcagacgaggataccgactttgaggacagccttaatagaaacgtgaaaaagcgcgcagccaaacgaccgcccaagaccacgcctgtggcgaaacatcctaaaaaggggtctagggtagtacacaggcactcacgcaaacaatccgagccgccagccaacgacctctttaatgccgtcaaagcagcaaaaagcgacatgcaagacagtggcgactaccccctgattgcacctgggccatcctggaaaaagttccagggctcattttgcgagtttgttcgtaccctcgtctgccagtgccagtatagcttactgtacgacggtttccctatggatgacctgatcagcctcctgaccggcttatctgattcccaagttagggcattccggcacacaagtaccctggcagccatgaagctgatgacatccctgtag

SEQ ID NO: 136473 - DNA, 1047 bp, synthetic construct
  misc_feature 1..1047: note = Description of Artificial Sequence: Synthetic coding sequence
  source 1..1047: mol_type = other DNA
atggtgtggccatgggtcgcaatggccagccggtgggggccgctgatcggactggccccctgttgcctctggctgctgggagcagtgcttttgatggacgcgtcagcgcggccagccaatcactctagcacacgggaacgtgtggctaatagagaggagaatgagattctgcccccagatcacctgaacggggtgaagctagagatggacgggcacctgaataggggttttcaccaagaagtatttctcggcaaggacctgggcgggttcgatgaagacgcagaaccccgccgcagccggaggaagctcatggttatattcagcaaagtagacgtgaatactgatcgaaaaatttcggcgaaagaaatgcagaggtggatcatggaaaaaaccgccgagcattttcaggaggcaatggaagagtccaaaacccacttccgggccgtggaccctgatggtgatgggcatgtgagctgggacgaatacaaagtcaagtttctggcttcaaagggtcattctgagaaggaggtcgccgacgccatccgacttaatgaagaattaaaggtggacgaggaaacacaggaggtgcttgaaaatctcaaggaccggtggtaccaggctgattctccacctgccgacctgctgttaaccgaagaagagtttctgtcattcctgcacccagaacactcccgaggaatgctgcgctttatggtgaaagagatagtacgggacctggaccaagatggtgataagcaactcagcgtgcccgaattcatatcactgcccgtcgggactgtagagaaccaacaggggcaggatattgacgacaattgggtcaaagatcggaagaaggaatttgaggagctaattgattccaatcacgacggaattgtgactgcagaggagctggagaacgtccccacacttccgttacagcctattggaacgctcaattctcactttgtgcgactggcagcagagttgggtggggggaaggcgacactgacatgcgcccctcttgccaggcgggcaacatggacaccttag

SEQ ID NO: 136474 - DNA, 1089 bp, synthetic construct
  misc_feature 1..1089: note = Description of Artificial Sequence: Synthetic coding sequence
  source 1..1089: mol_type = other DNA
atggtctggccttgggtggccatggcgagccgctggggcccactgatcggactggccccgtgctgcctgtggctgttaggggcagtcctcttgatggatgcaagcgctaggcccgctaaccattcctcaactagggagcgagtagctaaccgcgaggagaatgaaatcctaccccccgaccacctgaacggggttaagttggaaatggacgggcacctcaatagaggattccaccaggaagtgttcctcggcaaggacctgggagggttcgacgaggatgcagaacccaggcggagcagaagaaagctcatggtgatcttttctaaagtggacgttaacaccgaccggaagatatcagcgaaagaaatgcaaagatggattatggagaagaccgccgagcattttcaggaggccatggaggagtccaagacgcacttccgagcggtagacccagatggtgacggccacgtctcctgggatgagtataaagttaagtttctcgcctccaagggacatagtgaaaaggaggttgctgacgcaatcagactgaacgaggagctgaaagtcgatgaagagactcaggaagttctagagaacctaaaagatagatggtaccaggcagattcaccgcccgcagatcttttgctgaccgaagaagaattcttatcttttctgcaccctgagcactcacgcggcatgctccgctttatggtgaaggagatcgtgcgagatctggaccaggacggggacaagcaacttagcgtgcctgaattcatttctctcccagtgggcacagtagaaaaccagcagggacaggacattgatgataactgggtgaaggaccggaagaaagaattcgaagaattaattgactcaaaccacgacggaatcgtcaccgctgaggaattagagtcatatatggacccaatgaacgaatataatgccttgaacgaagccaaacaaatgatagccgtggcagacgagaatcagaaccaccacctggaaccagaagaggtgctgaagtactcggagttcttcacaggctcaaagctggtggattatgcccggagtgtgcacgaagagttctag

SEQ ID NO: 136475 - DNA, 732 bp, synthetic construct
  misc_feature 1..732: note = Description of Artificial Sequence: Synthetic coding sequence
  source 1..732: mol_type = other DNA
taactagagatggatgggcacctgaacaggggtttccatcaggaggtgtttctcgggaaggatttaggcgggtttgacgaagacgccgaaccacgacggtctagaagaaagctgatggtgatttttagcaaggtcgacgtgaataccgaccgtaaaatttccgcaaaagaaatgcagcggtggatcatggagaaaactgccgaacacttccaggaagcgatggaagagagtaaaacccactttcgcgctgttgaccctgacggtgacggacacgtgtcctgggatgaatacaaagtgaagtttctggccagcaaaggacactctgagaaggaggtagcagatgccatcaggttgaacgaagaacttaaagtcgatgaggagtcgtctacttcaaggaacttccttgatctgagagccggggtttgtaggcctaggtacccccaagctgcgcccctctcggctcaagaggtgctcgagaatttgaaggaccgatggtatcaagccgattccccacctgcagatcttctactcaccgaagaggaattcctaagcttcctccatcctgagcactcgcggggaatgttgagattcatggtgaaagagatcgtcagagatcttgaccaggatggtgacaagcagctctcagtgcctgagtttatctctctcccggtcggaaccgtggagaatcagcagggccaggacatcgatgacaattgggtcaaggaccgctag

SEQ ID NO: 136476 - DNA, 609 bp, synthetic construct
  misc_feature 1..609: note = Description of Artificial Sequence: Synthetic coding sequence
  source 1..609: mol_type = other DNA
atggtatggccctgggtcgcgatggcgagccgctgggggcccctcattggtttagccccctgctgcctgtggttgctaggcgccgttctcctgatggacgcctccgctagacccgccaatcactcctctacacgagaacgtgtagcaaaccgagaagaaaatgagatactccccccagaccacttgaacggagtgaagctcgaaatggatggccacctcaacagagggtttcaccaggaggtgttcctgggaaaagatcttggcgggttcgacgaagacgccgagccacggcgatccagacgaaaactcatggtgattttcagtaaggtggatgtgaatacagaccggaagatcagtgcaaaggagatgcaaagatggattatggaaaagacagcggagcactttcaagaggccatggaggagagcaagactcacttccgcgccgtcgacccagacggcgacgggcatgtcagctgggatgagtacaaggtgaagtttttggccagcaaggggcatagcgagaaagaagtggccgatgcaatccgattgaatgaggaactgaaggttgacgaagagagacatgggccgcctgggccacgggccttatag

SEQ ID NO: 136477 - DNA, 636 bp, synthetic construct
  misc_feature 1..636: note = Description of Artificial Sequence: Synthetic coding sequence
  source 1..636: mol_type = other DNA
atggctgtggtcccccttttgctgctgggcggcctctggagcgccgtgggcgcgtcttccctgggagtagtcacctgtggaagtgtggtcaagttgcttaatacccggcataatgttcggcttcacagccatgatgtgcgctacggtagtggctccggacagcagtctgtaaccggtgtaacgagcgtggacgacagcaactcatactggcgaatcagaggtaaatcagccacagtgtgcgaaaggggaacacctatcaagtgcggccagcctatccggttaacccacgttaataccggcagaaatttgcattcccaccacttcacatcacccctcagcggtaaccaggaagtgagcgctttcggggaggagggcgagggcgactatctggacgattggaccgttctgtgtaatggtccttattgggtgcgagatggcgaagtgcgcttcaaacactcgtcaaccgaggtgcttctgtccgtgactggggagcagtacggtaggcccatctccggacagaaagaggttcacggtatggctcaaccatctcagaataattactggaaggcaatggaggggatcttcatgaagccttcagaactcctaaaagcagaggcgcatcatgcagagctttag

SEQ ID NO: 136478 - DNA, 666 bp, synthetic construct
  misc_feature 1..666: note = Description of Artificial Sequence: Synthetic coding sequence
  source 1..666: mol_type = other DNA
atgtggagcgccggtaggggaggcgccgcatggccagttcttttaggcctcctcctggctttattagtgcctggtggcggtgccgccaaaactggtgccgaactcgttacttgcgggagcgtgctcaagctgctgaatacgcatcatcgggtgaggttacattcacacgacataaagtacggatccggctcagggcagcagtctgtgactggggttgaggcgagcgacgacgctaacagctattggcgtatccgaggcggaagcgagggcggctgtcctcgaggtagccccgttcggtgcgggcaagctgtgcggctcactcacgtacttaccggcaaaaatcttcatacccatcattttccatcgcctcttagcaacaatcaggaggtgtccgctttcggggaggacggggaaggggatgacctcgacctctggacggtccggtgcagcggccagcattgggaacgggaagctgccgtgcgttttcagcacgtggggacttcagtttttcttagtgtcaccggcgagcagtacggaagccccattaggggccaacatgaagtgcacggcatgccatctgccaatacgcacaacacatggaaggccatggagggaatctttatcaaacctagcgtcgagcccagtgcagggcacgacgaactgtag

SEQ ID NO: 136479 - DNA, 2058 bp, synthetic construct
  misc_feature 1..2058: note = Description of Artificial Sequence: Synthetic coding sequence
  source 1..2058: mol_type = other DNA
atggacgtctgtgtgagactggctctgtggctgctgtggggactgctcctgcatcagggtcagtcactatctcactcacattctgaaaaagcaactggcaccagcagcggggccaatagcgaggagtctactgcggcggaattttgtaggatcgacaaacctttatgtcatagtgaggatgagaaactctctttcgaggctgtacggaatattcataaattgatggacgatgacgcaaatggagatgtagacgtggaagagtccgatgaatttctcagagaagaccttaattatcacgatcctactgtcaagcacagtacctttcacggcgaggacaaactcatctccgttgaagacctatggaaggcctggaaaagcagcgaggtgtataattggacagtggatgaagtggtgcagtggctcatcacttacgttgagcttcctcagtatgaggaaacattcaggaagctgcagctatcaggccatgccatgcctcgtctcgcagtcaccaacacaactatgaccggaaccgtgctgaaaatgaccgatcggagtcaccgccaaaagctgcagttgaaagccctggatactgtcttgtttggtcctccactgctcacccggcataaccatctgaaggactttatgcttgtcgtgtccatcgtgattggtgtgggcgggtgttggttcgcctacatccaaaacaggtattccaaagaacacatgaagaagatgatgaaggaccttgaaggcctacatcgagccgagcagagtctgcatgatctgcaggaacgactgcataaagcccaggaagagcaccggacggtagaagtcgagaaggttcaccttgaaaagaagttaagagacgagatcaacctggccaagcaggaggcccagagactaaaagagctgcgtgaaggcaccgaaaatgaacgtagtagacagaagtacgcggaagaggagctagagcaggtgagagaggctctgaggaaggcggagaaggagctcgaatctcatagcagctggtatgctcctgaggctctccagaagtggctccagctcactcatgaagtggaggttcagtattataatattaagaagcagaacgctgagaagcaactgttggtggctaaagagggagctgaaaaaattaagaaaaagcgcaacacactattcggaactttccacgtcgctcattcctcatctttagatgatgttgatcacaagatcctgaccgccaagcaggcactctcagaggtgaccgctgcccttcgcgagcgcctccatcgatggcaacagattgagattctgtgtggatttcagatcgtcaataatccggggattcactccctggttgctgccctgaacatcgacccttcatggatgggctcaacacgtcctaacccagcccactttatcatgactgatgatgtggacgatatggatgaggaaatcgtctcacctctttccatgcaatctccatcactgcagtcctccgtgcgacaacgattaacggagcctcagcacgggcttggcagccagagggacctaacccattcagacagcgaatctagccttcacatgagtgatagacaaagagtggcccccaagcctccccagatgagcagggcagcagacgaggcccttaacgctatgacaagcaacgggagccataggctgatagagggcgtgcaccccggtagcctcgttgaaaaactgccggatagccctgccttggcgaagaaggctctacttgcgctaaatcacggcctggataaggctcatagtctgatggaactaagcccctccgcgccgccaggaggatccccgcatctggacagttctaggtctcactcaccctcctctccagatcccgataccccatctcccgtcggagattcccgcgctttgcaggcaagccgcaacacaaggattccccacctggctggcaaaaaggctgtcgccgaagaagacaacggaagtattggagaagagaccgactcttcaccgggccggaagaagttccctcttaagatttttaaaaaacccctgaaaaagtag

SEQ ID NO: 136480 - DNA, 2502 bp, synthetic construct
  misc_feature 1..2502: note = Description of Artificial Sequence: Synthetic coding sequence
  source 1..2502: mol_type = other DNA
atgaatgccgccggaattagagcccctgaggcggctggcgcggatggcactcgactggctccaggagggtctccatgtctgcgccggcgcggccgccctgaggagagtcctgcagcggttgtcgctcctaggggcgccggtgaactgcaggctgcgggcgcaccactcaggttccaccccgcatcaccacgcaggctccacccagcctccacccctgggccagcctggggttggctgctccgacgcaggcggtgggcagcacttctggtgctgggcctcctcgtggccggagccgctgatggatgtgagctagtgccacgacatctcagaggtagaagagcgacagggtccgctgccaccgccgcctcctcacctgcagcagcagccggcgacagcccagcgctcatgactgacccctgtatgtctctaagccctccgtgttttacagaggaggatagattcagccttgaagccctgcaaactatacacaagcagatggatgatgataaagacggtggtatagaagtggaggagtcagatgagtttattagggaagacatgaaatataaggacgctacgaacaaacacagtcatctgcatcgtgaagacaagcacatcacgatcgaggatttatggaagcggtggaagacaagcgaagttcacaactggaccctagaagacacacttcaatggctgattgaattcgtcgagttgccacagtacgaaaaaaacttccgcgataacaacgtgaaaggtaccacccttccaagaattgctgtgcacgaaccctcctttatgatctcccagttaaaaatctcagaccgctctcatcgccagaaactccaactgaaggctttggatgtcgtgctatttggccctctgacaaggccaccccacaactggatgaaagacttcatactcacagtgagcatcgttatcggagtcggcggctgttggttcgcctatacccagaacaagacatctaaggagcacgtggctaaaatgatgaaagacctcgaaagcctccagacagctgagcagtctctgatggacctgcaggagcgattggaaaaagcgcaggaggagaatcgaaacgtcgcggtcgaaaagcagaatctggagagaaaaatgatggatgaaattaactacgctaaggaggaagcctgcaggctcagagaactgcgagagggagccgagtgcgaactctccaggcggcagtacgccgaacaggagctggagcaggtgagaatggcacttaaaaaggcagagaaagaattcgaactgagaagcagctggtcggtgcccgatgcactccagaagtggctccagctgacccatgaggtcgaagtgcagtactacaacatcaaacgtcagaacgcagagatgcagctggctattgcgaaagacgaggcagagaagatcaagaagaaaaggagcaccgtctttggtacactccatgtggctcactccagctccctcgatgaagtggatcacaagatccttgaagccaagaaggccttatcggagttaaccacatgcctcagggagaggctgtttagatggcaacagatcgagaagatttgcggcttccagattgcccataattcaggcctcccttcccttacatcctctttgtacagcgaccattcttgggtggtgatgcccagagtcagcattcctccctaccctatcgctggaggtgtcgacgacctggacgaggacacccctcccatcgtgtcacagtttcctggtaccatggctaaaccccccggttctctggctagaagctcatccttgtgccgaagccgtagatccattgtaccctcatccccacagccgcaaagggctcagctcgcgcctcatgcaccccacccgtcacatccccgccatcctcaccatccgcagcataccccacattctctgccctccccagacccagatatcctgagcgtttcctcctgtcctgcactgtatagaaacgaggaggaggaggaggccatatacttcagtgccgagaaacaatgggaagttccggatactgcaagcgagtgcgacagtctgaattcatctattggacgcaagcaatcccccccattaagcttagaaatttaccaaacactctcgcctcgaaagatctcaagggatgaagttagccttgaggattcgagccgcggcgatagcccagtgacagtggacgtgagttgggggtcaccagattgcgtgggattaacagagactaaatcaatgatctttagccccgccagcaaagtatacaacggcatcctcgagaagtcttgttccatgaaccagctgtcctcgggtattccagtgcccaagcctcgccatacttcatgtagcagcgctggcaacgattcaaaacccgttcaggaagcaccctcagttgcccggatatctagcatcccacatgacttgtgccacaatggggagaaaagcaaaaaaccctctaagattaagagccttttcaaaaagaagtcaaaatag

SEQ ID NO: 136481 - DNA, 2526 bp, synthetic construct
  misc_feature 1..2526: note = Description of Artificial Sequence: Synthetic coding sequence
  source 1..2526: mol_type = other DNA
atgaacgccgctggtattcgtgcgcccgaagccgccggagccgacggaacccgcttggctccaggtggatcgccttgtctgagaaggcgcgggcggccggaggaatctcccgcagctgtggtggcccctcggggcgcgggagaactgcaggccgcgggcgcaccacttcggttccatcccgctagcccacggaggctccaccctgcttcaactccgggcccagcatggggttggctgctccgaagacgaagatgggcggccttgttagtgctcggactgcttgtggccggcgctgccgacggatgtgagttagtgccaaggcatctgaggggacggcgagccacagggtcagcagccacagccgctagcagccctgccgcggccgctggagattctcccgccctcatgacggacccctgcatgagcttaagccccccttgttttacagaggaagaccgttttagtctggaagcacttcagacaattcataaacagatggacgatgacaaagatggggggatcgaggtcgaagagtctgacgagtttattcgtgaagatatgaaatacaaggatgctaccaacaagcacagccatttgcacagggaggataaacatatcactatcgaagacttgtggaagagatggaaaacatcggaagtgcataattggacacttgaagatactctgcagtggcttattgagttcgtggaactgccccagtacgagaagaactttagagacaataatgtgaagggaactaccttgccccggattgcggtccacgagcctagctttatgatttcacagctgaaaatatccgacagaagccatcggcagaaactccagttgaaagctctagatgtggtgctcttcggacctctgactagaccgcctcacaactggatgaaggacttcattcttaccgtctcaatcgttatcggtgtgggagggtgttggttcgcttatacgcagaacaaaacgagcaaagaacacgtcgctaaaatgatgaaggatttggagtcactgcagaccgccgagcagagtctaatggacctccaggagcgcctggagaaagctcaggaggagaaccgtaacgtggccgtcgagaaacaaaatcttgagaggaagatgatggatgagataaactacgctaaagaggaggcgtgccgcctgcgggagcttagggagggcgcggagtgcgagctcagtagacgacaatacgctgagcaggaactggagcaggttcgcatggctttgaaaaaagctgaaaaagagttcgagctgcgctctagttggtctgtgccagatgctctccagaaatggttgcagctcacacacgaagtagaagttcagtactataacatcaaacgtcagaacgctgagatgcagctcgcaatcgccaaggacgaagtggctgcctcctatctgatacaggccgaaaagatcaaaaagaaaagaagtaccgttttcggcactctgcatgtggcccactcttcctcactcgatgaggtggaccacaagatcttggaggctaaaaaagccctcagtgaactaacgacttgcttgcgcgagaggctcttcagatggcagcagattgagaaaatctgcgggttccagatcgcacacaactctggacttccgagtctgacttcctccctctacagcgatcactcttgggtggtcatgccacgcgtgtcaataccaccttatcctatcgctgggggggtagacgatctggacgaggacacccccccaattgtttcgcagttcccaggaaccatggccaaacctcctggttccctcgcaagatcctcttccctttgcaggagcagacgaagtatcgtgccttccagccctcagccgcagagggcccagctggccccccatgccccacacccatcacaccctagacaccctcaccacccccagcacacgccccattcattaccttcgcctgatccggacattctgagcgtctccagctgccccgccctgtatcgaaatgaagaagaggaagaggcaatttacttttccgcggagaaacagtgggaggtgcccgataccgcctctgagtgtgacagcctaaattcttcaattggccggaagcagagcccccccttgtctctggaaatctaccagaccctgtcccccagaaaaatctcccgggatgaggtgagtcttgaggactcctcccgcggcgattctcccgtgactgttgacgtcagctggggctccccagactgtgtcggactcactgagaccaagagtatgatctttagccctgctagcaaagtttataacggaattctagagaagtcctgctcgatgaatcagctgtccagcggcatcccagttcctaagccccgacatacttcctgctcttccgctgggaacgactctaagcccgtccaggaggccccatctgtggccagaatcagtagtatcccgcacgatctgtgtcataatggcgaaaaaagcaagaaacccagtaaaatcaaaagcctgtttaagaaaaagtctaagtag

SEQ ID NO: 136482 - DNA, 2061 bp, synthetic construct
  misc_feature 1..2061: note = Description of Artificial Sequence: Synthetic coding sequence
  source 1..2061: mol_type = other DNA
atgaatgccgccggaatcagagccccagaggccgccggagccgacggcacaaggttggctcccggggggtccccctgcctccgtaggagggggaggcctgaagagtccccggccgcagtcgtggcacctagaggagcaggagaactgcaggcagccggtgctcccctgcgcttccatcctgcctcacccaggaggctgcatccagcaagcactcctggtcctgcctggggttggctcctgcgccgacgtcggtgggccgctcttctcgttcttggactgctcgtggcaggggccgccgacggctgcgagctagtgcctcgccatctaagagggcggagggccactggtagcgctgcgactgccgcttcctccccagccgctgcggctggcgactcccccgccctgatgacagacccctgtatgagcctgagccctccatgttttaccgaagaggatcgcttttcacttgaggcgttgcagacaattcacaaacagatggatgatgacaaggatggaggaatcgaggtggaagagtccgatgagtttattagggaagatatgaagtacaaggacgctacaaacaagcactctcacctccatagggaggataagcatatcaccattgaagacttatggaagaggtggaagaccagtgaggtccataactggactcttgaagacacactccagtggctgatagaatttgtggagcttccacagtacgagaaaaactttcgggacaataacgtgaaaggcaccactctgcccaggattgctgtccacgagccatctttcatgatcagccagttaaagatctcagatcggtctcacagacagaaactccagttgaaagctctggatgtcgtcttatttgggcccctcacacgacccccacacaattggatgaaagacttcatcttgaccgtgtctatagtaattggcgttggcggctgctggttcgcttatacccagaataaaacctcaaaggaacacgtggccaaaatgatgaaagatttggagagcctgcagaccgcagaacaatcattgatggatcttcaggagcgcctggagaaggctcaggaagagaaccggaacgtggccgtagaaaagcagaatctggaaaggaaaatgatggacgagatcaattatgccaaagaagaggcctgtcgtctcagagaactgagagagggcgctgagtgcgagctgagtaggcggcaatatgccgagcaagagctggaacaagttcgcatggccctcaagaaggctgaaaaggagtttgagctgcgctcctcatggtccgtaccagacgcactccaaaaatggttgcaactaacacacgaggtagaggtgcagtactacaacattaaacgacaaaacgccgaaatgcagctagcgatcgccaaagacgaagcggaaaaaataaagaagaaaagaagtaccgttttcggcacactacatgttgctcactctagctcactcgacgaagtggaccacaagatcctcgaggctaagaaggcactgtctgaactgaccacctgcttacgtgaacgcctgtttagatggcagcagatcgaaaaaatatgcggctttcagattgctcacaacagtggtctcccttccctgacatcctccctgtattctgaccatagctgggttgtgatgccaagagtgagtattccgccctatccaatcgccgggggagtggacgacctggatgaagacactcctcccatcgtgtctcagtttcctgggaccatggcaaagccaccaggctccttagcgagatcttcgtctctctgccgaagtagaagatccatcgtaccatcatccccgcagccgcagcgagcccagctggctccccacgcgccccacccatctcatcctaggcaccctcaccatcctcaacatactccacactccctccccagccctgacccggatatcctctccgtcagcagctgccctgctttgtaccgcaatgaagaggaggaagaagctatctacttcagcgccgagaagcagtgtattcacttaggactgggagcttgcaaatcagagtag

SEQ ID NO: 136483 - DNA, 2241 bp, synthetic construct
  misc_feature 1..2241: note = Description of Artificial Sequence: Synthetic coding sequence
  source 1..2241: mol_type = other DNA
cttctggtcttaggactgctggtggccggggcagcggatggctgcgaactcgttccccggcatttaagggggcggagagccactgggagcgccgctaccgcagccagctcacccgcagcagccgccggagatagccctgccctgatgacagatccatgcatgtctctgtctcctccatgttttaccgaggaggatagatttagcctagaggcactgcagacaatccacaagcagatggacgatgataaggacggtggcatagaggttgaggaatccgatgagtttatccgtgaagacatgaagtacaaagatgccaccaacaagcatagccacttacaccgtgaggataagcacattaccattgaagacctgtggaagcggtggaaaacatctgaggtacacaattggacccttgaggacaccctccagtggttgatagagttcgtcgaactgcctcaatacgaaaaaaattttagggacaacaatgtcaagggaaccacccttcccagaattgcggtgcacgagccttcatttatgatttcccagttaaagatttcggacaggtctcatagacaaaaactgcaactgaaagcgctggatgtagtgctctttggacccttgactagaccaccacataactggatgaaagatttcatcctgacggtgagtattgtgattggtgtcggggggtgttggtttgcatatacgcagaataagacttccaaagaacacgtcgctaaaatgatgaaggatcttgagtctctacagaccgcggagcaatccctcatggacttgcaggaaagactggagaaagcacaggaggaaaacaggaatgtagcagtggaaaaacagaatttggaaaggaaaatgatggacgagatcaattatgccaaggaggaagcatgcagattaagagaacttagagaaggagctgagtgcgagctgagtagaagacaatatgccgagcaggagctggagcaggttaggatggcactgaagaaggcagaaaaagagtttgaactcagatcttcttggtccgttcccgatgcactgcagaaatggctccagttgactcacgaggtggaggtacagtattacaatatcaagcgccaaaatgcagaaatgcagctcgccattgcgaaggacgaagccgagaaaatcaaaaaaaaacgaagcacagtgttcgggacgttgcacgttgcccactcctcctctctggacgaagtggaccataagatcctggaggctaagaaggctctcagtgaactgacaacgtgcttgcgggaacgcctcttcaggtggcagcagatcgagaagatctgcggatttcagattgcccacaactccgggcttcctagtctgacctcatccctgtatagtgatcatagctgggtcgtaatgccaagagtgagcatcccaccctatccgatcgccgggggagtagatgacttagatgaggatactccccctattgtatcgcagttcccagggaccatggccaagcctcccgggtctctcgcgcgttctagttccctgtgccgcagtcggagatctatcgtgccttcttccccacagccgcagagagcacagttagcacctcatgcaccgcacccatcccatcctcgccatccccaccaccctcagcataccccacattccctacctagtcctgatcctgatatcctctccgtgtcatcatgtccagcactgtaccgcaacgaggaggaggaagaagccatctatttctctgctgagaaacagtgggaggttcccgacactgccagcgaatgtgactcactcaattccagcatcggcagaaagcagtcgccccctctgagtctagagatataccagaccttaagccctcgaaaaataagcagggacgaagtgtcactggaggattcttctaggggggattctcccgttaccgttgacgtctcctggggtagtccagattgtgtcgggctgacggagactaagagcatgatcttcagccctgcctctaaggtttacaatgggatcttggaaaaaagctgcagtatgaaccaactgtcctcaggcatccccgtccccaaacctaggcatacgagttgtagctccgccggcaatgacagcaagcccgtgcaggaagccccatcagtggctagaatttcctctattcctcatgatctctgccacaatggcgaaaagtcgaaaaagccctctaaaattaagagcctcttcaagaagaagtccaaatag

SEQ ID NO: 136484 - DNA, 2265 bp, synthetic construct
  misc_feature 1..2265: note = Description of Artificial Sequence: Synthetic coding sequence
  source 1..2265: mol_type = other DNA
ttgctcgtcttaggactgctggtagctggagccgctgacggctgcgaactggttccccgacacctcagaggaaggagggccaccggctccgctgccaccgccgcttcgtcacccgccgccgcagcgggagactcaccagcactgatgacagatccctgcatgtccctgtcacctccatgcttcacagaagaggacaggttttccctcgaggctctgcagaccatccacaaacaaatggacgatgataaagacggcggaattgaggtggaagaatctgatgagtttattcgagaagacatgaaatataaagacgctacaaacaaacatagtcacttgcaccgtgaagacaaacacattacaatcgaagatttgtggaaacggtggaaaacatcagaggtccataactggactctggaggatactttacagtggctcatcgaattcgtggaactgccccagtatgagaagaactttcgcgacaacaacgtcaaaggaaccacactcccacgcattgcagtccatgaacccagtttcatgatctctcagctaaaaatcagcgatagatcacaccggcagaaattacagcttaaggctttggatgtggtccttttcggccccctcacccgacctccccataactggatgaaggatttcattctgactgtgtccattgtgataggagtggggggatgctggttcgcctatacccagaacaaaaccagtaaggagcacgtggccaagatgatgaaggatttagaatctttgcagactgctgagcagtcccttatggacctccaagaacgactggaaaaagcacaggaggagaaccgtaacgtagcggtagagaagcagaatttagaaaggaagatgatggatgagatcaactacgcaaaggaagaggcatgtaggctaagagagttgagagagggtgctgaatgcgagctttctcgccgtcagtacgcagaacaggaactggaacaggtccgtatggctctgaagaaagccgagaaagagtttgagctccgatcctcttggagtgttcctgatgctctgcagaagtggctacaactgactcacgaggtagaggttcaatattacaatattaaaaggcagaatgctgaaatgcaactggctatcgcgaaggacgaggtggcagcatcttatcttatccaggctgagaagataaaaaaaaaaagatctaccgtcttcggaacattgcacgtagctcactcatcctccctcgacgaagtggatcacaaaatactggaggcaaagaaggcactgtccgagctcaccacctgcctgagggagcggctcttccgctggcagcagatcgagaaaatctgtggttttcagatcgcgcataattccggtttacctagtctgaccagttccctgtatagcgaccactcttgggtcgtgatgccacgagtcagtatccccccttatccgatagcagggggtgtggacgacctggacgaggacactccacccatcgtgtctcagtttcctggtaccatggccaagccacccggaagcctagctagatctagtagtttgtgcaggtcacgccgctctatcgtcccttcatcgccgcaaccacaacgagctcagttggcaccccacgccccccatcccagtcatcccaggcacccgcaccacccacagcatactcctcactctctgccgagtcccgaccctgatatcctgagcgtgagcagttgtcccgctttgtatagaaatgaagaagaagaggaagctatctacttttccgctgaaaaacagtgggaagttccggacacagcttctgagtgcgactccctcaattccagcatcggtcgcaagcagtctccccctctgtccctagagatttatcagacactgtctccccgaaaaatatcccgggatgaggtctccctggaagactcatctcgtggggactcacccgtgacagttgacgtgagctgggggagcccggattgcgtgggcttgacagaaaccaaatctatgatattctcccccgcctctaaggtgtacaacgggattttagagaaatcgtgcagtatgaatcagctctcctccggcattcccgttcctaaaccaaggcacacatcatgcagcagtgcaggcaacgattcaaagccggtgcaggaggcaccaagcgtggctcgcatttcatccatcccacatgacctctgccacaatggagagaagagtaagaagccttctaagatcaagtctttgttcaagaagaaatccaagtag

SEQ ID NO: 136485 - DNA, 1800 bp, synthetic construct
  misc_feature 1..1800: note = Description of Artificial Sequence: Synthetic coding sequence
  source 1..1800: mol_type = other DNA
cttctggtactggggctgttggtggcaggggccgccgacggttgcgagctagtgccccggcacctacgcggtcgacgtgccaccggctcagccgctaccgccgcatcttcacctgcagcagcggcgggtgactcgccagcccttatgacagacccgtgtatgtctctttcccccccgtgcttcactgaggaggatcgattttccctggaagctctccaaaccatacacaagcagatggacgatgataaagacggaggaattgaggtcgaggagtccgatgagtttatccgagaggacatgaagtacaaagatgctaccaacaagcatagtcacctgcaccgcgaggacaagcacataaccatcgaggacctatggaagaggtggaagacatctgaagttcacaattggacactggaagacacactgcagtggctgatcgaattcgttgaattgccccagtacgagaaaaactttcgggataacaacgtgaaaggaacaacacttcctagaatcgctgttcacgagccttctttcatgatcagtcaattgaagatctctgaccgttcccatcgccagaaactgcaattgaaagccttggatgtagtgctgttcggtcctcttactagaccgccacataactggatgaaggacttcatcctgactgtgtccatagtgatcggggtcggcggttgttggtttgcctatacacagaacaagacctccaaagaacatgtcgcaaagatgatgaaggacctagagagtctgcaaactgcggagcaaagtctcatggacctgcaggaaagactagagaaagcccaggaagagaaccggaacgtggccgtcgagaagcagaatctggagagaaaaatgatggatgagattaattacgcaaaggaggaggcctgtcgcctgcgcgagctacgggaaggggccgagtgcgagctttccaggcggcagtacgcggagcaggagttggaacaggtaaggatggccctgaaaaaggccgaaaaggagttcgagttaagatcttcttggtccgtgcctgacgccctccagaagtggctccaactgacacatgaggtcgaagtgcagtactataatatcaaacgacagaatgctgaaatgcaactggccatcgcaaaggacgaagcagagaaaattaaaaagaaaaggagcacggtgtttggtactctgcacgtagcccactcctcctccctagacgaagtcgatcacaagatcctggaggctaagaaagccctttccgagctgacaacatgtctgcgagagagacttttccgctggcaacagatagagaaaatctgtggatttcagattgcccacaacagcggcctccccagcctcacatcatccttgtacagcgatcatagctgggtggtgatgcctagggtgtctattcccccttaccccatcgccggtggggtggacgatttggacgaagatacccctccaatcgtaagccagttccctgggacgatggcaaagccacccggctccctggcgcggagttcatccctctgtaggtcaagaagaagcatagtaccatcctccccccaacctcagagggcccaactagccccacatgccccgcacccctctcatccacgacacccccatcatccccagcatacacctcactccctaccctcacccgatccagatatcctgtctgtaagctcttgtccagcactgtatagaaatgaggaagaggaagaggccatctatttctcagctgagaagcagtgtattcacttgggtctcggcgcttgtaaatcagagtag

SEQ ID NO: 136486 - DNA, 3654 bp, synthetic construct
  misc_feature 1..3654: note = Description of Artificial Sequence: Synthetic coding sequence
  source 1..3654: mol_type = other DNA
atgtatatcaagcaagtgatcattcagggcttccgcagctaccgcgaccagacaattgtggaccccttcagcagcaagcacaacgtgatcgtgggaaggaatgggagcggcaaatctaacttcttctacgcaatccagtttgtactcagcgatgaatttagccaccttcggccggaacagagactggccttgttgcatgaagggactggcccacgtgttatttcagctttcgtggagatcatctttgataattctgataatcgtctgcccatagacaaagaggaggtcagtctgcggagagttatcggtgccaagaaagatcagtatttcctggataaaaaaatggtgacaaagaacgacgttatgaatcttctggaaagtgccggtttttcccgcagtaatccttactatatcgtgaaacaaggcaagattaatcaaatggcgaccgctccggattcccagagactcaaactgctgagagaagtggcaggcactcgcgtatacgacgagcgcaaggaggaatctatatcacttatgaaagaaaccgaagggaagagggagaaaattaacgaattattaaagtatatagaggagcgactccacacactcgaggaagagaaagaagagttggcacagtaccaaaagtgggacaaaatgcgtcgcgccttggaatatactatctataatcaggaactcaacgagacccgcgccaagctcgacgagctgtcagcaaaacgtgagacatccggagaaaagtcccgtcaactgcgcgatgcgcagcaggatgctcgcgataagatggaggatattgagcgacaggtgagggaattgaagaccaagatctccgccatgaaagaagaaaaggaacagctgagtgcagagcggcaagagcagatcaaacagcgtactaaactggagctgaaagccaaggacctgcaagatgagctggctggcaattcagagcagcgtaagcgcctgctgaaagagcgccagaagcttctggagaaaatcgaggagaagcagaaggaactcgccgaaacagaacctaagtttaacagcgttaaagaaaaagaagagcgcggaatcgctcggctggctcaggcaacgcaagagcgcactgatctttatgctaaacaaggtagaggctctcaattcacatctaaggaagagagagataagtggattaaaaaagaattgaagtctttggatcaagccatcaacgacaaaaagagacagatcgcggcgattcataaggacctggaagatacagaggcgaacaaggagaaaaatctggagcagtataataagttagatcaggaccttaacgaagtgaaggcacgcgtcgaagaactggaccgcaagtactacgaagttaaaaataaaaaagatgaacttcagtccgagaggaattacctttggcgagaggaaaatgctgaacaacaggcattggcagcaaagagggaggatctggagaaaaaacagcagttgcttcgggccgcaactggcaaggccatcctgaacgggattgacagcatcaacaaggtgcttgatcacttccggaggaagggcatcaatcagcacgtccagaacggatatcacggaatcgtgatgaacaacttcgagtgcgaacccgccttctacacgtgcgttgaggtgactgctggtaaccggcttttctatcacattgttgattccgacgaggtcagcaccaagatactaatggagttcaacaagatgaacctcccaggcgaggtcacattcttacctctgaacaaactagacgttcgcgataccgcttatcccgaaacaaacgacgcaatcccgatgatcagcaaattaagatataatccgaggtttgataaggcattcaagcacgtttttggtaaaaccttgatctgccggagcatggaggtcagcacccagctggcaagagccttcactatggattgtattactctcgagggggatcaagtatcccacaggggcgcacttaccggcggctattatgacacaaggaagtccagacttgagcttcaaaaagacgtgagaaaggcagaggaggagctgggggagctggaagcgaaacttaatgaaaacttgaggcgcaatatcgagaggattaataacgagattgaccagctgatgaatcagatgcaacagatcgaaacccagcaacgcaagtttaaagcttcaagggacagcatcctcagcgaaatgaaaatgctgaaggagaagcggcaacagtcagagaagacattcatgccgaagcagcgatcactccagagtctggaagcatctttgcacgctatggaatccacacgggaatcactcaaggccgagctcggaacagatctgttatcccagttatccctggaggatcagaagagagtcgacgctctaaacgacgagatcagacagctgcagcaggaaaatcggcaactattgaacgaacgcattaagctggaaggtattatcacaagggtagagacttacctgaatgaaaatctgagaaaacgccttgatcaagtggaacaggagctgaacgagctgcgcgaaaccgaaggaggcactgtactgacggccacaacttccgaactggaggcgattaacaaacgggtaaaagacactatggctaggtcagaggacttagataacagcattgacaagaccgaagccggaattaaggaacttcagaagtccatggagaggtggaaaaatatggagaaagagcacatggacgctattaaccatgataccaaggagctggagaagatgacaaatcggcaaggtatgctcctgaaaaagaaggaggaatgcatgaaaaaaatcagggaactggggtccctgccccaggaggcttttgagaagtatcaaaccctgagcttgaagcaactgttccgcaaactcgaacagtgtaataccgagctcaaaaaatactctcatgtcaacaagaaagctctcgaccagttcgtgaactttagcgaacagaaggaaaagttaattaaaagacaggaagagctcgacagagggtataagtcaatcatggagttgatgaatgtgcttgagctcagaaagtatgaggctatacaactaacatttaagcaggtgtctaaaaatttttccgaggtgtttcaaaagctcgtgcccggagggaaagcgacactggtgatgaaaaagggcgatgtggaaggatcacaaagccaggatgagggcgaggggtctggggagagcgaacgcggctcgggcagtcagagttcggtgccttccgttgatcagtttaccggggtaggcatcagggtgtcctttacggggaaacagggtgaaatgcgcgagatgcagcaactgagcggcggccagaagtcactggtggctctcgctctgatctttgctatccagaaatgcgaccctgctccattctacctgtttgatgagattgatcaggccttggatgctcagcatcggaaagctgtgtccgacatgatcatggaactggccgtccacgcccagttcatcaccacaacgttccggcccgagctgctggagtcagctgacaagttctatggagtgaagttcagaaataaggtgagccacatcgatgtgattaccgccgaaatggcaaaagacttcgtagaggatgacaccactcacggttag

SEQ ID NO: 136487 - DNA, 3306 bp, synthetic construct
  misc_feature 1..3306: note = Description of Artificial Sequence: Synthetic coding sequence
  source 1..3306: mol_type = other DNA
atggcaacaccatcaaagaaaacaagtactccttccccacaaccaagtaaacgcgccctgcctcgggacccgagttctgaggtccccagcaagcgcaaaaattcagcccctcaacttccactgctgcagtcctcagggcctttcgttgaaggatctatcgttagaatttctatggagaacttcctgacatacgatatctgtgaagtgagccctggtccgcacttaaatatgattgtgggagcgaacggaacaggaaaatcatccatcgtatgcgcaatttgtctcggcctcgcaggcaaaccagccttcatgggaagggctgataaggtgggctttttcgttaagcgcggctgctctaggggaatggtggagatcgagcttttcagagccagcggaaatctagttatcacacgcgagatagatgtagcaaaaaatcaatccttttggttcatcaacaaaaaatccacgacacagaagatcgttgaagagaaagtggcagcgttgaacattcaggtgggcaacctgtgtcagtttctgcctcaggacaaagttggtgaatttgccaagctttctaaaatcgagctgttggaggctaccgagaaatctatcgggccccctgaaatgcataagtaccactgtgagctgaagaatctcagagagaaagaaaagcagctcgagacttcttgtaaagaaaagacagaatacttacaaaaaatggtgcagcggaacgagaggtacaagcaagacgtggagagattctacgagagaaagcgccatctggatctcatcgaaatgctggaagccaagcggccctgggtagaatatgagaatgtgcgtcaagaatatgaggaagtgaaactggtgagagaccgtgtcaaagaggaagtacgcaagttaaaggaggggcagattccagtcacttgtagaattgaagaaatggagaatgaacgccataatttggaagctaggatcaaggaaaaggcaaccgacatcaaggaagcgtcccaaaaatgcaaacaaaagcaggacgtcattgagaggaaggacaaacatatagaggagctgcagcaggctcttatagtgaagcagaatgaagaactggacagacagcgtagaattggcaatacccgcaagatgatcgaggacctgcagaacgagctgaagacaacggaaaactgcgagaacctccagccacaaattgatgccataacaaacgatcttcggaggatccaggatgaaaaggctttatgtgagggggaaattattgacaaacggagagagagagagacacttgagaaggaaaaaaagagcgttgatgaccacatcgtccggttcgacaacctgatgaaccaaaaggaagataaactgagacaaaggtttagggatacatacgatgcagtgctttggctgcgcaacaatcgggacaagtttaaacaacgggtgtgtgagcctattatgctaacaatcaatatgaaggacaataaaaacgcaaagtacattgagaatcacattccttccaatgacttgcgcgccttcgtgttcgagagtcaggaggatatggaagtgttcttgaaagaagtgcgggacaacaaaaaactgcgggtaaacgcagtgatcgccccaaagtcctcttacgcggacaaggcgccctcccggtcacttaatgaactgaagcagtacgggtttttcagttatcttcgtgagctcttcgatgctccggaccccgtcatgagctacctctgctgtcaataccacatacacgaagtgcccgtgggaacggagaagactcgggaaagaattgagcgtgtgattcaagaaacacgcttaaaacaaatatataccgcagaggagaaatatgtcgtgaagacttccttctatagcaacaaggtgatctctagtaacaccagccttaaggttgctcagttcctgactgtgactgttgatctcgaacagcggcgacacctggaggagcagctgaaggagattcataggaagctccaggcagttgacagtggacttattgccctacgcgaaacctcgaagcacctggaacacaaagacaacgagttacggcagaagaaaaaggaactcctggaacgtaagaccaagaaacgccaactggaacagaaaatctcttcaaagctgggaagcctcaagctaatggagcaggatacctgtaatctcgaggaggaggagaggaaagcttctactaagatcaaagagattaacgtccagaaggccaagcttgtaacagagctcacgaacctcatcaaaatctgtacgagtctgcacatccagaaagtggatttaatcctccagaacactacagtaattagcgaaaagaataagctggaaagtgattacatggccgcttcctctcagctgcggctgactgaacagcatttcatcgagctggatgaaaaccgccaacggctcttgcagaagtgtaaggagttgatgaagcgggcaagacaagtgtgtaatcttggagctgagcagaccctgcctcaggaataccagacccaagttccaacgatccccaatggacacaatagctctctgccaatggtatttcaggatttgcctaacaccctcgatgaaatcgacgctctattgactgaggagcggagtagggcaagttgctttaccggtctgaatcccaccatcgtgcaggagtacacaaaacgggaagaagaaattgagcaactgaccgaggaactcaaggggaaaaaggtggaactcgaccagtaccgagagaatattagtcaggtgaaggagcgatggctgaatccgttaaaagaacttgtcgagaaaatcaatgaaaagttttctaactttttctcatccatgcagtgtgccggcgaggtcgacttgcacaccgaaaacgaggaggattatgacaagtatggaatacgaataagggtgaaatttcgatcatctacacaactccacgaacttacccctcatcaccaatccggaggagaaaggagcgtgagcactatgctctatctcatggcacttcaggagctaaatcggtgccctttcagagtcgtggatgagatcaaccagggaatggatcccatcaacgaacgtagagtcttcgagatggtcgtgaatactgcttgcaaggagaatacttcccaatacttcttcattacacccaagctcctccaaaacttaccttactccgagaagatgaccgttctgtttgtgtataatggccctcacatgctggaacctaatacctggaatctgaaggcattccagaggagaaggaggagaattacttttacacaaccctcatag

SEQ ID NO: 136488 - DNA, 3276 bp, synthetic construct
  misc_feature 1..3276: note = Description of Artificial Sequence: Synthetic coding sequence
  source 1..3276: mol_type = other DNA
atggcaaaacggaaggaagagaattttagttctcctaagaacgctaagcggcctcggcaggaagagttggaagacttcgacaaggatggggatgaagacgaatgcaagggcactactctgacagctgcagaggtaggcatcatagagtccatacatttgaaaaactttatgtgtcacagcatgttgggccccttcaagtttggctctaatgtgaacttcgttgtggggaacaacgggtctggaaagagtgcggtactgacggcactgatagttgggctgggcggtcgggcagtggccactaacaggggtagttcacttaagggattcgtcaaagacggacaaaactctgctgacatttcaattaccctccgtaatagaggcgacgacgcttttaaggcatctgtttatgggaatagtatcctgatccaacagcatatcagcatcgacgggtcccgatcttacaagctcaagagcgccaccggaagcgttgtgagcactcgaaaagaagagctgattgccatcctggaccactttaacatccaggtggataacccggtctcggtcttgacacaggaaatgtcaaagcagttcctgcagtcgaagaatgaaggagacaaatacaagttctttatgaaggcaactcaattggagcaaatgaaagaggattacagctatataatggagactaaggaacgaacaaaggaacagattcaccagggcgaggaacgtctaacagagttaaaacggcagtgcgtggaaaaagaagaaagattccaatccatcgcaggcctgagtacaatgaaaactaacctggaaagtctgaagcacgagatggcctgggccgtcgtgaacgagatcgagaagcagctcaatgctatcagggacaatattaagataggcgaagatcgggcagcccgcctggatcggaagatggaggaacagcaggtgcgactgaacgaggccgaacagaaatacaaggacatacaggacaagctcgagaagatcagtgaggagacaaacgcacgggcccctgagtgtatggcgcttaaggctgacgtagttgcaaagaaaagagcctataacgaagcagaggtcttatacaatcgttcactgaacgaatacaaagcgttgaaaaaagatgacgaacagctttgtaaaagaattgaggaactgaaaaaatctacagatcagtctctggagcctgaaaggctggaacgtcagaaaaaaatcagttggttaaaggagcgcgtcaaggcgtttcagaaccaggagaattccgtcaaccaagagatagagcagtttcagcaggccatcgagaaagacaaggaggagcacggcaaaattaagcgcgaggagctggacgtgaaacacgctttaagctacaaccaacgtcagctgaaggagctgaaggactctaagacagacaggttgaagaggttcgggcccaacgtacccgccctgttggaagctatcgacgatgcctaccggcagggacacttcacgtacaagccagtgggtcctctgggtgcatgtatccacctgcgggatccagaactcgcgctggctatcgagagttgcctgaaaggcctgttgcaggcctattgttgtcacaatcacgctgatgaaagagtcttgcaagcgttaatgaaacggttctatctcccaggtaccagtcgcccccccatcattgtctctgaattcaggaatgagatatatgacgtaagacatcgggctgcctatcaccctgacttccccacggtcctgaccgcactggagatagacaatgcagtggttgccaatagccttattgatatgagagggattgaaacagtactgttaattaagaataactcagtggctcgggcggtcatgcagtcccaaaagcctcctaagaattgccgcgaagcctttaccgctgacggagatcaagtctttgcaggtaggtattattcttctgaaaacacgagacccaagttcctgtctcgtgacgtggactccgaaatctcagatcttgagaacgaggtggagaacaagacggcacagatcttaaatctccagcagcacctgtcagccttggagaaggatattaaacacaacgaggagcttctcaagagatgccaactacactacaaggagctaaagatgaagattcgcaagaatatttctgagatcagggaactggagaatattgaagagcaccaaagtgtggatattgctacgctggaggacgaggcccaggagaacaaaagcaaaatgaaaatggtagaagagcacatggagcagcagaaggagaacatggaacatctgaagagtttgaaaatcgaagccgaaaataaatatgacgcaattaagtttaaaatcaaccaactcagcgaactggcagatccgctcaaagatgagctcaacctcgcagatagcgaggtcgacaaccagaagcgcggcaagcggcactatgaggagaagcaaaaggagcacctggacacactgaacaagaaaaagcgggagctcgacatgaaagagaaggaattagaagaaaaaatgtcccaggcccgtcagatatgtcctgaacggattgaagtggaaaagagcgcttcgatcctggataaagagatcaaccggctgcgtcagaaaattcaggctgagcacgctagtcatggggaccgagaggagattatgagacaatatcaggaagctcgtgagacttacctcgatctcgatagtaaggtacgcactctaaagaagttcatcaaactgctgggggaaattatggaacaccgcttcaaaacttaccagcagtttcgcaggtgccttaccctgcgttgcaagctttatttcgacaatttactgtcccagcgagcctactgcggaaagatgaactttgatcacaaaaacgaaacacttagcatatctgtccagcctggtgaagggaataaggcagccttcaatgacatgcgcgcactttctggaggcgaacgcagctttagtactgtgtgcttcatcctctcattgtggagtattgctgaatcaccctttagatgtttagatgagttcgatgtatacatggacatggtgaatcgtaggatagctatggacctcattctgaaaatggccgacagtcagagattcaggcaatttatattgctgacccctcaaagcatgtcatctctcccttcttctaaactgatccggattcttaggatgagcgaccccgagcgaggacagacgacattgccttttcgacctgtcacgcaggaggaggatgacgatcagcggtag

SEQ ID NO: 136489 - DNA, 3354 bp, synthetic construct
  misc_feature 1..3354: note = Description of Artificial Sequence: Synthetic coding sequence
  source 1..3354: mol_type = other DNA
atggcgaaacgcaaagaggagaatttttcgtcaccaaagaatgcgaagcggccacgccaggaggagctggaggattttgataaagacggcgacgaggatgagtgcaagggcaccactctgaccgcagctgaggtggggatcattgaaagcattcatcttaaaaactttatgtgtcactctatgttgggcccttttaaattcgggtccaatgtcaatttcgtcgtggggaacaatggctcctggagcgctgtggtgcgctcaaggctcaacgccacatcagcttcccaggtgcaagctatcctgctgtttcagccatgcggtaaaagcgctgttttgacggcactgatcgttggtctgggcggccgagctgtggcaaccaaccgtggctctagtctgaagggcttcgtgaaggatggtcagaatagtgcagatatttcgataacgctgagaaacagaggagatgatgcctttaaagcttcagtgtatggaaactcaatcctcatccagcagcacatctccatcgacgggtctcggtcttataagctcaaaagcgctacaggaagtgtggtctctacccgaaaggaagagcttattgcaatcttggatcacttcaacatccaggtagataaccccgtctccgttctgacacaagagatgtcaaagcagtttctccagtccaaaaacgagggagacaaatacaagttcttcatgaaagcgacccaactggaacagatgaaagaggattattcctacataatggagacgaaagaaaggaccaaagaacagatccaccaaggagaggagagactaacagagctcaaacggcagtgcgtggagaaggaagaaagatttcaatccatcgccggcctgtctacaatgaagacaaaccttgagtccctcaagcacgaaatggcttgggccgtggtgaacgaaattgagaagcaacttaacgcaatccgtgataacattaagatcggcgaggaccgcgccgccagattggaccgtaaaatggaggaacagcaggtgaggctgaacgaagccgagcagaagtataaggatatccaagacaaattggagaagatttctgaagagacaaacgcccgggcacccgaatgcatggctttgaaggccgatgtggtcgcaaagaagcgtgcatacaatgaagctgaggtgctctacaataggtccctcaacgaatacaaggccctgaagaaggatgacgaacagctgtgcaagaggattgaagaactcaagaaatctacagaccagagtttggagcccgagagactggaaaggcaaaagaagattagttggctgaaggagcgcgttaaggctttccagaaccaggagaatagcgtgaatcaagagatcgaacaatttcagcaagctattgaaaaggacaaagaggagcacggcaagattaagcgcgaagagttagacgtcaagcatgcactgtcttacaatcagcgacagctgaaggagctcaaggacagtaaaacagatcgactgaaaagattcgggcctaacgtccctgccctgctcgaggccatagatgacgcctaccggcagggccatttcacatataagccagtgggaccactcggtgcgtgcattcacctgcgagatccagaactggctctggccatcgaaagttgtctcaagggtctgctgcaagcctactgttgccataaccacgctgatgaacgagtgttgcaggcgctgatgaaacgattttatcttcccggcacgtcaagacctccaattatcgtctccgaattccgcaatgaaatttatgacgtgagacaccgagccgcctatcaccctgatttcccgactgtgctgaccgccctggagatcgacaatgccgtggtagcgaactcattaatcgatatgcgcggtattgaaaccgtgttgttgattaaaaacaactctgttgccagggccgtaatgcagagccaaaagcctccgaagaactgcagggaggcctttaccgcggatggtgaccaggtcttcgcaggacgctactatagttcagagaatactcgaccgaagttcctcagtagagacgttgattctgagatctctgatctggagaacgaagtggagaacaaaacagcacagatcttaaacctgcagcagcacttgagtgccctggagaaggatattaagcataacgaggaattgctgaagaggtgccaattacattacaaagaactcaaaatgaaaattcgtaagaacatctcagagatcagggagctggaaaacattgaagagcaccagagcgtagacatcgctaccctggaagatgaggcgcaagagaataagtcgaagatgaagatggtcgaagaacatatggaacaacagaaggaaaatatggaacacctcaagtcactcaaaatcgaagcagagaataagtatgacgccataaaattcaagatcaaccagttaagcgagctcgctgaccccctcaaggacgagttgaatcttgccgattctgaagtcgacaaccagaagagaggcaaacggcactatgaggaaaaacagaaagaacatttagacacgcttaacaagaagaagagagagctagacatgaaggaaaaagagctggaggagaaaatgagtcaggcaagacagatctgcccagaacggattgaggtcgaaaagtccgcatccattctggacaaggagattaaccgcttgagacaaaagattcaggccgagcacgcttcccatggcgaccgagaagaaatcatgcggcaatatcaggaagcccgagaaacctatctggatcttgattcaaaagtacgcacactcaaaaaatttatcaaattactcggggagataatggagcatagatttaaaacataccagcagttcagaagatgcctgacccttcgatgtaaattgtactttgataacctcctctcccagagagcctactgtggcaagatgaattttgaccacaaaaatgagactcttagtatcagcgtccagccgggggaaggtaataaagccgcatttaatgacatgagggcattgagcggcggggagcggtccttcagtaccgtgtgctttattctatccctttggtccatcgcagagtcccctttcaggtgcctcgacgaatttgacgtgtacatggatatggtgaaccgaagaatagcgatggatctgatcctgaagatggctgacagccaacgtttccgacagttcatcttactgacacctcagtccatgtcctctcttccctcatcgaaactgatccgaatcttgcgcatgagtgatccggaacggggccaaacaacactgcctttccggccagtcacgcaggaggaagatgatgaccaacgctag

SEQ ID NO: 136490 - DNA, 3276 bp, synthetic construct
  misc_feature 1..3276: note = Description of Artificial Sequence: Synthetic coding sequence
  source 1..3276: mol_type = other DNA
atggctaagaggaaggaggagaatttctcctctccaaagaacgcaaaaagaccgcgccaggaagagttggaagacttcgataaagacggggacgaggatgagtgcaagggaacaaccttaacagcggcggaagtggggataattgagagcatccacctcaagaattttatgtgtcattcgatgctgggaccttttaagtttgggagcaacgtgaactttgtggtggggaataacgggtccggaaagagcgccgttctcacagctcttatcgtgggactcggtggccgggctgtagcaactaatcggggatcttcactgaaaggcttcgttaaggacggacagaacagtgctgacatctccatcaccttgcggaacagaggtgacgacgcctttaaagcttccgtgtatggaaacagcatcctcattcagcagcatatttccattgacggcagccgatcctataagctcaagtcagcaacgggtagcgtcgtgtctaccaggaaagaagaactgattgccatactggatcactttaacatccaggtggacaaccccgtttccgtattgactcaggagatgagcaaacagttcttacagtccaagaacgaaggggataagtataagttttttatgaaggccacacagctagagcagatgaaagaggactacagttatataatggagaccaaagagcgcaccaaggagcagatacatcaaggcgaagagagactcaccgaactcaaaaggcagtgtgtggaaaaggaagaaaggttccagagtatagctggattgagcaccatgaaaacaaacttggagtcactgaagcatgaaatggcctgggctgtggtgaatgagattgagaagcagctcaacgcgattcgggataacatcaaaattggagaggaccgcgcagcaagactggaccgtaagatggaagagcaacaggttcgcttaaacgaggcagaacagaagtacaaggatatccaggataagctcgagaagatctcagaggagacaaatgcccgggcaccagagtgcatggccctaaaggctgacgtggtggctaagaagagggcctacaatgaagctgaggtgctgtacaaccggagcctgaacgagtacaaagccctgaaaaaagacgacgagcagctgtgcaagagaatcgaggagctgaagaaaagcactgaccagtccctcgagcctgagaggctggagagacaaaagaagataagctggttgaaggagcgggtcaaagccttccaaaatcaggaaaactctgtgaatcaagaaatagaacagttccaacaggctatcgaaaaggacaaggaggagcacggcaagataaaaagggaggaactggatgttaaacacgccctctcatataaccagaggcagcttaaagagttgaaagattctaaaactgatagactgaagcgatttgggccaaatgtcccggccctgctggaggccattgatgacgcctaccgccagggccactttacatataaaccagtgggccctctgggagcctgcatccatctaagagacccagaactggcactcgccattgaatcatgtcttaagggactgctccaggcatattgttgccataaccatgctgacgaaagagtgctgcaggctctgatgaaacgattttacctcccaggtacatctaggcccccaatcatcgtctctgagtttaggaatgagatctacgacgtgcgtcacagagcagcataccatcctgatttccctacagtgctgacagctctggagattgacaacgccgttgtcgccaattccctcattgatatgcgtggcattgagacagttctgttgataaaaaataattctgttgcacgggctgttatgcagtctcagaagcctccaaagaattgccgtgaggcctttactgccgatggagaccaggtattcgcaggaagatattacagttcagagaataccaggcctaaatttctgtccagggacgtggactcagagatctctgatctggagaatgaagtggaaaacaagacggcacaaatactgaacctgcaacagcatctgagcgccctggaaaaggatattaagcacaacgaagaactcttgaaacggtgtcagctgcactacaaagagcttaaaatgaagattaggaaaaacatttccgagattagagaattagagaatatagaggaacatcaaagcgtggatatagcgaccctcgaggacgaagcacaggagaataaatccaaaatgaagatggtcgaggaacacatggaacagcagaaagaaaatatggagcatttaaagtcattaaagatcgaagccgaaaacaaatacgatgctattaagtttaagattaaccagctgtcagagcttgcagacccactcaaggacgaacttaatcttgcggacagcgaagtcgacaaccagaagagagggaagagacactatgaggaaaagcagaaagaacatctggataccttaaacaagaaaaagcgggagctggacatgaaggagaaggagctcgaagaaaagatgagccaggcacgtcaaatatgcccagagaggatcgaggtcgagaagtccgccagcatcctggataaggaaatcaacagattgcgccagaagatccaggctgagcatgcctcgcacggggatcgggaagaaatcatgagacagtaccaggaggctcgggagacatacctggacttggatagcaaggtcagaacacttaaaaagttcattaagctcctgggtgagataatggagcacagattcaaaacctaccagcagttccgccgttgcttgaccctgagatgtaaactgtattttgataacctgctgtcccagcgggcatattgtggcaagatgaactttgatcacaagaatgagacactcagcatcagtgtgcagccaggagaagggaacaaggcagcattcaatgacatgagagccctgagcgggggggaaagatcattctccactgtctgctttattttatccctctggagcattgctgagagtccctttaggtgcttggacgagtttgatgtatatatggacatggttaacaggaggatcgccatggatctgatcctgaagatggctgactcgcagaggttcagacagttcattctgctgactccgcaatcaatgtccagcttgccatcgtctaagctcatccgtatcctccggatgtctgatcccgagagggggcagactacccttcctttccggcctgtgacacaagaggaggacgatgatcaacgttag

SEQ ID NO: 136491 - DNA, 174 bp, synthetic construct
  misc_feature 1..174: note = Description of Artificial Sequence: Synthetic coding sequence
  source 1..174: mol_type = other DNA
atggctaaacgtaaggaggagaatttctcttcccctaaaaacgccaaacgtcctcggcaggaagagctggaagattttgataaggacggcgatgaagacgagtgcaagggtaccactctgacggctgcagaggttggtataattgaaagcatccatttgaaaaattttatgtag

SEQ ID NO: 136492 - DNA, 3276 bp, synthetic construct
  misc_feature 1..3276: note = Description of Artificial Sequence: Synthetic coding sequence
  source 1..3276: mol_type = other DNA
atggccaagcgcaaggaagagaatttcagcagtcctaagaacgccaagaggccacgacaagaggaactagaagatttcgataaggatggggacgaggacgagtgcaaaggcaccactctgaccgccgctgaagtgggaattatcgagagtatccacttgaagaatttcatgtgtcacagcatgctcggcccttttaagtttggctccaacgtgaacttcgtggtgggaaacaatggctccggcaagtccgccgtgctgacagcactgatcgttggactcggaggccgggcggtagctacaaaccgcggatcatcccttaaaggctttgttaaagacgggcaaaacagcgccgacatttctatcactcttcgtaacagaggggatgatgcattcaaggctagcgtgtacggcaacagtatcttgatacagcaacacatctcaatcgacgggtctagatcgtataagctcaagtcggccaccgggagcgttgtcagcacgcggaaagaggagctgatcgcaatccttgaccattttaatatacaggtcgataacccagtgtcagtgctgactcaggaaatgagtaaacagtttcttcagtccaaaaacgagggggacaaatacaagttttttatgaaggccacacagctggagcagatgaaggaggactatagctatattatggagacaaaagagaggacgaaggaacaaatccatcagggcgaggaacggctgacggaattgaaaaggcagtgcgtggagaaggaagaaagatttcagagcatcgccggcctcagtactatgaagaccaacttagagtccttgaagcacgagatggcatgggcagtggtgaacgagatagaaaagcagttaaacgccatccgtgacaatatcaaaatcggcgaggatcgcgccgcccgccttgatcgcaagatggaggagcagcaggtcaggcttaacgaagccgaacagaagtacaaggacatccaggataaactggaaaagatctcggaagagacaaacgctagggcacccgagtgtatggcactgaaagctgatgttgtcgctaagaaacgggcctacaatgaagctgaggtcctttataaccgctctctgaacgagtataaagccctaaaaaaggacgatgaacagttgtgtaagcggattgaagaactaaaaaaatcgacagaccaaagtctggagcctgagcgtctcgagcggcagaagaaaatctcatggctaaaggagcgagtgaaagctttccagaaccaggaaaacagcgttaatcaggaaattgaacagttccaacaagccatagaaaaggataaggaggagcacggcaagatcaagagagaggaacttgacgtgaaacatgccttatcatacaatcagcgccagctcaaggagcttaaggactcaaagactgatcggctcaagaggttcggtccaaacgtccccgctctccttgaggctattgatgatgcctatagacaaggccattttacctacaaaccggtcggaccactgggtgcatgcattcatctgcgcgacccggaattggcactggctattgagagctgtctcaagggactcctccaagcttattgttgtcataaccacgccgatgagagagtgctgcaggcactgatgaagcgcttctatctgcctggcaccagtaggccgcctattatagtttcggagtttaggaatgaaatctacgatgtgcggcaccgcgccgcgtaccacccagattttccaaccgtgctgacagccttagagattgataatgccgtggtcgccaacagcctgatcgatatgcgggggatcgagaccgtactgctgatcaaaaataactcagtggctcgcgcagtaatgcagagccagaagcctccaaagaattgtcgggaggcctttaccgccgatggcgatcaggtttttgcaggccggtattactcttctgagaacactaggccgaaattcctatccagagacgtggattcagagatctctgacctcgagaacgaagtggagaataagaccgctcagatccttaatctccagcagcacctttccgctctagaaaaggatattaagcacaatgaggagctgttaaaaaggtgccagctacactacaaagagttaaaaatgaagattcgcaaaaacattagcgaaattcgggagctggagaatatcgaagaacaccagtcggtagacatagcaaccctggaagatgaggcgcaggagaataagagcaaaatgaagatggtagaggaacacatggaacaacaaaaagaaaacatggaacaccttaaatccctgaaaatagaagctgaaaacaaatatgatgcaattaaattcaagatcaatcagttgagcgagttggccgatccactcaaggacgagctgaatcttgccgacagcgaagtcgataaccagaagcgagggaagaggcactatgaggaaaagcagaaggaacacttggatacgctcaataagaagaagagagagctcgacatgaaagaaaaggagctggaagaaaagatgtctcaggcaagacagatttgccctgaaaggattgaggtcgaaaagtccgcgtccatcctggacaaggagattaatcgcctgcggcagaagatccaggccgagcacgcctcccacggagatagagaagagataatgagacagtaccaggaagcccgggaaacttacctggatctggatagtaaagtgaggaccctgaaaaaattcatcaagttacttggggaaattatggaacacaggtttaagacataccaacagttcagaaggtgtctcaccctgcgatgtaagttatacttcgacaatcttctcagtcagcgcgcctattgtgggaagatgaacttcgatcacaagaacgaaaccctctccatttctgttcagcccggagagggcaataaggctgccttcaatgacatgagggctttgagtgggggggagcgcagtttttccacagtgtgctttatcctcagtctgtggtcgatcgcggaatcaccttttcgttgtctggatgagtttgatgtgtacatggatatggttaaccgtcggattgccatggacctgatccttaagatggctgactcacagcggttcaggcaatttatcctgctaacacctcaatccatgtccagcttgccatcttccaaattgatccggatcctgaggatgagcgatccggagcgtggccagaccactcttccatttagaccagtgacccaagaagaggatgacgaccagcgatag

SEQ ID NO: 136493 - DNA, 2130 bp, synthetic construct
  misc_feature 1..2130: note = Description of Artificial Sequence: Synthetic coding sequence
  source 1..2130: mol_type = other DNA
atggctgaaaccctcgaattcaacgacgtatatcaggaagtcaaggggtccatgaatgacggcagattacgcctatcacgccaaggaataatattcaagaattcaaagactggaaaagtcgacaatatccaggcgggagagctaacagagggcatttggcgccgtgtggccctcggacacggcctgaagcttctgacaaagaacggacacgtctacaagtacgacgggtttagggagagtgagtttgagaagttgagcgacttttttaagactcattatcggttggaattgatggagaaagatctttgcgtaaagggctggaattggggcactgtgaaattcgggggccaactgctgagcttcgatattggggaccagcctgtatttgaaatccctcttagtaacgttagtcagtgcaccaccggcaaaaatgaagtcaccttggagttccatcagaacgacgatgcggaagtctccctgatggaggtgcgcttttacgttccacccacacaagaggacggcgtggaccctgtggaggcatttgctcaaaacgtcctatccaaagcagatgtcattcaggcgacaggcgacgccatttgcatctttcgtgagctgcagtgtctgacgccaaggggccgttatgatatcaggatctacccaacatttctgcatttgcatggcaagacctttgattataaaatcccttataccaccgtcctgcgtctttttttactcccccataaggatcaacgacaaatgtttttcgtaatatcgctggacccgcccattaaacaggggcaaactaggtaccacttcctgattcttctgttcagtaaggacgaggatatcagcctgacactgaacatgaacgaagaggaggtcgagaaacggtttgagggtaggcttacgaaaaacatgtcaggttccctctacgagatggtctcccgagttatgaaagctttagttaaccggaagatcactgtacccgggaattttcagggacattccggtgctcagtgcataacatgctcttataaggcctcttctggactattgtaccccttggaaaggggatttatctatgtgcataagccccccgtccacatccggttcgacgaaatctccttcgtcaactttgcaaggggaaccaccaccaccagatctttcgacttcgaaatagaaactaagcaaggcacccagtatactttcagcagcattgagcgggaggaatatggcaagctgttcgattttgtgaacgccaaaaagctcaatatcaagaaccgggggctcaaggagggtatgaatccctcatacgatgagtatgccgactccgatgaagatcagcacgacgcctatctcgaacgaatgaaggaggaaggtaagatccgggaagaaaatgccaacgatagctctgatgactctggtgaagaaactgacgaaagctttaacccaggcgaggaagaggaagatgtcgccgaagagtttgactctaatgcctcagcctcctcctcttctaacgagggcgatagcgacagagacgaaaagaaaaggaaacagttgaaaaaagcgaaaatggccaaggatagaaaatcaaggaagaagcctgtggaagttaagaaagggaaggaccccaatgcccccaagcgtcctatgtcagcttatatgctgtggttgaacgccagcagagagaagataaagagtgatcacccggggatcagcatcacagatcttagtaagaaagccggagagatttggaaaggtatgtccaaagaaaagaaggaagagtgggaccgtaaggcagaggacgcgcgtcgggactacgaaaaagctatgaaagaatatgaaggtggcaggggcgaaagtagcaagcgagataaaagtaaaaaaaagaagaaagtcaaagtcaagatggaaaagaagtcaacgccctcgcggggaagcagttcaaagagctcaagccgtcagctctccgaatcgtttaaaagtaaagagtttgtttcatcggatgagagctcgagcggcgagaacaaatccaagaagaaaaggcggcgctctgaagacagtgaggaagaagagctcgcaagcacgcctcctagcagtgaagacagtgcctccggctccgatgagtag

SEQ ID NO: 136494 - DNA, 240 bp, synthetic construct
  misc_feature 1..240: note = Description of Artificial Sequence: Synthetic coding sequence
  source 1..240: mol_type = other DNA
atgaagagcctgacttggattctcggactatgggcgctggccgcttgctttacgccaggtgagtcacagcggggtcctcgcggaccttaccccccaggcccactggctccccctcagcccttcggtcctggatttgtgcctcctcccccaccccctccatacgggccaggacgtatccctccacccccccctgctccatacggacccgggatttttcctcctccaccaccacagccctag

SEQ ID NO: 136495 - DNA, 324 bp, synthetic construct
  misc_feature 1..324: note = Description of Artificial Sequence: Synthetic coding sequence
  source 1..324: mol_type = other DNA
atgaaatctctcacttggattctgggattgtgggctctggccgcatgctttacccctggagagtctcaacgtgggccccgtggtccttaccctccaggccctttagcgccaccgcagcctttcgggcccggtttcgttcctccacccccaccaccaccatacggacccggaaggattccaccgccgccgtattcatgtactccgaacatgaacaactgcagccggtgccaccaccatcacaaacggcatcactatccctgcaactattgcttctattatccgaagtatgaattccagcattgtttccaagaaaccttcacctag

SEQ ID NO: 136496 - DNA, 240 bp, synthetic construct
  misc_feature 1..240: note = Description of Artificial Sequence: Synthetic coding sequence
  source 1..240: mol_type = other DNA
atgaaatcccttacttggatcctggggctctgggctcttgccgcgtgcttcactcccggggaaagccagcgtggccccagagggccttaccctccaggaccccttgcccctcctcagccctttggaccgggtttcgtaccaccccctcccccccccccttatggccccggtaggatacctcccccacctcccgccccatacggtcctggcatcttcccccctcctcctccacaaccctag

SEQ ID NO: 136497 - DNA, 348 bp, synthetic construct
  misc_feature 1..348: note = Description of Artificial Sequence: Synthetic coding sequence
  source 1..348: mol_type = other DNA
atgtcccggcactcaaggctgcaaaggcaggttctgtccttgtatcgcgatctcctgagggcaggccggggcaaacccggggctgaggcaagagttagagcggagttcaggcagcacgccggattgccccgcagcgatgtgttgagaatcgagtacctgtaccggagaggaagacgtcaacttcagttgctcaggagtggccacgccacggccatgggagcatttgtccgaccgagagcgccgaccggcgagccaggtggcgtgggctgccagcccgacgatggcgactctccccgaaatccacatgattctaccggggcacccgagacgcggccggatggaaggtag

SEQ ID NO: 136498 - DNA, 501 bp, synthetic construct
  misc_feature 1..501: note = Description of Artificial Sequence: Synthetic coding sequence
  source 1..501: mol_type = other DNA
atggccgtgtctactgtgttctccacctcttcactgatgctggcccttagccgacactctttgttgagcccactcctcagtgtcacttcgtttcggcgattttacaggggtgattctcctaccgactcacagaaggatatgattgaaatacctctgcccccctggcaggagaggacagatgagagtattgagacaaagcgagccaggctcttgtacgagagccgcaaaagaggaatgcttgaaaattgtatcctattgagcctgtttgcaaaagagcatctccagcacatgactgaaaagcaacttaatctgtacgatcggttaatcaatgaacccagcaacgattgggacatttactattgggccaccgaggccaaaccagcgcctgaaatcttcgaaaatgaggtgatggcccttctgagggacttcgcaaaaaacaagaataaagagcagaggcttcgtgctcctgacctcgagtatctctttgaaaagccacgatag

SEQ ID NO: 136499 - DNA, 843 bp, synthetic construct
  misc_feature 1..843: note = Description of Artificial Sequence: Synthetic coding sequence
  source 1..843: mol_type = other DNA
atggcagctgtggtcgctctttcactgagacggcgtttgcccgccacaacgctgggcggagcctgtcttcaagcatcacgcggcgctcagacggctgccgctaccgctccccgcatcaaaaagttcgctatctatagatgggacccagataaagcgggagacaaaccacatatgcagacctacgaggtggacctgaataaatgcggcccgatggttctcgatgccctcatcaagattaaaaacgaagttgactcaacgttaacgtttaggcggagctgccgagagggaatttgtggaagctgtgcaatgaatatcaatggagggaatactttagcctgcacgcgccggatcgataccaacctcaataaagtgtcaaagatctacccccttcctcacatgtacgtgattaaggatcttgtgcctgatctgtccaacttctatgcacagtacaaaagcatagagccatacctcaagaagaaagatgagtctcaggagggtaaacaacaatacttacaaagcatcgaggagcgggaaaagctcgacgggctttatgagtgcatcctttgtgcctgttgttcaacaagctgccctagctattggtggaacggtgataaatacttgggcccggctgtactcatgcaggcctacaggtggatgatcgacagtcgcgatgattttaccgaagagaggctcgccaagctccaggatcccttctcgctttaccgctgccatactataatgaactgtactagaacttgtccgaaaggtctgaatcctggaaaggctatagctgagatcaaaaaaatgatggccacttataaagagaagaaggcttcagtctag

SEQ ID NO: 136500 - DNA, 453 bp, synthetic construct
  misc_feature 1..453: note = Description of Artificial Sequence: Synthetic coding sequence
  source 1..453: mol_type = other DNA
atggccgctctgctgctacgacacgtgggtcgacactgtcttcgtgcccacttctccccgcagttatgtattcgaaacgctgtgccattgggcactaccgctaaagaggagatggaacggttttggaataagaacatcgggagtaacaggcccttgagtccccacattacaatctactcgtggtctttgccgatggccatgtccatctgccacagaggaacagggatcgctctctccgccgacgtgggccccagaaaacgccccgaggactctccagccatcccagtctggtccgggtgcccgggatcttattgtgtggtcctgtatggagccggctcccacgtcaagaagggcggctcccagcaccacctcccgacccactactatatccaccctagcttttgcctcagttttctaagcccagcgtgggagaagttctccctgtttgtgtag

SEQ ID NO: 136501 - DNA, 510 bp, synthetic construct
  misc_feature 1..510: note = Description of Artificial Sequence: Synthetic coding sequence
  source 1..510: mol_type = other DNA
atggctgctcttctgctcagacacgtggggagacactgcctgagagcacacttttctccacaactctgcatccgcaacgcagttcctctcgggaccacggccaaggaggagatggaaaggttctggaataaaaacattggatccaatagaccattgtcacctcatatcaccatttactcttggtcactgccaatggctatgtcaatctgccacaggggcacgggaattgccctttccgccggggtgtctttgttcggcatgtcagcactgttgctccccggaaactttgaaagctacctggagctggtcaaatcactgtgcttgggtccagccctgatccacacggcaaagtttgccttggtctttcctctcatgtatcatacatggaacgggatccgtcacctgatgtgggacttaggcaagggattaaagattccccaactgtaccaatccggagtagtggtgttagtgttgactgtcctctcctccatgggcctggcagcgatgtag

SEQ ID NO: 136502 - DNA, 351 bp, synthetic construct
  misc_feature 1..351: note = Description of Artificial Sequence: Synthetic coding sequence
  source 1..351: mol_type = other DNA
atggcagctttattgctgtcatggtccctgccaatggccatgtccatctgtcaccgggggaccgggatagctctgagtgccggcgtcagtctctttggtatgagcgccctgctgttgccaggaaacttcgagagctatctggagctagtcaagtctctgtgcttaggacctgccctgattcacactgctaagttcgccctggtgtttccgctgatgtaccacacgtggaacggcattcgccacctaatgtgggacttggggaaaggtttgaagatcccccaactgtatcagtctggggtagtcgtactggtcctcaccgtgttgtcctctatgggcttagcagccatgtag

SEQ ID NO: 136503 - DNA, 408 bp, synthetic construct
  misc_feature 1..408: note = Description of Artificial Sequence: Synthetic coding sequence
  source 1..408: mol_type = other DNA
atggctgcccttctgctgcggcacgtgggccgtcattgtcttagggctcatttctctccacagttgtgtattcggaactggtcacttccaatggctatgtctatttgtcacaggggtaccgggattgccctgagtgctggtgtctctttgtttggaatgagcgctctgctcctgcccgggaatttcgagtcttatcttgagttggtcaaaagcctgtgcctgggcccagcgctgattcacacagccaaatttgccctcgtctttccattaatgtatcacacttggaacggaataaggcacttaatgtgggatctgggcaaaggactcaaaatcccacagttgtatcaatctggagtggttgtgctggtgctgactgtactctcttctatgggtcttgctgctatgtag

SEQ ID NO: 136504 - DNA, 480 bp, synthetic construct
  misc_feature 1..480: note = Description of Artificial Sequence: Synthetic coding sequence
  source 1..480: mol_type = other DNA
atggccgtgttatggcggttgtctgctgtctgcggtgccctcggggggcgggccctgcttctgcgcaccccagtggttcgtccagcccacatctccgcctttcttcaggacaggcctattccagaatggtgcggggtgcaacacattcatttaagccctagccaccactctggcagcaaagccgcttccctccactggacatcggagcgggtagtttccgtccttttgctgggcttgctccctgctgcataccttaatccttgtagcgcaatggattatagcttggctgccgccctgacattgcacggtcactggggattagggcaggttgtaaccgactacgttcatggggacgctctccagaaagcagctaaggctggactgctggcgctaagtgcattaacgtttgcgggcctatgttattttaattaccatgacgttggcatctgcaaggcagtcgcgatgctgtggaaactgtag

SEQ ID NO: 136505 - DNA, 465 bp, synthetic construct
  misc_feature 1..465: note = Description of Artificial Sequence: Synthetic coding sequence
  source 1..465: mol_type = other DNA
atggcggctagtatgttttacgggcgacttgtggccgtagccactttgcgaaaccatcggccgcggactgcgcaacgagccgccgcacaggggccggtcttgatcggcagcagtcacggcggtgtgaacatcgaggatgttgctgcggagtcccctgaggctataatcaaggagcccatcgatattgaggaagggattaaaaaagaacaggcattgcagctcgcccaaaagatgggcttcccaccaaacattgtcgagtccgcggcagagaacatggtgaagctgtatagcttatttctgaagtacgatgctactatgatcgagattaacccaatggtggaagatagcgacggagcagttctgtgcatggatgcaaagataaacttcgactccaactctgcctataggcagaagaagatcttcgatctgcaggactggacacaggaggatgagcgggataagtag

SEQ ID NO: 136506 - DNA, 897 bp, synthetic construct
  misc_feature 1..897: note = Description of Artificial Sequence: Synthetic coding sequence
  source 1..897: mol_type = other DNA
agcggccgaggacaccctagcgaaccgcctgcaagcgatggcccagcgggctgttgtagcggttcaaaagatgtggtgataaaggctcaagtcctcgctgggggacggggcaagggtacattcgaaagtggacttaagggcggtgtaaaaattgttttctcgcccgaagaggcaaaagccgtgagctcacagatgatcggaaagaagttattcaccaagcagacaggggagaagggccggatctgtaaccaggttctggtctgcgagcggaagtaccctagaagagagtactactttgccattaccatggaacggagcttccaagggcccgtcctgattggaagttctcacggcggcgtgaatatcgaggacgtagctgcggagtcaccagaggcgataatcaaggaaccaattgacatcgaggagggaattaagaaagagcaggctctccagctcgcacagaaaatgggctttccccccaatatagtggagtcagcggctgaaaacatggttaaattgtactctctgtttctgaagtatgacgccaccatgatcgagattaatccaatggttgaagattcagacggcgccgtgctttgtatggatgcgaaaatcaatttcgactccaactccgcttaccggcagaagaaaatatttgacttgcaggattggacccaggaggatgagcgagacaaggatgcagcgaaggccaatctgaactacataggcttggacggcaacattggatgtctggtcaatggtgctggacttgctatggccactatggatatcatcaagctacacgggggcactccagctaattttctggatgtgggagggggggcaacagtgcatcaggttaccgaggcttttaagctgattacgtctgacaaatag

SEQ ID NO: 136507 - DNA, 1326 bp, synthetic construct
  misc_feature 1..1326: note = Description of Artificial Sequence: Synthetic coding sequence
  source 1..1326: mol_type = other DNA
atggcggcctctatgttttacggtcggctggtggcagtagcgaccctgcgaaatcatcgccctagaacagctcagcagcaacaacggaacctgagtctacacgagtacatgtccatggaactcctgcaggaagcaggggtctcggtaccgaagggatacgtggccaagtctcctgacgaggcctatgcaatcgccaagaagttgggatctaaggatgtggtgattaaggctcaagtgctagccgggggtcgggggaagggtacgttcgagtctgggcttaaggggggggtaaaaatagttttttctcctgaggaagccaaggctgttagcagtcaaatgataggtaagaagctgttcacaaagcagaccggcgagaagggtagaatttgcaaccaggtgctcgtctgcgagcggaaatatcctaggagagaatactacttcgccatcacaatggagagatctttccagggtcccgtgttaatcggaagctcgcacggtggcgttaacatcgaggatgtcgctgccgaaagtcctgaagccattatcaaagagcctattgatatagaggagggaataaagaaagagcaagcattgcagttggctcaaaagatgggatttccccctaatatcgttgagagcgctgctgagaatatggttaaactctattcccttttcctaaagtatgatgcaacaatgatcgaaattaatcctatggtggaagactctgatggagcagtgttgtgcatggatgctaagatcaatttcgactccaatagcgcctaccgacagaaaaaaatttttgatcttcaggactggacccaggaagacgagagagataaggatgccgctaaggccaatctcaactacattggacttgatggcaatattgggtgccttgtgaatggggcggggttggccatggctaccatggacatcattaagctgcatgggggcacccccgctaactttttggatgtgggaggcggggccacagtgcaccaggtgaccgaggccttcaagctgattaccagtgataaaaaggtgcttgccattctcgtcaacatctttggcggcataatgcgctgcgacgtcatagcacaggggatcgtgatggccgtgaaggacttagagatcaagatcccagtggtggttaggctgcagggaacccgggtggacgacgccaaagccctgattgctgattctggccttaagatactggcctgcgatgacctggacgaggcagcccggatggttgttaagctgagcgagattgtgacattggcaaagcaggctcacgtcgacgttaagtttcagctgccaatctag

SEQ ID NO: 136508 - DNA, 1392 bp, synthetic construct
  misc_feature 1..1392: note = Description of Artificial Sequence: Synthetic coding sequence
  source 1..1392: mol_type = other DNA
atggcggcaagtatgttctatgggaggctcgttgccgtggctaccctccgcaaccataggccaaggacagcacagcgagccgcagcgcaggtgctgggaagctctgggctcttcaataaccatggattacaggtgcagcagcaacagcagaggaatctgagtctacacgaatacatgtccatggagttattgcaggaagcaggcgtgagtgtgcctaagggatacgtggctaagtcccctgacgaagcctacgccatcgcaaaaaaactgggtagtaaggacgtcgtcataaaagcacaggtccttgcgggtggtagaggtaaaggcacattcgagagcggtcttaaaggcggagtcaaaatcgtgttttcccccgaggaggctaaggcagtgtcctcccaaatgattggcaagaagctgttcacaaagcagacaggagagaaaggtaggatttgtaaccaagtgttggtgtgtgagcggaagtatccccgacgcgagtattacttcgccatcacaatggagcggtctttccagggccccgtgctcatcggcagctcacacggtggagtcaatatagaggacgtagctgcggagtcacccgaggccatcatcaaggaacccatcgacatagaagaggggatcaaaaaggaacaggctctgcagctggcacaaaagatggggttcccgccaaacattgtagagtctgcagcagaaaatatggtgaaactgtacagtcttttcttgaagtatgacgccaccatgatcgaaatcaaccccatggtcgaagactccgacggtgctgtcctgtgtatggacgcaaagatcaattttgacagcaactcggcctatcgacagaaaaaaatctttgatctgcaggattggacccaggaggatgagagggacaaggatgcggccaaggcaaatctaaattacattgggttagatggaaacatcggctgcctggtcaatggcgccggccttgccatggcgaccatggatataattaaacttcacggcggcacccccgccaattttctggacgtcggaggtggggccacagtccaccaagtaaccgaggccttcaaattgatcacctccgacaaaaaagtcctggctatcctggtgaatatcttcggcgggatcatgcgatgcgatgttattgcccagggaattgtgatggctgtgaaggacctggagataaaaatcccggtcgtggtccgtctccagggaacacgggttgacgacgcgaaagcgctcatagccgattctggcttaaagatcttggcttgcgatgatctggacgaggccgcacgcatggttgtcaagttgtcagaaatcgtgaccctcgcaaagcaggcccacgtggatgtgaagtttcagttacctatttag

SEQ ID NO: 136509 - DNA, 1218 bp, synthetic construct
  misc_feature 1..1218: note = Description of Artificial Sequence: Synthetic coding sequence
  source 1..1218: mol_type = other DNA
atgtcaatggaacttttacaggaggctggcgtgtcggtacccaagggatacgttgcaaagtctcccgacgaggcatacgctatcgctaagaagctggggtctaaggatgtggtaatcaaagctcaagtgctggccggtggtcgcgggaagggtaccttcgagtctggcctgaaggggggcgtgaaaatcgttttcagtcctgaagaggcaaaggctgtgagctctcagatgatcggtaaaaagctctttactaaacagacaggtgaaaagggtagaatctgcaatcaggtgctggtgtgcgagcgcaagtatcctaggagggaatactattttgcaataaccatggagcgaagcttccaaggtcccgtgctcatcggctcttctcatggcggcgtcaacattgaggatgtggcggccgagagtcccgaggcgatcataaaggaacctatagatattgaggaaggaataaagaaagagcaggcccttcagctggcccagaaaatgggcttccctcctaacattgtggaaagtgccgccgaaaatatggtgaagctgtattcactctttttgaaatatgatgctactatgattgaaatcaaccctatggtcgaagacagcgatggtgctgtcctttgtatggatgcaaagatcaacttcgattcgaactctgcttacagacagaaaaaaatcttcgatctgcaggactggacgcaagaagatgagcgggacaaagacgccgcgaaggcaaatctgaattatattggactggatgggaacatagggtgtctggtcaatggggccgggctagcgatggcgacaatggatattattaagctgcacggggggacacctgcaaattttcttgatgtgggaggcggagctaccgtccaccaagtgaccgaggctttcaaattgatcacgtccgacaagaaagtgttggcaatcctggtgaatatctttgggggcatcatgcggtgtgacgtaatcgcccaaggcatagttatggccgtcaaggacctggaaataaagattccagttgtcgtccgcttacaggggacgcgcgtagatgatgctaaagcccttattgctgacagcggcctgaagatattggcttgcgacgacctggacgaggcagctcgaatggtggtgaagctgtcagagatcgtcacattagctaaacaggcccacgtcgacgttaagttccagctccctatctag

SEQ ID NO: 136510 - DNA, 876 bp, synthetic construct
  misc_feature 1..876: note = Description of Artificial Sequence: Synthetic coding sequence
  source 1..876: mol_type = other DNA
atggaacgctcattccagggtccggttcttatcggctcctcccacggtggagtgaacatcgaagatgtggcagctgaatctccggaggcaatcattaaagaacccatcgacatagaggaaggtatcaagaaggaacaagctctccaactggcccagaaaatgggctttcctcccaatattgtggagagcgctgcggagaatatggttaagctgtactcccttttccttaagtatgatgcgacaatgattgagattaatccgatggtcgaggactcagacggggcggtcttatgcatggatgcaaaaatcaattttgactccaacagcgcatataggcagaagaagattttcgacttgcaggactggacccaggaggacgagcgcgataaagatgctgcaaaagcaaacctgaactacataggactggacggcaatattggctgcctcgtaaacggagcaggccttgccatggctaccatggatatcatcaaacttcacggcgggactccagccaattttctcgacgtcggaggtggagcaacagtacaccaggttaccgaggcgtttaagctcatcacgagcgataaaaaagttctcgccatactggtgaacatcttcggtggcattatgagatgcgacgtcatcgctcagggcatagtgatggctgtcaaggatctcgaaattaagatccctgttgtggtaaggctccagggcacaagagtggatgacgccaaggccttgatcgcagactcgggccttaagattcttgcctgcgacgacctggacgaagcagcccggatggtggtcaagctgagtgagatcgtgaccctggcaaagcaggcccacgtggatgttaagttccagctgcccatctag

SEQ ID NO: 136511 - DNA, 1218 bp, synthetic construct
  misc_feature 1..1218: note = Description of Artificial Sequence: Synthetic coding sequence
  source 1..1218: mol_type = other DNA
atgagcatggagctgctgcaagaggccggcgtgagcgtgcctaaaggatatgtggccaagagtccagacgaagcctacgctatcgctaagaagttgggcagcaaagatgtggttatcaaggcccaggtgttagctggagggagagggaagggaactttcgagtcaggccttaagggaggagtcaaaattgtcttctctccagaggaggcaaaggctgtatcctcccagatgatcgggaaaaaattattcaccaagcagacaggcgagaagggcaggatttgcaatcaggtgctggtctgcgagcgaaagtacccaagacgggaatactatttcgcaattactatggagcgcagctttcagggacccgtactgatcggaagctctcatggaggcgttaacattgaggatgttgccgctgagtctcccgaagcaattatcaaggaaccaatcgatatcgaggaaggcatcaagaaagagcaggcactccagctggctcaaaagatggggttcccacccaacattgtggagtctgcagcggaaaatatggttaagctgtattctctgttcttaaagtacgacgcgaccatgatagaaatcaatccaatggtggaagatagcgatggagccgtcttatgtatggatgccaaaattaactttgattccaactccgcgtaccggcagaagaaaatttttgacctccaggactggactcaggaagatgaacgcgacaaagatgctgccaaggcaaacctgaattacatcggccttgacggcaacattggatgccttgtgaacggcgcagggctggctatggccaccatggatatcataaagctgcatggtggaaccccagctaactttttggatgttggagggggagccacagtgcaccaggtcaccgaggcttttaagctcataacctctgataagaaggtgctcgctatcctggtgaatatttttggagggatcatgagatgcgatgtgattgcgcaaggcatcgtcatggctgtaaaggacctggaaatcaaaatccccgtcgtggtgcggctgcaaggtactcgagtagacgacgctaaagcgctcattgccgacagtggtctgaagattctggcctgcgacgatctcgatgaggctgccagaatggtggtcaagttaagcgagattgtaactttagctaaacaggcccacgtggacgttaagttccagctccctatttag

SEQ ID NO: 136512 - DNA, 990 bp, synthetic construct
  misc_feature 1..990: note = Description of Artificial Sequence: Synthetic coding sequence
  source 1..990: mol_type = other DNA
atgatcggcaagaagcttttcacaaagcagaccggtgagaagggtagaatctgcaatcaggttctggtatgcgagcggaaatacccgcggcgcgaatattacttcgcaataaccatggagcggtcatttcaagggcccgttctaatcgggtcaagccatggtggcgttaatattgaggatgtagccgctgaatcccccgaggccatcattaaggagcccattgatatcgaagaaggcatcaaaaaggaacaggcgctgcaactggcccaaaaaatgggcttccccccaaatatcgtcgaaagtgccgccgagaatatggtgaagctctattccctctttctcaaatacgacgccacaatgattgagattaatcctatggtcgaggacagcgacggtgccgtgctgtgcatggacgctaaaatcaacttcgacagcaactccgcctatcgacaaaagaagatcttcgacctgcaagattggactcaggaagatgagagagacaaggatgctgccaaagctaatctgaattacattggcctggacggtaacattggctgtctcgtcaacggtgccggattggcgatggccacgatggatatcataaagctgcacgggggcaccccagcgaactttttggatgtgggcggaggcgctacagtgcatcaagtgaccgaagctttcaagttgatcacaagtgataagaaagtgttagctattctcgtgaatatatttggtgggataatgaggtgcgacgtgatcgcccagggcatcgtgatggccgttaaggacttagaaatcaagatcccagtggtggtgcgtctgcagggaacacgggtcgatgacgctaaggccctgatcgccgattcaggactgaagattctggcatgtgatgatctggatgaagccgccagaatggtggtgaaactatccgaaatagtgacattggccaaacaggctcacgtcgatgttaagttccagctacctatttag

SEQ ID NO: 136513 - DNA, 1041 bp, synthetic construct
  misc_feature 1..1041: note = Description of Artificial Sequence: Synthetic coding sequence
  source 1..1041: mol_type = other DNA
atgaccgctacgctcgccgcggcagcagacatcgccaccatggtctccggctcatctgggctcgccgcagctaggctgttaagtcgcagcttcctcctccctcaaaacggaatcaggcattgttcatacaccgcctcccggcaacatctttatgtggataagaataccaagatcatctgccagggcttcacgggcaagcagggcacatttcattctcagcaagcactggaatacgggacaaaacttgtgggaggcacaactcctgggaaggggggacagacccatctggggctgccagtgttcaacacagtaaaggaggccaaggagcagaccggtgccactgccagtgtcatttacgtgcccccaccctttgcagccgccgccattaacgaggccatagaggccgaaatccctctggtggtttgcatcacggaagggattccccagcaagatatggtgagggttaaacacaagctgctccggcaggaaaagactagacttatcggaccaaactgtccaggggtgattaatcctggagagtgtaagattgggattatgcctggccacatccataagaagggtaggatcggcattgtttcccgcagtggaactctgacctacgaggccgtacaccagaccacacaagttggcttggggcaaagcttgtgcgtaggcattgggggcgaccctttcaacggaaccgacttcattgattgcctggagatcttccttaatgacagcgccaccgaaggaattattctgattggggagatcggggggaatgctgaggagaatgccgccgagtttttgaaacagcataacagtggacctaattccaagcccgtggtttccttcatcgcaggcctgacagcacctcccgggcgacgcatgggacacgctggggctattatagccgggggcaaggggggtgcaaaagagaagattagcgcattgcagtcagccggagtggtggtttcaatgtctcctgcacaacttggcacaacgatctataaagaatttgagaagcggaaaatgctttag

SEQ ID NO: 136514 - DNA, 5484 bp, synthetic construct
  misc_feature 1..5484: note = Description of Artificial Sequence: Synthetic coding sequence
  source 1..5484: mol_type = other DNA
atggcccggaagaagttctccggcctcgaaatttcgctgattgttctgttcgttatcgttaccatcattgccattgctctgatagtggtactcgcaacaaagacccctgcagtcgatgagatcagcgactctaccagtacccccgccacaactcgcgtgaccaccaatccctccgacagtggtaaatgcccaaatgtcctgaatgatccagtgaatgttcgcattaactgtatcccggagcagttcccaactgagggaatttgtgcacagcgtggctgttgttggagaccatggaacgacagtctaataccatggtgtttcttcgtcgacaaccacgggtataacgtgcaggacatgacaaccaccagtataggggtagaggccaagctgaatcggatcccaagccctaccctctttgggaacgatattaattcagttctgtttaccactcaaaaccagactcccaatcgttttcgattcaaaatcaccgaccccaacaataggcgatatgaagtgccgcaccagtacgttaaagagtttactggtcctactgtgtccgatacactttacgacgtgaaggtggcgcaaaacccttttagcatacaagtgatacgaaaatcaaacggcaagactctgttcgacactagcatcggccccctggtatattctgatcaatatctgcagatctctaccagactgcctagtgactacatctatggaatcggggagcaggtgcacaaaaggttcagacacgatttgtcctggaaaacatggcctatcttcaccagagaccagctcccaggggacaataataacaatctgtacggccaccaaacctttttcatgtgcatcgaagacacctccggtaagagcttcggggtctttctgatgaacagcaacgctatggagatttttatccagccaactcccatagttacttatagggtgaccgggggaattttagatttttatatactgttaggtgatacacctgagcaagttgttcagcagtaccaacagttggtagggttgcctgcaatgcctgcctactggaacctcgggtttcagctgtccagatggaattacaaatccttggacgttgtcaaagaagtagtacgccgcaacagggaagcgggtatcccattcgatacccaagtcacagatatcgactatatggaagataaaaaagactttacctatgatcaggtagcttttaacggactgccccagttcgtgcaggacctgcacgaccacggccagaaatacgtaatcatattggatccggctatcagcattggccggcgagccaacggaactacctacgcaacctacgaacggggaaacactcagcatgtatggataaacgaatctgatggatccactcccatcattggcgaggtgtggcccggcctcaccgtatatccagacttcactaatccaaactgcatcgactggtgggcaaacgagtgctccatttttcatcaggaggtccaatatgatggattatggatagacatgaacgaagtgtccagcttcatccaaggctcaaccaaaggatgcaacgtaaacaagctcaactatcctccgttcactcccgacatactagacaaattgatgtacagtaagactatatgcatggacgcagttcagaattggggcaagcagtatgatgtgcacagcctgtatggatacagcatggccatcgccaccgagcaggccgtgcaaaaggtgttccccaataaacgaagttttattctgacacgatcaaccttcgcagggtcagggcgacatgccgctcactggttaggggataatactgcatcatgggagcagatggagtggagtatcactgggatgttggaattttccctgttcggcatccccttggtcggtgctgacatatgcggctttgtcgccgaaaccaccgaggaactatgccggcggtggatgcagttgggagccttctaccctttctctagaaaccataattccgacggatatgagcatcaagatccagcttttttcggccagaactcccttctcgtgaagtccagcagacagtatctcacaattcggtacacactactgccatttctctacacactgttctataaggcacacgtgttcggcgagacagtggcacgccccgtgctgcacgaattctatgaggacaccaactcttggatcgaggacactgaatttctttggggtcccgccctgctcattacccccgttctgaaacagggcgccgacacagtgagcgcatatataccagatgctatatggtacgactacgagagtggcgcgaaaagaccgtggagaaagcagagagtggacatgtatctcccagccgacaaaatcggtttgcacttacgaggcggttacatcatccctattcaggagcccgacgttactaccactgcaagtaggaagaatccactcggcttgatagtggcacttggtgagaataataccgccaaaggggacttcttctgggatgacggggaaactaaggacaccatccagaacggcaattacattctttatacgttctcagtttctaataatacgctggacattgtctgcactcactcttcctaccaagaaggaaccactctggcattccaaaccgtgaagatcctcggtctaacagattcagtgactgaggttagggtcgctgagaacaaccagccaatgaatgcacacagcaacttcacatatgacgccagcaatcaggtgctcctaattgcagatcttaagttaaacctcgggcgcaatttttcagtccagtggaatcagattttttccgaaaacgagcggttcaattgctatcccgacgccgaccttgccaccgaacagaaatgtacccagcgcggctgtgtctggcgcacaggatccagtctgtctaaagcccccgaatgctactttcccagacaggacaacagttattcggtcaactccgcaagatattcttcaatggggattacagccgacctccagctaaacacagccaatgcgcgcattaaactaccgtcagaccctatatccactctgcgagtcgaagtcaagtaccataagaatgacatgctccaatttaaaatctatgaccctcagaaaaagcggtacgaggtgcctgttccattgaatattccaaccacccctataagcacctacgaggacaggctctacgacgtggagatcaaggaaaaccccttcgggattcagatcaggaggcggagctccggccgcgtgatctgggactcctggcttccggggtttgcgttcaacgaccagtttattcaaatctccactcggctcccgagtgagtatatctacggattcggggaggtagagcatactgcatttaaaagggatctgaattggaacacatggggcatgttcacacgtgaccaacctcctggttataagttgaatagttatggattccatccctattacatggccctagaagaagaaggtaacgctcacggcgtgtttctgctgaatagtaacgcaatggacgtcacattccagcctaccccagctctaacctacaggaccgtaggcggcatattggacttctacatgttcttgggtccaactcctgaggtcgcgactaagcagtaccatgaggttatcgggcaccccgtcatgcctgcttattgggctctcggattccagctctgtcgttatggatatgctaacacctcagaagttagagaactctatgacgccatggtagcagctaacataccgtatgatgtgcaatacactgacattgattatatggaaaggcagctagatttcaccattggggaagccttccaggatctgccacagttcgtggataaaatcaggggcgagggaatgaggtatatcatcattcttgacccggcaatcagtgggaacgaaacaaaaacctatcccgcctttgagcgaggtcaacagaacgatgtgttcgtgaaatggccaaataccaacgacatttgctgggccaaggtgtggcctgatctccccaacataaccatcgacaagaccctgactgaagacgaggccgtcaacgcaagccgtgcccatgtggcattccctgacttcttccgcacttccacagcggagtggtgggcccgcgagattgtggacttttacaacgaaaagatgaagtttgacggcctgtggatcgacatgaatgaacctagttctttcgtaaacgggacaaccacaaatcagtgccgcaacgatgagctgaactaccctccctacttccctgagctcacaaagcggacggatggcctgcatttccgcaccatttgcatggaagccgagcagatccttagcgatggaacttccgtcctgcactacgacgtgcacaacctatatggttggagccagatgaaaccgacccacgacgccttacagaaaacaaccggtaaacgtggaatagtcatctctaggagcacctacccaacatcaggtagatggggcgggcactggcttggagataattacgcacgatgggacaatatggataaaagcataatcggtatgatggagttttccctgtttggaatgtcctatacaggcgcagatatttgcggcttcttcaataacagcgagtatcatctgtgcactcggtggatgcaacttggcgccttctatccctacagtagaaaccacaatatcgcgaatacacggcgacaggatccagcttcatggaatgagacattcgccgagatgagccggaacattctgaacatacgatacacgttgctcccatatttctatacacagatgcatgaaatccatgctaatggaggaactgtcatccgccctctactacatgaattctttgatgaaaaaccaacatgggacatctttaagcagttcctgtgggggccggcctttatggtcactccagttctcgaaccatacgtccagacagtaaacgcatacgttcccaacgcacgctggttcgactaccacaccggcaaggacataggggtccgcgggcagttccaaacctttaatgcatcgtatgacacaattaatctccacgtgagaggaggccacattctgccctgtcaggaaccagctcagaacacgttctatagccgtcaaaaacacatgaaactgatagttgctgcagacgacaatcagatggcacagggatccctcttctgggacgatggcgaaagcatcgacacttacgaacgcgatctctatctctcagtgcagttcaatctaaaccagaccactttaacttctactatcctgaagcgcggctacataaataagtcagagacccggttggggtccctgcacgtgtggggcaagggcacaactccagtcaacgcagtgacccttacttataatggaaataagaacagtttgccctttaacgaagacaccactaatatgattctcagaattgatttgacaacccacaacgtaaccctggaggaacctatagaaatcaattggtcatag

SEQ ID NO: 136515 - DNA, 2616 bp, synthetic construct
  misc_feature 1..2616: note = Description of Artificial Sequence: Synthetic coding sequence
  source 1..2616: mol_type = other DNA
atgaagtatagttgttgtgccctggtcctggccgtgcttggtaccgaactcctggggagcttatgctcgaccgtgcgctctcctcggttcagggggaggatccagcaggaaaggaagaacatccgccccaacattatcctagttttgaccgacgaccaggatgtggaactgggctcattgcaggtgatgaacaagactaggaaaatcatggagcacggaggagcaactttcatcaacgcttttgtgactactcccatgtgttgcccgagccgctcttccatgctcaccggtaaatatgtgcacaaccacaacgtatacaccaataacgaaaactgcagctctcccagctggcaggccatgcacgagccacgaactttcgctgtatatcttaacaacacaggatatcgaactgctttttttggcaaatatcttaacgagtacaacggcagctatatacctcctggctggagggaatggctgggactgatcaaaaacagtcgcttttataactatactgtctgtagaaatgggatcaaagagaagcatggatttgattatgctaaggattattttacagacctcattacgaatgaaagtattaactacttcaagatgtctaaacggatgtatccacaccgtccagtaatgatggtcatctcccatgccgctcctcacggccctgaagactctgccccccaattctccaaactgtaccccaacgccagccagcatatcaccccgagctataactacgctcctaacatggacaaacactggattatgcagtatactggccccatgctacctatccatatggagtttacgaacatcctacagcgcaaacggctgcagacactcatgtccgtggatgatagcgtggaaagactgtataatatgctggttgagaccggtgagctggaaaacacgtacattatttatacagctgatcacggctaccacattgggcagtttggcctcgtgaaaggaaagtccatgccctatgacttcgatatccgggtgccgtttttcatccgcggcccatccgtggagccaggctctattgtgcctcaaattgtcctgaacattgacctggcccccacaatcctggatatcgcgggtctcgatacccccccagatgtcgacgggaagtcagtgctgaaacttctggatcccgagaaacctggtaaccgcttcaggaccaataagaaggctaaaatatggagggatacctttttggtggaaaggggtaaattcttacgcaaaaaagaggagtcctccaagaacattcagcaatctaaccaccttccaaaatacgagcgggtgaaggagctgtgtcagcaagctcggtatcagacagcgtgtgagcaaccgggacagaagtggcagtgtatcgaagatacatcaggtaagcttcggattcacaagtgtaagggacccagcgacctgcttacagtgaggcagtcaacccgaaacctatatgctcgcgggttccatgacaaagacaaggagtgttcatgcagagaatcgggttatagagcaagccgctcccagaggaagtcccaacgccaattcctgcgaaatcagggtacacccaagtataaacctcggtttgtccatacacgccagacgcggagcctgtcggtcgagttcgaaggggagatctacgacatcaatttggaagaagaagaggagcttcaggtactgcagccaagaaacatagccaagcggcatgacgaaggtcacaagggacctagagatctgcaggccagttctggaggcaatagaggccgaatgttggcagactcatcaaacgccgtgggacctcctactaccgtacgagttacccacaaatgctttatactgccaaatgacagcattcactgtgaacgcgagttataccagtccgcccgagcctggaaggaccacaaggcctacatcgacaaagagattgaggcactgcaagacaaaataaagaatctgcgggaggtccgcggccacctgaaaagaagaaaacccgaagaatgctcttgtagcaagcagtcttattataataaggaaaagggagtaaaaaagcaggaaaagttgaaatctcacctccatccttttaaggaggctgcccaggaggtggactcaaaactgcagttgtttaaggagaataatcgccggcggaagaaggaaagaaaggaaaaacgaaggcagcggaagggcgaagagtgttcactgcccggcctcacgtgttttactcacgataataaccactggcagacagcgcctttttggaatctaggttctttttgcgcctgtacttccagcaataacaacacatattggtgcttgaggacagtgaacgaaacgcacaacttcttgttctgtgagttcgccaccgggtttcttgaatacttcgatatgaacacagatccataccaactcacaaacaccgtccacactgtagaaagagggattctgaaccaacttcatgtacagttgatggagttgcgctcctgtcagggatataaacagtgtaatcccagacctaagaatctggacgttggaaataaggacggaggctcctatgacctgcatagaggccagttatgggacgggtgggagggctag

SEQ ID NO: 136516 - DNA, 2616 bp, synthetic construct
  misc_feature 1..2616: note = Description of Artificial Sequence: Synthetic coding sequence
  source 1..2616: mol_type = other DNA
atgaaatattcatgctgcgccctggtgcttgccgtcttaggcacggagctcttaggtagcctctgctccactgtacgctcccccagatttcggggtagaattcagcaggaaaggaagaatataagaccgaatatcatcttagtgctgaccgatgaccaagacgtggagctcgggtccttgcaagtcatgaacaaaaccaggaagatcatggaacacggaggcgcaacctttatcaacgcatttgtcaccacccccatgtgttgcccaagcaggtccagcatgcttacagggaaatatgtccacaatcataatgtatacactaacaatgaaaattgttcttctccatcctggcaggcaatgcatgaaccccggacatttgctgtatacctcaacaatactggctatagaactgcattcttcggaaaatatttaaatgaatataacggaagttatattccaccaggttggagagagtggctgggtcttattaagaatagtaggttttataactataccgtatgccgtaacgggataaaagaaaagcacgggttcgattacgccaaggactatttcaccgatctcattacaaacgaatctatcaactattttaaaatgtcgaagcgaatgtaccctcacagacctgtaatgatggtaatttcccacgctgcgcctcatgggcccgaggactccgctcctcaattcagcaagctctaccctaacgccagtcagcatattactccaagctataattatgctccgaacatggacaaacactggatcatgcaatataccggccctatgctgcctatacacatggagttcaccaacatactgcaaaggaagagacttcagacgctcatgtctgtcgatgactccgtggagcgcttatataatatgctggtggagacaggtgaactggaaaatacttatattatctatacggccgatcacggatatcatattggacagttcgggctggtaaaaggcaagagtatgccctacgattttgacatccgagtacctttctttattcggggccctagcgtcgaaccaggcagcatcgttccgcaaatcgttctgaatattgacctggcccccactattcttgatatcgctgggctcgatacgcccccggacgttgacggtaaatcagtccttaaactgctcgacccggaaaagcccggcaatcgcttccggaccaacaaaaaggccaagatctggagggacacttttttggtcgaacggggcaagttcctgagaaagaaggaggagtcttcgaagaacatccaacagtccaaccatctccccaagtacgagagggtgaaagagttgtgtcagcaggccagatatcaaactgcatgtgagcagccgggccagaaatggcagtgcatcgaggacaccagcgggaagcttaggattcataaatgcaagggtccgagtgatctcctgacagttcggcaatcaacccggaatctgtacgcaagaggattccatgacaaagataaagagtgttcttgtcgagagagtggctaccgcgctagccgtagccagcgcaagagccagagacagttcctgagaaaccagggcacgcccaagtacaaaccgcgctttgtgcacaccagacaaactagatctctctccgtggaatttgagggagagatatatgacattaacctggaggaagaggaagaactacaggtcctacaaccaagaaacatcgcgaagcggcatgacgagggccataaggggccacgagacctgcaggcctcctcgggaggaaatagaggccggatgcttgcagactctagtaacgcagttggaccccctaccacagttagagtaactcataagtgttttatcctccctaatgactccatccattgcgagagggagctttatcagtctgctagagcatggaaggatcataaggcgtatatcgataaggagatagaggctttacaggacaaaattaagaaccttcgtgaagtgcgcggacacctgaagcggaggaagcccgaggagtgttcatgttccaaacaatcctattataacaaagagaaaggcgtcaagaaacaagaaaagttaaagtcacatttacacccattcaaagaggccgctcaagaggtggatagtaaattacagttatttaaagagaataaccgacgccgaaagaaggagaggaaggagaagcgtcggcagaggaaaggagaagagtgcagcctccctgggctgacctgctttacccacgacaacaatcactggcaaactgcacctttttggaatctggggagtttctgcgcctgtaccagttctaacaacaacacctactggtgtctgaggaccgttaatgaaacccacaattttttattttgcgagtttgctacgggattcctagaatacttcgacatgaacaccgacccataccaactgacaaatacagtgcatacagtcgagcgagggattctgaaccaactccacgttcagttgatggagctgcgatcctgccagggctacaagcagtgcaaccctaggcctaaaaatcttgatgtggggaacaaggacggaggatcctatgacctgcatagaggacagttatgggatggatgggaaggatag

SEQ ID NO: 136517 - DNA, 2616 bp, synthetic construct
  misc_feature 1..2616: note = Description of Artificial Sequence: Synthetic coding sequence
  source 1..2616: mol_type = other DNA
atgaagtatagctgctgcgctctggtgctggctgtcttggggacggaacttctggggtcgctctgttcaacagtgagatctcctcgtttcagaggtagaattcagcaggaacgaaagaatatccgccccaacatcatcctggtgcttacagacgaccaggacgttgaattgggctctcttcaggtgatgaacaagacgagaaaaattatggagcacgggggcgccacgtttattaatgccttcgttaccacccccatgtgctgcccatctcgaagctcgatgttaacaggcaagtacgtgcataaccataatgtctacaccaacaacgagaattgctcctccccctcctggcaggcaatgcacgaacctaggaccttcgcagtttacctgaataacacgggatacaggactgcgttctttggtaagtatctgaacgagtacaacggctcttacatacctccggggtggagagagtggctgggcctcatcaaaaactctaggttctataattataccgtgtgccgtaacgggataaaagagaagcatggattcgactacgctaaggactacttcacggacctcataaccaacgaatctattaactatttcaagatgtcgaaaaggatgtatccacatcgacctgtgatgatggtgatttctcacgctgcccctcacggacctgaagacagtgctccccaattctcaaaactttatcccaatgcgtctcagcatataacaccgagctacaactacgccccaaatatggataaacactggatcatgcagtacaccggccccatgttgccaattcatatggagttcactaacatactgcagcgcaaacggctgcagaccctgatgagtgtggatgacagtgtggagagactgtataacatgcttgtggaaactggggaacttgaaaacacctacatcatctatacggctgatcatgggtatcacatcggacagttcggtcttgtcaagggcaagtctatgccttacgattttgacatccgagtgcctttcttcatccgtgggcccagtgtcgaaccaggcagtatcgtgcctcagatcgtcctcaatatcgacctggctccgacaattctagacatcgccggactggacacccctccagatgttgacggaaagagtgtgctcaagctgctagaccccgagaagcctggtaatcgatttagaaccaataagaaggccaagatctggcgagatacattcctggtcgagcgcggcaagtttctacgcaagaaggaagaaagctcgaaaaacattcaacagagcaaccacctgcccaaatacgagagggttaaggagttgtgccagcaggcaagatatcagacagcctgcgaacagcccggccagaagtggcagtgcatcgaagacaccagcggcaagttgaggatacataaatgcaagggcccttcagatttactcaccgttcgccagtcgacccgtaacctgtacgccaggggttttcatgacaaggataaggagtgtagctgtagggagtccggctatcgcgcctcaaggtcacagagaaagagtcaaaggcagttcctgcgtaaccagggtactcccaagtataagcccaggtttgtgcacacaagacaaaccaggagtctgtcagttgaatttgaaggggagatatatgatataaatttagaggaggaagaggagctccaggtgctccagccacgcaacatcgccaagcgtcacgacgaggggcacaagggtcccagagatttgcaggctagctcaggcggcaacagggggagaatgttagccgattcttctaacgcggtggggccacctacgaccgtgagagtgacccacaaatgcttcatcctgcctaacgactctattcactgcgaacgggaactgtatcagtcagcccgcgcctggaaggaccacaaagcatatatcgacaaagagatcgaggcactacaggacaagatcaaaaatctgagggaggtgcgcggacaccttaaacgaaggaaacctgaagaatgctcctgcagcaagcagagttattacaacaaggagaagggggtcaaaaaacaggagaagctgaaaagccacctgcaccctttcaaagaggccgcccaggaagtagatagcaaactgcagctcttcaaggagaataaccgtcgcaggaagaaggagagaaaagagaaacggagacaacgtaaaggagaggagtgtagtctgccaggcctgacatgcttcacccacgataacaatcattggcagaccgcccccttctggaacctcggaagtttttgcgcctgtactagctcaaacaacaacacctattggtgcctcagaacagtgaacgagacccacaactttctgttttgtgagtttgctacagggtttctggaatacttcgatatgaacacagacccctaccagcttactaataccgtccataccgtggagcggggtatcctaaaccaactgcacgtgcagctaatggaactgaggagttgccaaggatacaagcagtgtaatcctcggccaaaaaacctcgacgtggggaacaaggacggagggtcctatgacctacataggggccagctctgggacggatgggagggatag

SEQ ID NO: 136518 - DNA, 2616 bp, synthetic construct
  misc_feature 1..2616: note = Description of Artificial Sequence: Synthetic coding sequence
  source 1..2616: mol_type = other DNA
atgaagtattcttgttgcgctctcgtcctggccgtgctcgggactgagctactaggctccctgtgctccacggtgcgttctcctaggtttagagggagaattcaacaggagcggaaaaacatcagacctaatattatcttagtcctgaccgacgatcaggatgtggaattgggctcgttacaggtgatgaataagacgaggaagatcatggagcatggcggagctacatttatcaacgcattcgtgaccacccccatgtgctgtcccagcaggtcatcaatgctgaccggaaagtacgtccacaatcacaacgtctatactaacaacgagaactgcagttccccaagctggcaggcgatgcacgagcctcgcacctttgcagtgtacctgaacaataccggatacagaactgccttcttcggaaagtatctgaacgagtataatggctcctatatcccgccggggtggcgcgagtggctgggcctgatcaagaattcaaggttctataattatacagtctgcaggaatggtataaaggaaaagcacggctttgattacgcgaaagattatttcacagatctaatcacaaatgaatcgatcaactacttcaaaatgagcaaaagaatgtacccccatcgacctgtcatgatggtcatctctcacgcggccccccacggtcctgaagacagcgcgccccagttttcaaagctgtaccccaacgctagccaacatattacgccttcctataactatgcgcccaacatggataagcattggatcatgcagtacaccggccctatgctgcctatccatatggagttcaccaatattctacagagaaagagactgcagaccctgatgagtgtcgacgacagcgtcgagagactgtacaacatgctggtcgaaacaggtgaactggagaatacttatatcatttataccgctgatcatgggtaccatattggacaatttggcttggttaaagggaagtccatgccatatgatttcgatattcgggtcccatttttcatcagaggaccctccgttgagcccggatctatcgtgccgcagattgtgcttaatatagacctggcccctaccatactggatatcgccggcctagacactcctccggatgtggatggaaaatccgtccttaagctcttagaccccgaaaagcctggtaaccggttccggacaaacaagaaggcaaagatctggcgcgatacattcctagttgagcgaggcaaattcttacgaaagaaggaagaatctagcaaaaatatccagcagtctaatcacctgcccaagtacgaaagagtaaaggagttatgtcagcaagcccgctatcagacggcctgtgagcagccaggacagaagtggcagtgcatcgaggatacgtcaggaaagctacgcatacacaaatgcaagggccctagtgacttgctgactgtgcgccaatcaacgcgcaacctgtatgctcgaggcttccacgacaaggataaggagtgctcttgcagggagagcggttaccgcgcaagtcgcagccaacggaagtcgcaacgccagttccttaggaaccagggaacacccaagtataaaccaaggtttgtgcacactagacagactcggtcactttcagtggaattcgagggggaaatctacgacataaacttggaggaagaggaagagctccaggtgctacagccaaggaatatcgccaaacggcatgacgagggtcataaagggcccagagatcttcaggcaagtagtggcgggaatcgtggcagaatgctggccgatagtagtaatgcagtggggccccctactaccgtccgggtgactcacaagtgcttcatcttgcccaacgattcgattcattgtgagagggaactgtaccagtccgcacgcgcctggaaggatcataaagcctacatagataaagaaatcgaggctctccaggacaaaattaagaatcttcgagaagtacgaggacacctcaagcgacggaagcccgaggagtgctcctgctccaagcagtcctactataataaggagaagggcgttaaaaagcaagaaaagctgaagtctcaccttcaccccttcaaggaagctgcccaggaagtagactcaaagctacagctgttcaaagagaataataggaggaggaaaaaagaaagaaaggagaaaagaagacagcggaaaggggaagaatgcagcctgcccgggctgacttgcttcacccacgacaataaccactggcagaccgcacctttctggaacctgggcagtttctgtgcatgcacatccagcaataacaatacttactggtgcctcagaaccgtgaacgagacccacaactttcttttctgcgagtttgccaccggttttctcgaatactttgatatgaacacggatccctatcagctcactaatactgttcacaccgtggagcgtggtattttaaaccagctccacgtacagctgatggagctgcggagctgccagggctacaaacaatgcaacccacgcccaaaaaacttggatgttggtaataaagatggcggctcgtacgatctgcacagagggcagctgtgggatggatgggagggttag

SEQ ID NO: 136519 - DNA, 90 bp, synthetic construct
  misc_feature 1..90: note = Description of Artificial Sequence: Synthetic coding sequence
  source 1..90: mol_type = other DNA
atgaaatactcttgctgcgctctagtgctggcggttctgggtaccgaactcctgggttccctgtgttcaaccgtgagatcacctagatag

SEQ ID NO: 136520 - DNA, 519 bp, synthetic construct
  misc_feature 1..519: note = Description of Artificial Sequence: Synthetic coding sequence
  source 1..519: mol_type = other DNA
atgaagtacagttgctgtgcactggtgctggctgtgttgggaacagaactcctaggcagcctctgttctactgtccgtagtccacgtttcagaggtagaatccagcaggagcgcaaaaatattcgccctaacatcattttagtcttaactgacgatcaggatgtggaactggggtctctccaggtgatgaataaaacccggaaaatcatggagcacggcggcgccacgtttatcaatgcatttgtaacgacaccaatgtgttgtcctagccgcagctctatgctgaccgggaagtacgtacataatcacaacgtttatactaacaacgaaaattgcagctctccttcatggcaagcaatgcatgagccccgaacctttgcagtgtatttgaacaataccggctaccggacagcctttttcggaaaatatctgaacgagtacaatggaagctatatccctcccggctggcgcgagtggttggggttgattaagaatagtaggttttacaactacacctag

SEQ ID NO: 136521 - DNA, 231 bp, synthetic construct
  misc_feature 1..231: note = Description of Artificial Sequence: Synthetic coding sequence
  source 1..231: mol_type = other DNA
atgaaatacagttgttgtgctctcgtcctggccgtcctgggaaccgaactattaggctcactttgcagtacagtgcgatcaccccgattcagaggcaggatacagcaggagagaaaaaatatcaggccaaacatcatcctggttctcacggacgaccaagatgtagaactggggtcactgcaggtaatgaacaaaactcgcaagattatggagcatggaggcgccacatag

SEQ ID NO: 136522 - DNA, 258 bp, synthetic construct
  misc_feature 1..258: note = Description of Artificial Sequence: Synthetic coding sequence
  source 1..258: mol_type = other DNA
atgaagtattcttgctgtgcgctagtccttgcagttctgggcactgagcttttaggcagtctttgctcaacggtacgctcgccccgttttcgggggaggatccagcaggaacggaaaaacattcgccccaacattatcctggttttgacagatgaccaggatgtcgagcttgggtccttacaagtgatgaacaaaacacggaagatcatggaacatgggggcgccacattcataaatgcgtttgtgactaccccctag

SEQ ID NO: 136523 - DNA, 171 bp, synthetic construct
  misc_feature 1..171: note = Description of Artificial Sequence: Synthetic coding sequence
  source 1..171: mol_type = other DNA
atgaagtacagctgctgtgcccttgtgctggcagttctcggcaccgaactgctgggatcattatgcagtactgtaagaagtccaaggttccgggggaggattcagcaggagcgaaaaaacatccggccaaatatcatcctggtgctcaccgacgatcaggatgtagagtag

SEQ ID NO: 136524 - DNA, 2613 bp, synthetic construct
  misc_feature 1..2613: note = Description of Artificial Sequence: Synthetic coding sequence
  source 1..2613: mol_type = other DNA
atggggccaccaagtctggtgttgtgtttactgagtgcgactgtcttctcgttactgggcgggtccagcgccttcttgtcacaccaccggctgaaaggtcggtttcagagggatcgacgcaatatacgacctaacattatcctggtgctaacggatgaccaagatgttgaactgggaagcatgcaggttatgaacaagactagaaggatcatggaacagggaggcgcccatttcatcaacgcctttgtgacaacccctatgtgctgcccgtccagatccagtatactgacagggaagtacgtacataatcacaacacctacacaaacaacgagaattgttcctctccatcgtggcaagcccaacatgagtcacggacctttgcagtgtatttgaactcaaccgggtaccgcaccgctttcttcgggaaatacctgaacgagtacaacggatcttatgtgccccctggctggaaggagtgggtgggcttactgaagaatagcagattttacaattacaccctttgtcgaaatggcgtcaaagagaagcacggcagcgactactccaaagactacctgaccgacctgatcaccaacgattccgtttcattctttaggacgtcgaagaaaatgtatccacaccggccagtcctgatggtaatttcgcacgcagctccgcatgggcctgaggattcagccccccagtacagcagactgtttccaaacgccagtcaacacattaccccatcttacaattatgccccaaacccagacaaacattggatcatgaggtacacgggccccatgaagccaatccacatggaattcactaacatgttgcaaagaaagcggctacagaccctgatgagcgtcgacgactccatggaaaccatctataatatgctagttgagaccggagagctcgacaacacgtatatcgtatacaccgccgaccacggataccatatcggccaattcggactggtcaaaggaaaaagcatgccctatgaattcgacatccgcgtgcctttttacgtgagaggaccgaatgtggaggcaggttgtctgaatcctcacatcgtgttgaacatcgacttggcaccgacaattctggatattgccggactggacattcctgcagacatggacggaaagtcaattctgaaactgctggacaccgagcgacccgtcaatcgtttccaccttaagaagaaaatgagggtctggcgggatagcttcctggtggagagggggaagctgcttcacaagcgcgacaatgataaggtggatgcccaggaagaaaactttcttcccaagtaccagcgcgtcaaagatttatgccagcgagccgaatatcagaccgcatgcgagcagctcggccagaaatggcagtgtgtggaagacgccacggggaagctcaagctgcataagtgtaaaggtccgatgaggctgggcggctcacgtgccctgtccaacttggtgcctaagtattatggccagggcagcgaggcctgtacctgtgacagcggtgattacaaattgtctctggctggaagacgaaagaagctattcaagaagaagtataaggcaagttacgtccgatctcgcagtatcaggtctgtcgccattgaagttgatggccgggtgtatcacgtgggcctgggcgatgctgctcagccaagaaatttgaccaaacgccactggcctggtgccccggaggaccaggacgataaagatggaggtgacttttcaggaaccggcggccttcccgattactctgcggcgaaccccatcaaagtcactcaccgctgctatatacttgaaaacgatacggtacagtgtgacttggacctgtacaagagccttcaagcatggaaagatcacaaactccatattgatcatgaaatcgagacgttgcagaacaaaattaagaatttgagggaagtcagagggcaccttaagaaaaagcgacctgaagagtgtgattgccacaagataagttaccacactcaacacaaaggtcgtctcaagcatcgtggctctagcctgcacccattcaggaaaggcttacaagagaaggacaaagtgtggcttctgagggagcagaagcggaagaaaaagctacggaaattgctcaaacggctgcaaaacaatgacacgtgctctatgccgggactcacatgttttactcatgacaaccagcactggcagaccgcgcccttctggaccctaggtcctttttgtgcatgtaccagcgcaaataataacacatactggtgcatgcgaaccattaacgaaacacacaactttctgttttgcgaatttgcaaccggattcctggaatactttgatctcaacactgacccttatcagttgatgaatgccgtcaacaccctggatcgcgacgtcctgaaccagcttcatgtgcaactgatggagcttcgaagctgcaaaggctacaagcaatgtaatcccagaacacgcaacatggacttggggttaaaggatgggggctcctacgaacagtataggcagttccaaaggcggaagtggcccgagatgaagcgaccttcctctaaaagcctgggacaactttgggagggatgggagggttag

SEQ ID NO: 136525 - DNA, 2559 bp, synthetic construct
  misc_feature 1..2559: note = Description of Artificial Sequence: Synthetic coding sequence
  source 1..2559: mol_type = other DNA
atgggaccacctagtcttgtattgtgcttattaagtgctacagtgttctcactgctgggcggctctagcgcttttctctctcaccacagacttaaaggacgattccagcgcgatcgtcgaaacatcaggccaaatatcatcttggttttgactgacgaccaagatgtagaactggggtccatgcaagtgatgaacaagacacgcaggataatggagcaggggggggcccatttcattaacgcgtttgtcaccacccccatgtgttgcccatcacggagctctatacttactggaaagtatgtacataatcacaatacatacacaaataatgaaaattgtagcagtccttcctggcaggcgcagcatgagtctcgcacgtttgccgtgtatctgaacagcaccggctaccgcacagctttctttggtaagtatctgaacgaatataatggcagctatgtgcccccaggatggaaagagtgggtgggtcttttgaagaacagtcgtttctacaactatacactgtgcagaaatggggtgaaagagaagcacggcagcgactatagtaaggattatctgacagatctcatcacgaacgacagtgtgagctttttccggacttcaaaaaagatgtatccccaccgccccgtcttgatggtgatatctcacgctgctccccacggacctgaggactccgcaccgcagtactcccgccttttcccaaatgcctcccagcacatcactccatcttacaattatgcccccaaccccgacaagcattggattatgagatacaccgggcctatgaagccaatccatatggagttcacaaatatgttacagaggaaacgcctgcagaccttgatgtcggtagacgattcgatggagacaatctacaatatgctggtagaaaccggagaacttgacaatacttacattgtgtatacggctgaccacggctatcacataggccagttcgggttggttaagggtaagtcgatgccatacgagttcgacatccgcgtccctttctacgtccggggtcctaacgttgaagccggatgtctcaatcctcacatcgtgctaaacatcgatctcgcccctactatcttggacatcgcaggtttggatattcccgcagacatggacggtaaaagtatcctgaagctgctcgatacggagcggcccgtgaatcgctttcacttgaagaaaaagatgcgtgtgtggcgcgatagcttcctggtcgagcgaggcaagcttctccataagagagacaacgacaaggtcgacgcccaggaggaaaatttcttgccaaagtatcaaagggtcaaggacctctgccagcgcgccgaatatcagaccgcatgcgaacaattgggacagaagtggcagtgcgtcgaagacgccacaggaaaactgaagttgcataagtgtaagggtcccatgcgtctgggagggagccgtgctctgtcaaacttagtgcctaaatattacggacaagggtccgaggcctgcacatgcgactcaggcgactataagctgtccctcgccggtcgaagaaagaagctattcaagaagaagtacaaagcttcatacgtccgctctcgctcaatccgaagcgttgcgatcgaggtcgacggacgtgtgtaccatgtgggcttgggcgacgcagcccagcccagaaacttaacaaagaggcattggcctggcgctcctgaggatcaggacgataaggacgggggtgatttcagcgggacgggaggactgcctgactattcagctgcaaatcctattaaggttactcaccgatgctacatccttgaaaacgatactgttcagtgcgacttggacttgtataagtcactacaggcttggaaggatcataagttgcacatcgaccacgaaatagagacactacagaacaaaatcaagaatctaagagaggtgagggggcatctgaaaaaaaagcggcccgaggaatgcgattgccacaagatcagctatcatacccagcataagggacggctgaagcaccgcggaagcagccttcacccattccgtaagggcctccaggagaaagacaaggtttggctgctccgcgaacagaaaaggaaaaagaaactgagaaaactcttgaaacgtcttcagaacaatgatacttgtagtatgccaggtctcacctgtttcactcatgataatcaacattggcagaccgccccattttggacactggggcccttctgcgcctgtacaagcgcaaacaacaacacctattggtgtatgcggacaattaatgagacccataatttcctgttctgcgaattcgccactggattcctggaatattttgaccttaacaccgatccctaccaactcatgaatgccgtgaatacgttggacagagacgtgctgaaccagttgcacgttcaactgatggagctgaggtcgtgtaagggctacaaacagtgcaacccacgaacgaggaatatggacctgggtctgaaggatgggggttcttacgagcagtacagaggacagttgtgggagggctgggagggttag

SEQ ID NO: 136526 - DNA, 870 bp, synthetic construct
  misc_feature 1..870: note = Description of Artificial Sequence: Synthetic coding sequence
  source 1..870: mol_type = other DNA
tttagtggtactggaggcctgcccgactactccgccgctaaccctattaaggtcactcataggtgttacatcttggagaatgacacagtacagtgcgacctggacctctacaaatctctgcaagcctggaaggaccacaagctacacattgaccacgagatagaaaccctacagaataaaatcaagaatctccgggaggtccgcggccatttaaagaaaaagcggcccgaggaatgcgactgccataagatatcataccacacacagcacaagggcagacttaagcatcgggggagcagtctccacccgttcagaaagggcttacaggagaaagataaggtgtggcttctgcgggagcagaagcgtaagaaaaagctgcgcaagttattgaagaggctgcagaataatgacacctgctcgatgcccggactaacctgctttacacacgataaccagcactggcagacggccccattttggaccctcggtccattctgcgcctgcacatccgctaacaacaacacctattggtgcatgaggactattaatgagactcacaattttctcttctgtgaatttgctaccggttttctcgagtacttcgacctaaataccgacccgtaccagctgatgaacgcagtgaatacgcttgatcgtgacgttttaaatcagctgcacgttcagctgatggagctcagatcttgcaaaggatacaaacagtgcaatccaaggacacgaaacatggacctaggactgaaagacgggggatcctacgagcagtacaggcagttccaacgccggaagtggcctgaaatgaagagaccttcgagtaagtcccttggtcaactctgggagggatgggagggttag

SEQ ID NO: 136527 - DNA, 2604 bp, synthetic construct
  misc_feature 1..2604: note = Description of Artificial Sequence: Synthetic coding sequence
  source 1..2604: mol_type = other DNA
atgggcccacccagcttagttctatgtctcctgtcggccactgtcttcagcctgttaggcgggagctctgcatttctgagtcatcatcgtctcaaagggcgttttcagcgtgacagacgcaacatcagaccgaacattatactggtactcactgatgatcaggacgttgaactaggctctatgcaggttatgaacaaaactcggcgcattatggagcaaggcggtgctcattttatcaatgccttcgtcactacccccatgtgctgtcccagcaggtcctccatcctcactggcaaatatgtccataaccacaacacatatacaaataatgaaaactgctccagcccgtcatggcaggcacagcacgaatctcgcacctttgctgtctaccttaacagcaccggctaccgcaccgcattcttcggcaagtacctcaacgagtacaacgggagctatgttcctcccggctggaaggagtgggttggtctccttaagaacagcaggttctataattacaccttatgtcggaatggggtgaaggagaaacacggcagcgattattcgaaggattacctgactgacctgatcacaaacgacagcgtcagcttctttagaacttctaagaagatgtacccacaccggccggtgctaatggttattagtcacgcagctccgcacggccccgaggacagtgctccccaatacagcaggctgtttccgaatgccagtcagcacatcaccccaagctataactacgctcctaatccggacaagcattggatcatgcggtacacgggccccatgaaacctatccacatggagttcactaacatgctgcaacggaagagactgcagactttgatgtcagtcgatgattcaatggaaactatttataacatgttggtggagactggcgagctggataatacttatatcgtctacactgccgaccatggatatcacattggccaatttgggctggtcaagggaaagagcatgccttatgaatttgacattagagttccattttacgtccgaggacctaatgtcgaagctggttgcctgaaccctcacattgtgcttaacatagacctagcccccacgattctggatatcgcagggctggacattccagcagacatggatggcaagtctatactcaaactgttagacaccgaaagaccggtaaacaggttccaccttaagaaaaaaatgcgggtgtggagagactcatttctggtagaacgagggaaacttttgcataaaagggacaatgacaaggtggatgcacaggaagagaacttcctaccaaagtatcaacgcgtgaaggatctctgccagcgtgctgagtatcagacggcatgcgagcagcttggtcagaaatggcaatgtgtcgaagatgctactggaaagctgaagttgcacaaatgcaaaggcccgatgcggctgggcggttctcgtgccctgtccaatttggtcccaaaatactacggacagggctccgaggcttgtacatgcgattcaggcgattataagctttctttggcgggtagacgcaagaagctgtttaagaagaaatacaaagcgtcatacgtgcggtccagatctattaggtctgttgccatcgaggttgatggccgggtttatcatgtcggcctgggagacgccgcacagccccggaacctgaccaagcggcactggccaggagctccagaggatcaggacgataaagacggaggtgacttttcaggcaccggtggcctccccgactatagcgccgctaaccccatcaaagtgacacatagatgttacatcttggaaaatgacacagtgcagtgtgatttggatctctataagagcctccaggcatggaaagaccacaagctgcacatagatcatgagatcgaaactctgcagaataagatcaaaaacctgagagaggtcaggggccacttaaaaaaaaagagacctgaggaatgcgactgtcacaagatcagctatcacacccaacacaaaggaaggttgaaacaccggggaagtagcttacatccgtttcgcaaagggttgcaggagaaggataaagtgtggctgttaagggagcagaagcgtaaaaagaagttacgtaaactcctgaagagactgcagaataatgacacatgcagcatgccgggtttgacgtgcttcactcacgacaatcagcactggcagaccgctccattttggacgttgggacctttctgcgcctgtacctctgccaacaataacacatactggtgtatgcggactattaatgaaactcacaatttcctcttttgtgagttcgccacaggtttcctggagtatttcgacttaaatacagatccctaccagttgatgaatgctgtcaacaccttggatcgggatgtcctgaaccagctgcatgttcagctgatggaactaagatcgtgcaaggggtataagcagtgcaatcctcgcacaaggaatatggacttggacggagggagctatgagcaatataggcagttccagcggcggaagtggccggaaatgaaacgtccgagttctaaatcactgggccagctgtgggaggggtgggagggctag

SEQ ID NO: 136528 - DNA, 2613 bp, synthetic construct
  misc_feature 1..2613: note = Description of Artificial Sequence: Synthetic coding sequence
  source 1..2613: mol_type = other DNA
atgggtccaccttccttagttctgtgtctcctttctgcaacagtgttctcccttctgggtggaagctcagccttcctaagtcatcatagactaaagggcaggtttcagagagaccgcaggaatatccgacccaacatcattcttgtgctgaccgacgaccaggatgtggagctcggttccatgcaagtgatgaacaagacccggcgtattatggagcaaggcggggctcactttatcaacgcttttgtgaccaccccaatgtgctgtccatcccggtccagcattctcactggcaagtacgtgcacaatcacaacacctatactaataacgagaactgttcaagcccttcttggcaggcccagcatgagagtcgtacatttgccgtctatttgaactcaactgggtaccgcaccgccttcttcggtaagtacttgaacgaatacaacgggtcttatgtgccgcccggctggaaggagtgggtggggctgcttaagaactcccgattttataactataccttatgtcgcaacggcgtgaaggagaagcacggttccgactattcgaaggattacttgacagatctgatcacgaacgattctgtgagcttctttagaacatccaaaaaaatgtacccccataggcccgtgttaatggtcatttctcatgccgcacctcatgggcctgaggactccgctccacaatacagccgcttgtttccaaacgcatctcagcatatcacacccagttataactatgctccaaatccggacaagcattggatcatgcggtacacaggacctatgaagccgatccatatggagtttacaaacatgctgcagaggaagcggttacagacactgatgtcggtggatgatagcatggagaccatctacaacatgctggtcgagaccggtgaactagataatacctatattgtgtacaccgctgatcatggatatcatatcggccagtttggcttggtcaagggtaagagcatgccatatgaattcgacataagggtacctttctatgtgagaggccccaacgtggaagccggttgtctcaacccccacatcgtgttgaatatcgaccttgctcctactatactcgacatcgccggcttagacatcccagccgacatggatggtaaatccattttaaaattgttggacaccgagaggcccgttaataggtttcacctcaaaaaaaaaatgagagtgtggcgcgattcctttctcgtggagcggggcaaattattacataagcgggacaacgataaggtggatgcgcaggaggaaaactttctgccaaagtatcagagggtgaaggacctgtgccaacgagccgagtaccagacagcttgcgagcaactgggacagaagtggcagtgcgtggaggatgcaaccggcaagctcaagttgcacaagtgcaaagggcctatgagactcggcgggagccgggcgctgtcgaacctggttcctaagtattacggtcagggatctgaagcttgcacctgcgacagcggtgattataagctgagcctcgccggaagacgtaagaagctgttcaaaaagaagtataaggcgtcttacgtgcgcagtcggagtatcagaagtgtcgccattgaggtcgatggacgcgtgtaccacgtcggtctcggcgacgctgcccagcccaggaacttgactaagaggcactggcccggggcgcccgaggaccaggatgacaaggatgggggggacttttctgggacaggaggcctgccagattactctgctgccaatccaatcaaagttacccaccggtgttatattctggaaaacgacaccgtacagtgcgacctagacctgtataaaagcctccaagcctggaaggaccataaactgcacatcgatcatgaaatagagacgcttcagaacaagatcaaaaatctacgggaagtgagaggtcacctcaagaagaaacggccagaggaatgcgactgccacaaaatttcataccatactcagcacaagggtcggctgaagcacagaggcagtagcctgcacccatttcgcaaaggactccaggagaaggataaggtgtggttattgcgcgagcaaaagcggaagaagaaattgcggaagctgctgaaaagacttcagaataatgatacttgttccatgcccggtctcacatgcttcacccatgataaccagcactggcagacggcccccttttggaccctcggacctttctgcgcctgcaccagcgccaacaataatacctattggtgtatgcgcaccattaatgagacccacaattttcttttttgtgagttcgctaccggcttcctcgagtactttgatctgaatacagacccatatcagttgatgaacgcagttaacacactcgaccgagacgttctgaaccagcttcacgtgcagttgatggagctgcggtcttgtaaggggtacaagcaatgcaaccctcgcacacgcaacatggacttgggactgaaagacggaggatcctatgagcagtaccggcaatttcaaagaaggaagtggcctgagatgaagcggccttcgagcaagtccctcgggcagctctgggagggctgggaggggtag

SEQ ID NO: 136529 - DNA, 1125 bp, synthetic construct
  misc_feature 1..1125: note = Description of Artificial Sequence: Synthetic coding sequence
  source 1..1125: mol_type = other DNA
atggccgccccagctctggggctggtttgcggaaggtgtcccgaactggggctggtcctgctgctccttctgctctctctgctctgcggtgcagccggatcccaggaggcggggactggtgcgggagctggctctctggcgggctcatgcggctgtggtacccctcagaggcctggcgcacacggttcttcggcagctgctcatagatatagtcgcgaggctaatgcaccgggcccagtgccaggggaacggcagctggctcattctaagatggtgcctatccccgccggtgtcttcaccatggggaccgacgatccccagattaagcaagacggcgaggctcctgctcgacgggttacaatcgacgctttctacatggacgcttatgaagtgtctaatactgagtttgaaaaattcgtgaatagcacaggctatctaactgaagccgagaaatttggggactctttcgtgtttgagggaatgttatcagaacaggttaaaacaaatattcagcaagctgtggctgccgctccctggtggctgccagtgaaaggagccaactggaggcacccagaaggcccagattcaactatcctacatcgccccgatcatccagttcttcatgtgtcatggaacgacgccgtcgcttattgcacatgggcaggtaagcggttgcccacggaggccgaatgggaatattcatgcagagggggccttcacaaccgtctgtttccatgggggaacaaactgcagcccaagggtcagcactacgccaacatttggcaaggggagttccccgtcaccaatacgggcgaggatgggtttcagggaaccgctccagtggatgcattccctcctaatgggtacggcctgtacaatatcgtcggcaacgcgtgggagtggacaagcgattggtggactgtgcatcatagtgtggaggagaccctcaaccctaaggggcccccaagcggtaaagatcgggtgaagaaggggggcagttatatgtgtcatcgctcttattgctaccgctaccggtgtgctgccaggtctcagaatacccctgactcctccgcctctaatctaggatttcgctgtgccgctgacagactgcctacaatggactag

SEQ ID NO: 136530 - DNA, 1281 bp, synthetic construct
  misc_feature 1..1281: note = Description of Artificial Sequence: Synthetic coding sequence
  source 1..1281: mol_type = other DNA
atggcagcccctgccctggggctggtgtgtgggaggtgccctgaacttggcttagttcttctgctgctattgttaagcttgctctgtggcgccgcagggagccaggaggctggcacaggagctggagctggctccctggccggcagttgcggttgcggtactccgcagaggcccggagcccatgggtccagtgccgcagcacatcggtactctagggaagccaacgcacccgggccggtccccggggagaggcaactggctcacagcaagatggttcccatcccggccggggtgttcacaatgggaacagacgacccgcagatcaaacaggatggagaggctcctgccagaagagtgacaattgacgcattttatatggatgcctatgaggtctctaataccgagtttgaaaagttcgttaattccacaggctatcttactgaggctgaaaagtttggagactccttcgtgtttgagggtatgctcagtgagcaggtgaaaacaaatattcaacaggctgtcgccgccgcaccctggtggctacctgtgaaaggcgcgaactggcgtcaccccgagggaccggatagcactatcttacacaggcccgatcatccagtcttgcacgtctcttggaatgacgcggtggcttattgcacctgggccgggaaaaggttgcctaccgaggccgaatgggaatatagctgcagaggcggcttacacaataggttgttcccatggggcaacaagctgcagccaaaaggccagcactacgccaatatttggcagggggaatttcccgtgaccaacacgggtgaggacggattccagggtaccgctccagtggatgcattccctcctaacggctatggcctgtacaatatcgtaggcaacgcgtgggaatggacatctgactggtggaccgtgcaccattctgttgaagagaccctcaacccgaaagggccgccctccggaaaagatagggtgaagaaaggcggatcttacatgtgtcataggtcccaagaatattacgatccatattttcaggatgtcgcctcagagatgctccgtcggcataccgctagccgctggaaagctttcagcagtctggagccctgctgcagtatccggaggcatcagcagtatgccgccatcgagagactgacttgcgggaagttcgaactccggtgtgcgtccctacgaaaaatagattgtctgaacacaaatattgcttgcagttattcaatgcggcaggatgggccacgcttgcactgcgtggactag

SEQ ID NO: 136531 - DNA, 1287 bp, synthetic construct
  misc_feature 1..1287: note = Description of Artificial Sequence: Synthetic coding sequence
  source 1..1287: mol_type = other DNA
atggcagctcccgccctcgggcttgtgtgtgggaggtgccctgagctagggctcgttctgctccttttgcttctgtccctgctttgtggcgctgccggttctcaagaggccgggaccggtgcgggagccggatctctggccggatcttgtggttgtgggactccgcaacggcctggggcccatggcagctctgcagcggcacatcgctatagccgggaggccaatgctccgggtcccgtgcccggggaacgccagctagctcactcaaaaatggttcccatacccgcgggggtgttcacgatgggcaccgacgacccccagatcaaacaggacggggaagcgcccgccaggcgagtcaccatagacgcattttatatggatgcttacgaggtgtcaaataccgagtttgagaagtttgtgaacagtacaggatacctgactgaggctgaaaaattcggtgacagtttcgtgtttgaaggcatgctatccgaacaagttaaaacaaatattcaacaggccgtggcggcggctccctggtggctgcctgtgaagggcgcgaattggcgccacccagaaggcccagactccactattctgcaccgcccagatcatcctgtccttcacgtgagctggaatgacgccgtggcctattgcacttgggcgggaaagaggctaccaacagaggctgagtgggaatacagttgcagaggcgggctgcacaacagactgtttccctgggggaataaattacagcccaagggacaacattatgccaacatctggcaaggcgagtttccggtgactaatacaggggaagatggattccagggcaccgccccagtggatgcattccctcccaacggctatggcctgtataatatcgtgggcaatgcctgggagtggacctcagattggtggacagtgcaccatagcgttgaggagacgttgaaccctaaagggcctcccagtgggaaagaccgggttaagaaggggggccttagtaaagcccatcaaagaattagccaggaatactatgacccctactttcaagatgtcgccagcgagatgcttagacggcacactgcaagtagatggaaggcgttttcttcacttgagccctgttgctcgataagacgtcatcaacagtacgccgccattgaaagattgacttgtgggaagtttgaattgcgttgcgcgagcctgcggaagattgactgccttaatactaacatagcgtgtagctatagtatgcggcaggacgggcctaggcttcattgcgtcgactag

SEQ ID NO: 136532 - DNA, 1050 bp, synthetic construct
  misc_feature 1..1050: note = Description of Artificial Sequence: Synthetic coding sequence
  source 1..1050: mol_type = other DNA
atggcggccccggcactgggcttagtttgtggccgctgtcccgagcttggcttggtacttctgctgctccttctttcactgctctgtggcgcagcaggctcccaggaagccgggacaggcgcaggagcaggatccctggctggcagttgcggctgcgggaccccccagaggcccggagcgcatgggagtagcgctgccgcccaccggtactcccgcgaagccaatgcacccggccccgtcccaggagaacggcagcttgctcacagcaaaatggtgccgatccctgctggggtatttacaatggggacagacgatccacaaataaaacaagatggcgaggcaccggcccggcgcgtgactattgacgccttctatatggatgcttacgaagttagtaacaccgagtttgagaaatttgtgaacagcacaggctacctcaccgaagtcgccgctgccccatggtggctgcccgtgaaaggagccaattggcgacaccctgaaggcccagactctaccattttacacaggcctgaccatccggtcctgcatgtttcctggaacgatgcagtcgcctattgtacgtgggccgggaaacgcttacctacagaggcagaatgggaatactcctgcagggggggcctccataaccgactgttcccatgggggaacaaactgcaaccaaaaggtcagcactacgctaatatctggcagggtgaatttcctgtgacgaacactggtgaggatgggtttcagggcacagcccccgtagatgcgttccccccgaacggatatgggctgtacaatattgtcggcaacgcctgggaatggacaagtgattggtggacggtacatcacagtgttgaggaaaccctgaatcctaagggacctccctctggtaaggatagggttaagaaaggcgggtcctatatgtgtcatcgttcctattgctatcgatatcgatgtgctgctcgcagccagaatacacctgattcgagcgcctccaacttaggttttagatgcgctgccgatcgtcttcctactatggattag

SEQ ID NO: 136533 - DNA, 1065 bp, synthetic construct
  misc_feature 1..1065: note = Description of Artificial Sequence: Synthetic coding sequence
  source 1..1065: mol_type = other DNA
atggcagcgcccgcccttgggctggtgtgcgggcgctgcccagagctggggctggtccttctgctgctgttgctcagtctcctgtgtggagcggctggtagccaggaagcgggcacaggcgcgggagccggatcccttgccggttcctgtggatgtggaaccccacagcggccgggggcgcacgggtcctctgctgctgcccaccggtattcacgggaagcaaacgcacctggacccgtcccaggcgagcgacagctagcacactctaaaatggtgcctatccctgccggagtatttaccatgggtaccgacgatccacaaattaagcaagatggagaggcccctgcccgcagggtgacaatcgatgccttctatatggatgcttatgaggtgtctaacactgaattcgaaaaatttgttaacagcactgggtatctaacagaggctgaaaagtttggagacagctttgtgttcgaaggtatgttaagcgagcaagtgaagacgaacatccaacaggcagttgccgctgccccttggtggctgcccgtgaagggtgccaactggaggcaccctgaaggacccgactcgacaattctccaccgacccgaccatccagtcctgcatgtgagctggaacgatgccgtggcctattgcacgtgggctggtaaacgactccctacagaggccgaatgggagtatagctgccgaggtggccttcataatagattgtttccctggggcaataagctccagcctaaaggacaacactacgccaatatttggcagggcgagttcccagtcaccaatacgggggaggatggttttcagggaacggccccagtagacgcctttccccccaatggctacggattatataatattgtgggaaatgcttgggaatggacctcagactggtggaccgttcaccacagcgtggaagagacactcaacccctcttactgttataggtatcgctgcgctgcccgctctcaaaatacgcccgacagcagcgcttcaaatttggggttccgatgtgcggcagaccggctgcctaccatggactag

SEQ ID NO: 136534 - DNA, 1638 bp, synthetic construct
  misc_feature 1..1638: note = Description of Artificial Sequence: Synthetic coding sequence
  source 1..1638: mol_type = other DNA
atgttgctgttacaccgcgcagtcgtcttgcgcctgcaacaggcgtgccgactgaaatctatcccttccaggatctgtatccaggcctgctccaccaatgactcttttcagccacagcggccaagcctcacgttctctggtgataacagctcaacacagggctggagggttatggggacattgcttgggcttggtgccgttttagcttaccaggatcatcgatgtagggccgcgcaggagagcactcacatctatactaaagaggaagtcagttcacatacctccccagaaactggcatctgggtcaccctgggctcagaagttttcgatgtaacagagttcgtggacctgcatccgggcgggccttctaaattaatgctggccgccggcggaccactggagcctttctgggccctctacgcagtccataaccaatcccatgtccgggagttattggcacagtataagattggcgagctcaaccctgaggacaaagtggctccaacagtagagaccagcgacccctacgccgatgacccagtgcgtcatccagcattgaaggttaatagccaacgccctttcaacgcagaacctccccccgagctgctgacagaaaattacataacccctaaccccattttctttacccgaaatcacctgcctgttcctaacctggaccctgacacttacaggttgcacgtcgtcggagctcccgggggccaatcactctccttgtctttagacgacctgcacaatttcccgaggtatgaaataactgttacgcttcagtgtgccggaaaccgaaggtccgagatgacccaggtcaaggaggtgaagggcttggagtggagaactggggcaatcagcacagcgcgctgggccggagctaggttatgcgacgtgctggcccaggccgggcaccagctttgtgaaaccgaagcacatgtctgtttcgagggtctggactctgatccaaccgggactgcttacggtgcaagcattccgctggcccgcgcaatggatccagaggctgaggtgctcctcgcctatgaaatgaacggtcagccattaccccgcgatcatggatttcccgtgcgggtggtggtgccaggggtggttggcgcgcgacacgtgaaatggctcggcagagtctcagtgcagcccgaggagtcttactcccactggcagaggagagattataaagggttctccccctccgtcgattgggaaacagttgactttgatagtgcaccaagtattcaggaactgcctgtgcagagcgccattacagagcctcgagacggagaaaccgtagaatccggagaggtgaccataaaaggctatgcctggagcggcggcgggagagcagttatcagggtggacgtgagcctggatgggggactgacatggcaggtggccaaattggatggcgaagaacagagaccacggaaagcctgggcttggcggctttggcagctaaaggctcccgttccggcgggtcagaaggagctaaatatcgtgtgcaaagcagtcgatgatggttataatgtccagccagatactgtggccccaatctggaatttgcggggcgttctcagcaatgcctggcatagggtgcacgtgtacgtgtccccctag

SEQ ID NO: 136535 - DNA, 1638 bp, synthetic construct
  misc_feature 1..1638: note = Description of Artificial Sequence: Synthetic coding sequence
  source 1..1638: mol_type = other DNA
atgttactgttacaccgtgccgttgtgctgaggctccaacaggcgtgtcgtctgaagtctatacctagtagaatatgcattcaggcatgtagcacgaacgatagttttcagccccagcgcccatcactgaccttttctggtgataattcctctacccaggggtggcgtgttatgggtaccctactcgggctaggcgccgtgttggcataccaggatcataggtgcagagcagcacaggaaagcacccacatttatacaaaagaagaagtgtcgagccacaccagtcctgaaaccggcatatgggtcactctgggatccgaagtgtttgatgttactgagtttgtggacttacatcccggcggtccttcaaagttgatgctggcggccggtggccctctcgaaccattctgggccctgtatgcggtgcacaatcagtcccacgtgcgcgaactgctggcacagtacaagatcggggagctgaatcccgaggacaaggtggccccaactgtggagacgagcgatccatacgcggacgacccggtgcggcacccggctctgaaagtaaacagccagcggccattcaatgccgaaccgcctccagaattgctgacagagaattacataacaccaaacccgattttcttcacacgcaatcatctgcctgtcccaaatcttgatcccgacacataccggttacatgtggtaggtgctccaggcggtcagagcttgagccttagtctggacgatttacataacttcccgaggtatgagataaccgtgacccttcagtgcgccggaaatagaaggtcagagatgacccaggtcaaggaggttaaggggttagagtggaggactggtgccatttctactgcgcggtgggctggcgccaggctctgcgatgttctggctcaagctggccaccagctatgtgaaacagaagcccatgtctgcttcgaaggcttggactccgaccccactggtaccgcttacggagcaagtataccgctggctcgcgccatggaccctgaggcggaagtcctgttggcttacgagatgaatggccaaccgcttcccagggatcatgggttcccagtgagagtcgtggtaccgggagtggtgggggcgcggcacgtgaagtggcttggaagggtttctgttcagcctgaggaaagctactcccattggcaacggcgggattacaagggattctctccctcggtggattgggaaacggtcgattttgacagcgcaccctccatacaggaactacccgtgcaaagtgctatcacggagccacgggacggggaaactgtggagtcgggagaagtcacaattaagggttacgcgtggagcggcggcggcagagcggtgattcgcgtggatgtctcactggatggtggattgacttggcaggtggccaagctggatggcgaggagcagagacccagaaaagcttgggcgtggagactctggcaacttaaagcacctgtgccagccggccaaaaagagctaaatatcgtctgcaaggccgtggacgatggttacaatgtgcagcctgataccgtagcgccaatttggaatcttagaggcgtgctgagcaacgcctggcacagagtgcacgtgtatgtcagcccctag

SEQ ID NO: 136536 - DNA, 1638 bp, synthetic construct
  misc_feature 1..1638: note = Description of Artificial Sequence: Synthetic coding sequence
  source 1..1638: mol_type = other DNA
atgctgctactccatcgagccgttgtgttgaggctccagcaggcatgccgcctcaaatccattccatcacgaatatgtatccaagcttgcagtactaatgatagcttccaacctcagcgaccgagcctgactttttcgggagacaacagtagtacgcagggatggcgtgtgatggggacactcctgggacttggggctgtgctggcgtatcaggaccaccggtgtagagcagcccaggaatccacgcacatttatactaaggaggaggtctcgagtcacacctcaccagaaaccggaatctgggtaacgctggggagtgaggtctttgatgtcaccgaattcgttgacctgcatcccggcggaccatcaaaactcatgctggccgctggtgggccactggaaccgttctgggctctttatgctgtgcacaatcaaagccacgtaagggaattgctcgcccaatacaaaattggcgagctgaaccccgaggacaaagttgccccaaccgttgagactagtgatccctatgcagacgatccagttagacacccggcactcaaggtgaatagtcagagaccatttaacgcagaaccaccacccgaactgttgacagagaattacataacacctaatcccatcttcttcactcgtaatcatttgccggtgcctaacctcgaccccgatacttatcgactccacgtggttggggctcccggcgggcagtccctcagcttatcactggatgacctgcacaattttcctcgatatgagataacggtaacacttcagtgcgccggaaacaggcgatccgaaatgacccaagtgaaagaggtaaaggggctcgaatggaggaccggcgccatctccactgcccgctgggctggagccaggctgtgcgacgttttggcacaggctgggcaccagctttgtgaaaccgaggctcatgtctgtttcgaggggctggattccgatcctaccggcacagcgtacggggcatcaattcctctggctagggccatggaccccgaagcggaggtgctcctcgcgtatgagatgaacggccagcctttgcccagagaccacggttttccggtgagggtagtcgtgccaggagtggtcggggccaggcatgtcaagtggctgggtagagtttccgttcagccagaagaatcctactcacactggcagaggcgagactacaaaggattctctccctcagttgattgggagacggtcgacttcgatagtgctccctctatccaagaactgccggtgcagagcgccatcactgagcctcgcgatggcgagaccgtcgagtccggagaggtgacaatcaaaggttatgcctggtccggcggagggagggctgtcatcagagtagatgttagcctggacggcggactaacttggcaagtggctaagcttgatggcgaggaacagagacctcggaaggcgtgggcatggcgactgtggcagcttaaagcgcctgtcccagcgggccaaaaagagctaaacatagtgtgtaaggcggtcgacgatggatataatgtgcagcctgacaccgtcgcgcctatctggaaccttagaggcgtcctgagtaacgcgtggcacagggtacacgtgtatgtgtcaccatag

SEQ ID NO: 136537 - DNA, 1638 bp, synthetic construct
  misc_feature 1..1638: note = Description of Artificial Sequence: Synthetic coding sequence
  source 1..1638: mol_type = other DNA
atgctgctcttgcatcgcgctgttgtgctgaggctacaacaggcgtgtcggttgaagagtatcccatccaggatctgcattcaggcatgctccaccaatgattcattccagccgcagcggccatcactgacctttagcggagataactctagcacacagggatggagggtcatgggaaccctgttggggctcggggccgtgctggcctaccaggaccaccgttgccgggctgcccaggaaagtactcacatttacaccaaggaggaagtgagcagtcacacgtcccctgaaactggcatttgggttacacttggctctgaggttttcgatgtcacagaattcgtcgatcttcatccaggaggaccatcaaaactgatgttggccgcgggaggcccgctggagcccttttgggcgctgtacgcagtgcataaccagtctcacgttcgcgaattgctggctcaatacaagatcggggagctgaacccagaggataaggtggctcctacagtggaaactagcgatccatatgccgatgatcccgtgagacatcctgctctgaaggtgaatagccagcgtcccttcaatgccgagcctccgccggaactgctaacagagaattatatcacccctaatccaatttttttcacaaggaatcacttgcctgtgcccaatttagaccccgacacctacagactccacgtcgtgggagcacccggcggccagtcattgtctctgagcctggatgatctacacaacttcccacgatatgaaattaccgtgacactccagtgcgccggtaatcgtcgaagtgaaatgactcaagttaaggaggtgaaaggattagagtggcgtaccggcgctatctcaaccgcccgatgggccggggcccgcctctgtgatgtgttagcgcaagccggacatcagctgtgtgagaccgaggcacatgtgtgctttgaaggtctggatagcgatccaacagggacagcatacggtgcgtcgatccccttggcccgggcaatggatccagaagccgaggttctcttagcctacgagatgaacggccagcctctcccaagggatcatggttttccggtcagagtggtggtgccaggggttgtgggagcccgacacgtcaagtggctcggccgcgtgtccgtccagccagaggagtcttatagccactggcagcgtcgtgactacaaaggttttagtccaagtgtggactgggagaccgtggatttcgacagcgcaccttccattcaggagctgcccgtgcagtctgccattacggaaccccgggatggcgaaacagttgaatcaggagaggttacaatcaaagggtacgcctggtctggtgggggccgggctgtgattagggttgatgtgtctctggacggagggttaacttggcaggttgctaaactggacggtgaagagcagcggccacgcaaggcatgggcgtggcgcttatggcagcttaaagcacccgtgcccgctgggcagaaagagctaaacattgtctgcaaagccgtcgatgatggttacaacgtccagcctgacaccgtggcaccgatttggaatctccgcggcgtcctgtcaaatgcctggcaccgggtccatgtgtacgtgtcaccctag

SEQ ID NO: 136538 - DNA, 489 bp, synthetic construct
  misc_feature 1..489: note = Description of Artificial Sequence: Synthetic coding sequence
  source 1..489: mol_type = other DNA
atgctccttctccaccgcgcagtcgtgctgaggctgcagcaggcatgccgtctgaagtcaattcctagcaggatctgtatacaggcttgttcaaccaacgactcctttcagccacagagacccagcctgaccttcagcggagacaatagctcgactcaaggatggagggtgatggggactctgttaggcttgggggcagtgctagcataccaggatcacaggtgtagggccgcccaggaaagcactcacatctacacaaaagaagaggtatcttcacatacatctcctgaaacaggtatttgggttacgctgggctctgaggtgttcgatgttacagagttcgtggacttgcaccccggtggcccctcaaaacttatgctggcggctggtgggcctctggaaccgttctgggcactgtacgctgtgcataatcaatcccacgttcgcgaactgctcgcccagtacaagattggggagcttaatccatag

SEQ ID NO: 136539 - DNA, 132 bp, synthetic construct
  misc_feature 1..132: note = Description of Artificial Sequence: Synthetic coding sequence
  source 1..132: mol_type = other DNA
atgcttcttctccacagggcggtagttctaaggcttcagcaggcctgtcgccttaagagcatcccttctaggatttgcatccaggcatgttctactaatgatagtttccagccacagaggccctcactttag

SEQ ID NO: 136540 - DNA, 1638 bp, synthetic construct
  misc_feature 1..1638: note = Description of Artificial Sequence: Synthetic coding sequence
  source 1..1638: mol_type = other DNA
atgctgttactccatcgggccgtggttctgaggttacagcaggcttgcagattgaagtccattcccagtcggatatgcatccaggcttgttcaaccaacgatagctttcagccccagaggcccagtttgacattctctggtgataattccagcacccagggatggcgcgtaatgggaactctgctcggtctgggggcagtgctggcctatcaggaccatcgatgcagagccgctcaagagtcaactcatatatacaccaaggaagaggtctccagtcacacgagtccagagacaggcatttgggtgacactcggttctgaagtctttgacgtgacagagttcgtcgatctccaccccggcggcccctctaagctgatgttggccgcagggggaccactggagccattttgggctttgtacgctgtgcacaaccagtcgcacgttcgcgagttactggcacagtataaaataggtgagctgaatccagaggacaaagttgcaccaactgtggagacttctgacccctatgcggatgatcccgtcaggcaccccgctctgaaagtaaattctcagcgcccgtttaatgctgaaccccccccagaactattaaccgaaaactatatcactcccaatcctatctttttcacaaggaatcaccttcctgttcccaatttggatccagatacatacagactccatgtcgtgggcgcccccgggggccagtcgctgtctttgtcactagatgatctacataattttccgcgatacgaaatcaccgttacactgcagtgcgcgggtaatcgcagatccgagatgacacaggtgaaagaggtgaagggtctggagtggagaacgggagctatctccacagccaggtgggcgggggcacgcctctgtgatgtgctcgcacaggctggtcaccaactgtgtgaaaccgaagcacatgtgtgctttgaaggcctggatagtgacccaaccgggactgcatacggcgcatccatcccccttgctagagccatggatccagaggctgaggtgcttctggcctacgagatgaacggtcaaccgttgcctcgtgatcatgggtttcccgtgcgcgtggtggtgcctggggtagtgggtgcaaggcacgtgaaatggctcggacgagtctccgtccagccagaggaatcttattctcactggcaaaggagggactacaaaggattcagcccttcagtcgactgggagactgtggattttgactcagcccctagcattcaggagctgcccgttcagtctgcgattaccgagccaagggatggagagacagtggagagtggagaagtaacgataaagggttacgcctggtccgggggtgggcgtgcggttatacgggtcgacgtttccctcgacggaggcctgacgtggcaggtggcgaagctcgacggggaggagcagaggccccggaaagcctgggcttggcggttgtggcaactgaaagcgccagtgcccgctggccagaaggagctcaatatcgtctgtaaggcagtggatgatggctataacgtacagcccgataccgtggcaccaatttggaacttgcgcggtgttttgtctaatgcatggcacagggtgcatgtgtacgtctccccatag

SEQ ID NO: 136541 - DNA, 1638 bp, synthetic construct
  misc_feature 1..1638: note = Description of Artificial Sequence: Synthetic coding sequence
  source 1..1638: mol_type = other DNA
atgctgctgctccatcgggcagtagtgttgcgcttgcagcaagcatgtcggctcaagagcatcccttctcgcatctgtatccaggcgtgttcaaccaatgatagttttcagccacagcgacccagcctgacttttagcggggacaactcaagtacccaaggttggcgcgtaatgggtaccctgctggggctgggagctgtgctcgcgtaccaggaccacagatgcagggccgctcaagaatctactcacatttatacgaaggaagaggtgagcagccacaccagtcctgagactggaatttgggtgactctggggtctgaggtcttcgacgttacagaattcgtggatctccatccgggcggacccagtaagttaatgctggccgccggtgggcccctggagcccttctgggccctttatgcagtgcacaaccagtcccacgtccgtgagttgctcgcgcaatacaaaatcggcgaattgaacccagaggataaggtggcaccgacagtagaaacatcggacccttacgctgacgaccctgtgagacatcccgctctcaaggtcaacagccaacgcccatttaacgccgaaccacctcctgagctactcacggagaattatataacacctaatcccatctttttcacccgaaatcacttacctgtgccaaatctggaccctgatacttaccggctccatgtggtgggtgcccctggtgggcaaagtctctctttaagtctggacgacctgcacaacttccctcgttacgagatcacagtgaccctgcagtgtgcggggaatcgaaggagtgaaatgactcaggtgaaggaggttaaaggtttggagtggcggactggggcgatctccactgccaggtgggcaggcgctcgcctgtgcgacgtgctggcccaggcgggtcatcaactttgtgaaacggaggcacatgtgtgctttgaagggctagactccgatccaactggcacagcttacggagccagtatcccacttgccagggcaatggatccagaagctgaagtactattggcatacgaaatgaacggacaacccctcccccgagaccacggattccctgtgagggtggtggttcccggagtggtcggtgcgaggcatgttaagtggctgggacgagtcagcgtccagcccgaggaatcctatagccactggcagcggcgcgattacaagggattctctccttccgtggattgggagacagtcgacttcgattccgccccttccatccaggagctgcccgtgcagagtgccattactgagcctagagacggggagactgtggaaagtggcgaggtgactatcaaaggctatgcttggagcggaggaggcagggcagtgataagagtagacgtatccctggacggggggctcacctggcaggtcgccaagctcgatggtgaggaacaaagaccacggaaggcatgggcatggaggctttggcagctgaaggcaccagtcccagctggacagaaggaactgaacattgtttgcaaggccgtggacgacgggtataacgtgcagccggataccgttgccccgatctggaatcttcgaggagtgctcagtaacgcctggcaccgggtacatgtgtatgtttcaccctag

SEQ ID NO: 136542 - DNA, 366 bp, synthetic construct
  misc_feature 1..366: note = Description of Artificial Sequence: Synthetic coding sequence
  source 1..366: mol_type = other DNA
atgctcctgctgcaccgagcagttgtgctcaggctgcaacaagcctgcaggctgaaatcaatcccctcgagaatctgtattcaggcctgctctacaaacgacagcttccagccacaacggccaagcctgacattctccggcgacaattcctcaacacagggatggcgggttatggggaccctgctgggactgggcgctgtgctcgcctaccaagaccaccgttgtagggcagcccaagagagtacccacatttatacaaaggaagaggtatcctcccacactagccccgaaactgggatatgggtgaccttgggctccgaagtattcgacgtgaccgagttcgtcgacctgcaccctggtggttag

SEQ ID NO: 136543 - DNA, 783 bp, synthetic construct
  misc_feature 1..783: note = Description of Artificial Sequence: Synthetic coding sequence
  source 1..783: mol_type = other DNA
atggcggaatccgaagccgaaacacccagtactcctggcgagtttgagagcaaatacttcgagtttcacggcgtgcgcctgccacccttctgtcgtggcaaaatggaggagatcgccaatttcccagtgcgcccttccgatgtctggatcgttacatacccgaaatccggaacctctctcctccaggaggtcgtttatctcgtttcacagggcgcagatcccgatgaaattgggctcatgaatattgatgaacagttgccagttctggagtacccccaacccggtctcgacattattaaagagctgacttcacccagactcataaaaagccacttaccatacaggttcctgccttcagatctgcataatggtgattccaaggttatttatatggccagaaatccaaaggatctcgttgtctcatattatcagttccaccggtccctgcgaacgatgtcctatagagggactttccaagaattctgccggaggttcatgaacgacaaactgggttacggtagttggttcgaacacgtgcaggaattctgggaacatcgaatggactctaatgtgctttttctgaaatatgaggatatgcatcgagatctcgtgaccatggtcgaacagttggctaggtttcttggtgtgtcgtgtgataaggctcagctcgaggccctgacggaacactgccatcagctcgtcgaccagtgctgtaatgctgaagcattgccggtgggccgtgcccattgtgtgttcgcccggaaaattttcctctcttggtag

SEQ ID NO: 136544 - DNA, 855 bp, synthetic construct
  misc_feature 1..855: note = Description of Artificial Sequence: Synthetic coding sequence
  source 1..855: mol_type = other DNA
atggctgagagcgaggccgagacgccatccacacctggcgagttcgagagtaaatactttgagttccatggcgtgagactaccgcctttttgcaggggcaagatggaagaaattgccaatttccctgtcaggccttccgatgtttggattgtcacttaccctaagagcggcacctcattgctgcaagaagtggtatatctcgtatcgcagggagccgatccagacgagatcggattaatgaacattgacgaacaactgcctgtgttggaatatccacagcccggccttgatatcattaaagaactcacctctccccgtctgataaagtctcatctgccataccgcttcctccccagtgacctgcacaatggggatagcaaagttatttatatggcccgaaatcctaaagacctggtggtcagctattatcaattccaccgctccctgcgcaccatgtcttaccgtggaacattccaagaattttgccggcgattcatgaatgacaaattaggttatgggtcgtggttcgagcatgttcaagagttttgggagcatcgaatggacagtaatgtgctgttcctgaaatacgaagatatgcatagagatctcgtaactatggtggagcagctggctcggtttctcggcgtttcatgcgacaaagcccagctagaggccctgaccgaacattgtcaccaactggtagaccagtgttgtaacgccgaggccctcccagtgggccgtgggcgcgtcggtctgtggaaggacatttttacagtaagcatgaacgagaaatttgatctcgtatacaagcagaaaatgggaaaatgcgacctcacctttgatttctacctttag

SEQ ID NO: 136545 - DNA, 516 bp, synthetic construct
  misc_feature 1..516: note = Description of Artificial Sequence: Synthetic coding sequence
  source 1..516: mol_type = other DNA
atggcagaaagcgaagctgaaaccccctctaccccgggagaatttgaatcgaagtactttgagttccatggggttcgcttgcctccattctgtagaggcaaaatggaagagattgcaaacttcccagtgcgaccatcagatgtgtggatcgtgacatatcctaaatctgttgggtacggatcatggtttgagcacgtgcaggagttctgggaacaccgtatggactcgaatgtgctatttttgaagtatgaagatatgcatcgagacctcgtcaccatggtcgagcagttggcaaggttcttgggagtctcttgtgataaggcccagttggaggcgctaaccgagcattgtcatcaactcgtggaccagtgttgtaatgctgaggccctgcctgttgggcgcggacgcgtcggtttgtggaaggacatttttacggtttctatgaatgagaagtttgatctggtgtataagcaaaaaatgggcaagtgtgacttgacttttgacttttatctctag

SEQ ID NO: 136546 - DNA, 171 bp, synthetic construct
  misc_feature 1..171: note = Description of Artificial Sequence: Synthetic coding sequence
  source 1..171: mol_type = other DNA
atgctggctaagctgctatgcgatcaggtggtaggcgcccctatcgccgtgtccgccttttacgccgggatgtcgatactccaggggaaggacgatatttttctagacctgaaacaaaagttttggaatacctacatgcaaacccaatcctggctttggcgctccctgtag

SEQ ID NO: 136547 - DNA, 888 bp, synthetic construct
  misc_feature 1..888: note = Description of Artificial Sequence: Synthetic coding sequence
  source 1..888: mol_type = other DNA
atggaactcattcaggacacatcacggcctcccctggaatatgtcaagggcgtaccacttattaagtatttcgcagaagctctcgggcccttgcagagcttccaggccaggcctgatgatctgctcatttccacctaccctaagagcgggacgacttgggtgagtcagatcttggatatgatctaccagggcggagatttggaaaaatgccatcgagccccaatcttcatgcgcgtgcccttcctggagttcaaggcaccgggaattcccagcgggatggaaacactgaaggatacaccagcccctaggctccttaagacccacctaccactggcactgctgcctcaaacactgctggatcagaaggtgaaggtggtgtatgtcgctcggaatgctaaagatgttgccgtgagctattatcatttttaccatatggcaaaggtacaccccgagccgggaacatgggatagctttttggaaaagttcatggttggagaggtgagctatgggtcatggtatcagcatgttcaggaatggtgggaattatctcgaactcaccccgtgctgtacttgttttacgaggatatgaaggaaaatcccaaaagagagattcagaaaatactggagtttgttggaagatctttgcccgaggagaccgtcgattttgtcgtccagcatacatctttcaaagaaatgaaaaaaaacccaatgacaaattataccacagtgccacaagaattcatggaccactcaatttcccccttcatgagaaagggcatggccggcgattggaagaccactttcaccgtcgcgcaaaacgagcgatttgatgccgattacgctgaaaaaatggcgggctgttcactttcgtttcggtccgagttgtag

SEQ ID NO: 136548 - DNA, 888 bp, synthetic construct
  misc_feature 1..888: note = Description of Artificial Sequence: Synthetic coding sequence
  source 1..888: mol_type = other DNA
atggagctcattcaggacacatcacgccccccactagagtacgtgaaaggtgttcccctaatcaaatacttcgccgaggccttagggcccctccagtcgttccaggcacgtccagatgatctgttgataagtacctacccaaagtctggtaccacctgggttagccagattcttgacatgatctatcagggtggagacctagaaaagtgtcaccgtgctcccatcttcatgagagtcccttttctggaattcaaagccccgggcattcccagtggcatggagaccctgaaggacaccccggcccccaggttgctgaaaacacacctgcctctagcactactcccgcagaccctcctcgaccagaaggtgaaggtggtctatgtggcacggaacgccaaggacgtggccgtgtcttactaccacttctatcatatggctaaggtgcacccagaacctgggacctgggactcttttttggaaaagtttatggtgggtgaagtatcttacggaagctggtatcaacatgtgcaggagtggtgggaactttctcgtactcacccagtcctctacctgttctacgaggatatgaaagagaatcccaagagggaaattcagaagatcctcgagtttgttggtagatccctgcctgaggagacggtggatttcgtagtgcaacacacttcgttcaaagaaatgaagaagaacccaatgaccaactatacaaccgtccctcaagaatttatggaccacagcatctcacccttcatgcgcaagggaatggccggcgattggaaaacaaccttcacagtggcacagaacgaacgctttgatgcagactacgctgagaagatggccggctgttcgttatcatttcgctccgagttatag

SEQ ID NO: 136549 - DNA, 654 bp, synthetic construct
  misc_feature 1..654: note = Description of Artificial Sequence: Synthetic coding sequence
  source 1..654: mol_type = other DNA
atgctggccaaactcctctgcgaccaagtcgtgggcgctccaatcgcagtgagtgctttctatgccggcatgtcaatcctgcagggcaaagatgatatcttcctggacttgaaacagaaattctggaacacgtatatggtcgtgtacgttgctaggaatgctaaagatgtagccgtctcttactaccacttctatcacatggccaaggttcaccccgaacccggaacatgggatagctttctggaaaagtttatggttggggaggtcagctatggttcatggtaccagcatgtccaggagtggtgggaattgagccgcacccacccggtcctgtatctgttctatgaggacatgaaggagaaccctaagagggagatacagaaaatcctggagttcgttggtcgctccctcccggaagagactgttgactttgtggtgcagcacactagctttaaggagatgaagaaaaatcccatgacaaattacaccaccgttccccaggaatttatggaccattcaatctctccttttatgcgtaaaggtatggcaggcgactggaagacaactttcacagttgcccaaaatgagcggttcgatgccgactatgcagagaagatggcaggttgctctttatctttcaggtccgaactgtag

SEQ ID NO: 136550 - DNA, 888 bp, synthetic construct
  misc_feature 1..888: note = Description of Artificial Sequence: Synthetic coding sequence
  source 1..888: mol_type = other DNA
atggaattgatccaggacacctcccggcctcctttagagtatgtaaaaggcgttccactgatcaagtactttgcagaagccctgggcccccttcagtctttccaggcccggccagacgacttgctgatcagcacttaccccaaatccggaacgacatgggtgtcccaaatcctggacatgatttaccagggaggtgacctggagaaatgccacagggcacccatattcatgagggtgccctttctggagtttaaagcccctggaatcccatctggcatggaaacccttaaagacactccagccccccgcctgctcaaaacacaccttcccctcgccctgcttccacagacgctgctggaccagaaggtgaaggtcgtctacgttgcccgtaacgccaaggatgtagctgtaagctactatcatttctatcatatggctaaagtccatcccgaaccgggcacatgggattcctttttggagaaatttatggtgggcgaggtgtcttacggatcctggtatcagcatgtgcaggagtggtgggagctatctcgcactcaccccgtgctctacctattctatgaagacatgaaagagaatccaaagagggaaatccagaaaattctagagttcgttgggaggtctctccctgaagaaaccgtggactttgtggtgcagcacacaagcttcaaggaaatgaagaaaaatccaatgactaattacactaccgtgccacaggagtttatggaccactctattagcccatttatgagaaaaggtatggctggggattggaagacgactttcaccgtcgcccagaacgagcgttttgacgctgactatgctgagaagatggcagggtgttctctttcattccggagcgagctctag

SEQ ID NO: 136551 - DNA, 888 bp, synthetic construct
  misc_feature 1..888: note = Description of Artificial Sequence: Synthetic coding sequence
  source 1..888: mol_type = other DNA
atggaattgatccaagatacaagcagacctcctttagagtatgtgaagggggttcctctgattaaatacttcgctgaagcactggggccgctgcagtcctttcaggcacgcccagacgaccttctgatttccacctatcctaaatcgggaaccacatgggtatcacagattcttgatatgatctaccagggcggggatctcgagaagtgccatcgcgcgcctatcttcatgcgcgtgcccttcctggagttcaaggcccccggcattcccagcggcatggagacactcaaagatacgcctgcacctaggctactcaagactcatctcccccttgctctgcttccacagaccctcttagaccaaaaagttaaggttgtctacgtggcgcgcaatgctaaagatgtagccgtcagctactatcacttttaccacatggccaaagtccatcccgagcctggaacatgggatagctttctcgaaaaattcatggtgggagaagtctcatatggcagttggtaccagcacgttcaagaatggtgggagttgtcccgaactcatccagttctttatctattctacgaggacatgaaggagaaccctaagagggagatccagaagattctcgaatttgttggaagatccctgccggaggagaccgttgattttgtcgtccagcatacaagctttaaggagatgaagaaaaatcctatgacaaactacaccaccgtgccgcaagaatttatggatcacagcatctcgcctttcatgagaaaagggatggccggagactggaagacgacctttaccgtggctcaaaacgagagatttgatgctgactatgcagagaagatggcaggctgcagtctgtctttccgttccgaactatag

SEQ ID NO: 136552 - DNA, 888 bp, synthetic construct
  misc_feature 1..888: note = Description of Artificial Sequence: Synthetic coding sequence
  source 1..888: mol_type = other DNA
atggaactgatccaagatatttctagaccacccctcgaatacgtgaagggtgtgccactcattaaatatttcgccgaggcgctggggccattgcaaagctttcaggcccgcccagatgatctgttaatctctacctaccccaaaagtggtacaacttgggtttcacaaatcctagacatgatctaccagggcggggatctcgagaaatgccacagggcaccaatattcatgagagtgcccttcctcgaattcaaggtgccaggaattccttctgggatggaaaccctgaaaaacacaccggccccccgcctgctgaaaacacacttacccctggccctcctgcctcagacactcttggaccagaaagttaaagtcgtgtatgtggcccgaaacgccaaagacgttgcagtctcttactaccatttctatcatatggcaaaggtctacccgcacccaggaacttgggagagcttcctagagaaattcatggccggtgaggtctcatacgggagttggtaccagcacgttcaggagtggtgggaactgtcccgaacacatcccgtactgtacctcttctacgaagatatgaaggaaaaccctaagcgggagatccagaagattctggaattcgtcggaagaagcctgccagaagaaacggtggacctgatggtggagcacacatcttttaaagaaatgaagaagaaccctatgacaaactacacgacagtgcgacgggagtttatggatcactcaatctctccattcatgcgcaagggtatggcaggcgactggaagactacgttcaccgtggcccaaaacgaacggtttgacgcagattatgcgaaaaagatggctgggtgcagcctctctttccgctccgaactgtag

SEQ ID NO: 136553 - DNA, 888 bp, synthetic construct
  misc_feature 1..888: note = Description of Artificial Sequence: Synthetic coding sequence
  source 1..888: mol_type = other DNA
atggaactgatacaagatatctccagaccgccgcttgaatacgtcaaaggagttccactgatcaagtactttgcagaagccctggggccactacagtcctttcaagcccgcccagatgatttgcttatcagcacctacccgaagtctgggacaacctgggtgagccaaatacttgacatgatctaccaaggtggagatctagaaaagtgccatcgggctcctatattcatgcgagtgccatttctcgagttcaaggtccccgggattccatctggaatggaaacccttaagaatactccagcgccacggctgctgaaaacacacctccccctggctctgctgccacagactttgctcgaccagaaggtcaaagtcgtctatgtagccagaaacgctaaagatgtggctgtgtcctactaccacttctatcatatggccaaagtttatccccaccctggaacctgggaatccttcttggagaaattcatggccggggaggtgtcatacggctcttggtaccagcacgtccaggagtggtgggagctcagtcggacccatcccgtgctctatctgttttacgaggacatgaaagaaaaccccaaacgcgaaatacagaagatcctggagttcgtgggccgttccctgcccgaagaaacagtggatctgatggtcgagcacacttcatttaaagagatgaaaaaaaaccccatgacgaattacaccactgtgcggcgagagtttatggatcattctatctccccattcatgagaaaaggcatggcaggggattggaaaactacatttaccgttgcccagaacgaaagattcgatgcggactacgccaaaaagatggcaggctgcagcttatccttcagaagtgaactctag

SEQ ID NO: 136554 - DNA, 579 bp, synthetic construct
  misc_feature 1..579: note = Description of Artificial Sequence: Synthetic coding sequence
  source 1..579: mol_type = other DNA
atggagctgatccaagacatcagtaggcctccactcgagtacgtaaaaggcgtcccgcttatcaaatactttgccgaggccctcggcccactgcaaagtttccaagcgaggccagacgacctgttgatctcaacatacccaaagagcggcacaacttgggtgagtcagattcttgacatgatttatcagggcggtgacttggagaagtgccaccgcgctcccatctttatgagagtcccatttctagagtttaaggttcctggtatcccctctgggatggagacccttaagaatacacctgctccacggctgctgaagacacacctgccacttgccctcctgccacagacgctgctggaccagaaggtgaaagtggtttatgtggcaagaaacgcgaaggatgttgccgtgagttactatcatttttatcacatggctaaggtgtacccccaccccgggacctgggagtcatttctggagaaattcatggccggcgaagtgtcttatggaagctggtatcagcacgtgcaggaatggtgggagctctcccggacccaccctgtgctgtatctgttttag

SEQ ID NO: 136555 - DNA, 891 bp, synthetic construct
  misc_feature 1..891: note = Description of Artificial Sequence: Synthetic coding sequence
  source 1..891: mol_type = other DNA
atggcccttacctctgatctgggaaaacagataaaactgaaggaagtagaaggaacacttctccaaccagccacagtggacaattggtcacagatccagtcttttgaggctaaacctgatgacctgttgatctgcacctaccctaaggctggcacaacttggatacaagagatcgtcgatatgattgagcaaaatggagacgttgaaaaatgccagagagctatcattcagcacagacacccattcatcgagtgggcccgccctcctcagcccagtggagtggagaaagcgaaagccatgccatctccaagaattctgaagacccatctctccacacaactcctgcctccctcgttttgggagaataattgtaaatttctgtatgtggctagaaatgccaaggactgcatggtctcctattaccacttccaaaggatgaaccatatgcttcctgatccagggacctgggaagagtattttgagacatttatcaacggaaaggttgtttggggcagttggtttgaccacgttaagggatggtgggagatgaaggacaggcatcagatcctgtttctgttctacgaggacatcaaaagggaccctaaacatgagattaggaaggtaatgcaattcatgggcaagaaagtggatgagactgtattagataagatcgtgcaagaaacttctttcgagaaaatgaaggagaaccccatgaccaaccggtcgacggtgtccaaatccatactggatcagagcatcagctctttcatgcgcaaagggactgtcggagactggaagaaccactttaccgtcgcacaaaacgaacgatttgatgagatatatagacgcaagatggaaggcacaagcattaacttctgtatggaactgtag

SEQ ID NO: 136556 - DNA, 924 bp, synthetic construct
  misc_feature 1..924: note = Description of Artificial Sequence: Synthetic coding sequence
  source 1..924: mol_type = other DNA
atggcactgacctcagatctgggcaagcagattaaattgaaagaggtggaaggcactttgcttcagccggctaccgtcgataattggagtcagattcaaagttttgaggccaagcccgacgatctgctgatttgcacctacccaaaggctggcacgacctggatccaggaaatcgtggacatgattgaacaaaacggcgacgtggagaagtgccagcgtgctatcatacagcaccgtcacccgttcatcgagtgggctcgcccgcctcaaccaagtgagaccggatttcatcatgttgcgcaggcgggcctgaaactgctctcttccagtaacccacccgcaagtacaagccagtccgctaagattactgatctgctccctccctccttctgggagaacaactgcaagtttctctatgtagccaggaacgcaaaagactgtatggtatcctactaccattttcagcgaatgaaccacatgctgccagaccccggaacatgggaagaatacttcgaaacttttatcaatgggaaggtcgtctggggctcatggttcgaccatgtcaaagggtggtgggaaatgaaagatcgccatcagatcctgttcctcttctacgaggatataaagcgcgatcctaagcatgagatcagaaaggttatgcagtttatgggaaaaaaagtggacgagactgtgctagacaaaattgtgcaagagaccagcttcgagaaaatgaaggagaatccaatgacgaacaggagtaccgtcagtaaatctatcctggaccagagcatctccagctttatgcgtaaaggcaccgttggagactggaagaatcatttcactgtggcgcagaatgagcgctttgacgaaatttaccgccgcaaaatggaagggactagcataaacttttgtatggagctgtag

SEQ ID NO: 136557 - DNA, 933 bp, synthetic construct
  misc_feature 1..933: note = Description of Artificial Sequence: Synthetic coding sequence
  source 1..933: mol_type = other DNA
atggccctgacatcagatctggggaagcagattaaactgaaggaagtggagggaaccctgctgcagcctgctactgtcgacaactggtcacagatccaatcctttgaagccaaaccggacgatctgcttatatgcacctacccgaaagccggcacaacttggattcaggaaatcgtggacatgatcgagcagaatggggacgtggaaaaatgtcagagggcaatcattcagcatcggcaccctttcattgagtgggccaggccaccacagccaagcgtcctcgtgctccgccgttgttttctgctgagttattttaagggcgtggagaaagccaaggccatgccatctccccggatactcaagacgcatctttctacacagctcctgcctccctcattttgggaaaataattgtaaattcctgtatgtcgctcgaaatgccaaggactgtatggtttcttactaccatttccagagaatgaaccatatgctacccgaccccggcacatgggaggagtacttcgagacttttattaacggtaaggtggtgtggggttcctggttcgatcacgtcaagggatggtgggagatgaaggatagacaccagatccttttcctgttctacgaagacatcaaaagagatccaaaacatgaaatcaggaaggtcatgcaatttatgggcaaaaaagtggacgagaccgtcctcgacaaaatcgtccaggagacctcttttgaaaaaatgaaagagaacccaatgaccaataggtcaactgtgtctaaatctatacttgatcagtctataagtagcttcatgagaaaaggaaccgtgggggattggaaaaatcatttcactgtagctcaaaacgaacgattcgatgaaatttatagaaggaaaatggaagggacctcaattaacttttgtatggagctgtag

SEQ ID NO: 136558 - DNA, 639 bp, synthetic construct
  misc_feature 1..639: note = Description of Artificial Sequence: Synthetic coding sequence
  source 1..639: mol_type = other DNA
atggggcccccatccgcctctccgcaccgtgagtgcattccatggcaggggctgctgcttaccgcatcactgttgaacttttggaatccccccactacagcgaaactgaccatagagtctatgccactttctgtggctgaagggaaagaagtattgcttttagtccacaatctcccacagcacttattcgggtactcgtggtataaaggcgaaagagtggacgggaactccttgatcgtcgggtacgtgatcggaactcaacaggctacacctggtgccgcgtactccggccgcgaaacaatctacacaaatgccagcctcttgatacagaatgtgacacagaacgatatcggcttttatacactgcaggtgatcaagtcagatctggtgaatgaggaggccacaggccagttccatgtttaccaggagaatgcccccggactgcccgtaggcgctgtcgctgggatcgtgactggtgtgctcgtgggagtcgcccttgttgcggctttggtttgttttcttctgcttgccaagaccggacgcccctggtctctcccccagctgtgcttgctcgacgtgccaagtcttcattgtcccggaccgccaacccagccacaggattcgtccttccacctgtag

SEQ ID NO: 136559 - DNA, 1098 bp, synthetic construct
  misc_feature 1..1098: note = Description of Artificial Sequence: Synthetic coding sequence
  source 1..1098: mol_type = other DNA
atggacggccctgcagaaccgcaaatacctggcctgtgggatacttacgaagacgatatttccgagatttctcagaagctcccaggcgaatactttcgatataagggtgtgccattccctgtggggctgtactctctggagtcaattagtttggcagagaatactcaggatgtgcgtgacgacgacatattcatcataacttatcccaaatccgggaccacttggatgattgaaatcatatgccttattctcaaagagggtgatccttcctggatccgtagcgtgcccatctgggagcgggccccctggtgcgaaactatagtgggcgcattttctctgcctgatcagtattctccccgcctaatgtcctcccacctccctatccagatatttacgaaagcattctttagttccaaggcaaaagtgatatatatggggcggaatcctcgagatgtggtggtctctctgtatcactattctaaaatagccggacagctgaaggatcctggcactcccgatcagtttctgcgggatttccttaagggtgaggttcagttcgggagctggtttgaccacattaaaggctggctaaggatgaaagggaaagacaactttctatttatcacctatgaagagctccagcaagacctccaggggtctgtggaaaggatctgcggttttctgggtagacctctggggaaggaggctctggggtcagtggtggcccacagcaccttcagcgccatgaaggccaataccatgtcaaattatacattgctacccccctcgttgctggatcatcgcaggggtgccttcttgcggaagggcgtctgtggggactggaaaaatcattttaccgtggcccagagtgaagctttcgatagggcatataggaaacaaatgcgaggtatgcccacttttccatgggatgaggacccagaggaagatggatcccctgatccagagccatccccagagcctgagccaaagccatcattagaaccaaacacatccctggaaagagaaccaaggccaaactcgtcaccaagccccagtcctggacaggcgtctgagacgccccatccccgcccatcatag

SEQ ID NO: 136560 - DNA, 1053 bp, synthetic construct
  misc_feature 1..1053: note = Description of Artificial Sequence: Synthetic coding sequence
  source 1..1053: mol_type = other DNA
atggccagtccccctccttttcactctcaaaagctgcctggagagtactttcggtacaagggcgtgcctttcccagttggcctgtatagtctggagtccatcagcctagctgagaacacacaggatgttcgagatgacgatattttcatcataacatatcctaagagtggaacgacctggatgattgagattatctgtcttatcctcaaagaaggtgacccatcttggatcaggtccgtacccatctgggagagggcgccttggtgcgaaaccatcgtgggtgccttcagcctgcctgaccagtactccccaagattgatgtcttcccatctccccatccagatattcacaaaggcctttttttcctctaaggccaaagtgatctacatgggtcgtaacccaagggatgttgtggtgagcctgtatcactactcaaagattgctgggcagcttaaggacccagggacaccagaccagttcttacgtgatttcctcaagggagaggtgcagttcggatcgtggtttgaccatatcaaagggtggctgcgcatgaagggaaaagataacttcctcttcattacttatgaagaattgcagcaagacctccaagggagcgtggaacgcatttgtggctttttaggcaggcccctcggcaaagaggcccttggttccgtggtggcgcattcaacgttctccgcaatgaaggctaacactatgagcaattacacacttctgcctccctcccttctcgaccatcgtcgaggcgcatttttaaggaaaggggtctgcggagattggaaaaaccattttaccgttgcccagagcgaggcgttcgaccgcgcctacagaaaacagatgcgcggcatgccaacctttccctgggacgaggaccctgaagaagacggttctcccgatcccgaaccctccccagaacctgagccgaaacctagtttggaaccaaataccagcctcgagagggaacccagacccaacagttcaccctcgcctagccctggccaggcaagcgagacaccgcacccccgcccatcatag

SEQ ID NO: 136561 - DNA, 1041 bp, synthetic construct
  misc_feature 1..1041: note = Description of Artificial Sequence: Synthetic coding sequence
  source 1..1041: mol_type = other DNA
atggttgaaaaggaggaggccggaggaggtataagcgaagaggaagcggcccagtacgaccggcagatcagactttggggactggaggcccagaagcggctgagggcctcaagggtcctcctagttggtcttaaaggcctgggtgccgagatcgccaagaaccttattctggccggagtgaagggactgacgatgttagaccatgaacaggtcacccccgaggatcccggtgctcagttcctgattaggacagggagcgttggacgcaaccgcgccgaggcctccctcgaacgtgcgcagaatctcaatcccatggttgatgttaaagttgacactgaagacatcgagaagaaacctgagtctttttttacacagttcgatgctgtgtgtctgacatgctgttctcgcgatgttattgtgaaagtggatcaaatctgtcacaagaactcaattaagttctttacgggagacgttttcgggtaccacggctacactttcgctaatctgggggagcacgagttcgtggaggaaaaaacaaaagtagctaaagtgagtcagggggtggaggatggaccagatacaaaaagggcaaaacttgatagcagtgagacaacaatggtgaagaaaaaggtcgtgttctgccctgtcaaggaggccctggaggttgattggagctctgaaaaagccaaggccgctctcaagcggacaacgtccgattacttcctgcttcaggtgctcctgaagtttcgtactgataagggccgggatccctcatctgatacctacgaggaagattctgagttgctccttcagatccggaacgatgtgctagatagcctgggcatatcaccagatctgctccccgaagacttcgtaaggtattgtttctccgaaatggcccccgtttgcgccgtagttggagggatcctggcccaggagatcgtcaaggctctgagccagagggacccacctcataacaactttttttttttcgacgggatgaagggcaacgggatagtagaatgtcttggtccgaaatag

SEQ ID NO: 136562 - DNA, 801 bp, synthetic construct
  misc_feature 1..801: note = Description of Artificial Sequence: Synthetic coding sequence
  source 1..801: mol_type = other DNA
atggtggagaaagaagaagctgggggaggaataagtgaagaagaggcagcgcagtatgatcggcagattagactgtgggggctggaggctcagaaaaggctccgggcctccagggttctcctggtgggtttgaaaggtcttggcgccgagattgccaaaaatctgattctggccggagtgaaggggctcacgatgctcgaccacgagcaagtcaccccggaagatccaggggctcagtttttgatcaggactgggagcgtgggcaggaatagagccgaggcgtccttggaacgggcccagaatctgaatccaatggtggacgtgaaggtcgacacggaggacatagaaaagaagcccgagtcgttttttacgcagttcgatgccgtgtgcctgacttgctgctcccgcgacgtaattgtcaaggtggatcagatatgccacaagaacagtatcaagtttttcactggagacgtttttggataccacgggtacactttcgcaaacttaggagaacacgagttcgtggaagagaaaactaaagtggccaaggtgtcccagggagtggaggatggcccggatacaaagagggcaaagctagattctagtgaaactactatggtgaagaagaaagttgtcttctgtcccgtgaaagaagcacttgaggtcgattggtcctctgagaaagctaaagccgccttaaaacggaccacttccgattatttcctgctgcagggcacggccagcccacggtggcctcagtgtgtgcggtggctagaaggcttttggcacaggaagttatag

SEQ ID NO: 136563 - DNA, 900 bp, synthetic construct
  misc_feature 1..900: note = Description of Artificial Sequence: Synthetic coding sequence
  source 1..900: mol_type = other DNA
atggtggaaaaggaagaggccggcggcggcatttctgaggaagaggccgcgcaatacgaccgacagattcggctctgggggctcgaagcacagaaaaggcttagggcctcaagagtgttgcttgtggggttaaaaggactcggggcagagatcgccaaaaatctaatactggctggagttaaagggctgacaatgctggatcacgaacaggtcacaccggaggaccccggagcccagtttttgatccggaccggtagcgtaggcagaaacagggcagaggcctccctggagcgggcacagaacctcaaccctatggtggacgtaaaggtcgacacagaagacatagagaaaaaaccagagtcattttttacgcagttcgacgccgtgtgcttaacctgctgttcccgagatgtgattgtgaaggtggatcagatttgccacaagaacagtatcaaattcttcacgggcgatgtgtttgggtaccatgggtacacctttgccaatctgggggagcacgagttcgtcgaggaaaagacaaaggtggctaaggtgagtcagggcgttgaagatggacctgacacgaagagagctaaactggatagcagtgagacaaccatggtgaaaaaaaaagtggtcttttgccccgtcaaagaggcgttggaagtagattggtcctccgaaaaggccaaagccgcccttaagcgcacaacatctgactattttctcttacaaggccctgtgtcagccggtccttctagccagcaactcctccttctgagatggcacgagggtgaatgggattgcggagtgccgtggccccaggtgaattcccggtttgggtcgcctcgcgatgctaattgctctatgcccacgtgtattccatgtcctctgccttcatag

SEQ ID NO: 136564 - DNA, 900 bp, synthetic construct
  misc_feature 1..900: note = Description of Artificial Sequence: Synthetic coding sequence
  source 1..900: mol_type = other DNA
atggttgaaaaggaagaggccggcggaggcatctcagaggaggaggccgcacagtacgaccgccagatacgcctgtgggggttagaagcccagaagcggctgcgagctagtcgcgtcttgctcgtgggcctgaaaggcctgggggccgagattgccaagaacctgattttagctggggtaaagggactgaccatgctggaccacgaacaggttacaccggaggatccaggggcccagtttcttattagaaccggttcagtgggaagaaatagggctgaggcctccctcgagagagcccagaatcttaatcccatggtcgacgtgaaggtggacactgaagatatcgaaaaaaaaccagagtcattcttcacacagttcgacgcagtgtgtctaacctgctgttctcgcgacgtcatcgtaaaagtggaccagatttgccacaagaatagcattaagtttttcaccggcgatgtgtttggttaccatggttacaccttcgctaatctcggcgagcacgaattcgtggaggagaagactaaagtggccaaggtgagtcagggcgtggaggacggccccgataccaaaagggccaagctagacagctccgaaacaaccatggtgaagaagaaggttgtgttttgcccggtaaaggaagctctagaagtggactggtcctcagagaaagctaaggccgcccttaaaaggaccaccagcgattattttctcctgcaagagctgtttcctcgtattgtggaaagggtgtatgcacagagacacccgagatccacggaaagaacccacgctaaaatgcttatcccttttttaacaaaagagaagcccgggtttctcggagaaatggcggtttctagatcaggagtggggaagctacagtgcagctag

SEQ ID NO: 136565 - DNA, 519 bp, synthetic construct
  misc_feature 1..519: note = Description of Artificial Sequence: Synthetic coding sequence
  source 1..519: mol_type = other DNA
atgttagaaaagaccaaggtggctaaggtaagtcaaggagtggaagatggtcccgataccaaaagagctaagctggatagcagtgagactacaatggtgaagaaaaaggtcgtcttctgtccggtgaaggaggcccttgaggtggattggtcctccgaaaaggctaaggccgccctgaagagaacaaccagcgactactttctgctgcaagtgctactcaagttccggacagacaaaggacgcgacccatcttcagatacctatgaggaagactctgagctgttacttcagattcgcaacgatgtcctcgattcactcggtatttctcctgatctgcttccagaggactttgtccggtactgtttctctgagatggcgcccgtgtgtgccgtcgtgggtggtattctggcgcaagaaattgtgaaggccttgtcccaacgcgatccaccacataataacttctttttcttcgatggtatgaagggaaatgggattgtggagtgtctggggccaaagtag

SEQ ID NO: 136566 - DNA, 1935 bp, synthetic construct
  misc_feature 1..1935: note = Description of Artificial Sequence: Synthetic coding sequence
  source 1..1935: mol_type = other DNA
atggacgacatcgccgatagaatgagaatggacgcaggcgaagtgacactggtgaaccataacagcgttttcaagacccacctgttgccacagaccggtttcccggaggaccagctgtcactttctgatcagcagattttgagctctagacagggtcacctagatagaagctttacctgctctacacgtagcgctgcgtacaacccttcttattactccgataacccttctagtgattctttcctcgggtcgggagacctgaggacgtttggccagtctgcaaacggtcagtggcgtaactccacaccttcgagctcatcatctctgcagaagtctcgaaattcaaggagcctctatttagagacccgcaaaaccagtagtgggctgtcaaatagttttgccgggaaatcaaaccatcactgccacgtctccgcctacgagaaatcatttcctatcaagcccgtgcccagcccttcctggtccggttcctgcagaagaagcctgctatcacccaagaagacccagcgcaggcatgtctcaactgccgaagagacagtgcaagaagaggagagggaaatctaccgccagctactccagatggtgactggaaagcagttcacaatcgccaaacccactacacacttcccgttacacttgagtagatgtctgagtagctctaagaatacactgaaggactcactttttaagaacggtaacagctgcgcaagccagatcattggcagcgacactagcagttctggctctgctagtatcttaaccaaccaggagcagcttagtcattccgtttacagtctatcttcatatacaccagacgtggccttcggcagtaaagactccggcaccttgcaccaccctcatcaccatcacagtgtgccacaccagcccgacaatcttgctgccagtaatacccaatcagagggatccgactcagtcattctgctgaaggttaaggattcccagacacctacgcctagttcaactttctttcaggccgaactctggatcaaagagcttacttcagtgtatgactccagagccagagaacggttgaggcagatcgaagaacagaaagctctggctctgcaattgcagaaccagcgccttcaagagagagagcacagcgtgcacgacagcgtggagttgcacctccgggtgcccctggagaaggagatcccagtcaccgtcgtccaggaaactcagaaaaaagggcacaagctgaccgactctgaagatgagttccctgaaatcacagaagagatggagaaagagattaagaatgtgttcaggaatgggaatcaggatgaggtgctctcagaagcttttcgcctgaccatcaccaggaaagatatacagactctgaaccatctcaattggttgaacgatgagatcatcaatttctatatgaatatgctcatggagcgctcaaaggagaaggggctacctagtgtacacgcttttaatactttcttttttaccaagctgaaaacagctgggtatcaagcggttaagcgctggaccaagaaagttgacgttttctccgtcgacattctgctagtgcctatccatctgggagtgcactggtgtcttgcagttgtggactttcggaagaaaaacatcacttactatgattccatgggtggtattaataatgaggcttgccgaatcctgctgcagtatctcaagcaggagagtatcgacaagaagcgtaaagagttcgacaccaacggctggcagctgttctctaagaaatcccaggagatcccacagcagatgaacggctctgactgcggtatgtttgcttgcaaatacgccgactgtattaccaaagatagaccaattaactttacccagcaacatatgccttacttccggaaacgcatggtgtgggaaattctccacaggaagttgctctag

SEQ ID NO: 136567 - DNA, 489 bp, synthetic construct
  misc_feature 1..489: note = Description of Artificial Sequence: Synthetic coding sequence
  source 1..489: mol_type = other DNA
atgaaaatccctctgaccgcgacaatatgtcttcccggttcatcccctccaggattgtgcatttttgctaaggtgtctgatgtgaaacggctggagatggatgatatcgcagatcgaatgaggatggatgctggcgaagtcacccttgtaaatcataatagcgtctttaagacacacctcctgcctcaaaccggttttccagaagaccaactgtccctcagtgaccaacagattcttagctcccgacagggacacctggatcgcagctttacatgcagcacccgcagtgcggcgtacaaccccagttattactcagggcccggccttggggtgttggccagatactcctggggcaaaatgcttacctttggcgggcaccacggtgtgactctcatgcagattaggcatatggccgtagcaggattctcctctttcatcaacttccagattattctgcctcagacagtttttcttgcacaggcgatatag

SEQ ID NO: 136568 - DNA, 1932 bp, synthetic construct
  misc_feature 1..1932: note = Description of Artificial Sequence: Synthetic coding sequence
  source 1..1932: mol_type = other DNA
atggacgatatcgcggatagaatgaggatggacgccggtgaagtaacgctggtaaatcataatagcgtgtttaagacccatctactccctcaaaccggcttccctgaagaccagttatccctgtccgatcaacagatcctcagttcgcggcaggggcatctcgacaggtccttcacatgttctacaaggagtgccgcatacaacccctcgtattattcggacaatcccagttctgattcgtttttggggtcaggggatctccggaccttcgggcaatccgcaaacggccaatggaggaactctactccttcttcgtcgtcaagtctgcagaagagccggaactcacgatcgctgtatttagaaacgaggaaaactagcagtggactatccaactcgtttgcaggaaagagtaatcaccattgccacgtctctgcctacgaaaagtcattccccatcaaaccagtgccgagtccatcttggtcggggtcctgccgacgctcactgctcagccccaaaaagacacagcggagacatgtgagcactgctgaggaaacagtgcaggaagaggagagggagatttacaggcagctgctccagatggtcacggggaaacagtttacaattgcaaagccgactacacactttccactgcatctgagcagatgcctgtcgagtagtaaaaatacactgaaggattcgctgttcaagaacggcaattcgtgcgcctcacaaatcataggctcggatacaagttcttcagggtcggcctcaattctgactaatcaagaacagctttcacactctgtgtactcgctgagttcctacaccccagatgttgcctttggctccaaggactcaggcacccttcaccacccccatcaccaccactccgttccccaccaacccgataacctggcagccagcaacactcagtcggaaggctcagatagcgtcatcctactgaaggtgaaggacagccagacccctaccccatctagcaccttttttcaagccgaactgtggattaaggagctcactagcgtctacgactcacgagcccgcgaacggttgagacagatcgaggaacaaaaagctctggccttacaactacaaaatcagagattacaagagcgcgaacatagtgtccacgactccgttgaactccacttacgggtcccactcgagaaagagatccctgtgactgtggttcaagagacccaaaagaagggccataaactaacggactcagaagacgaattcccagagatcactgaggagatggagaaagaaatcaaaaacgtatttaggaatgggaaccaggatgaagttctgtcggaagccttcagactcactatcaccaggaaggacattcagacgctgaaccacttgaattggctgaatgacgagattatcaatttctatatgaacatgctgatggagcggtccaaagagaagggcctgccttccgtccacgcgtttaacacctttttttttaccaaacttaaaacagccgggtatcaggctgttaaacggtggaccaagaaggtggacgtattctccgtggacatcctactggtacctatccacctgggggttcattggtgcctggccgtggttgatttccggaagaagaatatcacctactatgattccatgggaggcatcaataacgaggcctgtcgtatcctgctgcagtatctgaaacaggagtcgatcgacaagaaacggaaagagttcgacacaaacggatggcagctcttctccaaaaagtctcaaataccacaacagatgaacggttctgattgcggtatgtttgcttgtaaatatgccgattgcattaccaaagaccgccccatcaatttcacccaacagcacatgccatatttccgaaaacggatggtgtgggagatactgcacaggaagctgttgtag

SEQ ID NO: 136569 - DNA, 1935 bp, synthetic construct
  misc_feature 1..1935: note = Description of Artificial Sequence: Synthetic coding sequence
  source 1..1935: mol_type = other DNA
atggatgacatcgcagatagaatgcgaatggatgctggggaagtgacgctggtcaaccataactctgtgttcaagacccacctcctccctcagacggggtttcccgaggaccagctctctctgagcgatcagcagattctgtctagtcggcagggtcatctcgatcggtcctttacatgctccaccagatctgccgcctacaatccatcttattacagtgacaatccctcctctgatagctttttgggttcaggcgacctgaggaccttcgggcagagtgcgaatggacaatggcgaaactccacccctagcagctccagcagtctgcagaagagccgcaatagtcgctcgctctatctggaaacccgtaaaacttcctccggactgtccaatagcttcgcaggtaagagtaaccatcattgccatgtctcagcatatgaaaagtcttttcccataaaacctgtccctagtccctcctggagcggctcatgcagaagatcgctgctgagccccaagaagacacagaggcggcacgtgagcacggctgaggaaaccgtccaggaggaggagcgcgagatctacagacagttgctgcaaatggtcaccggaaagcagttcactatagcgaagccaaccacccatttccccctgcatctcagccgatgtttgtctagctccaaaaacacactcaaagacagtctgttcaaaaatggcaatagttgcgcaagccagattattgggtctgatacttcctcctccggtagtgcctctattctcaccaaccaggaacaactgtctcattctgtttactctttaagttcctatactccggacgttgccttcggctctaaggactccgggacgctgcatcaccctcaccatcaccatagtgtgccccatcagcccgataatctggctgccagcaacacacagtcggaaggtagtgattccgttattctgctgaaagttaaggattcccagacccccactccgagtagtactttttttcaagccgagctctggatcaaggaactgacatcagtttacgattcaagggcccgagagaggctgagacagatcgaggagcagaaagccttggcactccagcttcagaatcagcgcctccaggaacgggaacacagtgtacatgacagcgtggaactccatctgcgggtgcctctggagaaggagataccagttaccgtcgtacaggagacacagaaaaagggacacaagctgactgacagcgaagacgaattccccgaaattaccgaggagatggaaaaagagatcaagaatgtgttccggaatgggaatcaagatgaagttttgtctgaggccttccgcctcactatcactcggaaagatattcagactctgaaccacctgaactggctgaacgatgagatcataaacttctacatgaacatgctgatggaacggagcaaggagaaagggctcccttctgttcacgcatttaacacttttttcttcactaagctgaagaccgccggatatcaggctgtgaagaggtggactaagaaagttgacgttttctctgtggacatcctcctggtaccaatccatttgggcgtgcactggtgccttgctgtggtggattttcgcaagaaaaacataacttattacgactcaatgggtggcatcaacaatgaagcatgtaggatcctgctgcagtaccttaagcaggagtcaatcgacaagaagcggaaggagtttgacacgaatgggtggcaacttttcagcaagaagagccaggagatcccacagcagatgaacggcagcgactgcggcatgtttgcttgtaaatatgcagattgcattaccaaagacagacccattaactttactcagcagcacatgccctatttccgcaaaaggatggtatgggagattctacacaggaaacttctgtag

SEQ ID NO: 136570 - DNA, 1932 bp, synthetic construct
  misc_feature 1..1932: note = Description of Artificial Sequence: Synthetic coding sequence
  source 1..1932: mol_type = other DNA
atggatgacatcgccgacaggatgaggatggacgccggcgaagtaacactggtgaaccacaattccgtttttaaaactcacctgctgccccagactgggttccctgaggatcagctgagcctgtccgatcaacaaatcctttccagcagacaggggcaccttgatcgcagttttacatgctcaacgcgttccgctgcctataatcctagttactactctgataatccgagtagcgacagtttccttggctccggagatctccggacattcggccaaagtgccaacggacagtggagaaacagcacccccagctcgtccagttccctgcaaaaaagccgcaacagtcggtccctatacctcgaaacccggaaaacgtcctccgggttgagtaattctttcgccggcaagagcaatcaccattgtcatgtctctgcatacgaaaaatcctttccaattaagccagtcccatccccctcctggtctggtagttgtagaaggtctctgcttagcccgaaaaagacacagagaagacacgtgagcaccgccgaagaaaccgtccaggaagaggagagagagatctacaggcaactgctacagatggtcacggggaagcagttcaccatcgccaagccaacgacacactttccactccacctcagccgatgcctgtctagctcaaaaaacaccctgaaggatagcttgttcaagaacggaaactcctgtgccagtcaaatcatcgggagtgatacctcgtcttccggctctgcctctatcttgactaatcaggaacagttgtcccacagtgtgtattcccttagctcgtacaccccagacgttgcctttggatcgaaagactcaggcacccttcaccacccccaccaccatcactctgtgccacaccagccagataacctggctgcatcaaacacacagtccgaaggcagtgatagtgtgattcttctcaaggtgaaagattcccagactcctacacctagctctactttcttccaggcggaactgtggatcaaagaactgacaagcgtctacgattctcgggctagagagcgactgcgccagatcgaggagcagaaggctctggcgctgcagctccagaatcagcgcctgcaggagcgagagcatagcgtgcacgattcagtagaactacacctcagagtgccattggagaaggaaatcccagtgacagtggttcaggaaacgcagaagaagggtcacaaactgaccgactccgaggatgaattccctgaaattactgaagaaatggagaaagagattaaaaatgtttttagaaatgggaatcaggacgaggtgctaagtgaggcctttcgattgaccattacaagaaaggacattcagaccctgaaccatctgaactggttaaatgatgagataattaacttctacatgaatatgctcatggagaggagcaaggaaaaggggctgccgtctgtacacgccttcaatacttttttctttacaaaacttaagactgcaggatatcaggccgtgaaacgatggactaaaaaagtggacgtgttctcagtagatatcctgcttgtgcctatccacctgggggtgcactggtgtctagccgtggttgattttaggaaaaaaaatataacttactacgattctatgggaggaatcaacaacgaggcttgccggattctgctgcaatatctcaagcaggaatcaattgataagaaacggaaggaatttgatacaaacggatggcagttgttttctaagaaaagtcagatccctcagcagatgaatggttctgactgtgggatgttcgcctgtaagtacgccgactgtattaccaaagacagaccaatcaacttcactcagcagcacatgccctatttccggaaacggatggtgtgggagattctccatcggaaactcttatag

SEQ ID NO: 136571 - DNA, 1935 bp, synthetic construct
  misc_feature 1..1935: note = Description of Artificial Sequence: Synthetic coding sequence
  source 1..1935: mol_type = other DNA
atggacgatatagccgataggatgcgaatggatgctggtgaggtgacgttggtgaaccataactcagtttttaaaactcacttgctaccccaaactggttttcccgaggatcagctgagtcttagtgaccagcaaatccttagctctagacagggccatctcgacagaagcttcacatgtagcaccagatcagccgcttataacccgtcttattattccgacaatccttcgtcagatagctttcttgggtccggggacctgcgaaccttcgggcaaagtgcgaatggtcagtggcggaactccaccccatcctcctcatcttcactgcagaagtcacgcaatagtcgttccctgtatctggagactcgaaaaacctcatctggactgtctaatagcttcgccggcaagtccaatcaccattgccacgtctcagcctatgaaaaatcttttcctatcaaacctgtgccatcaccctcctggtccgggtcctgtcggagatctttgttgtcaccaaagaaaacacagcgtagacatgtgtccacagccgaggaaacagtgcaagaagaggaacgagaaatttataggcagttacttcagatggtcaccggcaagcagtttaccatagcaaagcctactacacactttcctctccacctctcaagatgtttgtcctcgagcaaaaacacactcaaggactctctgtttaagaatgggaattcgtgcgcctctcagatcatcggcagcgacacatccagttcagggtcagctagtatcctaaccaatcaagagcaactttcgcattcagtttactcgctttcgtcgtatactcccgacgtcgcttttggatccaaagatagcggaaccctgcatcatcctcatcatcaccatagtgtgcctcatcagcctgataatctggcagcctctaacacccagtctgaaggatctgattctgtgatcctcctcaaagtaaaggattcacagacaccgacacctagcagcaccttttttcaagcggagctgtggatcaaggaactcaccagcgtctatgacagtagggctagagagcggctgagacaaatcgaggaacagaaagccctcgccctgcaacttcagaatcagcgattgcaggagagggaacacagcgttcatgactctgtcgaactgcacctgcgcgttccattagagaaagaaatccctgtaacggtcgtacaggagacacagaagaaggggcacaagctgacagactcagaagatgagtttcctgaaatcactgaagaaatggagaaggaaataaaaaacgtgtttcgaaatggaaaccaggacgaagtgctgagtgaagcctttcggctcacgattacaagaaaagacattcagaccctgaaccatctgaactggttgaacgacgagatcattaatttttatatgaacatgctgatggaacggtctaaggagaaaggactgccctccgtgcacgctttcaacacttttttttttacgaagctgaagacagccgggtatcaggccgttaaacgatggaccaagaaggtggacgtgtttagcgtggatatactgcttgtgccaatccatctaggcgtgcattggtgtttggctgtagtggattttaggaaaaagaatatcacctattacgattcaatgggaggtattaataatgaagcttgccggatcttgctgcagtacttaaagcaggagtccatagacaaaaagaggaaggaatttgatacaaacggttggcagctttttagcaagaaatcccaagaaatccctcaacaaatgaatggttctgattgtggcatgtttgcctgtaagtatgctgattgcatcactaaagataggccaatcaacttcacacaacaacatatgccctactttaggaaaagaatggtttgggagatcctgcatcgcaaactgctgtag

SEQ ID NO: 136572 - DNA, 2268 bp, synthetic construct
  misc_feature 1..2268: note = Description of Artificial Sequence: Synthetic coding sequence
  source 1..2268: mol_type = other DNA
atgaaaaagcagaggaagattctctggagaaaaggcatccacttggcgtttagtgaaaaatggaacaccggtttcgggggatttaaaaaattttatttccatcaacacctatgcatacttaaagcaaaactggggagacctgtcacctggaatagacagctccgacactttcagggacggaaaaaggccctgcagatccaaaagacatggattaaagacgagcccctgtgcgccaagaccaaatttaacgtcgccacccagaatgtcagtacactgagttccaaggtgaagcgaaaagatgcgaaacacttcatctcttccagcaaaacacttctaagactccaagctgagaaactgctgtcgtctgccaagaactcagatcacgagtattgtagggagaaaaacctgctcaaggcggtgacagactttccttctaactctgccctgggacaggccaatggccacaggcccagaaccgatcctcagccctccgattttcctatgaaatttaatggggagagccagtcccctggagagtccgggactatagtggttacactgaacaaccacaagagaaaaggtttctgttacggttgttgtcaaggcccagaacaccacaggaatgggggacctctaattcctaaaaagttccagctcaaccagcacaggagaattaagctttcgccactgatgatgtacgaaaaactgtctatgattcgatttagatatcggatccttcggagtcagcattttcgaaccaaatccaaagtgtgtaagctcagaaaggctcagaggtcatgggtgcaaaaggtgactggggatcatcaggaaactagaagagagaacggggaaggtggaagctgttctccgtttccttccccagagcctaaggacccatcatgccggcaccaaccatatttccccgacatggatagctctgctgtggttaagggaaccaattcccatgtaccagactgccacacaaagggctcgagcttcctgggcaaagagctgtcgcttgatgaagcctttccagaccagcagaacggcagtgcaaccaatgcatgggaccagagcagttgctcatcccctaaatgggagtgtacagagctgatacatgacatccctctgcctgaacaccgatcgaacaccatgttcatctccgagactgaacgagaaatcatgaccctcggacaagagaaccagacaagttcagtgagtgacgacagagtgaagctgagcgttagcggggctgataccagtgtgagttccgtggatggtccagtttctcaaaaggccgttcagaatgagaactcataccagatggaagaggatgggtcactcaaacagtcgatcctttctagtgagctgctcgaccatccctattgtaaaagcccgcttgaggcacctctggtctgttctgggctcaagcttgagaaccaggttgggggcggtaaaaatagccagaaggcatctccagtcgacgacgagcagctatctgtttgcctgagcggctttttggacgaagttatgaaaaaatatggcagtctcgtaccactctccgagaaggaggtgctgggtagattgaaggatgtcttcaatgaagacttcagcaaccgcaaaccatttataaacagagaaatcaccaactaccgagcacggcaccagaagtgtaattttaggatcttctacaataaacacatgcttgatatggatgacttggctacactcgacggtcaaaattggctgaatgaccaggtgatcaatatgtatggtgaactgattatggacgctgttcccgacaaggtgcacttttttaatagttttttccacagacagctggtgacaaagggatataacggggtaaagagatggacgaaaaaagtagacctgttcaaaaagtctctgttgctaatcccaattcacctcgaagtccactggtctctcattaccgtgaccctatcaaataggataatctcattttacgattcccaggggattcattttaaattttgcgttgagaacattcgcaagtatttgttgaccgaagcaagggaaaaaaataggcctgagttcctgcaggggtggcagaccgctgtgacaaaatgcattcctcagcagaaaaacgattcagactgcggcgtgttcgtgctgcaatattgtaaatgtctggccctggagcagccattccaattttctcaagaggatatgcccagagtgcgcaaaaggatttacaaagaactgtgtgagtgtcggctcatggactag

SEQ ID NO: 136573 - DNA, 3318 bp, synthetic construct
  misc_feature 1..3318: note = Description of Artificial Sequence: Synthetic coding sequence
  source 1..3318: mol_type = other DNA
atggccgccggcaaaagcggtgggagtgcaggcgagattaccttcctcgaagctctggcccgaagcgaaagcaagagagacggcggctttaaaaacaactggtctttcgaccacgaggaagagtctgagggggacaccgacaaggatgggaccaatctgctcagcgtggacgaggacgaggattccgagacgagtaagggcaaaaagctgaatagacgcagcgagatagtggctaattccagtggggaattcatactgaagacctacgtgcgtagaaataaatctgagagttttaagactttgaagggcaacccaataggactaaatatgcttagcaacaataagaagctctctgagaacacccagaacacttcactgtgctccggcaccgtggtgcacgggagacgcttccatcatgcccacgctcaaattccagtggtcaagactgccgctcagcgcaaagagtaccctcctcatgtgcaaaaagtcgaaatcaatcctgttaggctttcccgactgcaaggtgtggagcgtataatgaaaaaaacagaagagagtgagagccaagtggaaccagaaattaagcgtaaggtccagcagaaacgacattgtagcacataccaacccacaccacccctctcccccgcttcaaagaaatgcctgactcatctcgaggacctccagaggaattgccgacaggcaatcacattgaacgaatccactgggcccttgctgcgaacctccatccatcagaatagcggaggccagaagagtcagaataccggcctgaccaccaaaaagttctatggaaacaacgtagagaaggtccccattgatattatcgttaactgcgacgatagcaagcatacttacctgcaaaccaatggtaaggtcattctacccggtgccaaaatccctaagattaccaacctgaaggagagaaagaccagtctctccgatttaaatgatccaattatactttcgtcagatgacgacgatgataacgatcggacaaatcgtcgagaatctatttctccacagccagccgactcagcatgctctagccctgctccgtcaaccggtaaagtcgaagcggcgctcaatgagaacacctgtcgcgcagaacgagaacttcgttcaattccagaagatagtgaactgaatacagtgactctacctcgtaaagcccggatgaaagaccagtttgggaattctattataaacaccccacttaagcgccgcaaggtcttttcacaagagccccccgatgcactggctttgtcttgccagagcagctttgacagtgtgatattgaactgccgctccattcgggtggggaccctgttcaggcttttgatagagccagtcatcttctgtctggactttataaaaatacagctggacgagccggatcacgatccagttgagatcattctgaatactagcgatttgaccaagtgtgagtggtgcaacgtgagaaaattgcctgttgtgtttctgcaagccatccccgcagtatatcaaaagctcagtatccagctgcagatgaacaaagaagacaaggtgtggaacgattgcaagggggtgaataaactgactaacttagaggagcagtatatcatcctgatctttcagaacgggctggatccgcccgccaacatggttttcgaatctattatcaatgaaattggaatcaaaaacaacattagcaacttttttgcaaaaatcccgttcgaagaggcgaacgggcgcctggttgcctgcacccgcacatacgaggaatcaatcaaaggcagctgcgggcaaaaagagaacaaaatcaaaaccgtttcctttgaatccaagatccaattgcgctccaaacaggagttccagttctttgatgaggaggaggaaaccggtgaaaatcacacgatcttcatcggtcccgtcgaaaagctcattgtgtacccacctccaccggccaaaggaggaattagtgtaactaatgaagatttgcactgcttgaacgagggggagtttcttaatgacgttatcatcgacttttatctgaagtatctggtactcgagaaactgaaaaaggaggacgctgatcgcatccacatttttagtagcttcttctataagcggctgaatcaacgcgagcggagaaaccatgaaactactaacctgagcatccaacagaagcgccacggacgcgtcaaaacttggacccggcacgtagacatcttcgaaaaagactttatcttcgttcccttaaatgaagctgcccactggtttctcgcagtggtgtgttttcccggattggagaaacccaagtacgagccgaacccgcattaccatgaaaacgcagtgatccagaagtgctccaccgtcgaggattcctgtattagctcatccgcatcagagatggaaagctgttcacagaatagtagcgctaagcccgttataaagaagatgcttaacaagaagcactgcatagcggtcatagattcaaacccgggacaggaagagtccgacccaaggtacaagaggaacatttgctcagtcaaatacagtgtcaagaagataaaccatacagcaagcgagaacgaagaattcaataaaggggagtccacatcccagaaagttgccgacaggacgaagtcagaaaacgggctacagaatgaatctttgtcatccacccatcacactgatggtttgtccaagatcaggcttaattattcagacgagtccccagaggctggaaaaatgttggaagacgagcttgtagactttagcgaagaccaggataaccaggacgacagcagcgacgacggcttcctggccgacgacaactgttcctcagaaattggtcagtggcacctgaaacccaccatctgtaagcagccctgcatcctactcatggattccctgagagggcctagcagaagtaatgtggtgaaaatattacgggaatatttagaagtggagtgggaagtgaagaagggatcaaagcggtctttcagcaaggacgtcatgaaagggtccaaccctaaggtgccccagcagaataacttctctgattgcggagtatacgtgctgcagtatgtggagagcttctttgagaaccccatactcagctttgagttgcctatgaacctggccaattggttcccacctcctaggatgcgcacaaagagggaggaaattcggaatataattctaaaattgcaggaggatcagtccaaggagaaaaggaaacataaagatacctattcgacggaggcaccactgggagagggcacagagcagtacgtgaatagcatatccgactag

SEQ ID NO: 136574 - DNA, 3339 bp, synthetic construct
  misc_feature 1..3339: note = Description of Artificial Sequence: Synthetic coding sequence
  source 1..3339: mol_type = other DNA
atggctgctggtaaatctggcggaagcgccggtgagattacatttctggaagccctggcaagatcagaaagcaagagagacggcgggttcaagaataactggtcctttgatcatgaagaggagagtgagggtgatactgacaaggatggcacaaatcttctgagtgtcgacgaggacgaggattccgagacaagcaaaggcaaaaaactgaatagaagaagcgaaatcgtggcaaacagttcaggcgagttcatactgaagacatacgtacgccgcaacaaatcggagtccttcaagacactgaagggaaaccctatcggattgaacatgctgagcaacaacaaaaaactcagcgagaatacacagaatacgtctttatgctctggcactgtggtgcatggaaggcggtttcatcatgcgcatgctcagatccccgtggtgaagaccgccgcccagcgcctgctgtccaatcagatattgaaagaataccctcctcacgtgcagaaagtggagatcaatcccgtgagactctcccgcctccagggggtggaaaggatcatgaagaaaactgaggaaagcgagagtcaggtcgagcccgagataaaaagaaaggtccagcaaaaaaggcactgctccacctaccagccgactccgccactgtctccagcttcaaaaaagtgtctgacgcacctcgaggatctgcagagaaactgcagacaggctattacactgaatgagtccacaggacccctgctgcgtacgtccatccatcaaaactccggcgggcagaaatcccaaaacactggtttaacaacaaaaaaattctacggaaataacgtggagaaggtgcctatcgacattattgtgaactgcgatgatagcaagcacacatatctacagacaaacggtaaggttatactccccggagccaaaattccaaagattacaaatctgaaggaacgaaagactagtcttagcgacttgaacgacccaatcatcctgagctcagacgatgatgatgacaatgacaggacgaatagaagagaaagtatctcaccgcaacctgctgactctgcatgctccagccccgcccctagtacaggtaaggtggaggccgccttgaacgagaatacatgcagggcggaacgcgagctcaggtctattcccgaagacagtgagcttaacacggttaccctccccagaaaagcaaggatgaaggatcagttcggcaacagcattatcaacacccctttgaagaggcgcaaggtgttcagccaggagcctcctgatgccctagcgctttcctgtcaaagctcgtttgactctgtcattctcaactgccggagcatccgagtaggtactctctttaggcttctcattgagcctgtcatcttttgtctggattttatcaagatccaactcgacgagcccgaccatgatcccgtggagatcatactgaacaccagcgatctgactaagtgcgagtggtgtaatgtgcggaagctgcccgtcgtcttcctgcaggcaattcccgcagtttaccagaaactgtccatccaactgcagatgaataaagaagacaaggtgtggaacgactgcaaaggggtgaacaaattgaccaacctagaggagcagtacatcatactgatttttcaaaatggattggaccccccggccaatatggtcttcgagtcgattatcaacgaaattgggatcaaaaataatatttctaacttctttgcgaagattccgttcgaggaagcaaatgggcgtttggtcgcatgcactcgaacttatgaggaaagcatcaaaggctcatgcgggcaaaaggaaaacaagataaagacagtttcctttgaatccaagatacagttacgctcgaagcaggaatttcagttctttgacgaagaggaggagacaggcgaaaatcacactattttcatcgggcccgttgagaaacttatcgtttacccccctcccccagcgaagggcggaatttccgtcaccaatgaagacctacactgtctgaatgagggagaattcttgaatgacgttataattgacttctacctcaagtatcttgtgctggaaaaactcaagaaggaagatgcagaccggatccacatcttcagctccttcttctataaacggctgaatcaacgagaacggcgcaaccacgagaccaccaatctatccatacagcagaaacggcatggacgcgttaagacttggacaaggcacgtagatatattcgaaaaagatttcatctttgtgccattaaatgaagctgcacactggttcctggccgttgtatgtttcccaggcctagaaaagccaaagtacgagcctaacccacattaccacgaaaatgccgtcattcagaagtgctcaaccgtagaagactcttgcattagttcatctgcatccgagatggaatcttgctcacagaatagctcggccaaacccgtcatcaaaaagatgctgaataaaaaacactgtatagccgtgattgatagcaatcccggccaagaggagtccgacccgagatacaagcgcaatatttgtagcgtgaagtatagtgtcaagaagattaaccacaccgcctcagagaatgaggaattcaataagggcgagagtactagccagaaggtcgccgacagaaccaaatccgaaaatgggctgcagaatgagtcactgagctcaacacatcataccgacggtctgtctaagatacgactaaactactcggacgagtctcctgaggctggcaaaatgttggaggacgagctcgtggactttagcgaggatcaggacaaccaggacgactcatcagatgatgggtttctggctgatgacaattgtagctctgagattgggcagtggcatctcaaacctaccatatgtaagcagccctgcattctcctcatggacagtctgcgaggtccgtccaggagtaacgttgtgaagatactgcgggagtaccttgaggttgagtgggaagttaagaaaggctccaagaggagcttcagtaaggatgtgatgaaaggaagcaatcccaaagtacctcagcaaaacaacttctccgactgcggggtatatgtactgcagtatgtggagtcgtttttcgagaatcctattctcagcttcgagttaccgatgaacctagctaactggttccctcccccaagaatgcgcacgaagcgggaggaaatccggaacattatcctgaagttgcaggaagatcaatcaaaggaaaaaagaaaacacaaagacacctactccacagaggcccctctgggggaaggcacagagcagtacgttaatagcataagcgattag

SEQ ID NO: 136575 - DNA, 3339 bp, synthetic construct
  misc_feature 1..3339: note = Description of Artificial Sequence: Synthetic coding sequence
  source 1..3339: mol_type = other DNA
atggcagcaggcaagtctgggggatcagcgggcgaaattaccttccttgaggcattagcacgatcggaaagcaagcgagacggtgggttcaaaaataattggagcttcgaccacgaagaggaaagtgagggcgataccgataaggatgggactaatctgctctcagtcgatgaggatgaggattccgaaacctcaaagggaaaaaaactgaaccgaaggagcgagatagttgcaaacagcagcggagagttcattctcaaaacatacgtgaggcggaacaagagtgaatcttttaaaactctgaaaggaaatccaattgggctgaatatgctttctaacaacaagaaactctctgaaaacacccagaatacttctctgtgttcaggcaccgtcgtgcatggacgaaggttccaccatgcccacgcgcaaattcctgtggtcaaaaccgctgcacagtcatcgctggacaggaaggagaggaaagagtatcctccacacgtgcagaaggtggagattaatcctgtgagacttagccgactgcagggggttgaacgcatcatgaaaaaaaccgaagagtccgaatcgcaggtagaacctgagattaaacgtaaggtacagcagaaacgacattgcagcacttaccagcccacccctcccctgtctcctgcatcaaagaagtgccttactcatctggaagacctacaaagaaactgcagacaggctattacattaaatgagtcaaccggacctctcctccggacgagtattcatcaaaactcgggtggacagaagagtcagaatactggcctgactaccaaaaaattctacgggaataatgtggaaaaagtgcctattgatattattgtaaattgtgatgactcaaagcacacctatcttcagaccaacgggaaagtcatcctgcccggagccaagatcccaaaaataaccaatctcaaagagcgcaagacatcacttagcgacctgaacgatcccatcatcttgagttccgacgacgacgacgataatgataggaccaataggcgggagagcatttccccccagcccgccgactcagcatgctcaagccctgctccctctaccgggaaggtggaggccgcattaaatgagaacacctgcagagccgagagagagctccgatcaatccccgaagatagcgagctcaataccgttacactacccagaaaagctagaatgaaggaccagttcgggaacagcattataaacactcctctcaagagacgtaaagtcttcagccaggaacctcctgacgccttagcgctgagctgtcagtcctctttcgattccgttatcctgaattgcagaagcatccgcgtgggaacactgttcagactcttgatcgagccagtcattttctgcttagattttattaagatacagctcgatgaacctgaccatgaccctgtggaaatcatactgaataccagcgatctcactaagtgtgagtggtgtaatgtgaggaagctgccagttgttttcctccaagccattcccgccgtctaccagaagctgtcaatccagctccagatgaacaaggaagataaagtgtggaacgactgcaaaggggtaaataagctgaccaatctggaagagcagtacataattttgatctttcagaatggactggatccacctgccaacatggttttcgaaagcattattaatgagattggaattaaaaataacataagtaacttttttgccaaaattcccttcgaggaggcaaacggtcggttagtggcgtgtactagaacctacgaagagtcaattaagggcagctgcgggcagaaagagaacaagatcaaaactgttagcttcgagagcaaaattcagctgcggagcaagcaggaatttcagtttttcgacgaggaagaggagacgggtgaaaaccacactatcttcatcggaccagtggagaagctgattgtgtacccacctccgccagctaagggcggcatttcggtgacaaatgaggacctccactgcttgaacgaaggtgagttcctcaacgatgtaattattgacttttaccttaagtaccttgtgctggagaaactcaaaaaggaggatgccgacaggatccacatattcagttcatttttttacaagagactcaatcagcgtgagcgtaggaaccacgagactactaatctgtcaattcagcagaagcgtcacggccgagtgaagacatggactagacatgtagatatcttcgagaaagactttattttcgtgcctctcaatgaagcggctcattggttcctggctgtggtgtgctttccaggcctcgagaagcccaaatatgagcctaacccacattatcacgagaatgcagtgatccagaaatgctcaacggtagaagattcatgcatttcaagctctgccagcgagatggaaagttgctcacagaactcatctgctaaaccagtcattaagaagatgctgaacaagaaacactgcattgctgtgattgatagtaacccgggacaggaggaaagcgatcctaggtacaaacgcaacatttgctccgtcaaatacagcgtcaagaaaatcaaccataccgcctcagaaaacgaggaattcaacaagggggagagtacctcccagaaggtggccgatagaacaaaatctgagaacggcctgcagaatgaaagcctgagcagcacccaccataccgatggcctgtccaaaatacggctgaactacagcgacgaaagcccagaagcagggaaaatgctcgaagatgagctggtggactttagtgaggatcaggataatcaagacgattccagtgatgatgggttcctagctgacgacaactgctcgagcgaaataggccagtggcatctgaaacctacaatttgcaaacagccatgcattctgctaatggacagtctgaggggccccagtagaagcaacgttgttaagattctccgagagtatctcgaggtggaatgggaggttaagaaagggagtaaaaggagctttagcaaagatgtgatgaaaggctctaatccgaaagtgccacagcagaataacttctccgactgtggtgtgtacgtgctgcaatatgtggaaagcttctttgaaaatcctatcctgagtttcgaactgccgatgaacctggccaactggtttccccctccaagaatgcgcaccaagagggaggagatcaggaacattattctcaaattacaagaggaccaatctaaagaaaagcgtaaacacaaagatacatactccacagaagcccctctgggcgagggtacagagcaatacgtcaattccatatccgactag

SEQ ID NO: 136576 - DNA, 1074 bp, synthetic construct
  misc_feature 1..1074: note = Description of Artificial Sequence: Synthetic coding sequence
  source 1..1074: mol_type = other DNA
atggccgcggggaaatcaggagggagtgcaggagagatcacctttctggaggccttagcgcgctctgagtctaaaagagatgggggctttaaaaataattggtcttttgaccacgaggaagagtctgagggcgacactgacaaggacggaacaaatctgctaagcgttgacgaggatgaggactccgaaaccagcaaagggaaaaaactcaacagacgctctgaaatcgtggctaattcatcaggagagttcattctcaagacatacgtccgtaggaataaaagcgaatcctttaaaacccttaaaggcaaccccatcggcctgaacatgctctccaataataaaaagttgagtgaaaatacacagaataccagtttgtgttctggtactgtggtgcacgggcgccggttccaccacgcccacgcacagatccccgtggtcaaaacggctgcacagtccaaccagatcctaaaggaatatccccctcacgtgcaaaaggtggagataaatccggtcagactcagtcgactccagggggttgtgatcctgagctccgacgacgacgacgataacgacagaactaatcgccgagaatccatctcacctcagccggcggatagtgcttgcagtagcccagcacctagtacggggaaagtggaggccgcccttaatgagaatacctgccgcgcagagagggagttgagatccattcccgaagattctgaattaaataccgtgacattgccaaggaaggccagaatgaaagaccaatttgggaattcaattataaacacccctctgaagcgaagaaaggttttcagccaagagccccctgatgcactcgcactctcctgtcagtcctcttttgattcagtaatccttaattgcagatcaatccgggtgggcactctctttcgtctgctgattgagcctgtgatcgtgattatcaaaatattctttattactcacaagaaaccggaccacgatccagtggagatcatactgaacaccagcgaccttactaaatgtgagtggtgcaacgtacggaagctgcccgtggtgtttctgcagtag

SEQ ID NO: 136577 - DNA, 1107 bp, synthetic construct
  misc_feature 1..1107: note = Description of Artificial Sequence: Synthetic coding sequence
  source 1..1107: mol_type = other DNA
atgaaagaccagtttggaaactccattataaacactcctctcaaacggcggaaggtgttttcccaagagccaccagatgccctggcacttagttgtcaatcgtcctttgactctgtgatcctcaactgccgatccatcagagttgggactctgttccgcctgctgattgagcctgtaattttttgcttggactttatcaaaattcaactggatgagccagatcacgaccccgtggagataattctcaatacttccgacttgacaaaatgcgagtggtgtaacgtgaggaaactccccgttgtattccttcaggcaatacccgccgtgtaccaaaagctgagcattcagcttcagatgaacaaggaagacaaggtgtggaacgactgtaagggagttaacaagctgaccaatctggaagaacagtatataatacttatttttcagaatgggctggatcctcctgccaatatggtctttgaatccataatcaatgagataggcatcaagaataacatctcaaattttttcgctaaaatcccatttgaggaggcaaatgggcggctggtggcatgcacccgcacttatgaggagtccatcaagggaagctgtggacagaaggagaacaaaatcaagaccgtctctttcgaaagcaaaatccagctgcgctcgaagcaggaatttcagttttttgacgaggaggaggagactggagagaatcacaccatttttatcggccccgtggagaaactaatcgtgtaccctcccccccccgctaaaggcggcatcagcgtaaccaacgaagacttacactgcttgaatgagggagaattcttgaatgacgttattattgatttctatctgaagtatctggtgctcgaaaaactgaaaaaggaggacgccgatagaatccatattttctcatcgttcttctataaaaggctaaatcagagggaaagacggaaccatgagacgactaatctctcaatccaacagaaacgacatggacgcgtgaagacgtggaccagacacgtcgatattttcgaaaaggacttcatcttcgttccactgaatgaggcatggctgaaacaaaatcagactaagctttag

SEQ ID NO: 136578 - DNA, 2955 bp, synthetic construct
  misc_feature 1..2955: note = Description of Artificial Sequence: Synthetic coding sequence
  source 1..2955: mol_type = other DNA
atggacaaacgcaaactcggccgccggccaagcagctccgaaattatcactgaaggaaagcgcaagaagagtagcagtgacctgtccgagataagaaaaatgcttaatgcaaagccagaggacgtccacgtgcagtctcccttgtccaaattccggagttcagagaggtggactttgcccctgcaatgggagagatcactacgcaataaggtcataagcttggaccacaagaacaagaagcatatccgcggctgccccgttactagtaagtctagtccagagaggatacccagagtcatcctcacaaatgttctcggaaccgagctgggaagaaagtacatccggacccccccagttaccgaaggcagtctcagtgacactgacaatttgcagagcgagcagctgagcagctcctctgatggaagtctggaatcttaccagaacctcaacccacataagagttgctatctctccgaaagaggctctcagcgttcaaaaaccgtagatgataactcagctaaacagactgcccataacaaagagaaacgaagaaaggatgacggcatatcactcttaatcagtgatacacaacccgaggatttaaatagtggcagcaggggttgcgatcatctcgaacaggagtcccgcaataaggatgtgaagtattctgattctaaagttgagctgaccttaatctcacggaagaccaagcgtaggcttaggaataatctgcccgatagtcagtactgtacatccctcgacaagtccactgaacagacaaagaagcaggaggatgattctaccatttcaacggagtttgaaaagcctagtgagaattatcaccaggaccctaaactaccagaagagatcaccaccaaacccacaaagtctgattttacgaaacttagcagcctgaattcccaggaactgaccctgagcaacgccacaaagtccgcttctgcgggctctacaactgagactgtagagaactccaactctattgatattgtcgggatcagttcccttgtagagaaggacgaaaacgagctgaacacaattgaaaaacctatcttgcgagggcacaacgaggggaatcagtcacttatttcagctgagcctatcgtagtctcctcagatgaggagggacccgtagaacataagtcttccgagattttgaagctccagtctaagcaggacagggagacgaccaacgagaatgagagcactagcgaaagcgctctgcttgagcttcccctaattacctgcgagagcgtccagatgagttctgaattgtgtccgtacaacccggtcatggaaaacatcagtagcattatgccatccaatgagatggatttgcagttagactttatcttcacgtctgtgtacattggtaaaataaaaggtgcaagcaagggctgcgtgactataaccaagaagtatatcaagatcccattccaggtcagcctgaatgaaatctcactcctcgtggacacaactcaccttaaaagattcggactgtggaaaagcaaagatgataatcactccaagagatcccatgcaattctctttttttgggtaagctccgactacctgcaggaaatccagacacagttggagcacagcgtcctctcacagcagtccaagtcaagcgagtttatcttcttggaactccacaatcctgtctcccaacgcgaggagttgaaactcaaagacattatgaccgagatctcaatcatttccggcgagctggaactgagctatccactgagctgggtgcaggcgttccccctattccagaatctgtcttccaaggagagctcctttatccattattattgcgtttctacctgcagtttccctgcgggggtggcagtggcggaagagatgaagttgaagagcgttagccaaccctccaatacggacgcggccaaacctacctatactttcctgcagaagcagagtagcgggtgctactctctgagtataactagcaacccagacgaagaatggcgagaggtccgtcacacaggattagttcaaaagctgattgtatatccgccacctcctacaaaaggaggtttaggcgtcaccaacgaggacctcgaatgcctggaggaaggcgagtttctgaacgacgtgatcatagatttctatctgaaatatctgatactggaaaaggccagcgatgagttagtagagagaagccatatcttctcctccttcttctataaatgtcttaccaggaaggaaaataatctcactgaagacaacccaaacctttcaatggcacagaggcggcacaaacgagttcggacctggacacggcatattaatatcttcaacaaagattatatcttcgtgccagtcaacgagtctagccattggtacctcgccgttatctgttttccctggctagaggaggcagtgtacgaggattttccccaaacggtgagccagcagtcccaagctcagcagtcccagaatgacaataaaacaattgataacgacttgagaaccacgtctactctgtcactcagcgccgaagattcacagtcaacagagtctaacatgtcagtgcctaagaagatgtgcaagcggccttgtatcctgatcttggatagcctgaaagccgcgagtgttcaaaatacagtgcagaatctgcgggagtacctggaggtcgagtgggaggtgaagctgaaaacgcaccggcagttctccaaaacgaatatggtcgacctgtgtcctaaggttcccaagcaggacaattctagtgactgtggagtttacctcctccagtatgtcgaatcttttttcaaagatcccattgtcaacttcgaacttccaattcatttggagaaatggttcccccggcacgtcatcaaaaccaagcgagaagacattcgggagttaatcctcaaactgcatctccagcagcagaaaggctccagctcctag

SEQ ID NO: 136579 - DNA, 3054 bp, synthetic construct
  misc_feature 1..3054: note = Description of Artificial Sequence: Synthetic coding sequence
  source 1..3054: mol_type = other DNA
atgttaaacgcaaaacctgaagatgtgcacgtgcagtcacccttatctaaattccgctcttcagagaggtggaccctacccctgcagtgggaacgctcattaaggaataaagttatttcacttgaccacaaaaataaaaaacatattagaggctgccctgtgactagtaagtcttccccagagaggcagcttaaggttatgctcaccaatgtgttatggaccgacctaggaagaaaatttcgcaaaaccctgccacgaaatgacgcaaacctgtgcgacgcgaataaggttcaatctgatagcctgccttctacaagcgtggatagcttggaaacctgccagaaacttgagcccctgcgccaaagcctgaatctcagcgagaggattccaagagttatcctgacaaacgtgttgggaaccgaactggggcgtaagtatatccggaccccgccagtcaccgaggggtcactgtccgacactgataacctgcagagtgagcagcttagtagctctagcgacggctccctggagtcataccagaacctcaacccgcataagagctgttacctctctgagcgaggtagtcaacgctctaagacagttgatgacaatagcgctaagcagactgctcacaacaaggaaaaacgcaggaaagatgacggcatttccctcttaataagcgatacacagcctgaagacttgaattctggatcgaggggctgcgaccatctggaacaagagagcaggaacaaggacgttaaatactcagacagtaaggtggagctgacgctgatcagccgcaaaacaaaaaggcggctcagaaataacctgcctgatagccaatactgcaccagcctggacaagagtaccgaacaaacaaaaaagcaagaagatgattctacgatctccacagaatttgaaaagccttctgaaaactaccaccaggatcccaagttgccagaagaaataacgaccaagccaacaaagagtgactttacgaaattgagctctctgaactctcaggagctgacacttagtaacgcaacaaaatctgccagtgcgggctcaacaacagagaccgtggaaaactctaactcgatagacatcgttggtatctcttcgctagtggagaaagatgagaacgagcttaacactattgaaaagcctattctgaggggtcacaacgagggaaatcagtctctcatctcagctgaaccaatcgtggtaagcagtgatgaggaggggcccgtcgaacataagtcctctgagatcctgaaattgcagtccaaacaggaccgtgagacaactaacgagaacgagtccacctcagagtcagccttgctcgaactccccctgattacgtgcgaatctgtgcagatgagctctgagctatgtccctataatcctgtaatggagaatatatcttcaatcatgccaagcaacgaaatggatctgcaactcgattttattttcaccagtgtgtacattggaaaaatcaagggcgcctcaaaggggtgcgttaccataacgaaaaagtatataaaaattccttttcaggtgtcccttaatgaaatttccctcctggtggacacgacccacctgaagcgcttcggcctgtggaagagtaaggacgacaaccactccaagcggtctcacgccatactctttttctgggtcagttctgattatctacaggagatccagacccagctcgaacactccgtgctgagtcaacagtccaaaagttccgagtttatattcctggaacttcacaaccccgtatcgcaacgagaagaactgaaactcaaggatataatgacagaaatctccataatctcgggtgaactggaactaagctatcccttgagctgggttcaagcttttcccttgttccaaaacctttcctccaaagaatcgagtttcatccattactattgtgtgagcacatgcagctttcccgccggtgtggcagtggcagaggagatgaagctgaaatcagtcagtcagccatccaacacggatgccgcaaaaccaacttacacattcctgcagaagcaatcctccggctgttattcgctgagtatcacctcgaaccctgatgaagaatggcgggaggtgcggcacaccggcctggtccagaaactgattgtgtatccccctcctcctaccaaagggggacttggagtgacgaacgaggacttagaatgcctggaggaaggcgagttcctgaatgacgtgatcatagatttttatctgaaatacctgatcttagaaaaagccagtgacgaattagtagaacggtcccatatcttttcctcattcttctataaatgcctgacacgcaaggagaataacttgacggaagataacccaaacctgtcaatggctcagaggcgtcataagagagtgaggacctggaccaggcacattaacatattcaacaaagactacatctttgttcccgttaatgaatcatctcactggtacctggctgtgatatgcttcccgtggctggaggaggcggtctatgaggactttccacaaacagtgtcacagcagagccaggcgcagcagagccagaatgacaacaaaacgatagataatgatctccgcactacctcaacactgagcttatccgctgaggacagccagtccactgaaagcaatatgtcagtgccaaagaaaatgtgtaaacggccgtgcatcttgattcttgactctttgaaggccgcctcagtgcagaacacagtgcagaatctgcgagagtaccttgaagttgagtgggaagtaaaattgaagactcatcgccaattttctaagaccaacatggtggatctctgcccaaaggttccaaagcaagacaacagctctgactgtggcgtctacctgctgcagtatgtggagagcttttttaaagatcctatcgtgaactttgaactcccgatacatctggaaaaatggtttcctcggcacgtgataaaaaccaagcgggaagacatacgggagctgattctcaaactccatctccagcagcaaaaaggcagctcctcatag

SEQ ID NO: 136580 - DNA, 2661 bp, synthetic construct
  misc_feature 1..2661: note = Description of Artificial Sequence: Synthetic coding sequence
  source 1..2661: mol_type = other DNA
atgctgaacgccaaacccgaggacgtgcatgtgcagagtcccctgtccaaattcaggtccagcgaaaggtggacccttcccctgcagtgggaacgctcgcttaggaacaaggttatcagtttagatcacaaaaataagaagcacatcagggggtgtcctgttacgtccaagagcagtccagagaggggctcccagagatctaaaacagtggacgataacagtgcaaagcagaccgcgcataataaagaaaagcggagaaaggatgatggaatatccctccttatctctgacactcagccagaagatctgaatagcggaagcaggggctgtgaccacctcgaacaggaatcccgcaacaaggacgtcaagtactccgactctaaggtggaacttacactcatttccagaaaaactaagcgccgactgcggaataatctccccgactcccagtactgtacctcacttgacaaaagtacggagcagacaaaaaaacaggaagacgacagtaccatttctaccgagtttgagaaaccatctgaaaattaccaccaggatccaaagctgcctgaggaaatcactactaaacctaccaaatcggatttcacgaagctgtcaagtctgaacagccaggaactgaccctttctaacgctacgaaaagcgcttccgctggctcaaccacagagacggtcgaaaatagtaactccatcgatatcgtcggtattagctccctggtggaaaaggacgagaatgagttgaacacaatcgaaaaaccgatactgcgtgggcataatgagggcaaccagtcgctgatctcagccgaacctatcgtggtttcatccgatgaagagggccccgtagagcacaaatcatctgagatactcaagctgcagagcaagcaggatagggaaacaacaaacgaaaacgaatcaacctccgagtctgccttattggaactgccactgattacctgcgagtcagtacaaatgagctcagagttgtgcccatacaaccctgtaatggagaacatcagtagtatcatgccttcaaatgaaatggacctccagcttgactttatttttacttcggtctacatagggaaaatcaagggagcttctaaaggctgcgtaacaattaccaagaaatacattaaaattcctttccaggtctctctcaatgagatttctctcttagtggacaccacccacctgaagcgctttggcctctggaagagtaaggatgacaatcatagtaaacgaagtcacgcaattttgtttttctgggtgtcttccgactacttacaagagatccagacccagctagagcacagtgtgctatcacagcagtccaaatcctctgaatttatctttctcgagttgcacaaccctgtttcccagagagaggagttgaagcttaaagacatcatgactgaaattagtatcatttcaggggagttggagctgtcttacccattgagttgggtccaggcttttcccctcttccagaacctgtcctcgaaggaatctagttttattcattattattgtgtgtccacttgcagtttcccagctggcgtcgcagtggccgaagaaatgaaactgaagtccgtcagccagccctctaacactgacgccgcgaaaccgacctatactttcctgcagaaacagagctctgggtgctattcccttagcatcacaagcaatcctgacgaggagtggcgcgaagtaaggcacactgggctggtccagaagttgatcgtgtatccaccccctccgacaaaaggcggcttgggagtgaccaacgaggacctggagtgtctggaagaaggagaattccttaatgacgtgatcatcgacttctacttgaagtacctaattttggagaaggcgagcgacgaattggttgaaaggtcacacatattctccagttttttctataaatgcttgacacggaaggagaacaatctcaccgaggataatccgaacctgtccatggcccagaggaggcataaacgagttcgaacttggacacggcacatcaatatcttcaataaagactacatttttgttcccgtgaatgagtccagtcattggtacctggctgtcatctgcttcccctggcttgaggaggccgtgtatgaagacttcccacagactgtgagtcagcaaagccaggcccaacagagtcagaacgataacaagaccattgataacgacctgaggactacttctacgctttccctgagcgcagaggactcgcagtcaacagagtctaacatgagcgtcccaaaaaaaatgtgtaagcgcccttgcattctgatcctcgattctttaaaggccgcttccgtacagaataccgttcagaatctgagagaatacttagaagtcgagtgggaggtgaaattaaagacccacaggcagttctcaaagacgaatatggtggacctatgcccaaaggttccaaagcaagataactcatcagattgtggagtttatcttttgcagtacgtggagtctttcttcaaagaccctatagtcaattttgaactccccattcacctagagaaatggttcccacgacacgtaataaagaccaaacgagaggatattagagaacttatcctgaagttgcacctgcagcagcagaagggctcgagctcgtag

SEQ ID NO: 136581 - DNA, 717 bp, synthetic construct
  misc_feature 1..717: note = Description of Artificial Sequence: Synthetic coding sequence
  source 1..717: mol_type = other DNA
atgaaaaaatttttgtacatcaagtcagtgtttcacacacttcggatggcccagaggagacacaagcgcgtgcgaacctggactaggcatataaacatcttcaataaagactacatattcgtaccagtgaacgaatctagccattggtatctggcagtgatatgttttccttggttggaggaggcagtgtatgaggactttcctcagacagtgagccaacagtcacaggcccagcagagtcagaacgacaataaaaccatagataatgacttgagaacaacgagcactctatccctgagcgccgaggacagtcaaagcacagaatctaacatgtctgtgcccaaaaagatgtgcaagcgaccctgtatcttaatccttgactccctgaaggctgcgtccgtacagaacacagtgcagaatctgcgcgaatacctggaggttgaatgggaggttaaactcaaaactcacagacagttttctaaaacgaacatggttgatctgtgcccgaaagtgcccaaacaggacaactccagtgactgcggggtttaccttttgcaatatgttgaaagcttcttcaaagatcccatagtgaattttgagctgcccatccacctggaaaaatggttcccccgtcacgtaattaagacgaagcgcgaggatatcagagagcttattctgaagttgcatctccagcaacagaagggcagtagtagttag

SEQ ID NO: 136582 - DNA, 2958 bp, synthetic construct
  misc_feature 1..2958: note = Description of Artificial Sequence: Synthetic coding sequence
  source 1..2958: mol_type = other DNA
atggacaagaggaaacttgggagaagaccctcctcttcagaaatcatcactgaagggaagagaaaaaaatcttcttctgatctgagcgaaattcgtaagatgttgaatgccaaacccgaagacgtgcacgtccaaagcccattatctaagttcaggtcctcggaacgctggaccctccccctacaatgggaacgatcccttagaaataaggtgatctcactggaccacaaaaataagaagcacattcgcggctgtcctgtgaccagcaagtcgagcccagagcgccaattaaaagtgatgcttaccaacgtcctgtggacggacctgggcaggaagtttaggaaaactctgccaagaaacgacgccaacctgtgcgatgccaataaggtccagtccgactcattgccaagcaccagcgtggactcccttgagacttgtcagaagctggagcctctcagacagtctctgaatctgtccgaaaggggatcacagaggtcgaaaactgtggatgataatagtgctaagcagacagcacacaacaaggaaaagcggcggaaggacgatggtatctctctgctaatcagtgatactcagcctgaagacttgaacagcggcagtaggggctgtgaccacctggagcaggagagtcgtaataaggacgtgaaatatagtgattccaaagtcgagctgacattgataagccggaaaactaaaaggaggctcaggaataacctgcctgacagtcagtactgcacatcgcttgataagtctacggagcagaccaaaaaacaggaggatgacagtaccatcagtaccgagttcgaaaagcccagcgaaaactaccatcaggaccccaagctaccagaggaaattacaaccaaacccaccaagtccgattttactaaactgtcttccctgaatagtcaggagttgacgctgtctaacgccaccaagagcgcgagtgccgggtctactaccgagactgtcgaaaacagcaacagcatagatatcgttggcatctcgtctctcgtcgagaaggatgagaatgaacttaacacaatcgagaagcccattttgcggggtcacaatgaagggaaccagagcctcatctccgctgagccaatcgttgtgtcatccgatgaagaaggaccagtggagcacaagagctctgagattcttaaactccaatctaaacaggatagagaaaccaccaatgagaatgaatcgaccagcgagagcgctcttctcgagctgccattaattacctgcgagtccgtccagatgtctagtgagctgtgcccctataatcccgttatggaaaacatctcctctattatgccaagcaacgagatggacttgcagcttgacttcatttttaccagcgtatatatcggaaaaataaagggagctagtaaaggctgtgtaaccatcactaagaagtacattaaaattcccttccaggtttccttaaatgaaatatctttgctcgtggacaccactcatctgaagcgttttggcctgtggaaatccaaagatgataatcacagcaaaaggagccacgctattctctttttttgggtgagctctgactatctgcaagaaatccagacacagctcgagcactcagtcctgtcccaacaatccaaatcatcagagtttattttcctggaactccataacccggttagccaacgggaggagttgaagttgaaggatatcatgaccgagatttcaattatctcaggcgaactcgaactgagctacccgttgtcatgggtccaggcctttccgctttttcagaatctctcctctaaggagtcaagctttatccactattattgcgtgtccacgtgctcctttcctgctggcgtggcagtagccgaggagatgaaactgaaatccgtgtctcagccctcaaacactgatgcagctaagcctacttatacttttctgcaaaagcaatcctctggatgttactctttaagtattacctccaaccctgacgaagaatggcgagaagtccgacacactgggctggtccaaaagcttatcgtctatcccccaccacctacaaaaggcggcctgggagttacaaacgaagatctggagtgcttggaggaaggggaatttctcaatgatgtgataattgatttttatcttaagtacctgattttagaaaaggcgtccgacgaactggtggagcggtctcacatcttctcttcttttttctacaagtgcctcactagaaaagagaataaccttaccgaggataatccaaacttgtctatggcgcagaggcgccacaagagagtccggacttggactagacacatcaatatctttaacaaagattatatttttgtaccggtaaacgagtcctcacattggtacctggcggtaatctgctttccatggctcgaggaagcggtgtatgaagactttccacagacagtgtcgcagcagtctcaagcacagcagtctcagaatgacaacaagactatcgataatgacctgaggaccaccagcacactttcgttgagcgctgaggatagccaaagtaccgagagtaatatgtctgtgcccaagaagatgtgtaagaggccctgcattctgatcctggacagtttgaaggctgcatctgtccagaacactgttcaaaatcttagagagtacctagaggtcgaatgggaggtaaaactaaaaacccaccgccagttcagcaaaacgaatatggttgatctttgtcctaaagtgcccaaacaggataactccagtgattgtggcgtgtatctgctgcagtacgtggagtccttctttaaggatcccattgttaatttcgagctacccattcacttagaaaaatggtttccccgtcacgtcataaagactaaacgagaggatatacgggagctgatcctcaaactccacctccagcaacagaaaggtagctcctcttag

SEQ ID NO: 136583 - DNA, 3153 bp, synthetic construct
  misc_feature 1..3153: note = Description of Artificial Sequence: Synthetic coding sequence
  source 1..3153: mol_type = other DNA
atggacaaacgaaagctgggccgccgcccatcctcatctgaaattatcactgagggcaagcggaagaagtcgtcctccgatctatccgaaatcagaaagatgctgaacgccaagcctgaggacgttcacgtacagagccccctctcaaagtttaggtcttcagagagatggacccttcctctgcagtgggaacggagcctgcggaataaggtcataagcctggatcacaagaataagaagcatatcagaggatgtcccgtgacatctaaatctagccctgagcggcaattaaaggttatgctaacaaacgttctgtggactgatctggggaggaagtttcggaagactctccctcgcaacgacgcaaacctttgcgacgcaaataaggtacaaagcgattcgttaccatcgacttcagtcgactccttagagacctgccagaagctcgagcccctgcgacagtctttgaatctcagcgaaagaatcccacgtgtgattctgacaaatgtgctgggaacagaactcggcaggaaatatatcaggacgcccccggtgacagaagggtctctgagtgacactgacaacctgcaaagcgagcaactctcaagtagttccgacgggtccctcgagtcttaccagaacctgaacccgcacaaaagctgctacctgagcgagcgcggaagccagcggtccaagaccgtcgacgacaattctgctaaacagaccgcccataacaaagagaagaggcgcaaagacgacggcatcagtctcctgatctctgatacccagcctgaagatctgaactctgggtctcgaggttgtgaccatctcgaacaagaatccaggaacaaggacgtgaaatacagcgactccaaagtcgaactcaccctcatttcacgcaaaactaaacgcagactgcggaataatttgcccgacagccagtattgcacctccctagacaagtccactgaacagacaaagaaacaggaagatgattctaccatttctaccgaatttgagaagccaagtgagaactatcaccaggaccccaagttaccagaagagatcaccaccaagcctaccaagtccgatttcaccaagttgtcttctctgaattcgcaggagctaaccctctccaatgcaactaaaagcgcatccgctggaagcacaactgagacagttgagaattcaaacagtatagacatcgtaggcatctcttcgttggtggagaaagatgagaacgaactgaacactattgaaaagccaatcctgagaggacataacgaagggaatcagtctcttatctctgccgagcctattgtggttagctcagacgaagagggacctgtcgaacataagagcagtgaaatacttaagctccagagtaagcaggatagggagaccacaaacgagaacgagtctacgagcgagtccgctctcttagagcttcccctcatcacgtgtgagtccgtgcagatgtcaagtgagctctgcccttataaccccgttatggagaatatttcttctattatgcccagcaatgaaatggacctgcagctggatttcatctttacatccgtgtatattggcaaaattaagggcgcaagcaagggatgcgtgacaatcaccaaaaaatatataaagatcccatttcaggtgagcctgaacgagatctccttgctagttgacactacccatctcaaaaggttcggattatggaagtccaaggatgataaccattcaaaacgatctcatgctatcctttttttctgggtatccagcgattacctccaagaaatccagactcagctggaacattccgtgctgagtcagcaaagtaagagttccgagtttatcttcctcgagcttcataaccccgtgtctcaacgggaggagctcaaactcaaagatattatgacggagatttccattatcagcggcgagctggagcttagttatccgctctcatgggtgcaggcctttcctctgttccagaatctgtccagcaaagaaagttcatttatccactactactgtgtgagcacctgctccttcccagccggcgttgccgtggcggaagagatgaagctcaagtcagtcagtcaacccagtaacacagacgcggcgaagccgacttacacctttcttcagaagcagtcaagtggctgttactccctctctatcacttcaaatccggacgaagagtggcgggaagtgagacacactggattggtccagaagctgatcgtgtaccctcctccacctacaaaggggggacttggcgtgacaaacgaagatcttgagtgcctggaagaaggagaatttttgaacgatgtcattatcgatttctacctgaaatatctaatcctagaaaaagcctccgacgagctcgttgagagatcacatattttttccagcttcttctacaagtgtctgacacggaaggagaacaacttgaccgaggacaatcctaacttgtctatggctcagagaaggcacaagcgggtgcgaacctggacacgtcacatcaatatatttaacaaggactacattttcgtaccagtgaacgagagctcccattggtacctcgcagtgatttgcttcccgtggttagaggaagctgtctatgaggacttcccacaaacagtcagtcagcagtctcaggcgcagcagagccagaacgacaataaaacaatcgataatgatctgaggacgacttcaacactgtccctgtccgccgaggatagtcagagcaccgagagcaacatgtctgtgccaaagaagatgtgcaaaaggccttgcatccttatcctggattcccttaaagcggcatcagtgcagaacaccgtacagaatctgagagagtacttagaggtggaatgggaagtcaaacttaagacccaccggcagtttagtaagactaacatggtggatctatgtccaaaagttccaaagcaagataactccagtgattgcggcgtctacctgctccagtacgtggagtctttcttcaaggaccccattgttaactttgagctccccattcacctggaaaagtggtttccacgccatgtaattaaaaccaaacgagaggatatacgggagcttatcctcaaactgcacctgcagcagcagaaggggagcagctcttag

SEQ ID NO: 136584 - DNA, 1770 bp, synthetic construct
  misc_feature 1..1770: note = Description of Artificial Sequence: Synthetic coding sequence
  source 1..1770: mol_type = other DNA
atgtaccgatggctggtgaggattttgggtaccatcttcaggttttgtgatagaagcgtgcccccagccagagccctgcttaaacgccgtagatctgacagtacactgttcagcaccgtcgatacagacgaaatcccagcgaagcgtcccagactggactgctttatccaccaggtgaagaattctctgtataacgcagcttccttgttcggcttcccctttcagctcactacaaaacctatggtgacctcagcctgcaatgggacacgtaatgtggccccttcaggagaagtgtttagcaactctagctcttgtgagttgactggatccggttcctggaataacatgctgaagctcgggaataaatcaccaaatggaatctccgactatcccaaaatccgcgttaccgtaacccgggaccagccacggcgggtcctgccaagcttcggattcactctgaattctgaaggctgcaataggcgaccgggcggccgtagacattccaaaggcaatcctgagtcgtccctgatgtggaagccgcaggagcaggccgtaaccgagatgatctcagaagagtctggcaaaggtctcaggcggccacactgcacagttgaagaaggtgtgcagaaagaggaacgcgagaaatataggaagctacttgaacgtttgaaagagagtggacacggcaacagcgtctgtcccgtcacttccaactaccactcatctcagcggtcccagatggacaccctgaaaaccaaagggtggggcgaggaacagaatcatggtgtgaaaacaactcagttcgttccaaaacagtaccgccttgttgaaacgcggggccccctctgttcactgaggtctgagaagagatgctccaagggcaaaattactgataccgaaaccatggtgggcatcagattcgagaatgagtctcggagaggctatcagctcgaacccgacctctccgaggaagtgagtgctcgacttcgtttaggctcagggtcaaacgggctgcttcggcgcaaagtctctatcatagagaccaaggagaagaattgctccggaaaagaacgggataggcggacggacgatcttcttgaacttacggaagacatggagaaggagatctcaaatgcacttggacacggccctcaggacgagattctttcttcggcattcaaacttaggataacacgtggtgatatccagacattgaaaaactaccattggctgaatgacgaagtcataaacttttatatgaacctgttggttgagcgcaacaagaagcagggatatcctgccttacatgtttttagtaccttcttttatcctaagttgaaatcaggcggctaccaggccgtgaagcggtggaccaagggggtcaacctgttcgaacaagaaattatcctggtgccaatccaccgcaaagtacactggtctttggtggtaattgatctgagaaaaaagtgtcttaaatatctggactccatgggccagaaaggacatcgcatttgcgagattctccttcagtatctgcaggatgaaagcaaaactaaacggaactccgatcttaatcttctggagtggacgcaccactctatgaaaccacacgaaattcctcaacagctaaatgggtccgattgtgggatgttcacttgcaagtatgccgactacatcagtcgagacaagcccattaccttcacgcaacatcagatgccactgttccgcaaaaaaatggtttgggagatcctgcatcaacaactgctgtag

SEQ ID NO: 136585 - DNA, 1242 bp, synthetic construct
  misc_feature 1..1242: note = Description of Artificial Sequence: Synthetic coding sequence
  source 1..1242: mol_type = other DNA
atgtggaagccccaggaacaggctgtgactgagatgatctcagaggaatctggaaagggcctgcgccgaccccattgcactgtggaggagggagtccagaaggaagaaagagaaaagtacaggaagctgcttgagagactgaaggaatccggacatggcaacagcgtgtgccctgtgaccagcaattaccatagctcacagaggtcacagatggacacattgaaaacaaagggctggggcgaagaacaaaaccacggtgtgaagacaactcagtttgtccctaaacagtaccgcttagtggaaaccagaggccctctgtgttctctgcggtctgagaaacgctgctccaaggggaagatcacagacaccgagacgatggtcggaattaggttcgaaaacgagagtcggcggggataccaattggagccggacctgtctgaggaggtgagcgcccgtttgaggttgggttctggttcaaacggactgctccgaaggaaggtcagcataatcgagacaaaagaaaaaaattgctctggcaaggaacgcgatcgtagaactgatgatctactggagctcacggaagacatggaaaaagagatcagtaatgccttaggccacgggccacaggacgagatcctgtcttcagccttcaagctgcggataacccgaggagatattcagaccctgaaaaattaccactggctgaacgacgaggttattaatttctacatgaacctcctggtagaaagaaacaagaagcagggctacccggcactgcatgtgttttcgaccttcttttatcccaagctcaagagcggcgggtaccaggccgtcaaacggtggactaagggggtcaacctatttgagcaagagattattttggttcccattcaccgaaaagtgcactggtcgcttgtagtcatcgacttgagaaagaagtgccttaaatatctggatagtatggggcagaaggggcacagaatctgcgagatcttattacagtatctgcaggatgaatcaaaaactaagaggaactcagacctcaacctgctcgaatggacccatcacagtatgaaaccacacgagattcctcagcaacttaatggcagcgattgcggtatgttcacctgtaaatatgctgattatatcagcagagataaaccaattaccttcactcagcatcagatgcccctgtttagaaagaagatggtttgggagatcctgcaccaacagttgctgtag

SEQ ID NO: 136586 - DNA, 1383 bp, synthetic construct
  misc_feature 1..1383: note = Description of Artificial Sequence: Synthetic coding sequence
  source 1..1383: mol_type = other DNA
atgtatcgatggctagtgcggatcctcgggaccatcttccgattctgtgaccgcagcgtgccaccggctcgagctctgctcaaaagacggcgttctgattccactctgttcagtacagtggatactgacgaaatccctgctaaacgcccccgtctagattgtttcatccaccaagttaagaactccctctacaacgcagcctctctgttcgggttccctttccagttgactaccaagcccatggtcacctctgcctgcaatggaactcgaaatgtagcaccctctggagaagtgaatggaaactcagtttgtcccgtgacaagcaactaccactctagtcagagatctcagatggatacccttaagaccaaggggtggggcgaagaacagaaccacggcgtgaaaacaacccagttcgtccccaagcagtaccgtctcgtcgagacaagggggcctctgtgttctctccggtccgagaagcgctgcagtaaaggcaaaatcactgacaccgagaccatggtgggcattcgctttgagaacgagtcccgcaggggctaccagctggaacccgatctttcagaggaggtgtctgcaaggctgcggcttggcagtggatctaatggcctgctacggcgcaaggtgagtattattgaaactaaggaaaaaaattgttctggaaaggaacgggaccgcagaactgacgacctactcgaactgaccgaggacatggagaaggagattagtaacgctctgggacacgggccccaggatgagatactctcaagcgcatttaagcttcggatcaccaggggtgacattcaaactctcaagaactatcactggctgaacgacgaagtcatcaatttctatatgaatcttctggtcgagagaaataagaaacagggataccccgccctccacgtattcagtacattcttttaccctaagcttaaatcggggggataccaagccgttaaaaggtggacgaaaggcgtgaatctttttgagcaggagattattcttgtgccaattcataggaaagttcattggtctttggtggtgatcgacttgcgcaaaaagtgccttaaatatttggactccatgggacaaaaaggccacaggatttgtgagatactgctgcagtaccttcaggatgagtcaaaaaccaagaggaatagtgatctgaacctcttggaatggacccatcatagcatgaagccccatgagattcctcagcaactcaatggtagcgattgcggaatgttcacgtgcaagtatgcagactacatttcacgtgacaaacccattacattcacgcagcatcaaatgcctctcttccgcaaaaaaatggtatgggagatcctgcatcaacagctgctgtag

SEQ ID NO: 136587 - DNA, 1740 bp, synthetic construct
  misc_feature 1..1740: note = Description of Artificial Sequence: Synthetic coding sequence
  source 1..1740: mol_type = other DNA
atggacagccacccctgtttgtactgcgggccacaggacagtgaggggacgaattggcagacctctccatctacgctgttttccacagtcgatacagatgagatccccgcaaagagaccacgtttggattgctttatccaccaggtcaaaaatagcctgtataatgccgcctctttgtttgggttcccatttcagctaaccaccaagccaatggtcacatctgcgtgtaatgggacccgaaacgtggccccctcaggcgaggtcttctccaatagctccagctgcgagcttactgggtccgggtcatggaacaatatgctgaaactaggcaacaaatcacccaatggcatcagcgactaccccaagatccgagtgactgtcactcgagaccagccccgacgcgtgctgccaagctttgggttcaccctaaattccgaaggttgcaacaggaggcccggagggaggagacattctaaaggcaaccctgagagctcactgatgtggaagccccaggagcaggctgtgacagaaatgatatcagaggagtcggggaagggactgcgccgaccacactgcaccgtggaggagggcgtccagaaagaagagagagagaagtatcggaagctacttgagcggctgaaagagtctggtcacgggaatagcgtctgccccgtaacctccaactatcatagctcacaaaggtcacagatggacaccctgaagactaaaggttggggggaggaacagaaccacggggtgaagactacgcagtttgtcccaaaacagtacagactagtggaaacaagaggtcctctgtgcagtctgcgaagcgagaaaaggtgctccaagggaaagatcactgatacagagaccatggtgggcattcgatttgaaaatgagtcacgacgcggttaccagcttgaaccggatctgtcggaggaggtgagcgcgagactgcgcctggggtctggctccaatggactcctgcggcggaaggtttcgatcatcgagacaaaggagaagaattgctcaggcaaagagagagacaggcggaccgatgatctgctggaacttaccgaggacatggaaaaagagatatctaacgcccttggacacggcccccaggatgagatcctcagctccgcttttaaactgcggatcacacgtggcgatattcaaacccttaagaactaccactggctcaacgacgaggttatcaatttctacatgaacctgctggtggaacgaaacaaaaagcaagggtacccagcgctgcacgtctttagcaccttcttttatcccaaactcaagtccggcggctaccaagccgtgaagagatggacaaaaggagtgaacctcttcgaacaggagatcatcctggtacccattcatcggaaggtgcattggtcactggtggtcatcgatctgcgtaagaagtgcctgaaatacctagattcgatgggccagaagggccaccgaatctgtgagatcctgcttcaatacctgcaggacgaatccaagacaaaaagaaacagtgatctgaatcttctagaatggactcaccatagtatgaagccccacgagatcccacagcagcttaatggatctgactgcgggatgttcacctgtaagtatgcagactacatctcacgcgataagccaataacttttacccaacatcagatgccgctcttcaggaaaaaaatggtctgggagatccttcaccaacagctgctctag

SEQ ID NO: 136588 - DNA, 1722 bp, synthetic construct
  misc_feature 1..1722: note = Description of Artificial Sequence: Synthetic coding sequence
  source 1..1722: mol_type = other DNA
atgaaagagacgatacaggggactggctcatggggcccagagccgccaggcccaggaatacctcctgcatactcgagcccacgcagggagaggcttagatggccccctcctcctaagccgagattaaagagcggggggggcttcgggccagaccccggatccggcaccaccgttcccgccagaaggctaccagtacccaggcccagcttcgacgcaagcgcctcggaagaagaagaggaggaggaggaagaagaggatgaggatgaggaggaagaggtagcagcttggcgcctgcccccacgatggtcacaactgggcacaagccagcggcccagaccctcaagacccacccataggaaaacatgttcgcagaggcgcagaagggctatgagagcttttagaatgctgctgtacagcaagagtacctctctgacctttcattggaagctgtggggccggcaccgcgggagacggaggggccttgctcatcccaaaaatcatctgtcaccccagcaaggcggcgctaccccgcaggtcccaagcccctgttgtcgatttgatagccctcgtggccccccgcccccccggctgggattgctcggggctctcatggccgaggatggcgttcgggggtctccgcccgtcccgtctggtccgcccatggaggaagatggattacgctggacacctaagtcccccttggaccccgactccggcttgctatcctgcactttgcctaacggattcggcgggcagagcggtcccgaaggggaacggtctctggcacccccagatgcctccatcctgatctccaatgtctgcagcatcggtgaccatgtcgctcaggagctgttccagggaagtgaccttgggatggcagaggaggccgagagaccgggagaaaaagcaggacagcacagtccattacgcgaggagcacgtaacttgtgtgcagagcattttggatgaattcctgcagacctacggatctctgataccactgagtaccgacgaagttgtcgagaagctggaggacatcttccagcaggagttttccaccccaagtcgtaaggggttggttctccagcttatccagagctaccagaggatgcctggaaacgcaatggtacgggggttcagagtcgcttataagcgccatgtgctaacgatggatgacctggggaccttgtatggtcagaattggcttaacgatcaggtgatgaacatgtacggcgacctggtgatggacactgtgccagaaaaagtacactttttcaactcattcttttatgacaagttgaggactgggtacgatggagtgaagcggtggaccaagaatgtggatatcttcaacaaagaacttctgctgattcccattcacctggaggtacattggagcctgatttcagtcgacgtgcggcgcaggacaattacttattttgactcccagcgcacgctcaacagaagatgccccaagcacatcgccaaatatcttcaggcagaagcggtgaagaaggatcgactggacttccatcagggctggaagggctattttaaaatgaacgtggcgcggcaaaacaatgatagcgattgtggtgctttcgttttgcagtactgtaaacatctggcgttgtcacagcctttttcgttcacccagcaggatatgcccaagctccgcagacaaatatataaggagctctgccattgtaaactcacagtatag

SEQ ID NO: 136589 - DNA, 1725 bp, synthetic construct
  misc_feature 1..1725: note = Description of Artificial Sequence: Synthetic coding sequence
  source 1..1725: mol_type = other DNA
atgaaggagacgattcagggcacagggtcttggggtccagagcctccaggacccggaatacctccagcctattctagcccgcgacgggagcggctgcggtggccacctcccccaaagcctcgcctgaagtcaggtggtggcttcggacccgaccccgggagtggaactacagtccctgcacggcgacttcctgttccgcggccctcctttgacgcatctgcaagcgaggaagaggaggaagaggaagaagaggaggatgaggatgaagaggaggaggttgccgcctggcgactcccgccacggtggtcgcaattgggaacgagccagcgcccccgtccttcacgacccactcaccgcaagacatgtagtcagaggcgacgcagagccatgcgagcgtttcgaatgctgctgtactcaaaatccaccagtctgaccttccactggaaactgtggggaaggcaccgtggccgaagaagaggcctggcccatcctaagaatcacctgagtccgcagcaggggggggctaccccgcaggtaccgagcccgtgttgcaggtttgactcaccccgcggaccacccccccccaggctagggctcctaggcgccctaatggcagaagacggagtgagaggcagtccaccggtccccagcgggccccctatggaagaggacggccttcggtggactccaaaatcaccattagatcccgattcagggctgctcagctgtacgctgcctaatggattcggcggacagagtggaccggagggggagagaagcctcgccccacccgacgcttctatccttataagcaacgtgtgctccatcggcgaccatgtagcgcaagagctgtttcagggctcggacctgggaatggccgaggaagccgaacggcccggagaaaaagccgggcaacatagtcctctgagggaagaacacgtcacctgcgttcagtcgatactcgacgaatttttacagacatatgggagtcttatccctctcagtacggacgaagtggtggagaagctcgaggacattttccagcaggagttttctacaccaagccggaaaggactggttctgcagctgattcaatcctaccagagaatgccaggtaacgcaatggtgcgggggttccgggtagcttacaagcgacatgtactcacgatggatgatctggggacactgtacggccagaactggttaaatgaccaggttatgaacatgtacggcgacttagttatggacactgtcccagagaaggtgcacttttttaatagttttttctatgacaagctcaggaccaaagggtacgatggcgtgaagcgctggacaaaaaatgttgatatctttaacaaggagctgcttctcatcccaatccacctggaagtccattggtcactgattagcgtagacgtaagacggcggaccatcacgtattttgactctcagcggacactcaaccgacggtgcccaaagcatatagctaagtaccttcaggccgaggccgtcaagaaggataggctcgactttcaccagggctggaaggggtacttcaagatgaacgtcgcgagacagaacaatgactcagactgcggcgcttttgttctgcaatactgtaaacacctcgcgctttcgcagccattctctttcactcagcaggacatgccaaaactcaggaggcagatctataaggaactttgccattgtaaacttactgtctag

SEQ ID NO: 136590 - DNA, 3741 bp, synthetic construct
  misc_feature 1..3741: note = Description of Artificial Sequence: Synthetic coding sequence
  source 1..3741: mol_type = other DNA
atgatggagaccgaacggctcgtgctcccccctcctgaccccttagatctgcctctacgggctgtagagcttgggtgcaccggacattgggaactattgaatctccccggagccccagagagcagcctgccacatggcttgcccccttgtgcgcccgacctacagcaggaagcagagcagctgttcctctcttctccggcatggctgcctctacatggagttgagcactcggcccgaaagtggcagcgcaaaaccgacccatggtccctgttagccgtgttgggggcgcccgtaccctcagatctgcaggcacagcggcaccccaccaccggacaaatattaggctacaaagaggttctgctggaaaacaccaaccttagcgccaccacctcattatccctgaggcgcccgcctggcccggcttcacagagcctgtgggggaacccaacccagtacccattctggccaggggggatggacgaaccaacaatcacagacctcaacacacgggaggaggcagaggaggagattgattttgaaaaggacttgctcacaatcccacctggatttaagaaggggatggacttcgccccaaaggattgccccacaccagcacccgggctgcttagtctgtcttgtatgctcgagccactagatctgggcggcggagacgaggacgagaacgaagcagtagggcaaccgggcggtccacgcggggatactgtcagcgcctcgccttgcagcgcaccattggccagagcatcaagtttggaggatctggtgctcaaggaagcaagcactgctgtttccacacctgaggcccctgagcctccctcacaggagcagtgggccatcccagtagacgctacgtctcctgtcggtgatttttacaggctgataccccagcctgcttttcagtgggcctttgaacctgatgtttttcagaagcaagcaattctgcacctggagaggcacgattccgtctttgtggcagcacacaccagtgccggcaaaaccgtggtggccgaatacgctattgccttggcccagaaacatatgacaagaaccatatacactagtccgattaaggccctttccaaccaaaagttccgggactttcgcaatacattcggcgatgtgggtttgctcaccggcgacgtgcagcttcatcctgaagcatcatgcttaatcatgaccaccgaaatcctccggagcatgctctactcaggaagtgacgtgattagagacctcgaatgggtcattttcgacgaagtgcattatatcaatgacgtcgaacgaggagtcgtgtgggaggaagtgctcatcatgctgcccgatcacgtgagcatcatactcctgtcagctactgtgccgaatgctcttgagttcgcagattggatcggccggctcaaacgccggcaaatttacgtgatctcgacagtgactaggcctgtgccccttgagcactacttattcacaggcaactctagtaagacccagggggagctgtttttactgctagacagcaggggtgcgtttcacacaaaaggttattatgcagcagttgaggctaaaaaagagcgcatgtcaaagcacgctcagaccttcggcgccaaacaaccaacgcaccagggcggcccagcgcaggaccgcggagtctacttatccctgctcgccagtctcaggacccgagcacaacttccagttgtggtgttcaccttctctagaggccggtgcgatgagcaggcatccggactcactagtttagacttgactaccagctccgagaagtcagagattcacctttttctccagcgttgcctggctaggttacgtggctctgatcgacagttaccacaggtgctccacatgagcgagctcctcaaccggggcctcggggtgcatcatagcggtattttgcctatactcaaggaaattgtcgagatgctgttttctcgtggtctggtgaaagtactatttgcgacggaaacttttgcaatgggagtgaacatgcccgcccgaaccgtcgtgttcgactccatgcgcaagcacgacgggtctacgtttcgggacttgttgcctggggaatatgtgcaaatggctggacgggctggccgacggggcctggacccgaccggaactgtaatactgctatgcaagggccgggtgccagagatggcggacctgcataggatgatgatgggcaagcctagccagttacagtcccagttccgtctgacctacacaatgattcttaatctgttacgcgtagacgcactccgcgtcgaagacatgatgaagcggtctttcagtgaattcccctctcggaaagactctaaggcacacgaacaggcactagcggaactcaccaaaaggttaggagccctcgaggagcctgacatgaccggacaactcgttgatctgcctgagtactactcttggggcgaagagctgaccgaaacacagcatatgattcagaggcggataatggaatctgtaaatgggctgaagtctttgtcagctggcagagtcgttgtagtgaagaaccaggaacaccacaacgccttgggagtcattctgcaagtaagctcgaactccacctctagagtgtttacaaccctcgtgttatgcgacaagccattgtcccaggatccccaggaccggggacccgccactgccgaagttccataccctgacgacctggtcgggttcaaactgttcctgcctgaggggccctgcgaccacaccgtggtgaaactccagcctggagacatggccgctatcacgaccaaggtgctacgcgttaacggcgaaaagattctggaggacttctctaaaagacagcagcctaaattcaagaaggacccgcctttggcagctgtgacaaccgccgtgcaagagcttctccgactagcacaggcccatcccgcaggccccccaaccctggaccccgtgaatgacctacagctgaaagacatgtcagtggttgaggggggccttagagctcgaaagttagaagaattgattcagggagcccagtgtgtgcattcccctagattcccagcacagtatctgaagctgagggagaggatgcaaatccagaaagaaatggagcgcctgcgattcctgctgtctgaccagagtctgctgcttctgccggagtaccatcagagggtcgaggtgcttcggacactaggctatgtcgatgaagccgggacggtgaaactcgccggccgggtagcatgcgccatgagctctcacgaattgctgctgactgaattgatgttcgacaatgccctgagtactctgcggcccgaagagatagcggcattattgtcagggctggtgtgtcaatctccaggagacgccggcgaccagctcccaaataccctgaaacaaggcatcgagagggttcgagccgtagccaagcgtataggcgaggttcaggtggcatgtggtttgaatcagaccgtggaagaattcgtcggcgaactgaacttcggcctagtggaagtggtctacgagtgggcgcggggaatgcctttctccgagctggctggactgtctgggactcctgagggactggttgttcggtgcatacagcggcttgcagaaatgtgccggtccctacgcggtgccgctcggctggtcggggagcctgtcctgggtgctaaaatggaaacagctgccacactgctccgccgtgatatagtctttgccgcttcgttatacacccagtag

SEQ ID NO: 136591 - DNA, 3741 bp, synthetic construct
  misc_feature 1..3741: note = Description of Artificial Sequence: Synthetic coding sequence
  source 1..3741: mol_type = other DNA
atgatggaaactgaacggctcgtcctgcctccgcccgaccccctagatttaccattgagagcagtggagctcggatgtacaggccattgggaactgctgaatctgcccggcgctcccgaatcatcactgccacacggactccccccatgcgctcccgatcttcagcaagaagccgaacaactttttctctcttctccggcttggcttcctctgcacggcgtggagcacagtgcccgtaagtggcagcgcaagaccgatccatggagtctgctggctgtcttaggcgcacccgtgccctctgacctacaggctcagcgccacccaaccactggacaaatcctcgggtacaaagaggtgctcctcgagaatacaaatctgagcgccacaacctccctctctctgcggagaccgccaggccccgcgtcccagtcattatggggcaaccctactcagtatcccttctggccaggcggcatggatgaacccacgataaccgacctgaacacaagggaggaagctgaagaagagatcgatttcgaaaaagatttgctgaccatccctcctggctttaagaaaggaatggatttcgcacctaaggattgccccactccagcacccggcctcctctcgctaagctgtctgctcgaacccttggatctgggcggcggcgatgaggatgagaacgaggccgtagggcagcccggcggtcccaggggggatactgtatcagctagcccctgctctgctcccctggcccgcgcctcatcactcgaggatctcgtgttaaaggaagccagcacagcagtgtcaacaccagaggcgcctgagcctccgagccaggagcagtgggctattcctgtggacgccacgtccccagtgggagacttctacagattaatcccccagcctgcattccagtgggctttcgaaccagacgtgttccaaaagcaggcaatcctccatttggagaggcatgattcggttttcgtagctgcccacacctctgccggcaagacagtcgtggccgaatatgcaatagcactcgctcagaagcacatgactcgtaccatttatacaagcccaatcaaggcactgtccaatcagaagttcagagatttccgcaatactttcggggatgtgggcctcctgaccggagacgtgcaactgcaccccgaagccagttgtctgattatgacaacagagatcttacggagcatgctctactccggttcggatgtgataagagacctggagtgggtcatttttgatgaagtgcattacatcaacgacgtcgagcgtggcgtggtttgggaggaggtcctgatcatgctccctgaccacgtgtccatcatactcctaagcgccacggtgccaaacgccctggagttcgctgactggattggacgactcaagcgccgccagatctatgtcatcagtacagtgacaagaccagtgcccctcgagcactaccttttcaccggcaattcctcgaaaacccagggagaactcttcctgctactggattctcgaggcgcttttcacactaaaggctactatgccgcggtggaggctaaaaaggaacgcatgtcaaagcacgcccagacatttggagccaaacagcctacccaccagggcggacctgctcaagaccgcggagtgtacctttctttattagcctcgctccgaacgagagcccagctgccagttgtggtgttcactttcagtcggggcagatgcgatgagcaggcctccggtctcacgagcttagacttgacgactagttcggagaaatctgagatccatttgtttttgcaaagatgtcttgctagattgcgggggagtgatcgacagctgcctcaggttttgcacatgtctgagttgttgaatcggggcctgggagtgcaccattcaggaatcctgcctattctgaaagagattgtggagatgctgttctcccggggcctcgtgaaagtgctattcgcaacagaaacgtttgctatgggcgtgaacatgccagcaaggacagtagtgtttgactccatgcgcaagcacgatggcagcacattcagagatttactgcctggtgagtatgtgcagatggccggacgggcaggtagacgggggctcgacccaacgggcacagtgatcctgttgtgcaagggccgcgtgccagagatggcggatctgcatcgcatgatgatgggaaaaccctctcagctccagtcgcagttccgcttgacttacacaatgatccttaacctgctgcgggtggatgctctgagagtggaggatatgatgaagcgttcttttagtgagtttccctcccgcaaggactctaaagcccacgagcaggccctcgccgagctgaccaaacggctcggagcactcgaggagcctgatatgaccggacagctggttgacctaccagagtactacagctggggggaggaactcactgagactcagcacatgattcagagacggatcatggagtcagtgaacggcctaaaaagcttgtcggcaggcagagtggtggtggtgaaaaatcaggagcaccataatgcactcggtgtaatcctgcaagtgagtagtaattccacatccagagtttttaccacgctggtgctatgtgacaaacccctgtctcaagatccccaggacagggggcctgcaactgcagaggtgccctatcccgatgacctggtcggattcaagttatttcttcccgagggtccgtgcgatcacacggttgtgaaactgcagccaggcgatatggctgctatcactactaaagtgttgcgagtgaacggagaaaagatcttagaagatttttccaaacggcaacagcccaagtttaagaaggatccaccactagccgcagttaccacggccgtgcaggaattgctcagactcgcccaggcccacccagctgggcctcctacgcttgacccagtgaacgatctgcagttgaaggacatgagtgtggtcgaaggtggactgagggcccgtaagctggaagaactgattcagggcgcccagtgtgttcacagtccaagatttccagctcagtacctgaaactcagggaacgcatgcagatccaaaaggagatggaacgactgcggttcctgctgtcagatcagagcctcttgctgctcccagagtaccaccagagggtggaagtgctccgaaccttggggtacgtagatgaagcagggaccgtaaagctcgccgggcgagttgcctgcgccatgagttcacacgaacttttgctgactgaactgatgttcgacaatgctcttagcactctgcgcccagaagaaatcgccgcgctgctgtcaggcctggtgtgtcaatcacccggcgatgccggtgaccagctgccaaacacccttaaacagggtattgaacgcgtaagagccgtagcaaaacgcattggtgaggtgcaagtggcctgtggcttgaatcagactgtggaggagtttgtgggagagttgaacttcggactcgttgaggtagtctacgagtgggcccgtggcatgcccttctccgaacttgctggcctgtcaggaaccccagaaggactggtggtgagatgtatacaacgcctggcggagatgtgcaggtcgttgcgaggagcagcccgcctggttggagaaccagtgctaggcgcaaaaatggagacagctgcgacactgttgcgccgcgacatcgtctttgctgcatccctatacactcagtag

SEQ ID NO: 136592 - DNA, 3741 bp, synthetic construct
  misc_feature 1..3741: note = Description of Artificial Sequence: Synthetic coding sequence
  source 1..3741: mol_type = other DNA
atgatggaaactgagagattagtccttccacccccagatccactcgacctgccgcttcgggccgtagaactgggatgcaccggccactgggagctgctgaacctgcctggggcacctgagagttcgcttccgcacggactacccccctgtgcaccagatctacagcaggaagccgagcagttgtttttatcctccccagcttggttgcccctgcacggcgtcgaacacagcgcaaggaagtggcagaggaagaccgatccctggagcctgctggcagttctgggggcacctgtgccgtcggacctgcaggctcaacgccaccctacgaccggtcagattctgggctataaagaggtcctgctagaaaacaccaatcttagcgccacaacaagcctgagccttagacgacccccaggacctgctagtcagagcctttggggcaatccgactcagtaccccttttggccaggtgggatggatgagcccactattaccgacctgaacacaagagaggaggccgaggaagaaatcgacttcgagaaagacctcctgacaatcccaccgggtttcaaaaagggcatggacttcgctcctaaagactgcccgacccccgcaccaggactgctctcgctgagctgcctgcttgagccattggacctgggtggtggcgatgaggatgagaacgaagctgttggccagccaggtggaccaaggggagatactgtcagcgcttccccttgtagtgctccccttgccagagcaagctctctggaagaccttgtgttgaaagaagcaagtaccgcagttagcaccccagaggcgcccgagcccccctctcaggaacagtgggccattcctgtcgacgccactagtcccgtaggggacttttataggcttatacctcagcctgccttccagtgggcgtttgagccagacgtgttccagaaacaggccatcctgcatctggagcgtcacgacagcgtctttgtcgccgcgcacaccagcgccgggaagacagtggtcgctgagtacgctatcgcattggcacagaagcatatgacacgcactatctacacatcccccatcaaggcattgtcaaatcaaaaatttcgcgatttcaggaacacctttggcgatgtcggtctgttgacaggtgacgtacagctccacccagaagcctcctgcctcattatgactacggagattttgcgctctatgctttacagcggcagcgatgtcatacgcgaccttgaatgggtcatttttgacgaagttcactatatcaatgacgtggagaggggggtagtctgggaggaagtgctcattatgctgcctgaccacgttagtatcattctcctgagcgctacagtccccaatgcgctcgagtttgcggactggattgggcggctgaagagaagacagatatatgtgataagcacagtgacccgaccagtgccactggaacactatctgttcaccgggaactcgagtaagacccagggagaactcttcctgctgctcgactctcgcggggccttccataccaagggatattacgcagccgtggaggctaagaaggagagaatgagcaaacacgcacagacattcggggccaagcagccaacacatcagggggggcctgcccaggaccgcggcgtttacttatctttgcttgccagtctccggactagggcccaattgcctgtcgttgtgtttacgttcagcagaggtagatgcgatgagcaggctagcggtctcacatccctggatcttaccactagctcagagaaatcagagattcatctgttccttcagaggtgtctggcacggcttcggggcagcgatcggcaactgccacaggtgttgcatatgagcgagttgctgaaccgcggcctcggggtgcaccatagcggaatactgcccatcctcaaggagatcgtggaaatgttgttcagtaggggtcttgtgaaagtgctgtttgcaacggaaaccttcgccatgggcgtcaacatgccagcccgcacagtcgtcttcgattccatgaggaagcacgacggatccaccttccgtgacctcttaccgggcgaatacgttcagatggccggtcgcgccggacgacggggcttggaccccactggtactgtgattctgttgtgtaagggacgggtgccagagatggccgacctgcaccggatgatgatgggtaaacctagtcagctgcagtcccaattccgcttaacctatacaatgattttgaacttgctccgggtggatgctttgcgtgttgaggacatgatgaagcgctctttttctgaattcccttcacgcaaggattccaaagctcatgagcaggcactggccgagctaactaaaagactgggagctctcgaagaacccgacatgactggtcagctagtggacctgcctgaatactacagctggggtgaagagctgaccgaaacccagcatatgatccaacggagaatcatggagtccgtcaacggcctcaaaagtttgtccgctgggcgggtagtcgtggtcaagaaccaagagcatcataacgctctcggcgtcattctccaggtgtctagtaattctaccagtagagtgttcacaactctcgtgctctgtgacaagccactatcccaagatcctcaggatcgcggtcccgctactgccgaggtcccttatcctgatgaccttgtggggtttaagctgttcctgcctgaggggccttgtgatcatacagtggtcaaactccagccaggggacatggccgctataactaccaaagtgcttcgagtgaatggggagaagatcctagaagacttctctaagaggcagcagccaaagttcaagaaggacccgcccctagcagcagtgaccacggcagtgcaggagctgctgaggctggctcaggcacatccagccggacccccgactctggatcccgtgaatgacctgcagctcaaggatatgtccgtggtcgagggtggcctaagagccaggaaactggaggagttgatccagggagcccagtgcgtgcacagtccacggtttcccgctcaatatcttaagttaagagagaggatgcagattcagaaagagatggaacgccttcgtttcctattgtccgaccagtctcttctgctcctcccagagtatcatcaacgggtggaggtactgaggaccttgggatatgtcgatgaggccgggaccgtaaagctagcaggtcgggtagcctgtgccatgtcatcccatgaacttctgctcactgagctgatgttcgacaatgctctctccacactacggcccgaagagattgcagccctcctatctggacttgtgtgtcagagcccaggcgatgccggtgaccaactgccaaacacgctcaagcagggtatcgagagagtcagagcggtggccaagcgtatcggcgaggtccaggtggcctgtggcctgaatcagaccgttgaagagtttgtgggcgaactcaactttggcctggtggaggttgtatacgagtgggccagaggcatgcccttctccgagttagccggtctgagcggaaccccggaaggacttgtcgtgaggtgcattcaacggttagcagaaatgtgcagaagcctgcgtggtgccgcccgcctggtgggggagccagtcctcggagcgaaaatggagaccgctgccaccctgctgagaagggatatagtattcgccgcttcgctgtatacgcagtag

SEQ ID NO: 136593 - DNA, 3741 bp, synthetic construct
  misc_feature 1..3741: note = Description of Artificial Sequence: Synthetic coding sequence
  source 1..3741: mol_type = other DNA
atgatggaaacagagaggctagtgctcccaccacccgaccctctcgacttgccactacgcgcagtcgagttgggctgcaccggtcattgggagttactgaatctcccgggagctcccgagtcgtccctgcctcacgggcttcccccctgtgcccctgatcttcagcaggaggccgagcagcttttcctgagtagccctgcttggctgcctctgcacggagttgagcacagtgcccgtaagtggcaacggaagactgacccctggtcactgctcgccgttttgggagctccggtgccctcggatttgcaggcgcagcgccatcccacaaccgggcagatactaggatacaaagaggtgttgctggagaatacaaatctgtccgccacaactagtctgtctctcagacggccccccgggcctgcctcacagtccctatggggaaaccccacgcagtacccattctggcccggcggcatggacgaacctaccataaccgatttaaatacacgcgaagaggccgaggaagaaattgattttgagaaagacctactaacaatcccccctgggtttaagaagggtatggactttgcccccaaggactgccccactcccgcacccggcctactgtccctgtcctgtctgctcgaaccgttggatctggggggcggcgatgaggatgagaatgaggcagtgggtcagcctggaggtccccggggagacacggtctctgcttccccatgtagcgccccactggcaagggccagttcacttgaggacctggtgctcaaagaggccagtactgccgtctccacccccgaagcacccgaaccacccagccaggagcagtgggctatcccagtggacgctacttcccctgtcggcgatttttacagactaatcccacagccggctttccagtgggcgttcgagcctgacgtctttcagaagcaggctatcttgcaccttgaacggcacgacagtgtatttgtcgccgcccatacctctgcaggaaaaaccgtggtggccgaatatgcgatcgctctagcacagaaacatatgacaagaactatctacacctcccccatcaaggccctgtctaatcaaaagtttagggacttccggaacacattcggcgacgtaggcctgctgacgggcgacgtccagctgcacccggaggcaagttgcctcatcatgacaacggagatcctaagatctatgctgtactctggatctgatgtaattcgcgatctggagtgggtaatattcgatgaagtgcactatattaatgatgtcgagagaggtgtggtttgggaagaggtcctgatcatgctgccagatcatgtctcaatcattctactgtccgccacggtgcccaacgctctggagtttgccgactggatcggcagactcaaaaggcggcaaatatatgtgatctccaccgtgacaaggcctgtgcccttggaacactatctttttacgggtaatagcagtaaaacccagggagagctcttcctgctgcttgatagccgcggagcgttccataccaagggatactacgctgcggttgaggcaaaaaaagagaggatgagcaagcacgctcagaccttcggggctaagcaacctacccatcaaggcggtccagctcaggatcggggggtgtatcttagcctccttgcctccttgcggacacgggctcagctacccgtggttgtgttcactttctctcggggtcgctgcgacgaacaggcatccggactcacctcactcgatctgaccacatcaagcgaaaagagtgagattcatctgtttctacagcgctgcctggcgcgactgcgcggcagcgaccgacagcttcctcaggttctgcatatgtcagaattgttgaatcggggattgggtgtacaccacagtggaatcctccctatcctaaaagaaattgtggaaatgctgttttcaagagggcttgtaaaggtcctttttgccacggaaacatttgccatgggagttaatatgcctgccaggacagtggtgttcgactccatgcggaagcatgacggtagtacattccgagatctgttacctggagaatatgttcaaatggctgggcgggccggtcgccgcgggttggatccaacaggcactgtgatcctcctctgcaaaggacgcgtcccagagatggcagatcttcatcgtatgatgatggggaaaccctctcagctgcaaagccagttccgcctaacctatacgatgattctgaatctgttacgggtcgatgctctcagagttgaggacatgatgaaacgatccttcagtgaatttcccagtcgaaaggactccaaagcccacgagcaggcccttgcagagctcaccaagcgcttaggcgcactcgaggaaccggatatgaccggacagctggtcgacctgccagaatattattcatggggtgaggagctcacggagacacaacacatgatccagcgacgaatcatggaatccgtgaacggactgaagagtttatccgccgggcgtgtggtcgtggtgaagaaccaggaacaccataacgctttgggagttattttacaagtttcatcaaacagcacatctcgagtgtttacaacacttgttttgtgcgacaagcctctgagccaagatccccaggacagaggccctgcaactgcagaggtcccctatccagatgatctggttggcttcaaactgttcctgccggaggggccttgtgaccataccgtggtcaaacttcaaccaggagatatggccgcgatcactacaaaagttttgagggtcaacggcgagaaaattcttgaggacttctccaaacgacaacagcccaaattcaagaaggacccaccgcttgcagctgtaaccaccgccgtgcaggaacttttaaggctggcccaggcgcaccctgcaggaccaccaacactggatcccgtaaacgatctccaactgaaggatatgagcgtagtcgagggtggactgcgagccagaaaattggaagaactgatacagggcgcccagtgtgttcacagtccacggttcccagcacagtatctgaagcttcgtgaaaggatgcagatccagaaagagatggaacgcctgaggttcctactctctgaccaaagcttgctgctgttgcctgaataccaccagcgggttgaggttttgagaacactagggtacgtggacgaagcaggcaccgtcaaactggccggtcgggttgcctgtgcaatgagctctcacgaactattgctcacagaattgatgttcgacaatgccttgtccaccctgaggccagaggagatcgccgctctactcagcggcctggtgtgtcaaagccctggagatgccggcgatcagttgccaaacactctgaagcagggcattgaacgcgtgcgcgccgtggccaagcgaatcggagaggtgcaagtcgcgtgtggacttaatcagactgtcgaggagtttgtgggagaactcaatttcggcctcgtcgaggtggtgtatgaatgggcgcgggggatgcccttctctgagctcgctggcctgtcaggtacgcctgaggggctcgtggtgcgttgtattcagcgactggctgaaatgtgcagatcactgagaggggcagctcgcctggtcggagaaccggttctgggagcgaaaatggaaacagccgccacactgctgagacgtgacattgtgtttgcagcttcactgtatactcagtag

SEQ ID NO: 136594 - DNA, 3741 bp, synthetic construct
  misc_feature 1..3741: note = Description of Artificial Sequence: Synthetic coding sequence
  source 1..3741: mol_type = other DNA
atgatggagactgagcggcttgtccttcccccacccgacccacttgatctgcccctcagagcagtggagctgggatgcaccggacactgggaactgttgaacctgcccggggcccccgaatctagcctgcctcacgggttaccaccatgcgcccctgacctccagcaggaggccgagcaactctttctcagctctcctgcttggctgccgttacacggggtggaacatagtgcaagaaagtggcagcgaaaaacagatccttggagtcttctcgccgttttgggcgctccggtcccaagcgacctgcaggcccaacggcatccaacaactgggcagatcctgggctacaaagaagtcctcttagaaaacacaaacctctccgccactacaagcctgagtctgagaaggcctcctggacctgccagtcagtccctctggggaaatcctacccagtaccctttctggcccggaggcatggatgaacccactataaccgacttgaatactagggaggaagccgaggaagagatcgactttgaaaaggacttgctgacaattccccccggcttcaagaaaggcatggatttcgcacctaaggattgcccgacacccgcacccggactgctgtctttgtcctgcttattagagcccctggatctggggggcggcgacgaagatgaaaatgaagccgtggggcagcccggaggccctcggggtgacaccgtgtccgctagtccgtgtagcgcacctctggcaagggctagttcacttgaggatctagtcttaaaggaagcctctaccgccgtgtcaactcctgaggctcccgagccacccagtcaggaacaatgggcaatacccgttgacgcgactagcccagttggagatttttacagactgatcccgcaacccgctttccaatgggccttcgaacctgatgtcttccagaaacaggcgattttgcacttggaaagacacgactcagtttttgtcgccgcccacacaagcgctggcaagacagtggtggcggagtatgcaatagctctcgcccaaaaacacatgacacgtaccatttacacaagtccaatcaaagctctctccaaccagaaattccgagactttcgcaatacatttggggacgtcggtctcctcaccggagatgtgcagctgcaccccgaggctagctgtctgatcatgacgaccgagatcctcagatcgatgctgtatagcggttctgatgtgatccgcgacctggagtgggtgatctttgatgaagtgcactatataaacgatgtggaacgcggagtcgtctgggaagaggtgctcatcatgcttcccgatcacgtgagtattatcttactgtccgcaacagtgccaaacgctttggaattcgcggactggattgggcgcctgaagaggcggcagatatacgtgatctccaccgtcacaagacccgtgcccctcgagcattacctgtttacgggaaattcgtctaagacccaaggggagctctttctgttgttggatagtcggggcgcttttcacaccaaagggtactacgctgccgtggaggcaaaaaaggagaggatgagtaaacacgctcagacttttggtgctaagcaaccgacacaccagggcggaccagcacaggaccgtggggtgtatctttcgctgcttgcttcgctgcggactcgtgcgcagctgccagtcgtggtgttcacattttctcgagggcgatgcgatgagcaagcaagcggtctcacctcgctagatctgacaacttcttccgagaaatctgagatccacctcttcttgcagcgatgcctggcccgccttagaggcagtgaccggcagctaccacaagtgcttcatatgtcagaacttctcaatcggggcctaggcgtccaccactctggcattcttcccatcctcaaggaaatcgtggaaatgctgttctctcgaggactagttaaggtgcttttcgccaccgaaactttcgctatgggcgtgaatatgcctgcccggaccgtggtgtttgatagcatgcgaaagcacgacggcagtacattccgggatttgctgccgggagagtacgtccagatggcgggccgcgccggaagacgcggacttgacccgacgggtacagttattctcttgtgtaagggtcgcgtaccagagatggctgacctacatcggatgatgatgggcaagcctagccaattacagtcccagttcaggcttacttacacaatgatcctaaacctattgcgtgtcgatgctctgagagttgaggatatgatgaaacgttctttttctgagtttccctctagaaaagattctaaagcccacgaacaggccctcgccgagctgactaagcggctcggtgcgctggaggaaccagacatgactggccaattggtggacctgcctgagtactattcctggggagaagagctaaccgagacacagcacatgattcaacgtcgtattatggaatccgtgaatggcttaaagtctctcagcgctggacgagttgtcgtggttaagaaccaggaacaccataacgccttgggcgtcatactacaagtcagctccaactctacatcaagggttttcaccaccctggtgctatgcgataaacccctgtcccaggatccccaggaccgaggccctgccaccgccgaggtcccttatccagatgacttagtgggcttcaagctctttctgccggaaggcccatgcgaccatacagtagtgaaactccagccaggggatatggcagccattacgacgaaggtgctaagagtgaacggggaaaagatactggaagatttttctaagcgccagcagcctaagtttaaaaaggacccccccctcgctgctgttactactgcagtccaggagctgctcagacttgcccaggcgcatcccgctggccccccaactctggacccagtgaacgacctgcagctgaaggatatgtccgttgtggagggcggcctgcgtgctcggaagttggaggagctgatacagggggctcagtgcgtgcattcgccgcgttttcccgcgcagtatctaaagctgcgcgagcgtatgcagatacaaaaggagatggaacggctccgttttctgctgagcgaccagtccctccttttgcttcccgagtaccatcagagagtagaggtcctgcgaactctggggtacgtggatgaagccggcaccgtgaagctggccggaagggttgcatgtgctatgtcctcacacgagctgcttctgacagaacttatgtttgataacgctctttcaacgctgaggcccgaagaaatcgctgccctcctcagtggactggtgtgccagtcgcccggtgacgctggcgaccaactgcctaacactctgaagcaggggatagaacgtgttagggcagtcgccaagcgaatcggtgaggtgcaggtggcttgcggccttaatcagacagttgaggagtttgtcggagagctgaactttggcctggtcgaggttgtgtacgagtgggcacgcggcatgcctttttctgagttagccggcttgagcggtactcccgaaggactcgttgtgcggtgtatccagcggctcgccgagatgtgtcggtctctcagaggggcggcgagactcgtgggtgagccagtgctaggcgctaaaatggagacggccgccacactgctcaggcgagacatcgtatttgccgcatctctttatacacagtag

SEQ ID NO: 136595 - DNA, 3267 bp, synthetic construct
  misc_feature 1..3267: note = Description of Artificial Sequence: Synthetic coding sequence
  source 1..3267: mol_type = other DNA
atggatgagcctactattacagacctcaatacaagggaagaggcggaggaagaaatcgactttgaaaaggacttattgacaatcccacctggattcaaaaaaggaatggatttcgctcctaaagattgtccaacccctgcgcctgggctgctgtctttgtcctgtatgcttgagcccctcgacctaggcggaggggatgaggatgagaatgaggcggttggccagcctggcggtcctcgtggagatactgttagcgcctccccctgcagcgcacctctggcgagggcatcaagcctcgaggacctagtgttgaaagaggcatccacggccgtgtctactccagaggcacctgagcctccctcccaggaacagtgggcaattccagttgatgcgacatcacctgtcggggatttctataggctaatacctcagccggcctttcagtgggccttcgagcccgatgtgttccagaagcaggcaattctgcatctggagcgccacgattcagtgtttgtggctgcccatacatccgctgggaaaaccgttgtcgcagagtacgctatcgcactcgctcaaaaacacatgactcgaaccatatataccagccccataaaggctctgagtaaccaaaaattcagggacttccggaacacattcggtgatgttggactgctgactggagatgtgcagttgcatccagaggcctcctgtcttataatgaccaccgagattctgcgatccatgctgtacagtggatctgacgtgatacgcgacctggagtgggtgatctttgatgaggtccattacattaatgacgtcgaaagaggtgtcgtatgggaggaggtgctgattatgcttccagaccatgtctccatcatcctgctgagcgctaccgttcctaatgccttggagttcgccgactggatcggtcgccttaaacgccgtcagatatacgtaatcagcacagtgacacgcccggtccctcttgagcactacctgtttaccggaaatagctccaagacacagggcgaactgtttctgttactggattccagaggggcttttcataccaagggctactatgcggctgtggaggccaaaaaagagaggatgagcaagcacgcccagacgttcggagctaagcaacctacccaccagggcgggccagcacaggacaggggtgtgtacctgtcactgttagcctccctcagaacacgtgcccaactccctgttgtggtttttaccttctcccgggggcgatgcgatgaacaggcttccggtctgacctctctggacctgacgacttcttccgagaaatccgaaattcatctgtttcttcagaggtgcctagcaaggttgcgtggctccgacaggcagcttccccaggtactgcacatgtcggaactgctcaaccgcgggctgggtgtccaccacagcggcattctgcccatactgaaagagattgttgaaatgctgttttcccggggcctcgtgaaagtcctgtttgccaccgagacattcgcaatgggagtgaacatgccagcacgtactgtggtattcgattctatgagaaagcacgacggaagcaccttcagggacctgcttcctggagagtatgttcagatggcagggagagccggtcgtagaggcctggaccccaccggaacagtgattctgttgtgtaaagggagagttcctgagatggcagatctgcaccggatgatgatggggaagccctcccagctacagtctcagtttaggttgacctacacaatgattctcaacctcctgcgggtagacgctctccgggtggaggatatgatgaagagatcctttagcgagtttccctccagaaaggacagcaaggcgcacgagcaggctttggcagaactaaccaaaaggctgggggcgttagaggagccggacatgaccgggcagcttgtggaccttccagaatattactcctggggagaggagttaacagaaacacaacacatgatacagagaagaattatggagtctgtgaatggcctgaaatctctgtccgccggccgtgttgtggtggtgaaaaaccaggagcaccataatgctcttggggttattttacaggttagtagtaactctacctcaagggtgtttaccacattggtgctttgtgataagccgctgagccaggatcctcaagatcgaggccctgctacagcggaagtcccgtatccagatgatttggttgggtttaagctgttccttccggaaggcccttgtgatcataccgttgtgaaattgcaacctggggacatggccgctatcacgactaaggtgctgagagtgaacggagaaaagattctggaggacttcagcaaacggcagcaacctaaattcaagaaggaccctccacttgcagccgttaccaccgccgtgcaggagctgctgagactcgcgcaggctcaccctgcagggccaccaacccttgaccctgtgaacgacctccagcttaaggacatgagcgtcgtggagggaggcctgcgcgctagaaagctggaagagctaattcagggagcccaatgtgttcattctcctagattcccagcccaatacctgaagctgcgggagcggatgcagatccagaaggagatggaaagactgaggtttctgctgtcagaccagagcttactcctcttacccgaatatcaccagcgggttgaggtgctgcgcactttgggctatgttgacgaagctggtaccgtgaaactcgctggcagagtggcgtgtgccatgtctagccatgaactcctactgaccgagttaatgttcgataatgcactgtcgaccctcaggccggaggaaatcgcggctcttctcagcgggctggtttgccagagccctggcgacgccggagaccagctaccgaataccctgaagcagggcatcgagagggtccgggccgttgctaaaagaatcggggaggtgcaggtagcttgcgggctgaatcagaccgtggaggaattcgtcggagagctgaacttcggcttggtggaggtagtatacgaatgggccagagggatgcctttctcggagcttgccggcctgagtggcacccccgaaggattggtggtgagatgtatacaacggctcgcagagatgtgtagatctcttaggggcgccgcacgactagtgggggagcccgttttgggagccaagatggaaacagcggccactctgcttagaagagatatcgtttttgccgcctctctctacacccaatag

SEQ ID NO: 136596 - DNA, 3741 bp, synthetic construct
  misc_feature 1..3741: note = Description of Artificial Sequence: Synthetic coding sequence
  source 1..3741: mol_type = other DNA
atgatggaaacagagcggcttgttctgcccccccctgacccactcgacttgcctttgcgagcagtggaattgggctgtacaggccactgggagctcctgaatctgcccggagcacccgagtcttcccttcctcatggcctgccgccatgcgcccctgatttgcagcaggaggccgaacaacttttcctgagctcacctgcatggctgcctcttcatggggttgaacattccgcccgaaagtggcagcgcaaaacagatccatggagcttgttagccgtcctgggggccccagtgccttccgacctacaggcccagagacatccaacgacagggcaaatccttggttataaagaagtgctgctagagaacactaatctgagtgctactactagcctctcccttcggcgtcccccgggcccagcatcccagtccctttggggcaaccccacgcagtatcccttttggccaggaggcatggacgaaccgacaataaccgatcttaatacacgcgaggaagccgaggaggagatcgatttcgaaaaagatcttttgactataccaccaggctttaagaagggcatggattttgcacctaaagactgccccacccccgcccctggactgctatcactctcctgcatgttggagcctctcgacctcgggggcggcgatgaagatgagaatgaggccgtgggtcagcccgggggcccgaggggggatacggtctctgccagtccatgctcggcgccgctggcaagagcaagttcacttgaggacctggtgctgaaagaggctagtactgcagtgtccacccccgaggctccggaaccgccttcccaggagcagtgggccattcccgtggatgcaacatctcctgttggtgacttttaccgccttattcctcagccagctttccagtgggcatttgagccagacgtgttccagaagcaggcgatcctgcacttggagcggcacgattcagtgtttgtggccgcacacaccagtgccggcaagaccgtagttgccgagtatgccatagccttggcgcaaaagcacatgaccagaacaatttacaccagcccgatcaaggctctgagtaatcagaaatttagggacttccggaatactttcggagacgtaggtctcttgacaggcgacgtgcagctccaccctgaggcttcatgcctgattatgactacagagattctccgttctatgctttactctggcagtgacgtgatccgcgatctcgagtgggtcatctttgacgaggtacactatattaatgacgtggaacgaggcgtggtgtgggaggaagtgcttattatgctgccagatcacgtatccatcatactcctgagtgctaccgtcccaaacgctctggaattcgctgattggatcggaaggctcaagaggagacaaatttacgtcatctcaaccgtcactagaccagtccctttggagcattacctgtttacagggaactctagcaagacacagggagaactgtttctgttattggattctcgcggggcgttccatacgaagggctactacgccgcggtggaggccaagaaggaaagaatgtctaagcacgcccaaacattcggagctaagcaacctacccatcagggcggtccagcacaggatcggggcgtttatttgtctctgcttgcctccctgagaaccagagctcagttgccagttgttgtgtttactttcagtagagggaggtgtgacgaacaagcaagcgggctgacttctctggacctgacaacaagcagcgaaaagagcgagatccacctgtttctccaaagatgcctggccaggctgagaggctccgaccggcaactgccccaagtcctccatatgtcagaactgctgaatagaggtttaggagtgcatcactctggcattttaccaattttgaaggagatcgtagaaatgctgttcagtcgcggcttggtgaaagtcctctttgcaaccgaaactttcgctatgggtgttaatatgcctgccagaaccgtagtgtttgattccatgaggaagcacgatggctccacctttagggatctgctgcccggcgaatatgtacagatggcagggagagccgggagacgcggacttgatccaaccggcacagtgattttgctctgcaagggacgcgttcctgaaatggccgatctgcaccggatgatgatgggcaagccctcccagctccagagtcagttccgtctgacctatacaatgattctcaatctactgcgagtcgatgcactacgcgtggaagacatgatgaagcgatcctttagtgagttcccctcccggaaagactctaaggcacacgagcaagccctggctgagcttactaaaaggctgggggctctggaagagcctgacatgacgggccagctcgtggacctacccgagtattacagttggggagaggagctaaccgaaacgcagcacatgatccagcgtcggatcatggaatctgtgaacggcctgaaatcactctccgcgggcagggtagtggtggtgaagaatcaagaacatcataacgccctcggcgtcatccttcaagtcagcagcaatagcacatcaagagttttcacaaccctagttttgtgtgacaaaccgttatcacaggacccccaggatcggggacccgccaccgccgaagtgccttatcccgacgacctggtggggttcaaattattcctgcccgagggaccatgtgatcacaccgtcgtaaagttacagccaggggatatggctgctatcaccaccaaggtcttacgagtaaacggcgaaaagattctggaggacttctccaaaaggcagcagcctaagttcaagaaggatcctcctttggcagctgtgaccacagctgtgcaagagcttttaaggctggctcaagcacacccagctggtccgcccacccttgaccccgtgaacgatttgcaactcaaagacatgtcggtcgtggagggggggctgcgggctcgtaagctggaggagctcatccagggggcacagtgtgtacactcaccacgcttccctgcccagtatctaaagttacgggaacgcatgcagatccagaaggagatggagcgcctgagatttctcttaagtgaccagagccttcttctgctgcccgagtatcaccaaagagttgaagtgctgcgaactcttgggtacgtcgatgaggcagggactgtgaagcttgctggaagagtcgcctgtgctatgtccagccacgagctgcttctgactgaattaatgtttgacaatgctttgtctacactgcggcctgaggaaatcgccgccctgctctccggccttgtgtgccagagtcctggggatgctggggaccagctgcccaatacgctgaaacaaggaatcgaacgggtacgcgcagtcgccaagaggatcggcgaagttcaggtggcttgcggccttaatcagaccgttgaggaattcgtcggagagctgaatttcggcttggtcgaagtagtgtacgagtgggctagagggatgccatttagcgaactagctggtctgtccggcacaccagaaggcctcgtcgtcaggtgtattcagcgccttgctgaaatgtgtaggagcctacggggtgctgctcgtctcgtcggggaacctgtgctcggggcgaagatggaaaccgccgccaccctattgcgcagagacatcgtgttcgccgccagcctttacacccagtag

SEQ ID NO: 136597 - DNA, 3162 bp, synthetic construct
  misc_feature 1..3162: note = Description of Artificial Sequence: Synthetic coding sequence
  source 1..3162: mol_type = other DNA
atggatttcgcaccaaaagactgccctacacccgcaccaggactgctcagtctctcttgtatgctggaacctttagatctaggaggcggcgatgaggatgagaacgaagccgttggccagcctggtggaccacgtggcgacaccgtgtccgcaagcccatgctctgctccattggctcgcgcgagttcactggaggacctcgtgctgaaagaggctagcaccgccgtgtcaaccccggaggcccccgagcctcccagccaggagcagtgggccattcccgtggatgctaccagtcccgtcggagatttttatagactcatcccgcagcccgcctttcagtgggccttcgagccagacgtgttccagaagcaggccattcttcacctcgaaagacacgactcagtcttcgttgctgcgcatacttcggctgggaagactgtggtcgccgaatacgccatcgccctggcccagaaacatatgaccagaacaatttacaccagcccaatcaaagctctctccaaccaaaaatttcgcgatttccgcaacacctttggcgacgttggcctcctcacgggtgacgtgcaattacatcccgaggcaagttgtctgataatgacaacagagattctgcgcagcatgctgtactctgggtccgatgtgatcagagacctcgagtgggttatttttgatgaggtgcattacattaatgacgttgaaaggggagtcgtctgggaagaggtgctgatcatgctgcctgatcacgtgtctataattttactctccgccactgttcctaatgcactcgagtttgctgactggatcggccgtttgaagagaaggcagatctatgtcattagtaccgtgacccgaccagtgcccctggaacattacctcttcacgggtaacagcagcaagacgcaaggggaactgtttttgctcctggatagcaggggggctttccacactaaaggctattacgccgcggtggaggcaaagaaagagagaatgagcaagcacgcacagacttttggcgccaagcagcccacccaccaaggtggacccgcccaggaccgcggcgtatacctgtccctactcgcatctcttcggactcgagcacaactgcccgtcgtagtctttaccttcagtcgcggcaggtgcgatgagcaagcatccggcctcacatccttagatcttacaacctcctccgaaaaatcagagattcatcttttcctacaaaggtgtctggctcgcctgaggggatctgataggcagctgcctcaggtgttgcacatgagcgagctgctcaaccgagggctgggagtccaccacagcggtatactcccgatacttaaagaaatcgttgaaatgctcttttcaagggggctagtaaaagttttgtttgccactgaaacatttgctatgggagttaacatgcctgctaggaccgttgtcttcgactctatgagaaaacacgacggcagcacttttagggatctgttgcctggcgagtatgtgcagatggccggacgagccggccgtcgggggctggatcccaccggaacagtcattcttttatgcaaaggccgcgtccccgagatggctgacctgcaccggatgatgatgggcaagccttcccagctccagagccagtttaggcttacttacacaatgatactcaacctcttgagagtcgacgctctgcgtgttgaggatatgatgaaacgtagcttctccgaattccccagccgaaaagatagtaaggcccacgagcaggcacttgcggagcttacgaaacgcctcggtgccttagaggaaccggacatgaccggccagctggtcgacttgccggagtattattcttggggcgaggaactaaccgaaactcaacacatgattcagagaagaatcatggagtctgtgaatggacttaagtcactctccgccgggcgtgttgtcgtagtgaaaaatcaggaacaccacaacgccttaggtgtgatcctgcaggtgagtagcaacagtacatcccgagtatttaccactctggtgctttgtgataaaccactgagtcaggatcctcaggacagagggcccgcgaccgccgaggtgccataccccgacgacctcgtgggctttaagctgtttctccctgagggcccctgtgatcataccgtagtgaaattacagccaggtgacatggccgctataaccacaaaagtcctgagagttaacggggaaaagatccttgaagatttttcaaagagacagcagcccaagttcaaaaaagacccacctctggccgccgtgaccacggccgtccaggagctactgagactggctcaggcccatcctgccggccctcccaccctggatccagtaaatgatctgcagctcaaggatatgtccgtggtcgaggggggattacgcgctcgcaaactggaggaacttattcaaggggcccagtgtgtacattccccccggtttcctgcccagtacctgaaactgcgcgagcgcatgcagatccagaaggagatggaaagattacggttcttgttgagtgaccagagcctgctgctgctgcctgaataccatcagcgcgtggaggtattaaggacgttggggtatgtcgacgaggccgggaccgtcaagctggcgggccgggtcgcatgtgcgatgtcctctcacgaactcctgcttaccgagctcatgtttgataacgcacttagcacacttagaccagaggaaatagctgctctcctgtctggactagtgtgtcagtcccctggagacgccggcgatcagctgcctaacacactcaagcaaggtatcgagcgcgtcagagccgtggccaaacggatcggcgaggtccaagttgcgtgcggactgaatcaaacagttgaagagttcgtgggcgagctgaacttcggcctggtggaagtcgtgtacgaatgggcgcgtggtatgcctttttccgagttggcaggtctgtccggaactcccgagggtctcgtggtgaggtgcattcaacgactcgctgagatgtgtcgcagccttaggggcgctgcccgtctggtaggggagccggtccttggcgccaagatggagacagccgcaaccttgcttcggcgcgatatagttttcgctgcatcactctacactcagtag

SEQ ID NO: 136598 - DNA, 3162 bp, synthetic construct
  misc_feature 1..3162: note = Description of Artificial Sequence: Synthetic coding sequence
  source 1..3162: mol_type = other DNA
atggatttcgctccaaaggactgtccgacgcctgctccgggcctactgtcacttagctgtatgcttgagcccctcgatctgggtggcggcgacgaggacgaaaacgaggctgtgggccagcctggtggaccaaggggagatacggtcagcgcctcaccttgtagtgcaccactggctcgcgcttccagcctggaagacctggtgcttaaagaggcgtcgactgcggtgtccacgccggaggcgcccgagccccccagccaggagcagtgggcaatccccgtcgacgccacctctcctgtaggggatttttatagactaatccctcaacccgcatttcaatgggctttcgaacctgacgtgttccagaagcaggctatcctgcatctcgaaagacacgatagtgtgttcgtcgctgcccatacctccgctgggaagactgttgtggcggagtatgccatcgccctcgcacagaagcatatgacacgtacaatttacacctcccctatcaaggctctatccaaccagaaatttagggactttcgcaacacgtttggggatgtgggactgctcacaggcgatgtgcagctacaccccgaagcctcatgcctgatcatgaccacagagatcctgcgttcaatgctgtactccggatcagacgtcataagggatctggagtgggtcatattcgatgaggtccactatatcaacgatgtcgaacggggggtagtgtgggaggaagtgctcattatgctgccagatcacgtgtccatcatccttctgagtgccacggtccccaatgctctcgagttcgcagactggatcggtcggctgaaaaggaggcagatctatgttatcagcaccgtcacgcgaccagtgccactggagcactacttgttcacgggtaattcttcaaagacacagggagagctgttcctgctgctcgattcacgtggagcatttcacacaaagggctactacgcggctgtggaggccaaaaaggagagaatgtctaaacacgcccaaactttcggcgcgaagcagcctacccatcagggagggccagcccaggaccgaggggtttacctgtcactcttagcctccctgaggactcgcgctcagctgccagtcgtggttttcacgtttagccggggcagatgcgacgagcaggcctccggactaaccagcctggacctgaccacgtcaagtgagaagagtgaaattcacctgttcctccaacgatgcctggcccggctgagaggcagcgaccgacagctgccgcaagtgcttcatatgtcggaactattgaatcggggactcggtgtgcatcactctgggatcctgcctatcttaaaggagattgtggagatgctgttcagccgcggtcttgtgaaggtgttattcgccactgaaaccttcgccatgggagtcaacatgccagcacggaccgtcgtgtttgactcaatgcggaaacatgacggatccacgtttagagacctgctgccgggcgagtacgtccaaatggcagggcgcgctggaaggaggggattagatccaacgggaactgtcattctgctgtgtaagggtcgtgtgcccgagatggccgacctgcacagaatgatgatgggaaagccatctcagctgcagtctcagttccgcctcacctacacgatgattctgaatctgcttcgtgtcgacgctctgcgcgttgaagacatgatgaaaagatcctttagtgaatttccttctcgcaaggattctaaggctcacgagcaggcccttgccgagctgacgaaaaggctgggagctctagaggaaccagacatgactggccaactggtagacttgccagagtactactcgtggggtgaggaactgacagagacccaacacatgatccaacgccgcataatggagtctgtcaacgggctgaagtctctctctgcaggaagggtggtggtggtaaaaaatcaggaacatcacaacgcactgggcgtgattttgcaagtgtcaagcaacagcacatctagagtttttactacactggtcctgtgtgataagccactctctcaagaccctcaggaccgcggaccggcaacggctgaggtgccatatccagacgatctagtagggttcaagctgttcctaccagagggcccctgcgatcatacagtcgttaagctgcagccgggcgacatggctgccataactactaaggtgctgcgggttaacggggagaaaattctcgaagattttagcaagcggcagcaaccgaaatttaagaaagaccccccccttgcagccgtgaccactgctgtgcaggagctgctccgtctcgctcaggctcacccagctgggccaccgacattggatccagtaaatgatctgcagctcaaggatatgagtgttgttgagggaggcctgagagcgcggaaactcgaggaactcatccagggtgcccagtgcgtgcacagcccaaggttccctgcgcagtaccttaaactgagagagcgaatgcagatccaaaaagagatggaaaggcttaggtttctgttgtccgatcagagtctcctgcttctgccagaataccaccagcgtgtggaggtccttcggaccctgggttacgtggatgaggcaggcaccgtgaaactcgctggaagggtggcctgtgctatgtccagccatgagctgctgctcacagagttaatgttcgataacgctttaagcacactacggcctgaggaaattgccgctctgttgagtggactggtttgtcagagccccggggatgcgggcgatcagctgccgaatacgctcaagcaggggatcgaaagggtcagagccgtcgcgaagaggattggcgaggtgcaagtagcgtgtgggttaaatcagactgttgaggagtttgttggagaactcaactttgggctcgttgaagtggtatatgagtgggctagaggaatgccattttccgagctggccggactctctggcacccccgagggactggtcgtaagatgtatccaacgcctggcagagatgtgtagaagcttgcggggagcagccagattggtgggtgagcctgtcctgggagccaaaatggaaactgcagctacactcctcagacgggacattgttttcgctgcctcgctgtacacccagtag

SEQ ID NO: 136599 - DNA, 693 bp, synthetic construct
  misc_feature 1..693: note = Description of Artificial Sequence: Synthetic coding sequence
  source 1..693: mol_type = other DNA
atgatggaaacggagagactcgtacttccaccacctgaccctcttgatctgccactgcgcgctgttgaactggggtgtactggccactgggaactattgaacttgcccggggccccagaatccagcctgccccacggattacccccctgcgcccccgatctgcaacaagaggctgagcagctgttcctctctagccccgcttggctgcctctgcacggggtggaacattctgccaggaaatggcaacgcaagactgatccttggtccttgcttgcagttctgggcgctcctgtcccgagcgatctccaggctcaaagacacccaacaaccgggcaaattctcggatataaagaagttttgctggagaacactaatctgagtgcaacaacctcgttgtctctgcggcggccacccggtccagcatcccaatccctgtggggaaaccctacacaataccccttctggccaggcggcatggacgagcccaccataacagacctaaacactcgggaagaggctgaggaggagattgatttcgaaaaggatttgctcaccatccctcccgggttcaagaaaggtatggacttcgcgcccaaggggagcgtacatagctgtatccacccacggggcccacgagctagcatttcgggagcggtgggccacccatgcgggagacatttaccctgctggtag

SEQ ID NO: 136600 - DNA, 3267 bp, synthetic construct
  misc_feature 1..3267: note = Description of Artificial Sequence: Synthetic coding sequence
  source 1..3267: mol_type = other DNA
atggatgaaccgaccattaccgatttaaatacgagagaggaagctgaagaggagatagatttcgagaaggacttgctgactattccacccggttttaagaagggaatggacttcgctcccaaggactgcccaacccctgctccgggtttactgtccctttcctgcttgctggaacccctggatctgggcggcggcgatgaagacgagaacgaggcagtaggccagccaggcggccctaggggcgatacagtgtccgccagcccctgcagtgcccctctcgcccgggcttctagcttagaggacctggttctcaaggaggcgtcaacagccgtgtcaaccccagaagctcctgagccaccttcacaggagcaatgggccattccagtcgacgcaacatctcccgtgggagatttctaccggttgatccctcagcccgccttccagtgggctttcgaaccagatgtgttccagaaacaggccatcctgcacctcgagaggcatgatagcgtttttgttgctgcccatacctccgcgggaaagaccgtcgtagccgagtacgctatcgctctggcccagaaacacatgaccaggactatttacacctcccctatcaaggctctgagcaatcagaagttcagagatttcaggaacacttttggagacgtcgggctccttaccggggatgtgcaactccaccccgaggcaagctgtctgatcatgactacggaaatcttgagaagtatgctgtactcagggtctgatgttatccgggacctggaatgggtaatcttcgacgaagtgcactatataaacgatgtggagcggggcgtggtgtgggaggaggttttgatcatgctgcccgatcacgttagcattatcctgctcagcgccaccgtgccaaacgccctcgagtttgccgactggattgggcggctgaaacggcgtcagatttacgtgatttctaccgtgacacgccccgtccctctggagcactatctcttcacgggcaacagctctaaaactcagggtgagctgttcctgctcctagattccagaggcgctttccacacaaagggctactatgccgctgtcgaggctaaaaaagaacggatgtcaaaacatgcacaaaccttcggtgcaaagcaaccaacccatcaaggcggcccagcccaggaccgtggggtgtaccttagtcttctggcttcactacggacgagagctcagctgccagtggtggtgttcactttcagcaggggccgctgtgatgagcaggcgtcaggcctcacgtccctggacctgacaacttccagcgaaaaatccgagatccatctgttcttacagagatgccttgcaagacttagaggcagcgaccggcaactgccacaggtacttcacatgagcgaattactgaatcgtggactgggggtgcatcattccgggattctgccgatcctgaaggagatagtggagatgctattcagccgggggctggtgaaagtccttttcgcaactgaaacctttgccatgggagttaacatgccagcccggaccgtggtgttcgactccatgcgcaaacatgatgggtctacctttagggacctcttgcccggcgagtacgttcaaatggccggtcgggcaggcaggcggggcctcgatcctacgggtaccgtcatattactttgtaagggcagagtgcccgagatggcagacctgcaccggatgatgatgggaaaacctagccagctccagtcccaatttcgtctgacatatacaatgatcctgaatttactccgagtagatgccctcagggtagaggacatgatgaaaaggtctttctccgaatttccttctcggaaggattctaaggcgcacgagcaagcccttgcagaactgacgaaacgcctaggggccctggaagagccagacatgacgggacagcttgtcgatctccccgagtactacagctggggcgaggaactgacagagactcaacatatgattcagcggcggatcatggaatctgtcaatgggttgaagagcttgagcgccgggagggtagttgttgtgaagaatcaggaacatcataatgcactgggagttatcctccaagtaagtagcaattccacctctcgggtctttactacgctcgtcctgtgcgataagcccttaagtcaggatccgcaagatcggggccccgctaccgctgaggtcccatatccagacgacctggtggggtttaaattgttcctgccagaaggaccttgcgaccataccgttgttaagctgcaaccaggcgatatggccgcaatcaccacaaaggtgttgagggttaacggcgagaagatactggaagacttttctaagcgccagcagccaaaattcaagaaggacccccctctggccgcggtgaccaccgctgtgcaggaactcctccggctagcccaggctcaccccgctggaccacctaccttagatccagtgaatgatcttcagctcaaggatatgagtgtagtagagggcggcttaagggccaggaagctggaagagctgatccagggggcccagtgtgtgcactcccccagatttcctgcgcagtacctcaagctccgtgagcgcatgcagatccagaaggaaatggagcgactgcgattcttgctgagcgaccagtccctgctgctcctgccggaataccatcaacgcgtggaggtattgcggaccctgggctatgtggatgaagccggcacggtgaagctcgcggggagggttgcttgcgcaatgagttcccatgaactcctactgacagagttgatgttcgataacgcgttgtcaactctaaggccagaggaaattgcagctttattaagcggtttagtgtgccagtctccaggcgatgcaggcgatcagctccctaatacgttgaaacagggcatcgagcgcgtgcgagccgtcgcgaaaaggattggagaggttcaggtggcttgtggtttaaaccaaacagttgaagagttcgtgggggagctgaactttggcctggtcgaggtcgtctacgagtgggccaggggcatgcccttcagtgagcttgcggggttgtccggcacccctgagggactggtggtgcggtgtatccaacgattggcagagatgtgtcggtcccttcgaggagctgctaggttagtcggagagcctgtactgggtgcaaagatggagacagcggctacgctgttgcgcagggacatcgtttttgcagctagcctgtatacacagtag

SEQ ID NO: 136601 - DNA, 3162 bp, synthetic construct
  misc_feature 1..3162: note = Description of Artificial Sequence: Synthetic coding sequence
  source 1..3162: mol_type = other DNA
atggacttcgccccaaaagactgtcctaccccagccccagggctgcttagcctgtcttgtctcctggagcccctcgatttagggggcggcgatgaggatgagaatgaggccgtggggcaacccgggggaccaagaggtgatacagtatcggcgagcccatgcagcgctcctttggctcgtgcgtccagcttggaggacttggtgctcaaggaggctagcactgccgtttcaacacccgaagcccccgaacccccgagccaggaacaatgggccatccctgtggacgcaacctcccccgttggcgacttctatcggctcatacctcagcctgcttttcagtgggctttcgaaccagatgttttccagaagcaggctatcctccatctggagagacacgatagcgtcttcgttgccgcacatacatctgccggaaaaaccgtagtcgccgagtacgccatcgccctcgcccagaagcacatgacacgcaccatctacacttcacctattaaagccctgtccaatcagaagtttagagatttccgtaatacgttcggagatgttgggctgctgaccggcgatgtgcagctacaccccgaagccagttgcttgatcatgactactgagatactgcgcagcatgctgtactccggttccgacgtgatccgcgacttggaatgggtgatcttcgacgaggtccattatatcaacgacgttgagagaggggtggtgtgggaagaagtcctcatcatgctgcctgaccatgtttccattattctgctgagtgcaacagtgcccaacgcactagagttcgccgattggatcggtagattgaagcgcagacagatctacgtgattagtactgtaacgaggcccgtgccactggaacactacttgttcacaggaaacagctcgaagacccaaggcgaattgtttctgctgctggactccaggggggcattccacacgaaggggtactacgctgccgtcgaagctaaaaaggagcgcatgagtaagcacgcccagacttttggcgcaaaacagcccactcaccagggtgggcccgcccaagataggggtgtatacttgtcactgcttgcttccctgaggacaagggctcaactgcctgttgttgtctttaccttctccagaggccggtgcgatgagcaggcttcgggactgacttccctggacttgaccacgtcttccgagaagtcagaaattcatctctttctgcagcgatgcctggcccgcctgcggggctcagaccgacagctgccacaggtccttcacatgtctgaactcctgaacagagggctaggcgtgcaccactctggcatacttccaatcctcaaggagattgtggaaatgctcttctccaggggactggtgaaggtcctgtttgcaaccgaaaccttcgctatgggtgtgaatatgccagctcgaactgtcgtatttgattctatgagaaagcacgatggttccacatttagggatctcttaccgggggagtatgtgcagatggcagggcgggctggtcggcggggtctagatcctaccgggacagtgattcttctgtgcaaggggcgcgtccccgagatggctgacctgcatagaatgatgatgggtaagccgagtcaactccaaagtcagtttagattgacctacaccatgatcctcaatttgcttagagtagacgccctgcgggtggaggatatgatgaaacgatccttctcagagttcccttccaggaaggactctaaggcccatgagcaggctcttgcggaacttacaaagagactcggggctctggaagagcctgatatgacaggccagctggtcgatttgcccgagtattactcatggggggaggaactcactgaaactcagcacatgatccagcggcgaattatggagtctgtgaatgggctgaaatcactatcagcaggtcgggtggtggtggttaagaatcaggagcaccacaatgccttgggggtaattttacaggtgagcagtaactccacctcccgcgtctttaccactctggttttgtgcgataagcctctctcccaggatccccaagaccggggacccgccactgcagaagtgccttatccagacgacctggtgggcttcaagctcttcctgccagaaggcccatgtgatcatacagttgtcaaattacaaccgggggatatggccgctattaccactaaggttctcagggtgaacggcgaaaaaatcttggaagatttctccaaacgacagcagcccaagtttaaaaaggatccgcctctcgccgccgtgactactgcagtgcaggaactccttaggttagcccaagctcatcctgccggtcccccaacactagatccggtgaatgacctccagctgaaggatatgtcagtggttgagggaggactgagggcacgaaaactggaggagttgatccagggagcacagtgtgtccactccccacgctttcccgcccagtacttaaagctccgggagaggatgcagatacagaaagaaatggagaggctccgattcttgttgtcagatcagtccctgctgctcctgcctgagtaccatcagcgtgttgaggtgctaagaaccttgggctatgttgacgaggccggaaccgtaaagctggccggaagggtagcgtgtgctatgtcaagtcacgaactgctgcttacggagttaatgttcgataatgccctctcgaccctgcggcccgaagagatcgccgcccttcttagcggcttggtctgccagagcccaggcgacgccggggatcagctgccaaatacactcaagcagggcatcgaacgggtgagagcagtcgctaaacgaattggtgaggtccaggtggcctgtggcctcaaccagacggttgaggaattcgtgggtgagctgaattttgggctcgtagaggtcgtgtatgagtgggcgcgaggtatgcctttcagcgagcttgccggcctgagtggtacaccagaggggctggtggtgcggtgcatccagcgcctcgctgagatgtgcaggagcttacgcggagcagctcgtcttgtgggcgagcccgttcttggcgccaaaatggagacagcagctactctcctaagacgagatatcgtatttgccgctagtctgtatacccagtag

SEQ ID NO: 136602 - DNA, 2643 bp, synthetic construct
  misc_feature 1..2643: note = Description of Artificial Sequence: Synthetic coding sequence
  source 1..2643: mol_type = other DNA
atgatggagacggaacggttggttcttccacccccagacccgctggatctccctcttcgggctgtggaattgggctgtacgggacattgggaacttcttaatctcccaggggctccggagtccagtttgcctcacggtctgcctccttgcgccccggacctccagcaggaagccgagcagctctttctttccagtccagcctggctccccctgcacggtgtagaacattccgcccgcaagtggcagaggaagactgacccttggtctctcctcgccgttctgggcgctcccgtgccatctgatcttcaagcacaaagacaccctactaccgggcagattctggggtataaagaggtcctgctggaacactacctgttcactggcaatagtagtaagacgcagggggaattatttttgctgctcgattctcgcggcgcttttcatacaaaggggtactacgctgccgtggaggctaaaaaagaaaggatgtccaaacatgcacagaccttcggcgctaaacagccgacacaccagggaggcccagcccaggatcgaggagtgtacctgagccttctggcatccctgagaactcgcgcgcaattgccagtggtggtattcacgttcagccggggccgctgtgacgagcaggcaagtggattgacttcattggacctgacaacctcttccgagaaaagcgagattcacttgttcctgcagaggtgtctggcccgactccgcggcagcgatagacaactgccacaggtactccacatgagtgaattgctgaatcggggtttgggggtgcaccactccggcatcctcccgattctgaaagagatcgttgagatgctgtttagtcgcgggcttgtgaaagtattattcgcaacagaaaccttcgctatgggcgtgaacatgcccgctcgcaccgtggtgttcgactcaatgcggaaacacgatgggtcgacattccgcgacctgctgccaggggagtatgtgcagatggccggaagagccggaagacgcggtctagaccccaccgggactgtgattctcctgtgcaagggaagggtgcctgagatggcagaccttcaccggatgatgatggggaagccatcgcagctgcaatcccagttccgcctgacttacactatgatcttaaatcttttgagggttgatgctctccgcgtagaggacatgatgaagagatctttctccgaatttccatctaggaaagactctaaagcacacgagcaggctctggcggagctgaccaagcgactgggcgcgctcgaggagcctgatatgactggccagcttgtcgacctgcctgaatattatagttggggtgaagagttgaccgaaacccaacatatgatccagcgcaggatcatggagtctgtgaacggtctgaagagcctgagcgccgggcgggtcgtcgttgtcaaaaaccaggaacaccataacgccttaggcgtcatcttacaggtgagtagcaattctaccagccgggtctttaccacactcgtactatgtgataaaccactgtctcaagatcctcaggatcgcggacccgccacggctgaggtgccctaccccgacgatctagtcggcttcaaattattcttgcctgagggcccctgcgatcacactgtggtgaagctgcagcctggcgatatggccgccattactacgaaagtgctgcgggtgaatggcgagaagatcttagaggacttttccaaacggcagcagcccaagtttaagaaggaccctccactggccgctgtcactacagccgtgcaggagttgttgaggctcgcccaggcacacccagcaggtccccccactctggacccagtgaatgatctgcagctgaaagatatgtcagtagtagaaggcgggctccgtgctagaaaactggaggaactgattcagggggctcagtgcgttcatagccccaggttccccgcccagtatttgaagctgcgtgagcgtatgcagattcaaaaggagatggaaagactccgatttctgctgagcgatcagtctctcttgttgctgcctgagtatcaccagagagtggaagtgctacgaacgttgggatatgtggatgaagcaggtaccgtcaagctagccgggcgtgtggcctgcgctatgtcttcccacgagcttctgttaactgagttgatgttcgataacgccctctccacactccggcccgaagaaatcgccgccctgctgagcggcctggtgtgtcagtcaccgggggatgctggggaccagcttcccaataccctcaagcaaggcatcgagagggttcgggccgtcgctaagagaatcggggaggttcaagtcgcctgcggcctgaaccagacagtggaggagttcgtaggggagttgaattttgggcttgtggaagtggtctacgagtgggccagggggatgccatttagcgaactcgccggacttagtggcacccctgaggggcttgttgtgcgctgcattcagcggttggcggagatgtgcagaagcctgcggggcgcagctcgactggtgggagagcccgtactaggcgctaagatggagacagctgcaacactgctgaggagagacattgtgttcgccgcaagtctttatacccaatag

SEQ ID NO: 136603 - DNA, 3267 bp, synthetic construct
  misc_feature 1..3267: note = Description of Artificial Sequence: Synthetic coding sequence
  source 1..3267: mol_type = other DNA
atggatgaacctacaatcaccgatctcaatactcgtgaagaagccgaggaagaaattgattttgagaaagacctccttaccatccctcccggcttcaaaaaaggcatggatttcgctcctaaggactgtcctacaccagcaccaggcttactttctctgagttgcctcctggagcccctggatctggggggcggcgatgaggatgagaacgaagccgtggggcagcccggggggccacggggagatacagtcagcgcttcaccttgtagcgcgcctttagcacgggcctcttcccttgaggacctggtcctgaaagaggccagcactgcagtgtccacccctgaagccccagaacctccaagccaggaacagtgggctattcccgttgatgcgaccagtcctgtaggcgatttctaccggctgattccccaacctgcgtttcagtgggcgttcgaaccggacgtattccagaaacaggcgattctgcacctggaaagacacgatagcgtgtttgtcgccgctcatacctctgccggcaaaacagtcgtggcggagtacgctattgctctggcccagaagcatatgacaaggacgatctacacatctcctattaaggctctgtctaaccagaaattccgggattttcgaaataccttcggcgatgtgggcctgctgaccggggacgtgcagcttcaccctgaagccagctgtctgatcatgacaacagagatcttgagaagcatgctgtactcagggtcagacgtgattcgggatctggagtgggtgatctttgacgaagtgcactacattaacgacgttgagcgcggagtcgtgtgggaagaggtcctgattatgctgccggatcacgtgtctatcatcctcctctcggccaccgttcctaatgctctcgagttcgcggattggatagggagattgaagcgccgccagatctacgtgatttctactgtgactagaccagttcccttggagcattacttattcaccggcaattctagcaagacacagggggagctttttctgctgctcgacagtcgcggcgcttttcatactaaaggctattacgcagctgtggaggccaagaaggagcgtatgtccaagcacgcccagacttttggggctaaacaacctactcatcaggggggcccagctcaagacagaggtgtgtacctttctctacttgcctctctgcgcactagagcccaactgcctgtggttgtgtttactttttctcggggcagatgcgacgagcaagcctcaggcttaacgagcctcgatctgactacgtctagtgaaaagagtgaaattcacctcttcctgcagcgatgcctagctcggctgagaggatccgacaggcagctccctcaggtcctgcatatgagtgagctgcttaacagggggctgggggttcatcacagtggaatcttacccattctgaaggagatcgtggagatgctgttctcacggggcctggtaaaggttctttttgcaacagaaacattcgcaatgggcgtcaacatgcctgctcggactgtagtgttcgatagtatgagaaaacacgacgggagtacatttcgggacttgcttcccggcgaatacgtacagatggcagggcgggccggtcgccgcggtctcgatccgaccgggaccgtcatcctgctctgtaaaggccgcgttcctgagatggcagacctccaccggatgatgatggggaagccttctcaactgcaatctcaatttcgattgacttacacaatgatcctgaatctgcttcgcgtggacgccctgcgggttgaggatatgatgaagcgtagcttcagcgagtttccaagtcgcaaagactctaaggctcatgagcaggcgctagcggagttgaccaaaaggctgggcgccctggaggagcccgatatgacggggcagctggtcgacctgcctgaatattattcttggggtgaggaattgacagaaacccagcacatgattcagcgccgcattatggaaagtgtgaatgggctcaagtcgttgtcagccggaagagtggtggtggtgaaaaaccaggagcaccacaacgctctgggcgtcatcctgcaggtctcatccaactcaacatctcgcgtgtttacaaccctggtgctgtgtgacaagccactgagtcaggatccacaggaccgcggtccagcaaccgccgaggtcccatatcctgacgatctcgtgggattcaaactcttcctgcccgaaggtccctgtgaccatactgtcgtgaagctccaacccggggatatggcagctatcacaaccaaggtgttgagggtaaacggagagaagattctcgaagatttttcaaaaagacagcagcctaagtttaaaaaggatccccccttggcggctgttaccacagccgtgcaggagttactgcgcctagcccaggcccatccagcaggaccccctacactggacccagtgaacgatctccagttaaaggacatgtctgtcgtggaaggggggctcagggcacgcaagctggaagagttgatacaaggcgctcagtgtgtgcacagtccaaggttccccgcccaatacctcaagttaagagagcggatgcagatccagaaggagatggaaagactccgcttccttctctctgatcagtctctactgcttctacccgagtaccaccagcgtgtggaggttttgaggaccctcggatatgtggacgaggcaggcacagtaaaattagcgggccgagtagcttgtgctatgagttctcatgaattacttcttactgagctgatgttcgacaacgcactgagtacactgcgccccgaggagatcgccgctctgctgagcggcctagtgtgccaaagcccaggcgacgccggggatcagctccctaatactctgaagcaagggatcgagcgcgtgcgggctgttgccaaacgcatcggtgaggttcaggtggcgtgcggcctgaaccagaccgtcgaggagttcgtaggtgagctcaatttcggcctcgtggaagtggtgtatgagtgggcccgcgggatgcctttctcagagttggcaggactttcaggcacccccgagggactagtggtgcgctgcatacagaggcttgccgagatgtgccggtctttgagaggagctgctcggcttgtcggtgaacctgttttgggcgcaaaaatggagactgcagccaccctgttaaggagggatatagttttcgccgccagtctgtatacccagtag

SEQ ID NO: 136604 - DNA, 2643 bp, synthetic construct
  misc_feature 1..2643: note = Description of Artificial Sequence: Synthetic coding sequence
  source 1..2643: mol_type = other DNA
atgatggagacagagcgacttgttcttcctccccctgacccactggatctgcccctgagggcggttgagcttggatgcaccggtcactgggagctcctcaatttaccgggggctccagaaagcagcctgccacacggccttccaccttgcgctcccgacctgcagcaggaggcagagcaactgtttttgtcctctccagcctggctgccactacatggtgtggagcactccgcacggaagtggcaacgaaaaaccgatccttggtccctgttagccgtcctgggagcacccgtgccaagtgacctgcaggcccagagacaccctaccaccggtcagattcttggatacaaggaagtgttactcgagcattatctgttcactgggaactcttctaagacacagggtgagctttttctgctcctcgatagtcgaggcgcgttccataccaaaggctattacgcagctgtggaggccaagaaagaacgaatgagtaaacacgcacagaccttcggagccaaacagccaacacaccagggtggaccagctcaggaccggggggtttacttaagccttctggcctccttacgaactagagcccagctcccggttgtagtgttcactttctcacggggcaggtgtgatgaacaggcctccgggttaacatcgttagacctcacgacctcctcagaaaaatccgaaatccacttgttcctccagcggtgcctggccagacttcgcggaagtgaccgtcagcttccccaggtgctccatatgtcggaacttctgaacagaggattaggtgttcatcactccggaatattaccaattctcaaagagattgtggagatgctgttctctagggggttggtaaaggtcctattcgccacggaaacctttgctatgggtgtgaatatgccggctaggaccgtcgtcttcgattctatgcgaaagcacgatggcagtaccttccgagaccttcttcctggcgagtatgttcagatggcggggcgggcaggccggcggggactcgacccgactgggacggttatccttctgtgtaagggacgcgtcccagaaatggcagacctacaccgtatgatgatgggtaagccctcccagctccagtcccagtttcggctaacttacacaatgatcctcaacctcttgagggttgatgccttaagagtggaagacatgatgaagcgttcattcagtgagttcccttcacgcaaggactcaaaggcgcacgaacaggccctcgctgagctgacgaaaagattgggggcccttgaggagcccgatatgaccggccagctagtagacttgcctgagtattatagctggggcgaggaactgaccgagacgcagcacatgattcagaggcgaatcatggagtctgtgaatggactcaaatctctcagcgccggtagagttgtcgttgtgaagaatcaggaacatcacaatgccttaggcgtgattctgcaggtatccagtaattcaacgtcccgggtgtttactactttggttctgtgtgacaagcccctctctcaggatcctcaagaccggggacccgcaacagcagaggtaccttacccggacgatcttgtcggctttaaactgttcttgccggaggggccctgcgaccacacagtggtgaagctccagcctggcgacatggccgctatcacaaccaaggtgctacgcgtgaacggtgagaaaatcttagaggacttttccaagcgccagcagcctaagttcaaaaaagatcccccactggcggctgtcactaccgcggtgcaggagctgctgcggcttgcccaagctcaccccgccggaccacccactctggatccagttaacgatcttcagctcaaagacatgtcagtggtggagggcggtctccgagcccgcaaattagaggaactgattcagggcgctcagtgcgtccacagcccacgttttcccgctcagtatctaaaacttcgggagcgcatgcagatccagaaggaaatggaaagactgcggttccttctgagcgatcagagcctcttgctcttgcccgagtatcaccaacgagttgaggtcctccggaccttagggtacgtagacgaagcaggcactgtgaagttggccggccgggtggcctgcgcgatgtcatcccacgagctactgttgaccgagctgatgttcgataatgccctgtccaccctgcgacccgaggagattgcagccctcctctcaggactggtgtgtcaaagcccaggtgatgccggagaccagctccccaatacactgaagcaggggattgaaagagtgcgagcagtcgcaaaacgaattggcgaggtgcaggtggcttgcggcctcaaccaaacagttgaggagttcgtgggcgagctgaattttggcctagtagaggtggtgtacgagtgggcgcgggggatgcctttcagcgagctggctggtctgagtggaacccctgagggactcgtcgtgaggtgcattcagagactagctgagatgtgtcgatccctacggggagccgcacggctcgtgggagaacccgttcttggcgctaagatggagactgctgccactcttctgcgccgcgatatcgtcttcgcggcatcattatacacccagtag

SEQ ID NO: 136605 - DNA, 2643 bp, synthetic construct
  misc_feature 1..2643: note = Description of Artificial Sequence: Synthetic coding sequence
  source 1..2643: mol_type = other DNA
atgatggagacagaaagattagtgctgccccccccggacccacttgatcttccattacgtgcagttgaacttggctgcacaggccactgggagctgttgaatttgcctggtgccccagagtcttccctaccccacgggttgcctccgtgtgctcctgatctgcagcaggaggcggaacagttatttttgtcctccccggcttggcttcccttgcatggagtcgaacattccgctagaaagtggcagagaaagacggacccgtggagcctgctggccgttctcggcgcccccgtcccgtcagatctccaggcgcaacgacacccgactactgggcaaatcctaggctacaaggaggtcctgcttgagcattatctcttcacaggaaactcctcaaaaactcaaggggagctctttctgctcctggactctagaggtgctttccataccaaagggtactacgctgcagtggaggccaaaaaagagcgcatgagtaaacatgcgcagacctttggcgccaaacagccaacgcatcaaggcggcccagctcaggatcgaggggtctatttgtcgctactcgcctccctgcgaactcgggctcagctgcctgtggtcgtgttcactttcagtcggggtcggtgtgacgaacaagcaagtggactgactagcttagaccttacaacctcttctgagaaaagtgaaattcacctgttcctccagcggtgtcttgcccgactgagaggctcagatcgtcagttgccacaagtgttacatatgtccgagttgttgaataggggcttgggtgtgcatcactctggaatccttccaatcctcaaggagattgttgagatgctcttctcgcggggactcgtaaaagtattattcgccacagaaacattcgcaatgggggtgaacatgccagcccggacagtggtgtttgactcgatgcgaaaacatgatggatctacatttcgggatctgctcccgggtgagtatgttcagatggcaggcagagccggaagaagaggcctcgatcccacaggcaccgtcattcttctctgcaaggggagggttcccgagatggctgacctgcatcgtatgatgatgggaaaacccagccaactgcagtctcagttccgtctgacgtatacgatgatcctcaacctgcttagagtggacgcactgcgcgtggaggacatgatgaaacggtctttttcagaattccctagccggaaggactccaaggctcacgagcaggcattagccgagctcactaagcggcttggggcactggaggagcctgacatgactggacagctcgtagacctgcccgagtattactcgtggggagaagagcttacagagactcagcacatgatccagcgccgtatcatggagtcagtaaacggattgaagagtctctctgcaggacgtgtagtcgttgtcaaaaaccaggagcatcataatgctttaggtgttattctgcaggtgagctctaacagcaccagccgtgtcttcactactttagtgctatgcgataaacccttgagccaggacccacaggacaggggacctgccaccgccgaggtaccataccctgacgatctggtcggctttaagctgttcttgccagaaggaccctgcgatcacacagtcgtgaagctgcaacccggggacatggcagctatcactacaaaagtattacgcgtgaacggggagaaaatactggaagacttttcaaagagacaacagccaaaattcaagaaggaccctcccttagccgcagttaccacagcggtgcaggaactgctcagactggcgcaagcgcatcccgcggggcctcctactttggaccccgtgaatgaccttcagttgaaagacatgtccgttgtggagggcgggctgagagcacgcaagctggaagaattgattcagggcgctcagtgcgtacacagcccaagatttcctgcacagtacctgaagctaagagagaggatgcaaatccaaaaggagatggagaggcttagatttcttctgagtgaccagagtctgttgcttctcccagaataccaccagagggtcgaggtgctgcgaacgctgggatacgtggatgaggcagggaccgtgaaattggcggggcgcgtcgcatgcgctatgtccagccatgagctgctccttacagaattaatgttcgataacgccctgtcaactctcaggcccgaggaaattgctgcactgcttagcggacttgtttgtcagtctcccggggatgccggagatcaactgcccaatacactgaaacagggcatcgagcgagtgcgggctgtggcaaaacggattggtgaggtgcaggtggcttgcgggctgaatcagacagttgaggagtttgtaggtgagcttaacttcggactcgtggaggtcgtgtacgagtgggcaagaggaatgcccttctccgagctagccggactcagcggaacccccgaaggtctggtcgttagatgcattcagcgccttgccgaaatgtgccggtccttaagaggtgcagcgcgcttagtgggcgaacccgtcctcggggccaaaatggagacggccgccacccttctcaggagagatatcgtattcgcagcttcactatatacccagtag

SEQ ID NO: 136606 - DNA, 693 bp, synthetic construct
  misc_feature 1..693: note = Description of Artificial Sequence: Synthetic coding sequence
  source 1..693: mol_type = other DNA
atgatggaaaccgaacgactggtcctgccaccgcctgatcctctcgatttgcctcttcgggcagtcgagttaggatgcactgggcactgggagctcctgaacctcccaggtgccccagaaagcagcctcccacacggtttgcccccctgcgcacctgaccttcaacaagaggccgaacaactcttcctaagtagtccagcatggctgcctctgcatggcgtagaacattcagccagaaagtggcaacggaaaacagacccttggtccctgctcgccgtcctgggggcccccgtgccaagtgaccttcaagcgcagcgacatccaactaccggccagattctgggatacaaggaagtacttttagagaacactaatctaagtgccacaacctccttgtccctgaggcggcccccaggccccgcctcacagagtctttggggcaacccaacccagtatccgttctggcctggcggcatggacgagccgaccattaccgatctaaacaccagggaggaggctgaagaagagattgattttgagaaggacctgttgactatccctcccggttttaagaagggtatggattttgcccccaagggttctgtgcacagttgcattcaccctagggggccccgcgcatcgatttctggagctgttggccacccttgtgggaggcacctcccctgctggtag

SEQ ID NO: 136607 - DNA, 2643 bp, synthetic construct
  misc_feature 1..2643: note = Description of Artificial Sequence: Synthetic coding sequence
  source 1..2643: mol_type = other DNA
atgatggaaactgagcgccttgtgctacctccacccgaccccttggacctgcctctcagggcggtggaacttggttgcacgggtcattgggagctcctcaacctcccaggtgcaccagagtcatccctgccccacggcctcccaccatgcgcacccgacctccagcaagaagctgaacagttatttctgagctcaccggcatggctaccgctccacggcgttgaacacagcgccagaaagtggcagcgaaaaacggacccttggtcccttctggctgtactcggggcacctgtaccctccgatctgcaggcccagagacacccaaccacagggcagatcttgggctacaaggaagtgctgctggaacattacctgtttacggggaattcatcgaaaactcagggagagctctttctgctgctcgacagccgaggtgctttccacacaaaggggtactacgcagccgtagaggccaagaaggagaggatgtcaaagcacgcccagacttttggggctaaacaaccgacacatcagggtgggccagctcaggaccgtggggtatatttgtcgcttctggcatctttgcgtactcgggcccaacttcctgtggttgtgttcacgttttcacgcggtagatgtgacgaacaggcctctggcctgactagtctagaccttactacaagcagtgaaaagtctgagattcacctctttctgcagcgctgtcttgcgcgtctgcgaggttccgacaggcagctgccgcaggtgctgcatatgtccgagttgctgaaccgtggcctgggggtccaccactcgggcatcctgccaattctcaaagagatcgtggagatgctatttagtaggggcctcgtgaaggtcctctttgcaacagagacgtttgccatgggcgtcaatatgcctgcccgcacagttgtgtttgactcaatgcggaaacacgacggctcaacgttcagggatctcttgcccggcgagtacgtgcagatggccggtagagcgggccgcagaggcttggatcctaccgggacagtcattctactgtgtaaaggaagggtgcctgagatggccgacctccaccgtatgatgatgggtaaaccaagccagttgcagtcgcagtttcgcctgacttatacgatgatcctgaacttattgagagtggatgcactacgggtggaagatatgatgaagcgtagttttagtgagtttccatcccgtaaagatagcaaggcacacgagcaggccctggctgagctcacaaagcgactgggcgctctcgaggaacccgatatgaccggccaactggtggatctccctgagtactattcctggggcgaggagttgactgaaacccagcacatgattcagcggcgaatcatggagtctgtgaatggattgaagtcgctgagcgccggcagggtcgtggtcgttaaaaatcaggagcatcataatgcgctaggagtgatactgcaggtgtctagtaacagcacatctcgagttttcacaacacttgtcttgtgcgataaaccgctgtctcaagatccacaggacaggggcccggccaccgcggaggtgccataccctgacgacttagttggtttcaaactgttcctccctgagggaccttgcgatcatactgtggtgaagttgcaaccaggtgacatggccgctattacaacaaaggtgcttcgagtgaacggtgaaaaaatactcgaggacttctccaagcggcagcagccgaaattcaaaaaagaccctcctttagctgctgtgactacagctgtgcaggagctcttgcggcttgcgcaggcacacccagcgggcccacccaccttagaccctgtcaacgacctgcagctgaaggatatgtctgttgtagagggggggctccgcgctcgtaagctagaagaacttattcagggcgcgcagtgtgtgcatagtcccagattccctgcccagtatctaaaactgcgcgaaaggatgcagatccaaaaggaaatggagaggttgaggttcctgttaagcgatcagagcctgttgctcttgcccgagtatcaccaaagggtcgaagtgctgcgaactcttggctacgtcgacgaggctgggactgtgaagctagcagggagagtggcctgtgctatgtcttcgcatgagttgctgctcaccgaattgatgttcgataacgctctgtcaaccctcaggcctgaggaaatcgctgctttgctgtcaggactggtctgtcagagcccgggcgacgccggcgatcagctgccgaacactctcaagcaagggatcgaaagggtgagggcagtagccaagcgcattggagaggtgcaagtagcgtgcggactgaatcaaactgtggaggagttcgttggcgaactaaactttggattagttgaggtggtttacgaatgggccaggggcatgcccttttcagaactggctggactgtctgggaccccagagggtctcgtggtacgctgcattcaacgcctggccgagatgtgccggtcgttgcggggcgcagctcgcctcgtcggtgaacctgttcttggggctaagatggaaactgccgccactttgcttagaagagacatcgtgttcgctgcatcactgtacacccagtag

SEQ ID NO: 136608 - DNA, 3267 bp, synthetic construct
  misc_feature 1..3267: note = Description of Artificial Sequence: Synthetic coding sequence
  source 1..3267: mol_type = other DNA
atggatgaacctacaattacggaccttaacacaagggaagaagcagaagaggagatcgattttgagaaggatctgttgactatacctcccggattcaagaaaggcatggactttgctccaaaagattgcccgacccctgcacccggactactgtctctcagttgccttctagagcccctcgatttgggggggggcgacgaagacgaaaatgaggccgtgggtcagccagggggaccaaggggtgatacggtgtccgcttcaccctgcagcgctcctctggcccgcgccagctcattggaggatttggttctgaaggaggcatctaccgcagtctcgacacccgaggctccagagccaccctcccaagagcagtgggcaatcccagtggacgccacatcccccgtgggagacttttaccgcctgatccctcagccagcctttcagtgggcattcgagccggatgtctttcagaagcaggccatcttacacctcgaaagacatgactctgtctttgtagctgcccacacgtccgccgggaaaaccgtcgtcgcagagtatgcgatcgctcttgcccaaaaacacatgaccaggactatatatacatcccccatcaaggccctctccaatcagaaatttcgggacttcaggaatacattcggggatgtgggattacttactggagacgtccagttgcaccctgaggcctcctgtcttatcatgactacagagattctaagaagtatgctatactcaggcagtgatgtgatccgtgaccttgagtgggtcatcttcgacgaagtacactacatcaatgacgttgagcgcggtgtggtctgggaggaggtcttgattatgctgcctgatcatgtaagcatcatcctcttgtctgcgaccgttcctaatgcgcttgaattcgccgactggattggccgcctgaagcgacggcaaatttacgttatttccacagtgacccggcctgtacccttggaacattacctgttcaccggcaactccagcaaaactcagggcgaactctttctcttgttggatagtcgaggagcctttcatactaaaggatactacgctgcagttgaagccaaaaaggagcggatgtctaaacatgcacagacattcggcgccaagcaacccacccaccagggcggccctgcacaggacagaggggtctatctttctctgctcgcatctctgagaacacgagcccaactgccagtggtagtgttcacattttctagaggacgctgtgacgagcaggcctccggtctgacctcactggatcttaccacatcctcagagaaatccgagattcacctcttcctgcagcgatgcctagctcgcttgcgcggctcagatcgtcagctgccccaggttctgcacatgagtgagttactgaaccgcggccttggcgtgcatcattcaggcatcttgcccattcttaaggagatcgtggaaatgctgttttccaggggtctggtaaaagtgttatttgcaactgaaactttcgcgatgggagtcaacatgcctgctagaaccgtagtctttgatagcatgaggaaacacgacggatcgaccttcagagatcttttaccaggggagtacgttcaaatggcgggtcgagccgggcggagaggtcttgaccccactggaaccgtgattctgttatgtaagggaagagtgccagaaatggctgatctgcaccgaatgatgatggggaagccctctcagctgcaaagccagttccgactgacgtataccatgattttaaacctgttaagggtcgacgctttaagggtggaagacatgatgaagaggagcttttctgagttcccttccagaaaggattccaaggcccacgagcaggctcttgctgagctgaccaagagactcggcgcattagaggagcctgacatgaccggtcagctggttgatctccctgagtactatagctggggcgaggagctgaccgaaacccaacacatgatccaaagaagaattatggagtcagttaatggcctcaagagtctcagcgctgggcgggtcgttgtggtcaagaaccaagagcatcataacgccctaggagtgatcctacaggtttcgtctaatagtacatcacgtgttttcaccacacttgtgttatgcgacaaacccctgtctcaggaccctcaagatcgaggtccagcgaccgccgaagtgccataccctgacgatctcgttgggttcaagctgttcctccccgagggcccctgcgatcatacagtggtgaaactgcaacccggcgatatggctgccattaccacaaaggtgctgagggtcaatggcgagaagatactcgaagatttttctaagcgccagcaaccaaagttcaagaaggaccctccgctcgccgcagtgacaaccgcagtccaggagctgttgagactagcacaagctcatcctgctggacctcccactctggatcccgtgaacgaccttcaactgaaagatatgtccgtggtagagggggggctgagagctcgcaaactggaggagctcattcagggagctcagtgcgtacatagtccacgcttccccgctcagtaccttaaactgagagagcgcatgcagattcaaaaggagatggaaaggcttaggttcctcttgtcagatcagtctcttctcttgctgcccgagtatcatcaacgagtggaggttctccggaccctgggttatgtggatgaagcgggaacagtgaagctggctggaagggtggcttgcgctatgagcagccatgaactgctgttgacggagttgatgttcgataatgccctgtctactctgcgtcccgaagaaatagcagcactgctgtccggcctggtgtgtcagagccctggtgatgcaggtgaccagctccctaataccctgaagcagggcatcgaacgtgtgcgcgccgtggcgaaaagaataggggaggttcaggtggcatgcgggctgaatcagacagtggaggagtttgtcggggaactgaatttcggtctcgtggaggttgtctacgagtgggcacgcggcatgcccttttctgagttggctggtcttagcggcaccccggaggggctggtcgttcggtgcattcagcggctggctgagatgtgcagaagcctgcggggggcagcccgcctggttggagagcccgtgctgggcgccaagatggagactgccgccacccttcttcgacgcgatatcgtgttcgcagcatcactgtacacccagtag

SEQ ID NO: 136609 - DNA, 3267 bp, synthetic construct
  misc_feature 1..3267: note = Description of Artificial Sequence: Synthetic coding sequence
  source 1..3267: mol_type = other DNA
atggacgagccaactataacagacctgaacaccagagaggaagctgaggaagaaattgactttgaaaaagatctgctcactattccgcccggattcaaaaagggcatggatttcgcacccaaagattgtcccactcctgccccagggctactctctttgagttgcctgctcgagccccttgacctcggcggtggagacgaagacgagaatgaggccgtcggacagccaggaggacctcgcggcgatacagtcagtgctagcccttgttcggcccccttggcgcgagcatcttctctcgaagaccttgtgctgaaagaagcaagtaccgccgtctctaccccagaggcacccgaaccaccgtcccaagagcagtgggccatacccgtcgacgccacatctccagtgggagacttttacaggctgatcccgcagccagcttttcagtgggccttcgaacccgatgtgttccagaaacaggcaatcttgcacttggaaagacacgatagcgtcttcgtggcggctcatactagtgcaggaaaaacggtggtggccgagtatgcgatcgccctcgcccagaaacatatgacaaggacgatctatacttctcccatcaaagccctgtcgaaccagaaattcagggatttccgtaacaccttcggtgacgtcggactactgactggcgatgttcagctgcatccagaggcttcatgcttgatcatgaccaccgagatcctccgttcaatgttatattcgggctctgatgttattagggacttagaatgggtgatcttcgatgaggttcactacataaatgacgtggagcggggcgtggtgtgggaggaggtattaatcatgcttcccgatcacgtcagcatcattctcctatctgcgaccgtaccgaacgccctcgaatttgccgattggatcgggcgactgaaacggaggcagatctatgtaatatcaaccgttacccgacctgtgcccctggagcactacctcttcaccgggaattctagtaagacccagggagagctctttctgctcctcgacagtagaggggccttccataccaagggatactatgctgcggtggaggctaaaaaggagcggatgtctaaacatgcacagacattcggtgcaaagcaacctactcatcaggggggccctgcacaggatcgaggagtctacctcagtttgctcgccagcctgagaaccagggcccagctgcctgtggtcgtgtttactttttctcgggggagatgcgacgagcaagcgtcagggctcacttccctggatctcactacctcaagcgagaagagcgaaattcatctgtttctccagagatgtctcgcgcgcctccgcggaagtgatagacaacttcctcaggttctgcacatgtcagaactcctcaaccgggggctgggtgtccatcactctggaatccttccaatactcaaagagattgtggagatgctgttcagccggggactggtgaaagtactttttgccacagagaccttcgccatgggcgtgaacatgccagctcgaaccgtggttttcgatagtatgagaaagcacgatgggagcacgtttcgtgacctcctgccaggagagtacgtgcagatggccggtcgcgccggccgccggggcctcgatcctacggggacggttattttgctctgcaagggcagagtacctgaaatggctgatctgcataggatgatgatgggcaagccttcgcagctgcagtcccaatttcgcctgacctataccatgatattaaaccttctgcgcgttgatgcattgcgagttgaagacatgatgaagcggtccttttcagaatttcctagcaggaaagactcaaaggcccacgagcaggcccttgctgaactgacaaagaggctcggcgccctagaggagccggatatgacaggccagctcgttgaccttcccgagtattattcatggggagaagagctcactgaaacacagcatatgattcagagacggatcatggaatccgtcaatgggctgaaaagcctttccgctggacgagtagttgtggtgaagaaccaggagcaccataatgcacttggcgtgattctgcaggtaagcagtaacagcaccagccgggtattcactacgctggtattgtgtgacaaacctctctcccaggatccgcaagatcgtggacccgcaaccgcagaggtcccgtaccccgacgacttggttgggtttaagctgttcttacctgaaggaccctgtgatcataccgtggtcaaacttcagcccggagacatggccgctataaccacaaaggttttgagggtgaatggcgaaaagatccttgaggattttagcaagaggcagcagcctaagtttaagaaagacccacccctcgcggctgttacgactgcagtccaggagctgctccgactagctcaagcacaccccgcaggtccacctactctggacccagtgaatgatctgcagctcaaagacatgagcgtggtcgaaggaggtctcagagcccgaaagctggaagaacttatacagggtgcacagtgcgtgcactcgccaaggttccctgctcagtacctgaagctacgcgagaggatgcaaatacagaaggagatggagcggctgaggttccttctctccgaccagtcactgctgttgttacccgaatatcatcagagagtggaagtccttagaaccctggggtacgtcgacgaagccggaacagtcaaattagcagggagggtcgcgtgtgcaatgtcatcacacgaactgcttctgacggagctcatgtttgataacgccttgagtacattgagaccagaagagatcgctgctctcctcagcggtcttgtgtgccagagtccaggggatgccggagatcagcttccaaacacattaaaacagggcatagagagggtgagggccgtcgctaaacgaatcggagaggttcaggtggcatgtggtttgaatcagacggtggaggaatttgtaggagagctcaatttcggcttggtggaagtggtttatgagtgggcccgaggtatgcccttttctgagcttgctggactgagcgggacccctgaagggctggtggtccgatgcatacagagactggcggagatgtgtcggtcgctcagaggagcagcacgcttggtgggagagcctgtgttgggggctaaaatggagaccgcggctaccctcctgcgccgggacatcgttttcgctgcatctctctatactcaatag

SEQ ID NO: 136610 - DNA, 693 bp, synthetic construct
  misc_feature 1..693: note = Description of Artificial Sequence: Synthetic coding sequence
  source 1..693: mol_type = other DNA
atgatggagacggagcgcctcgtgctgccacctccagacccattggatctccccctccgggccgtggagctgggatgtacggggcactgggaactgctcaacctaccaggcgcacccgagagctccctccctcacgggctgcccccttgcgcccctgatttgcagcaagaggccgaacaactcttcctctcgagcccagcgtggctcccactgcacggcgtagaacattccgcgagaaagtggcagcgaaaaacagatccttggagcctgctagcggtgctcggtgctcctgttccctccgacctgcaagcacagaggcatccgaccactgggcagatcctcgggtacaaagaggtgttactagagaacaccaacctgtcagctacaacgagccttagcctgcgcaggccaccaggcccggccagtcaatctctatgggggaacccgacccagtaccctttctggccaggtggcatggacgagcctaccatcactgacctgaacactcgcgaggaagctgaggaggaaatcgattttgagaaggacctcctgacaattcctccggggtttaaaaaggggatggacttcgcccccaaaggctcagtccacagctgtatccaccctaggggtcctagagcaagcatctcgggggccgtggggcacccctgcggacggcatctcccatgctggtag

SEQ ID NO: 136611 - DNA, 3267 bp, synthetic construct
  misc_feature 1..3267: note = Description of Artificial Sequence: Synthetic coding sequence
  source 1..3267: mol_type = other DNA
atggatgagccgactatcactgatttgaacactcgggaggaagccgaggaagagatcgactttgagaaagatctcttgacgatcccacctggattcaagaagggtatggactttgccccaaaagactgtcccacccccgcacctggcctcctgtcactttcatgtatgttggagcctctggatttgggaggaggagatgaggacgaaaatgaagctgtgggacagccaggagggccgcgaggggacacagtctcagcatccccctgctcagcccccttagcaagggcttcaagtcttgaggacctggtgttaaaggaagcctccaccgcagtttcaactcctgaagccccggagccccctagtcaagaacagtgggccataccagtggatgcaaccagcccagttggtgatttctataggctgattcctcagcccgcatttcagtgggctttcgaacctgatgtcttccagaaacaagccatactgcatctggagcgccacgatagcgtcttcgtcgcagctcacaccagcgccggcaaaaccgtcgtggctgagtacgccatcgcactggcacagaagcatatgacacgtacaatctacaccagtccaatcaaagctctcagcaaccagaagttccgcgacttcaggaacacctttggcgatgtcggactgctgacaggcgacgtgcaactccatcccgaggcatcttgtctgataatgaccacagaaatactgaggagtatgctttacagtggtagtgacgtgatccgagacctggaatgggtgatcttcgatgaagtgcattacattaatgatgtcgaaagaggcgttgtttgggaggaagtgctgatcatgctgccagatcacgtgagcattatcctgctgtccgccaccgtacctaatgctcttgagttcgcagattggatcggcaggctcaaaagacggcagatatatgtgatctctacagtgacaagacctgtgcctcttgagcactatctcttcaccggtaatagcagcaaaacacagggcgaactttttcttctcctcgatagccgtggagcattccacactaaggggtactacgcagcggtggaggcgaaaaaggaaaggatgtcaaaacatgcccagacattcggcgctaaacagccaacccaccagggaggtcctgcccaggatcgaggggtgtacctcagcctcctggcatccctgcgtacgagagcgcagctgccagttgtggtgttcacattttcccgcgggcgctgtgatgaacaggcttccggtctgacctctttagaccttactacgtctagcgagaaatccgagatccacctcttcctgcagcggtgtcttgcccgactacgcggcagtgatcgccaactcccccaggtccttcacatgagcgagcttctcaatcgtggattaggcgtgcatcatagtggaatcctgcctattcttaaggaaattgttgaaatgctgttttcccgtggactggtaaaagtcctgtttgctactgaaacatttgccatgggagtcaacatgcccgcacgcacagttgtatttgatagcatgaggaagcacgacggtagcactttcagggatctattgccaggtgagtatgtgcaaatggctgggagagcggggagaagggggctggatcccactggaaccgtgatcttactctgtaaggggagggtcccggaaatggcggatctgcaccgtatgatgatggggaagccctcccaactgcagtctcagttcaggctcacctacactatgatcctgaacctactccgggtagatgccctgcgagtggaggacatgatgaagcgcagcttttccgagttcccatctaggaaggactcaaaggctcatgaacaggccctggctgaactgaccaagagactgggtgcactggaagagcccgatatgactggccagctcgtagatcttccagagtattacagttggggagaggagctgaccgaaacgcagcatatgatccaacggagaatcatggagtctgtgaatggcttgaagtcgctgtccgcaggaagggtggtcgttgttaagaatcaagaacaccataacgccctgggggtcatacttcaggtatcttctaatagcacctcgcgggtattcaccactttagttctgtgtgataagcccctcagtcaagacccacaggacaggggacctgccacggccgaagtcccctaccccgatgatctcgtcggttttaaattgttcctgccagagggcccttgtgaccacaccgtggtgaagctgcagcccggcgatatggccgccatcaccacaaaagtgctgcgcgtaaatggagagaagatattagaggatttttcgaaaagacaacaaccaaagttcaagaaagatcctccgctggccgctgtcaccaccgccgtgcaagaactattgaggcttgcccaggcgcaccctgccggccccccaacgcttgacccagtaaacgacctccagttgaaggacatgagcgtggtggaaggaggattacgggcacggaagctggaagaactgattcagggtgctcagtgcgtgcactcaccaaggtttcctgcccagtatttgaagctgagggaaagaatgcagatccaaaaggagatggaacgtctcagatttttgcttagcgaccagagcctgttgcttctaccggagtatcatcagagggtcgaggtcctgcgaaccctggggtacgtggacgaggctggcacggtgaaactcgccggccgagtcgcatgtgctatgtcgagccacgagctcctgctaactgagctgatgtttgataacgctctgtcaactctcagaccagaagagattgcagctttgctgagtggcttggtgtgccagtcccctggcgatgcaggcgatcaactaccaaatacactgaaacaagggattgaaagggtccgcgccgtagcaaaacgcatcggagaggtccaggtcgcctgtggcctgaaccagaccgtggaagagtttgtgggggagcttaatttcggccttgtcgaggtggtgtatgagtgggcccggggcatgcccttttccgagctggctggactttcaggcactccagaggggctggtcgtgagatgcatccagagactggccgagatgtgcaggagcttgcggggagcagcccgtctcgttggcgaacctgtacttggagccaaaatggaaacagcggcaacactgttgcgcagagacatcgtcttcgctgcatctctgtacacccagtag

SEQ ID NO: 136612 - DNA, 693 bp, synthetic construct
  misc_feature 1..693: note = Description of Artificial Sequence: Synthetic coding sequence
  source 1..693: mol_type = other DNA
atgatggaaactgaacggctggttcttcctccacctgatccattggacctgcctctgcgcgcggttgaactggggtgcaccggtcactgggaattgttaaacctgccaggcgcgccggaatcctccttaccacacggcctgcctccatgcgctccggatctgcagcaggaagcagagcagttgttcctatcttccccagcttggttgccccttcacggggtagagcatagtgctcgaaagtggcagcggaaaaccgacccctggtctctgctcgccgtcctgggggctccagtgccatccgatctgcaggcacaacggcaccctactacaggtcagatcctgggctacaaggaagtgctgttggaaaacaccaacctatctgcaacgactagcttatctctccggcggccacctgggcccgctagccaaagtttatggggtaaccccactcaatatcctttctggcccggaggaatggatgagccaactataacggatttgaatactcgtgaagaggccgaagaggaaattgacttcgagaaggaccttcttacgattccgcctgggttcaagaagggcatggattttgcccccaaagggagcgtccacagctgtatccatccacgaggcccccgggcatccataagcggagcggtgggtcacccttgtggtcgtcacctgccatgctggtag

SEQ ID NO: 136613 - DNA, 2643 bp, synthetic construct
  misc_feature 1..2643: note = Description of Artificial Sequence: Synthetic coding sequence
  source 1..2643: mol_type = other DNA
atgatggagactgagcgacttgtactgccacctcccgacccgttagaccttcctcttagagcagtcgaattaggatgcactggccattgggagctgcttaatctccccggcgcccccgaatccagcttgccgcacggactgcccccttgtgctccagatttgcaacaggaagccgaacagctatttttatcaagcccagcttggctgccactccatggcgttgaacactccgcccgaaagtggcagagaaaaacggatccatggagtctgctggccgtgcttggagctcctgtccctagcgatctacaagcacaacggcaccccactaccggccagattctggggtacaaggaggtgctgctggagcattatctatttacaggtaactcttcaaagacccagggggagctgtttctgctgctggattcacgtggcgctttccacaccaaaggatattatgcagctgtcgaggccaaaaaggagcggatgtccaaacatgctcaaacattcggcgccaaacagcccactcaccaaggtgggcctgcccaagataggggggtatacctaagcctcttagcatccctcaggaccagggcacagctcccagtcgtggtcttcactttctcaaggggacggtgtgatgaacaggctagcggcttaaccagccttgacctgacaacctcctctgagaagtctgaaattcacctattcttacagcggtgtctggccagactgcgggggtctgacagacagcttccacaggtactccacatgtcagagctcttgaaccgcggcctcggcgtgcatcattcagggatcttacctatcctcaaggaaatcgtagaaatgctcttctctcggggtctggtgaaggtactttttgcgactgaaacctttgccatgggtgtcaacatgccagcgcggaccgttgtttttgattccatgcggaagcatgacggatccaccttccgagatctgctgcctggcgagtatgtacagatggcaggacgggcaggtcgccgggggcttgatcccactgggacagtgattctgttgtgcaaggggcgagtgcccgagatggctgacctccatagaatgatgatggggaaaccatcacagttgcaaagccagtttagactcacgtataccatgattctgaacctcttgcgggtcgatgctctgcgcgtcgaggacatgatgaagcgaagtttcagtgaattcccctcccgcaaagactccaaagctcatgagcaggcccttgccgagctcactaagcgcctgggagccttggaagaacctgacatgacagggcagcttgtggacctgcctgagtattactcatggggagaggagctgacggaaactcagcacatgatacaaagacgtatcatggagtccgtaaacggcctcaagtccttgtcagccggccgggtagttgtggtgaaaaatcaagagcaccacaatgccctaggagtgatcctgcaggtgtcctccaacagcacatcccgtgtctttacgactttggtgctgtgcgacaagcccctaagccaggatccacaggaccggggccctgcgacggcagaggtgccatatccagacgatctagttggatttaaactgttccttcctgagggtccatgtgatcatacagttgtgaaattgcagcctggcgatatggccgcaattacaacaaaggtgcttagggtaaacggggaaaaaatcctggaagacttctctaaacgccagcagccaaaattcaagaaagatccccctctagctgctgtaactacggcggtgcaagagctccttcgccttgctcaagcccacccagctggaccaccaacccttgatcctgtaaacgacctccagttaaaggatatgtccgtcgtagaaggtgggctgagggctaggaagctcgaggagctaattcagggcgctcagtgtgtgcactctcctcgcttccccgctcagtatctgaagctgcgggaacgaatgcagatacagaaggagatggaaagactgcgttttctcctaagtgatcagagtctgctcttgcttccagagtaccatcaacgagtggaagtcctgcggactctaggatatgtcgatgaggctgggacggtaaagctggctggcagggttgcgtgcgctatgagcagtcatgaactgctcttaaccgaacttatgtttgacaacgcactgtccacactgagacccgaggagatcgctgctctgctcagcgggctcgtgtgtcagagtccaggagatgcgggtgaccagctgccaaacaccctgaaacagggcatcgagcgcgtgcgcgctgtcgctaaaaggattggggaagttcaggtcgcttgcggactgaaccagactgtagaagagttcgtgggggaattgaattttggtcttgttgaggttgtgtatgaatgggctaggggcatgcccttttccgagctggcaggcctatctggaacccccgaaggactggtcgtgcgctgcattcagcgccttgctgaaatgtgccggagcttgcgcggcgccgcccggctcgttggggaacctgtgctaggcgctaaaatggagactgccgccaccttgttgaggagagacatcgtgttcgctgcatcattatacacccagtag

SEQ ID NO: 136614 - DNA, 693 bp, synthetic construct
  misc_feature 1..693: note = Description of Artificial Sequence: Synthetic coding sequence
  source 1..693: mol_type = other DNA
atgatggaaaccgagaggttagttctcccaccacccgaccccctggatctgccattgcgggccgtcgagttgggctgcacgggccactgggagctcctgaacttgccgggcgcccctgaaagctccttgccccacgggctaccaccgtgtgctcctgatcttcagcaggaggccgagcagctgttcctcagctccccggcatggctgccattacatggagtggaacactcagctcggaaatggcaaaggaagaccgacccctggagtttgctggccgtgcttggagcccctgtgccgtcagacttgcaggcccagcggcacccaacaaccggacagatcctgggctacaaagaagtactgcttgaaaatactaacctctccgcaacaacaagcttatccttgcggagacctcctggccccgcctcccagtctctatggggaaaccctactcaatacccattttggccagggggtatggacgaacctaccataacagacttaaacacacgcgaggaagcggaggaggagatcgacttcgaaaaagatctgctaactatcccacccgggttcaaaaaaggcatggatttcgcacccaagggcagcgtacacagctgcattcaccctcggggaccccgcgctagcatcagtggcgccgtgggccacccctgcggccgccatctcccctgctggtag

SEQ ID NO: 136615 - DNA, 3162 bp, synthetic construct
  misc_feature 1..3162: note = Description of Artificial Sequence: Synthetic coding sequence
  source 1..3162: mol_type = other DNA
atggacttcgctccaaaggactgtcccactccagccccgggcctcctcagcctgagctgtctcctggaaccgctggacctgggaggcggtgacgaggacgagaacgaagccgtcggacagcctgggggcccacgaggcgataccgtgagcgcttcaccctgttctgccccgttggcgagagcctcatcactcgaggacttggttctgaaggaagcctctaccgctgtttctaccccagaagctcccgaacccccttctcaagagcagtgggcaattcccgtggatgcaacctctcccgtgggcgacttttacaggctcatccctcagcccgcatttcagtgggcttttgagcccgacgtcttccaaaaacaggctattctacatctcgagcggcacgacagcgttttcgtagcagcacatacaagtgcaggaaaaacagtggtggccgagtacgccatagctctggcccaaaaacacatgactagaacaatatatacatccccaatcaaagccctgagtaatcagaagtttagggatttcaggaacactttcggcgacgttggactactcactggggacgtccagctgcatccagaagcctcttgtctcattatgacaacagaaatcctccgaagcatgctgtatagtggatctgacgtcatccgtgatctggaatgggtaatttttgacgaggttcattacataaatgatgtggaaaggggggtggtctgggaggaggtattaatcatgctgcccgaccacgtctcaattatactcctttcggcaaccgtccccaacgcactggaatttgctgactggatcggacgattaaagcgaagacagatatatgtgatctctactgtgaccagacctgtcccattggagcactatcttttcactggtaactcctcaaagacacaaggggagctctttctgctactagactcgcgcggggctttccataccaaaggttattatgcggcggtggaagcaaaaaaagagagaatgtctaaacatgcccagacattcggggctaaacaacccacacatcagggcggcccggcacaagaccgtggcgtgtacctatcattattagccagcctgcggacaagggcccagctgccggtggtggtctttaccttctctagaggcaggtgcgatgaacaggcgtctggactgacctctttggacctgacaaccagctctgaaaaatccgagattcacttattcttgcagaggtgccttgcccgattacggggcagtgaccgtcagctgccacaggtcctccatatgtcggaactactcaacagagggctgggcgtccatcattcaggtatcctgcccatcctaaaagagattgtggaaatgctcttctcacggggcctggtcaaggtgctgtttgctaccgaaacatttgcaatgggggtgaacatgccagcacggaccgtggtgtttgactccatgaggaagcacgacggctctactttccgcgacctgctcccaggggagtacgtccagatggctggtagggctggcaggagaggcctggatcctacaggcactgttatcctgctgtgtaagggccgcgtgcctgagatggctgatctgcaccgcatgatgatggggaaaccaagccaactgcagtcccaatttcgcttgacttacacgatgatcctgaatctgcttcgggtagacgcattaagggtagaggacatgatgaaaagatcattctctgaattcccttcccgcaaagatagcaaagcccacgaacaggctctggccgagctgacaaaacggttaggtgcgcttgaggaacccgatatgactggacaactggtcgatctgccagagtattacagctggggtgaggagctcactgaaacccaacatatgatccagcggcgaatcatggagagtgttaatgggctgaagtccctttcagccggcagggtggtagttgtaaaaaaccaagagcaccacaatgcattgggtgttatcctgcaggtgagctctaactccacctcaagagttttcacgacacttgtgctgtgtgataagcccttgtcccaggatccacaggatcgcgggcccgctactgctgaggtgccctatcccgatgacctcgtcggctttaagctctttctccctgaaggcccttgcgaccatacagtggtgaaactgcaacccggtgatatggctgcaattacgactaaggtcctccgggttaacggtgagaagatcctcgaagacttttcaaagcgtcagcaaccaaaatttaagaaggatccaccgctcgcggccgtgaccacagccgtgcaggagttgctcagactggcacaggcacaccccgcaggacccccgactttagatccagttaacgatctgcaattgaaggacatgtccgtagtggagggaggtctgcgggcacgtaaacttgaggaactcatccagggagcgcaatgtgtccattccccccgtttccccgcacagtacctcaagctgagggaacggatgcagatccagaaagagatggagagattacgattcctcctttctgaccagtctctcctgctcctgcctgagtatcaccagcgtgtcgaggtgctcagaacacttgggtacgtggacgaggcggggacggtgaaactggcaggaagagttgcctgcgccatgtcttcgcatgaactactgctgaccgagttaatgttcgataacgccctttccacattacgccccgaagaaatcgcagcgctcttatccggactggtttgtcagtcccctggcgacgccggagaccaactcccaaacacattaaaacaagggatagaacgcgtgcgcgccgttgcgaagcggattggagaagtacaagtcgcatgtggactgaatcaaaccgttgaagaattcgtgggcgaactcaattttggactggtggaagttgtatatgagtgggcccggggcatgcctttttccgaacttgccggactgtcgggtactcccgagggtctggtggtcagatgcatccagcgacttgcggagatgtgtcgcagcctgcggggggcagcacgactggtgggcgagcccgtactcggagccaagatggaaactgcagctactctcctgcggcgggatattgtttttgctgcaagcctgtacacccaatag

SEQ ID NO: 136616 - DNA, 3162 bp, synthetic construct
  misc_feature 1..3162: note = Description of Artificial Sequence: Synthetic coding sequence
  source 1..3162: mol_type = other DNA
atggactttgctccgaaagattgtcctaccccagcaccggggttgttgagcctgtcgtgcctcctggagccacttgacctgggaggcggggatgaagatgaaaacgaggcagtgggtcagcctggtggcccccgcggagacaccgtctctgcgagcccctgcagtgctccactggcccgcgcttccagcctggaggacctggttctgaaggaggcatctaccgcagttagtacgccagaggcccctgagccaccttcccaggaacagtgggccatcccggtcgacgccacatcccctgttggtgatttctaccggctcatcccgcagccggctttccaatgggccttcgaacccgatgtttttcagaagcaggcaattctgcatcttgagcgacatgatagcgtgttcgttgccgcccacactagtgccgggaagacagtagttgcggaatacgctatcgctttagcccaaaagcacatgacaagaacaatttacacttcacctattaaagctttgagcaaccagaagtttcgagacttcagaaacaccttcggtgatgttgggttgttaacgggcgacgtgcagctccaccctgaggcttcttgcttaattatgactacagaaattctcagatccatgctgtacagcggcagcgacgtgatcagagacctagagtgggtaatcttcgatgaagtgcattacatcaacgatgttgagaggggggtggtgtgggaagaggtgctcattatgctgccggaccatgtgagtattattctgctctcagcaactgtaccaaatgccctggagtttgctgactggatcggccgactaaagcggcgacagatttatgtgatatccaccgtgacacggcccgtccccttagagcactaccttttcaccgggaactcgagtaaaacccagggcgaactgttcttacttttggactccaggggcgcattccatacaaaaggctactacgccgccgtcgaggcaaaaaaagagcggatgtccaagcacgcccaaacattcggggctaaacagccgacacatcaggggggccctgcacaagatagaggcgtctacttatcactgctcgccagcctgcgcacacgcgctcaactgccagtggtggttttcaccttcagcaggggtagatgtgacgagcaggcctccggactgactagtctcgatctgactacctctagcgagaagtccgaaattcacctgtttctgcagcggtgtcttgcccggttacgaggctccgataggcagctcccccaagtgttacatatgtccgaactactgaaccgaggcctgggggtgcatcattctggcatcttacccattctgaaagagatcgtggagatgctgttttcgcgaggattagtaaaagtgctcttcgccacagagaccttcgcgatgggcgtaaacatgcctgcacgcacagtcgtgttcgatagtatgcgcaaacacgacgggtccaccttcagggacctgttgcctggtgaatatgtgcagatggcaggccgcgctggaaggcgagggcttgatccaaccggaacggtaattttactctgtaaggggcgagtcccagagatggccgacctacaccggatgatgatgggcaagcccagccaacttcagagtcagttcagactgacatatacaatgatactgaatttgcttcgagtggacgccttgcgtgtggaggatatgatgaaacggagcttctccgaatttccttctcgaaaagactctaaggcgcacgagcaggctctcgccgagctgactaagcgcctgggggccctggaagaacctgacatgactggccagctcgttgatctgccagaatactactcctggggcgaggaactcaccgagacccagcacatgattcagcggaggattatggagagtgttaacggattgaaatccttgagcgcggggagggtggttgtggtgaaaaaccaagagcatcataacgcactgggtgtgatcctgcaggtgagctctaattccacgtctagggtctttactactttggtcctgtgcgacaagcccttgagtcaggatcctcaggatagaggccccgccacagctgaggtcccataccccgatgatcttgtcggttttaaactatttcttcctgagggtccttgcgaccacaccgtggtcaagctgcagcccggcgatatggcggctattacaacgaaggtgcttcgggtgaatggagagaagatcctagaagacttctcaaagagacagcagcccaaattcaaaaaggatccaccactggccgccgtcaccaccgctgtccaggaactcttaagactggcccaggcccaccctgcagggcctcctactctcgatccggtaaatgatctgcagctcaaggatatgtccgtggtagaaggtggccttagagctagaaagttggaggagctgatccagggtgctcagtgcgtgcactccccacgctttcccgctcagtacctcaagcttagagaacggatgcagattcagaaagagatggagaggttgaggttcctgttatcagatcagtcactgctgctcctccctgagtaccaccagagggtagaggtactgagaaccctgggttatgtggatgaggctggcactgtaaaattggctggccgcgtcgcctgtgctatgtcatctcacgaactgctgttaactgagctcatgttcgacaacgcactctccaccctgcgtcctgaagaaatcgcagccctgctcagcggcctagtgtgccaatcccccggggatgccggggatcagttgccaaataccctgaagcagggaatcgagagggttcgagctgtggcaaagcgcattggtgaggttcaggttgcctgcggccttaatcagactgtggaagagtttgttggagagttgaactttgggcttgtagaagtcgtgtacgagtgggcccgcggaatgcccttttcagagctcgcaggcctgagcgggaccccagaagggttagtggtgaggtgtatccagagactggccgagatgtgcagatcactgcgtggggcggcccggctcgtgggggagccagttctcggagctaagatggagaccgcggcaaccctcctgcgccgcgacatagtctttgcggctagcctgtatactcagtag

SEQ ID NO: 136617 - DNA, 3162 bp, synthetic construct
  misc_feature 1..3162: note = Description of Artificial Sequence: Synthetic coding sequence
  source 1..3162: mol_type = other DNA
atggactttgctcccaaggattgtccaacaccggcacctggcctgctgtccctcagctgtcttcttgagccacttgacctgggaggcggagatgaagacgaaaacgaagctgtcggccagccaggcggtccaaggggggacactgtctccgccagtccatgcagcgcacctctcgctcgagcttcgtctcttgaagatcttgtacttaaagaagcatctacagccgtaagcacccccgaggccccagaacccccctcccaggagcagtgggccatacccgtggacgctacgtcgccagttggtgatttctataggctcatcccacaaccggccttccagtgggccttcgagcctgacgtgttccagaaacaggccatactgcatctcgagcggcatgactcagtgtttgtcgccgcacatacatctgcagggaagactgtagtcgccgaatacgccattgcgctggctcagaaacatatgacgagaaccatctacactagccctatcaaggcgctctctaaccaaaagttcagagattttcggaacacctttggagacgtggggctcctcaccggagatgttcagctacacccagaggccagttgcttaattatgaccacggagatcctccgctcaatgctctatagcgggagtgatgtgattagagacctggagtgggtgatcttcgacgaagttcattacattaatgatgtcgaaagaggcgtggtctgggaagaggtcctcatcatgttaccagaccatgtgtccatcatcctgttgagcgcgactgtgcctaacgctttagaattcgccgactggattgggaggctcaaacgccgtcagatttacgtgatctctactgttacccggccagttcccctcgagcactacctgtttactggcaattcctcaaagacacagggagaacttttcctcctcctggatagtaggggcgcatttcacacaaaaggatattatgccgccgtggaagctaaaaaggagagaatgtcaaagcacgcgcaaacatttggagccaaacagccaacccaccagggaggccccgcacaagataggggggtataccttagcctgctagcctcgttgcgaactagagcccagctgccagtagtcgtgttcaccttttcccgcggccgttgtgacgagcaggcgtccggcttgaccagcttggatctgaccacatccagcgaaaaatccgaaattcatcttttcctccagcgctgtctggcccgcctgagaggcagcgacaggcagctgccacaggtactgcacatgagcgagctgcttaaccgaggcttaggggtgcatcatagcggtatcctgcccatccttaaagagatagttgaaatgctgttctcaagaggcctggtgaaagtgctttttgcaaccgagacctttgcgatgggcgtgaacatgcctgctaggaccgtggtttttgacagtatgaggaaacacgacggaagcaccttccgggatcttcttccgggcgagtatgtgcagatggccggaagggccggtaggcggggtctagacccaaccggcactgtcattctcctttgcaaaggccgagtgcctgagatggcagacttacatagaatgatgatgggtaagccctctcagttacagtctcagttcagactgacctatacgatgatcttgaacctgcttcgggtggatgccctccgtgttgaggacatgatgaagcgatctttctcagaattcccctcaaggaaagattccaaggcccatgaacaggcgttggcagagctcacaaaaaggctcggcgccttggaagagcccgacatgacagggcagttggtcgacctgccagagtattactcatggggagaagaactgacagaaacacaacacatgatacagaggcgcatcatggagagtgtaaatggcctgaaatccctgtctgctggtagagttgtggtggtgaaaaaccaggagcaccacaatgcccttggcgtgatcctccaggtgagttcgaattctacctcacgggtttttaccactctggtgctgtgcgataaacctttaagtcaggacccccaggatcgtggccccgccacggccgaagtcccctaccctgatgacctggtcggatttaagctgttcctccccgaaggaccttgcgatcacacagtcgtcaaattgcagcctggcgacatggctgccatcacgacaaaggtgctccgggtaaatggagaaaagatcctggaagactttagcaagcggcagcaaccgaagtttaaaaaggatcctcccttggctgccgtgaccacagccgtacaggaactgctgaggctggcccaggctcaccctgccgggccccctaccctggatcctgtcaacgacctccagctaaaggatatgtctgtggttgaaggaggtttgcgcgctcgaaagttagaggagctcatacagggtgcacagtgtgtgcattctcccaggttccctgctcagtacttgaaactgagagaacggatgcagattcaaaaggagatggaaagactacggttcctcctgagcgatcaaagtttgctgctgctccctgagtatcaccagagggtggaggtcttgcggactctgggatacgtggatgaggccggcacggttaagctggcgggtagggttgcttgcgcgatgagttctcatgagttactcctgaccgagcttatgtttgacaacgccttatctacgcttaggccagaagagatcgcagccctgctgtcaggccttgtgtgtcagagtcccggggacgctggggatcagttgcccaacacattgaaacaaggcatcgaacgcgtccgagcagtcgccaagcgcatcggagaggtacaggttgcttgcgggctgaaccagaccgtggaggagttcgtgggggagctgaactttggattggtagaggtggtatatgagtgggctcgcgggatgccattctccgaacttgcgggcttgtctgggacgcctgagggactggtggtgaggtgcatccagaggctcgctgaaatgtgtcgctccctcagaggcgctgccaggctggtgggggaaccggttctgggagccaagatggaaaccgctgccacgctacttcgcagggacatcgtatttgccgcatcgctatatacacagtag

SEQ ID NO: 136618 - DNA, 465 bp, synthetic construct
  misc_feature 1..465: note = Description of Artificial Sequence: Synthetic coding sequence
  source 1..465: mol_type = other DNA
atggccacaaaggcagtgtgtgtcctgaagggggacggacccgtacagggtattattaacttcgagcagaaagaatccaatgggcctgtgaaagtatggggcagtatcaagggcctgaccgaaggcctgcacggcttccatgtgcacgagtttggcgacaacacagctgggtgcactagcgcaggtcctcatttcaaccctctgtcaaggaagcacggtgggcccaaggatgaggagcgccacgtgggagacctggggaatgtgactgctgataaagacggggtagcagatgtgtctatcgaggattcagtgatctcgctgagcggcgaccactgtattatcggtcgtaccttggtcgtgcacgagaaggccgacgatctcgggaagggcggcaatgaggagtccacaaagacgggcaatgctgggtctcgcttagcctgtggagtaatcgggatcgctcaatag

SEQ ID NO: 136619 - DNA, 108 bp, synthetic construct
  misc_feature 1..108: note = Description of Artificial Sequence: Synthetic coding sequence
  source 1..108: mol_type = other DNA
atggcaacgaaagcggtgtgtgtactcaaaggagatggccctgtgcaaggaattatcaatttcgaacagaaagaaagcaacgggcctgagggtgtgggtaagcactag

SEQ ID NO: 136620 - DNA, 1074 bp, synthetic construct
  misc_feature 1..1074: note = Description of Artificial Sequence: Synthetic coding sequence
  source 1..1074: mol_type = other DNA
atggattcagtagagaagacaaccaacagatcggagcagaaatctcggaagtttttgaaatctttaatacggaaacagccgcaagaactgctattagtgatagggaccggcgtttccgcggctgtggcaccggggatacccgctctgtgctcatggaggagctgtatcgaagccgtgattgaggcagcagagcagttggaggtgcttcaccccggagacgtagcagaattccgccggaaggtgacaaaagatagggatctgctggtggtggcgcatgatctcattaggaagatgtctccccgcaccggggatgccaagccttcatttttccaggactgtctcatggaggtcttcgacgaccttgagcaacacatacgaagcccagttgtattacagtccattttgagccttatggaccggggggcgatggtcctaacaacaaactacgataacctcctcgaagccttcggcaggcgccagaacaaacccatggaatccctagacttaaaagacaaaaccaaggtacttgagtgggcccggggccatatgaagtacggagtacttcatatccatgggctctataccgatccgtgcggcgtcgtgctggacccaagcgggtataaggacgtgacgcaggacgccgaggtgatggaggtcttgcagaatctgtaccgaacaaaaagtttcttattcgtaggctgtggagagacgctgagggaccaaatatttcaagctctttttttgtacagtgtacctaacaaggtagatctcgagcactatatgctggtgctgaaagagaacgaggaccacttctttaagcaccaggctgacatgttgctccatggcatcaaggtcgtgtcctacggcgactgctttgaccattttccgggctacgtccaagacctggccacgcagatctgcaaacagcagtctcctgacgctgaccgcgttgacagcactaccctcctaggtaacgcttgccaggactgcgctaagcgaaagttggaagaaaacggcatcgaggtgtctaaaaagcggactcagagcgacacggacgacgcagggggtagctag

SEQ ID NO: 136621 - DNA, 636 bp, synthetic construct
  misc_feature 1..636: note = Description of Artificial Sequence: Synthetic coding sequence
  source 1..636: mol_type = other DNA
atggacccacgtaaggtgaacgagctcagagctttcgtgaaaatgtgcaagcaggacccctctgtccttcataccgaggaaatgaggtttctgcgggagtgggtggagtcgatgggagggaaagtccccccggcaacacagaaagccaaaagcgaagaaaacaccaaggaagagaagcccgactcaaagaaagttgaggaagacctgaaggctgacgagccaagttcggaggagtcagacctggagattgacaaggaaggggtgatcgagcccgacacagacgccccgcaggaaatgggtgatgagaatgctgagatcaccgaagaaatgatggaccaagccaatgataagaaagtggccgcaatcgaggcgcttaatgatggcgagctccagaaggctatcgacctgtttacagacgcaattaagcttaatcctcgacttgccatcctctatgccaagagggcttccgtctttgtgaaattgcaaaaacccaacgctgccattagggactgcgatagagccatagaaatcaatcctgactcggcccaaccgtacaagtggagggggaaagcacatagactactgggccactgggaggaagccgcgcatgatctcgccctcgcatggactcagtag

SEQ ID NO: 136622 - DNA, 489 bp, synthetic construct
  misc_feature 1..489: note = Description of Artificial Sequence: Synthetic coding sequence
  source 1..489: mol_type = other DNA
atgggtgggaaagtgcctccggctacacagaaagccaagagtgaagaaaacacaaaggaagagaagccagattccaagaaagtcgaggaggacctgaaggccgatgagccatcttcagaagaatcagacctggagatcgacaaggagggcgttattgaaccagatactgacgctccccaggagatgggagacgaaaatgccgaaattaccgaggaaatgatggatcaagctaatgataaaaaagtagcagccattgaagcactcaatgatggggagctacaaaaggctattgacctgttcaccgatgcaatcaaactgaatcccagactggctatcctctatgcaaaacgcgctagtgtatttgtgaagctccagaaaccaaatgccgccattcgcgactgtgatagggccatcgaaattaatcccgattccgctcagccgtataaatggagaggtaaagcacaccgtctattgggacattgggagtag

SEQ ID NO: 136623 - DNA, 366 bp, synthetic construct
  misc_feature 1..366: note = Description of Artificial Sequence: Synthetic coding sequence
  source 1..366: mol_type = other DNA
atggatcctcggaaggtcaatgagttacgtgcttttgttaagatgtgtaagcaggacccgtcagttcttcatacggaagagatgcgctttctgcgggagtgggttgaaagcatggggggtaaagtgcctccggccacccaaaaagctaagagcgaggagaacactaaggaagaaaagcccgattcaaagaaagtggaggaggacctcaaggccgatgagccatcctctgaagagtcggacctcgaaattgacaaggagggagtgattgagcccgacaccgacgcccctcaggaaatgggtgatgagaatgccgaaatcactgaagagatgatggaccaggccaatgacaagtcggggtgttattag

SEQ ID NO: 136624 - DNA, 2568 bp, synthetic construct
  misc_feature 1..2568: note = Description of Artificial Sequence: Synthetic coding sequence
  source 1..2568: mol_type = other DNA
atggggagcgatcgcgcccgcaagggcggtggcgggccgaaagatttcggtgccggattgaagtataatagccggcacgagaaggtcaacggattggaggaaggcgtggagtttctgcccgtgaacaacgtcaaaaaggtcgaaaaacacggccccggtcggtgggtcgtactggccgctgtgctgatagggctgctactcgtcctgctggggatcgggttcttagtgtggcacctgcagtacagagacgttcgggtccagaaagtgtttaacggctatatgcggatcacaaacgagaactttgttgacgcatacgagaacagcaactcaactgagtttgtttctctggctagtaaagtgaaggatgctttgaagctgctgtatagcggcgtgcccttcctaggcccgtatcacaaggagtccgccgtgaccgcattctctgaggggagtgtgattgcctattactggagtgaattctctatcccacaacaccttgtcgaggaggccgaacgggtgatggccgaggagagagtcgtgatgctgccccctagagcacgaagtctaaagtctttcgtggtaaccagcgtggtggctttcccgacagatagtaaaactgttcagcggacacaggataactcctgcagctttggactccacgcccggggcgtggagcttatgagattcaccacgccgggattcccagattcaccataccctgcccacgcaagatgtcagtgggctttgaggggagacgccgattccgtgctctctctcacttttcgttccttcgacttggcctcctgcgacgagagaggctccgacctggtgactgtctataatactctgagtccaatggagccacatgccctcgtgcagctgtgcggcacataccctcccagctacaacctaacatttcattccagccaaaacgtgctgttgatcacactcattaccaatactgagcgccggcatcccggatttgaggctacgtttttccagctcccgcgcatgtcttcatgtggtggtcggctgcgcaaggcgcagggaacattcaatagcccctactacccaggtcattatccccctaacatcgactgtacctggaacattgaagtgcctaacaaccagcacgtaaaggtgcgatttaaatttttctatctgctggagcctggagtgcctgccgggacatgcccaaaggattatgtcgaaatcaatggggaaaaatattgcggtgagaggagccagttcgtggttacctccaacagtaataagataacagtacggtttcatagcgaccagagctataccgatacggggtttctcgccgaatacctctcttacgactcaagcgatccctgccccgggcagtttacctgccgtactggcagatgtattagaaaagagctgcgttgcgatggctgggccgactgtaccgatcactcagacgagctgaattgctcctgtgacgcaggtcaccagttcacctgcaaaaataagttctgtaaacctctattttgggtgtgcgacagcgtgaacgattgcggagacaattccgacgaacagggctgctcatgtcccgcacagactttccgttgcagcaacggaaagtgcctttctaaaagtcagcagtgcaacggaaaagatgactgtggcgatgggtccgacgaggcaagctgccccaaagtgaacgtggtcacctgcacaaaacatacttacagatgcctgaatggactgtgcctgagcaagggcaatccggaatgtgacggaaaggaagactgctcagacggctctgatgagaaggattgcgactgtggccttcggagttttacaaggcaagctcgcgttgtggggggcactgacgcagatgaaggggaatggccgtggcaggtcagcttgcacgcccttggccagggccacatttgcggagcttcactgatcagccctaactggctggtgtcagccgcccattgttacatagatgacagaggcttccgctattcagacccgacacagtggaccgctttcctcggactgcacgatcagtcccagcgaagcgcccccggcgtgcaggaacggcggttgaagcgtattatatctcacccattttttaacgacttcacatttgactacgatatcgcccttctggaactggaaaaacctgctgagtattcttccatggtccgcccgatctgcctccctgatgcatcacacgtgttcccagccggaaaggcgatctgggtgacaggctggggacatacacaatacggcggcacaggagctctgatcttgcaaaaaggagagatccgagtgataaatcagactacctgtgagaatcttctcccacaacagattacaccccgcatgatgtgcgttgggttcctttccgggggagtggacagctgccaaggtgacagcgggggaccgctttccagcgtcgaggccgacggcaggatctttcaggccggagtggtgagctggggtgacggttgcgcgcagcgcaataagcctggagtgtataccaggctgcccctgttcagggactggataaaagagaacacaggcgtgtag

SEQ ID NO: 136625 - DNA, 3414 bp, synthetic construct
  misc_feature 1..3414: note = Description of Artificial Sequence: Synthetic coding sequence
  source 1..3414: mol_type = other DNA
atgaccatgaccgctaataaaaattcctccatcacgcatggcgccggaggcactaaggcgccaagaggcaccctttctaggtcccaatcagtctctcccccgcctgtactatcacctcctagaagccccatatatccattgagcgattctgaaacttcggcttgtcggtacccctctcactcctcctctcgagttttactgaaggatcgacaccccccggccccatctccccaaaacccccaagatccgtctccagacacctctccacccacttgcccttttaagaccgcctcgtttggatacctcgacaggagtccatcagcgtgcaagcgagacgctcagaaagagagcgttcagggggcggcccaggatgttgccggtgtcgccgcctgcttgcctctggcccaaagtacaccatttccaggtccagctgccggaccacgcggggtgttattgacacggacagggactcgcgctcattcccttgggatacgtgaaaaaatatctgcctgggaggggcgtagagaggcttctcccaggatgagtatgtgtggggaaaagcgggagggatcaggaagcgagtgggccgcctcagagggctgtccatccttggggtgccccagcgttgtgccatccccatgtagctccgagaagaccttcgacttcaagggcctgaggaggatgtccagaacattttccgagtgttcttaccccgaaaccgaggaggagggcgaggctctgccagtgcgcgactcattttaccggcttgagaagcgtctggggaggagcgagccatcagcctttcttcgaggccacggaagcagaaaggagtcttctgctgttctgagtcgcatccaaaagattgagcaggttctgaaggagcagccaggccgggggctccctcaattgccaagttcatgttattccgtagatcgcggcaagagaaagaccggcacactgggtagcctcgaggaacccgccggtggagcttcagtgtccgctggaagcagggcagtaggagtggccggtgtggcaggcgaagctggaccccctcctgagcgggagggatcaggttccacaaaaccaggcaccccagggaattcaccttcctcccaaaggctgccatctaagtcaagcctggatccggctgtcaaccctgtgccgaaacccaagcgcacttttgaatacgaggctgacaaaaatcctaagagcaagccctcaaacggcttacctccttcacctactccagccgctcctcctcctttaccttctactccagctcctccagtcacaagacggcccaagaaagacatgagggggcataggaagtctcagagcaggaagagtttcgagttcgaggatgcttcctccttacagagcctctatcctagctctcccacagaaaatgggacggaaaatcaacccaaattcgggtcaaaatcgaccttggaggagaatgcttatgaagatattgtgggagatctgcctaaggagaatccttatgaagatgttgatttgaagtctcgcagagctgggagaaagagtcagcagctgtctgagaactcactcgactcccttcatcgcatgtggagtccccaggacagaaagtataattcccctcctacacagctgagcctaaaaccaaattcacagtcactgcgctctggcaactggagtgaacgaaagagtcaccgcctgccgcggttacccaaaaggcatagccatgacgacatgctgctgctagctcagctttctctgccatcgtctcctagcagcctgaatgaggattctctgtccaccacatctgagcttctgagttctcgtcgtgccagaaggatcccaaagctagtgcagcgcattaactccatctacaatgctaagcgggggaaaaagcggctcaagaaactcagcatgtcatccattgaaacggcgagcctcagggacgagaactctgagtctgaatctgacagtgatgatcggttcaaagctcacacccagcggctagtccatatccagtctatgttgaaaagggcccccagttacaggactcttgaactcgaacttctggagtggcaagaacgcgagttgtttgaatatttcgtggttgtgtctctgaagaagaaaccatctcggaacacgtatctgccagaggtcagctatcagttccctaagctggaccgaccaactaagcaaatgagggaggctgaagagcggctaaaggccatcccgcagttctgctttccagatgccaaggactggctgcccgtctctgaatacagctcagagacattctccttcatgttgacgggcgaggatggatctcgcaggtttggatactgcagacggcttttgccctctgggaaaggcccgcgcttgccagaagtctattgcgtcatcagtaggctgggctgtttcggcctttttagtaaagtgctggatgaagtagagcgcaggcggggaatctccgccgcactggtttaccccttcatgagatccctgatggagagccccttccctgcccccggaaaaacaattaaggtgaaaactttcttgccaggagcaggaaatgaggtgctagagttaaggcgtcctatggatagtaggcttgagcacgttgatttcgagtgtttgttcacttgcttgtcagtgcgccaattgattcggatcttcgcctcattacttcttgagcggagggtgatctttgtcgccgataagctcagcaccctgagctcatgttcccacgctgtcgtggcattactgtatccattttcctggcaacataccttcattccggtcctgcccgccagcatgatcgatattgtgtgctgtccaaccccgttcctcgtcggcctcctgtcctcgtccctgcctaaactcaaagaactaccagtggaggaagccctgatggtcaaccttggctcagatcgtttcatcaggcagatggacgacgaggacactctgctccctagaaagctgcaagccgccttggagcaggcgttagagagaaagaacgagctgattagccaagactctgatagtgatagcgatgatgagtgtaatacactgaatggactggtgtcagaggtgttcatccgttttttcgtggagactgtgggtcactatagcctgtttttgacacaatcagagaagggcgaaagggcattccaaagagaggcttttcgcaaatctgtcgcatccaagagcatccgccgcttcctcgaggtgttcatggaatcacagatgtttgccggcttcatccaagaccgggagctgcggaaatgccgtgccaagggactgtttgaacagcgcgtggaacagtacctggaagagctgcccgataccgaacagagtggcatgaataaattcctcaggggtttgggtaataaaatgaaattcctccacaagaagaattag

SEQ ID NO: 136626 - DNA, 3414 bp, synthetic construct
  misc_feature 1..3414: note = Description of Artificial Sequence: Synthetic coding sequence
  source 1..3414: mol_type = other DNA
atgaccatgacagcgaacaaaaattcctccataacacatggcgctggaggaactaaggcccctcggggtactttgagccggagccagagcgtgtcccctccaccagtgctgtctccccccaggtccccgatatacccgctgagcgatagtgagacaagtgcgtgtagataccccagtcattcctcttcccgcgttcttttgaaagacaggcaccccccagccccgtccccccagaaccctcaggatcccagccccgatacctccccacccacctgtccttttaagacagcctccttcggctatctggataggtcgccgtcagcctgcaagcgcgatgcgcaaaaagagagcgttcagggtgccgcccaggacgttgccggggtggcggcttgtcttcccctagcccagagcacgccctttcccggacctgcagccggcccacgcggtgtgctgctcacgcgaacgggcacccgagctcacagtctgggaattcgcgaaaaaatatcagcctgggaggggcgccgcgaagcatccccacgcatgtcaatgtgtggtgaaaagcgcgaagggtctggaagtgagtgggctgctagcgagggatgccccagcttgggctgcccctctgtggtccctagcccttgttcttccgagaaaacctttgacttcaaggggctgaggagaatgagccgcacgttcagcgaatgttcctaccctgaaaccgaagaggaaggagaggccttgcctgtgagggacagcttctataggctggaaaagagactcggaaggagtgaaccaagtgcatttctgcggggacatggcagcagaaaggagtcctccgctgtcctatctcgcatccagaagatcgagcaggtgctcaaggaacagcccggaagaggactcccacagctcccctcatcctgttactcagtggacaggggcaagcgaaaaaccgggactttgggtagtctcgaagagccagcgggaggagcaagtgtctccgccggatctcgcgccgtgggcgtggccggtgtggctggggaggctgggccacccccagaacgagaggggagcggcagcacaaaaccggggaccccaggcaatagccctagttcccagaggctgccaagcaagagctcacttgatccggctgtgaaccccgttcccaagcccaaacgtacctttgaatatgaagccgataaaaacccaaagtcaaaaccttctaacgggctcccccctagccctacccccgctgcaccacccccgctgccaagtaccccggccccccccgttacccgccgacctaagaaagatatgaggggacatcgcaagtctcagagccggaaaagttttgaattcgaggatgcctcgagcctccaaagtctgtatcccagctcacctactgaaaacggaaccgaaaaccaaccaaagttcggatccaagtcaaccctggaggaaaatgcttacgaagacattgtgggcgatttgccaaaggagaacccatacgaggacgtggacttaaagtccagaagggccggcagaaaaagtcagcaactctcagaaaactccttggacagcctccatcgaatgtggtctcctcaggacagaaaatataattctccccctacccaactctctttgaaacccaactcacagagtctacggagcgggaactggagtgagcgcaaatcccatcgactgccccggctcccaaagagacactcgcacgacgacatgctgctgctggcacagctgtctctcccgtcctccccttcatccctgaacgaagatagtttgtcaaccacctccgaactgttgtcctctagacgggctaggaggatacccaaactggtccaacggattaattcaatatacaacgccaaaagaggcaagaagcggttgaaaaaactgtctatgtccagtatcgagaccgcaagcctgcgcgatgagaactccgagtcagagtctgactctgatgatcgctttaaggctcacacccaacggcttgtgcacattcagtctatgctaaaacgggcaccgtcctaccggacacttgagctcgagctgttggaatggcaagaacgagagctatttgagtatttcgtggtggtgtccttaaaaaaaaagccatctcggaacacatacctgcccgaggttagctaccagttccccaaactcgaccgtcccaccaaacagatgagagaggctgaggagcgcctaaaggccatcccgcagttctgtttcccagacgcaaaggattggctgccagtgtctgagtactcttccgagaccttttcttttatgctcacaggagaagacggcagtcggcgtttcggttattgcagaagactcctcccaagcggcaagggcccaagactaccagaagtttattgtgtaatctctcgcttgggatgctttggcctgtttagcaaagttctggacgaagtggagcgcagaagaggcatcagcgctgccctggtttaccccttcatgaggagcttaatggagagtccttttcctgctcctggcaaaactataaaagtaaaaacttttctgccaggtgctggaaacgaggtgctcgaattgcggaggcctatggattccagactagagcacgttgattttgagtgtctgttcacctgcctgagtgtgagacagttgattcggatttttgccagccttttgctcgaaagacgcgtaatctttgttgctgacaagctctcaactttaagcagctgttcacacgctgtggtggcactgctgtaccctttttcttggcagcacacatttatacccgtgttgcctgcatcaatgattgatattgtgtgctgtcccacaccgttcctggtgggcctgcttagttccagcttgccaaaacttaaggagttaccagtcgaagaagctctgatggttaatttgggctctgaccgctttattaggcagatggatgatgaagacaccctcctgccccgcaagctgcaggcagctctggaacaggcattggaaagaaaaaacgagctaatctcacaggactcagattccgatagcgacgacgagtgcaatacgctcaatgggctggtgtctgaggtgttcatacggttcttcgtcgagacagttggccactacagcctgtttcttacccagtctgaaaagggcgagcgagcctttcagagggaggcttttcgcaagtctgtcgccagcaaatctatccgtagatttctcgaggtttttatggagtcccagatgtttgcgggcttcatccaggatcgggaattgcgaaagtgtagggccaagggactctttgaacagcgggtggaacagtacctggaagaattacccgacactgaacagtcaggtatgaataagttcttgagaggccttggtaacaagatgaagtttctccataagaagaattag

SEQ ID NO: 136627 - DNA, 1263 bp, synthetic construct
  misc_feature 1..1263: note = Description of Artificial Sequence: Synthetic coding sequence
  source 1..1263: mol_type = other DNA
atgacttctcgcaagaacggggggggggctcacagctggcaggaaacgccctgggagcagcgtcgcgctctggggctccagcgggcagagatgaccatgactgctaataagaacagttcgatcactcacggggccggtggaactaaagccccccggggtactttgtcccgaaaatcattcgagtttgaagacgcgtcttccctgcagtcactgtatccttcatccccgactgagaatggaactgagaaccagccaaaattcgggagcaagtccactctcgaggagaatgcctatgaagacatagtgggagacttaccgaaggagaacccatatgaagatgtcgatctgaaatcaagacgtgctggaaggaagtcacagcagctcagcgaaaactctctggacagtcttcatagaatgtggtctcctcaggatcggaaatacaatagcccaccaactcagttaagtttgaagcctaattctcagagcctgcgatccgggaattggtctgaaagaaagtcccatcggttgccaaggctgcctaagaggcatagtcatgacgacatgctcctcttagcccaactgtcactcccgtcatctccaagcagtctcaacgaggatagcctgagtaccactagtgaactcctatcttcacgcagagcgaggcgtatccccaaattggtccagagaatcaacagcatttacaacgcaaaacggggcaaaaagcgacttaagaagttatctatgtctagcatcgagaccgccagccttcgggacgagaactccgagtccgaaagtgattccgacgataggtttaaggcccacactcagcgactagttcacatccaatctatgcttaagcgagcaccttcttacagaacattagagcttgaattgctggaatggcaggagcgggagctcctgtccaccctttggtggtgcccatcaaggcgtagtcaccgcgaaactcccacctcgccaaaatctcccacttcctttccacgcaacgtgctgtcacccgccctgcatgtggcagccggcagcttctcatttctcaggctctgctcaagcagaacgagcttccgccggtcagtacaaactccggcttggtccccttccccagctcagctcgcattactagaccggccgacgaagcagatgagagaggccgaagagaggctgaaagcaattccccagttttgcttccccgatgcgaaggattggctgcccgttagcgaatacatgcggcctttcttaagctgctag

SEQ ID NO: 136628 - DNA, 174 bp, synthetic construct
  misc_feature 1..174: note = Description of Artificial Sequence: Synthetic coding sequence
  source 1..174: mol_type = other DNA
atgacaatgacggcaaacaagaactcttctattacccacggtgctggcggcacgaaggccccgcgtggcaccctgtcccgctcccagagtgtgagtccccctcccgtgctcagcccaccccgatctccaatttatcccctctcagattccgaaacctcagcctgccggtactag

SEQ ID NO: 136629 - DNA, 123 bp, synthetic construct
  misc_feature 1..123: note = Description of Artificial Sequence: Synthetic coding sequence
  source 1..123: mol_type = other DNA
atgacaatgaccgccaataagaattccagcatcactcacggtgctggtgggactaaggcccccagaggtaccctgtcacgcagtcagtccgtgtcaccgccacccgtcttgtcacctccatag

SEQ ID NO: 136630 - DNA, 144 bp, synthetic construct
  misc_feature 1..144: note = Description of Artificial Sequence: Synthetic coding sequence
  source 1..144: mol_type = other DNA
atgtggagcccacaggacagaaagtacaactcccctcccactcagctgtcactaaagcccaattcccagagcctccgctccggcaactggagtgagcgcaagtcccaccggttacctcgactgcccaaaaggcatagccattag

SEQ ID NO: 136631 - DNA, 219 bp, synthetic construct
  misc_feature 1..219: note = Description of Artificial Sequence: Synthetic coding sequence
  source 1..219: mol_type = other DNA
atgacaatgacagctaacaaaaatagctcgatcactcatggcgccggggggaccaaggccccccggggcactctgagccgcaaatcatttgagtttgaggatgcttccagccttcagtccctgtaccccagcagccctacggaaaacggtacagaaaaccagcccaaatttggctctaaatctactctggaggaaaacgcatacgaagacatagtgtag

SEQ ID NO: 136632 - DNA, 375 bp, synthetic construct
  misc_feature 1..375: note = Description of Artificial Sequence: Synthetic coding sequence
  source 1..375: mol_type = other DNA
atgactatgactgctaataaaaattcctcaataactcacggcgccgggggaaccaaggcccccaggggaactctctctcgtagccaaagtgtctcacctccccctgtgctttcacctcctcgctcgcctatctatcctctctctgacagtgagactagtgcgtgccgatatccctcacactcttcaagcagagttctgctgaaggatcggcacccaccagcaccatcccctcagaatccacaggatcctagtccagacacttcaccccctacttgtccatttaagaccgcgagttttgggtatcttgatcggtctccttcagcttgtaaacgggacgctcagaaggaaagcgtgcaaggcgccgcacaggactag

SEQ ID NO: 136633 - DNA, 429 bp, synthetic construct
  misc_feature 1..429: note = Description of Artificial Sequence: Synthetic coding sequence
  source 1..429: mol_type = other DNA
atgaccatgaccgctaataagaactctagcataacccatggtgcaggcggtaccaaggcaccgaggggcacgctctctcgttcgcaatccgtgtctcctccgcccgttttgtctcctcccaggtcacccatctatcccctgagtgattccgaaaccagcgcctgcaggtacccctcacatagctcctccagagtcctgctgaaagataggcatccacccgcgcccagtcctcagaacccccaagatccttctcccgatacatccccaccgacatgtcccttcaaaacggctagtttcggatacctcgacagaagtccaagtgcgtgcaagcgtgatgcacagaaggagtctgtgcagggggccgcccaggacgtggcaggagtggcagcttgcctcccactggctcaaagcacccccttccctggctag

SEQ ID NO: 136634 - DNA, 2154 bp, synthetic construct
  misc_feature 1..2154: note = Description of Artificial Sequence: Synthetic coding sequence
  source 1..2154: mol_type = other DNA
atgacgatgactgcaaacaaaaattctagcataacccacggcgcagggggaacgaaagctccccggggaaccctgagtaggaagagtttcgaattcgaggacgcctcatccctgcagagcctctaccctagtagtcctaccgaaaacggcactgagaatcagcccaagtttggatctaaatccacactggaggagaacgcttacgaggacattgtgggtgatttacctaaggagaacccatacgaagacgtcgatctcaagtctcgtcgcgcaggaaggaaaagtcagcaactctcagagaactctttggacagtctgcatcggatgtggtcaccgcaagaccgtaaatacaactcgccacccactcagctgagccttaagcccaactcacagtctctcaggtcagggaactggtccgaacgcaaatctcaccgactgcctagattgcctaaaaggcactcacatgacgatatgctgctgctggcccagctgagcttaccaagcagccccagctctttgaatgaagatagcctatcaacaacttctgaactcctttccagtagacgggcacgccggatccctaagctcgttcagcgcattaatagcatctataatgcaaagagggggaaaaaaaggttaaaaaagctttctatgagtagcatcgagacagcctccctgcgagacgagaacagcgagagtgagtctgatagcgatgaccgatttaaagctcacacgcagaggttggtacacattcagtcaatgttaaagcgcgctccttcttatcgcacactggaactagagctgttggaatggcaagagagagaactgtttgagtacttcgtcgtggtctccctgaagaagaaaccaagcaggaacacctatttacctgaagtgagttaccaatttccaaagctagacaggcccacgaagcagatgcgtgaagcggaggagagactcaaggctattccccagttttgctttcccgacgcgaaggactggctgcctgtcagcgaatacagcagcgaaacgttcagtttcatgctcaccggggaagatggctcacgtcgcttcggctactgccgacgcctgctgccatccggcaaaggtccgaggctcccggaggtttattgtgttatttcccgcctgggctgtttcgggctgttttccaaggttttggatgaagtggaaagaagaaggggcatctcagcagccttagtatacccattcatgaggagcctgatggaatctccatttcccgcacctggaaagactatcaaagtaaaaaccttcttgccaggagcaggcaacgaggtccttgaactgaggagacccatggatagccgtctcgaacatgtagactttgagtgtctgtttacgtgcctctctgtgcgccagttgattcgcatatttgcatcccttttactggaacgcagggtgattttcgtggctgataagctgtcaaccttatcctcctgcagccacgcagtagtagcactgctttatccattttcctggcagcacacatttattccagtgctgcccgccagcatgatagacatcgtgtgctgcccgaccccatttctggtgggtcttttatcctcttcactccctaagctcaaagaactgcccgtggaggaggcccttatggttaacttaggatcggaccggttcattcgccagatggacgacgaggataccttgcttcccaggaaactgcaagctgccctcgaacaggccttagagaggaaaaatgaactgatctcccaggacagtgattcagacagcgacgatgagtgcaacactctgaatgggctggtatctgaggtgttcattaggttttttgtggaaaccgttggccattattccctgttcctgactcagtcagagaagggagagcgagcattccagagggaggcttttcgcaaatcagtggcctccaagagcatccggaggtttctcgaggtgttcatggaatcccaaatgtttgcaggctttatccaggatcgagaacttcgcaagtgtcgcgctaaaggcctgtttgagcaacgggtggagcagtatttggaggagctgcctgatactgaacagtctggtatgaacaaatttctgagggggctcggcaataagatgaaattcttacacaagaagaattag

SEQ ID NO: 136635 - DNA, 159 bp, synthetic construct
  misc_feature 1..159: note = Description of Artificial Sequence: Synthetic coding sequence
  source 1..159: mol_type = other DNA
atgacgatgaccgcaaataagaacagcagcattactcatggagctggaggtaccaaggccccacgcgggacactctcacggtctcagtccgtgtcgcctccaccggtcctgagccccccaaggagccccatttatcctttatcggacagcgagacctag

SEQ ID NO: 136636 - DNA, 336 bp, synthetic construct
  misc_feature 1..336: note = Description of Artificial Sequence: Synthetic coding sequence
  source 1..336: mol_type = other DNA
atgaccatgaccgccaacaagaattcctcgataactcatggcgcaggcggtaccaaggcccccaggggaactttatccaggagtcagagtgtttctccaccgcctgtgctgagccctccacgctcgcccatctaccccctctctgatagcgagacaagcgcttgtcgatacccttctcactcgagcagccgggtcttgctcaaggacaggcatccacccgccccaagtccccagaatcctcaggacccttccccagatacttcacccccaacttgccctttcaaaacagccagcttcgggtacctggacaggagcccatctgcctgcaagaggtag

SEQ ID NO: 136637 - DNA, 162 bp, synthetic construct
  misc_feature 1..162: note = Description of Artificial Sequence: Synthetic coding sequence
  source 1..162: mol_type = other DNA
atgaccatgaccgccaataagaattcatctatcactcacggggccggcggaactaaggcacctcgcggaactctttcccgatctcaaagtgtctccccacccccggtgctgagccccccaaggtccccgatctaccctctcagtgattccgagacctcgtag

SEQ ID NO: 136638 - DNA, 252 bp, synthetic construct
  misc_feature 1..252: note = Description of Artificial Sequence: Synthetic coding sequence
  source 1..252: mol_type = other DNA
atgaccatgactgctaacaagaattccagcataactcatggtgccgggggcacaaaggcccctaggggtacattaagtcggtcccagagcgttagtccgcctccggtgttgagtcccccgagatcacctatatatcctctgtccgatagtgagacatccgcctgccggtatcccagtcattcaagctcccgcgtgttacttaaagataggcatcctccagccccttcaccacagaatccacaagacccgtag

SEQ ID NO: 136639 - DNA, 288 bp, synthetic construct
  misc_feature 1..288: note = Description of Artificial Sequence: Synthetic coding sequence
  source 1..288: mol_type = other DNA
atgacaatgaccgccaacaaaaacagttccattacccacggagctggaggtacaaaggcaccgcgggggacgttgagcaggagccagtccgtttcgcctcctcctgtgctctcaccacctagaagccctatataccctctcagtgactctgagaccagtgcctgccgctacccatcacactccagtagtcgagtcctcttaaaagatcgccatccgccagcaccatctccccagaacccacaggaccctagtccagacacctcgccaccgacctgtccctttaagtag

SEQ ID NO: 136640 - DNA, 465 bp, synthetic construct
  misc_feature 1..465: note = Description of Artificial Sequence: Synthetic coding sequence
  source 1..465: mol_type = other DNA
atgactatgaccgcaaataaaaattcatccataacccacggagctggcgggacaaaggctccccgggggaccctgtctaggtcacaatcagtttctcccccgccagtgctgagcccaccaaggtctccgatctatcctctgagtgacagcgagacgagcgcatgccgttatccaagccactctagcagcagagtcctcctcaaggaccgtcatccccccgccccaagcccccaaaatccgcaggaccccagtcctgataccagtccccctacgtgccccttcaaaacggcttcctttggctatttggatcgatcaccttccgcctgcaagcgggatgcccagaaagaatcagtgcaaggcgccgcccaggacgttgcaggcgtggctgcttgtctcccattggcccagtccaccccatttcctggtcctgctgctggtcctagaggagtgttgttgactagatag

SEQ ID NO: 136641 - DNA, 540 bp, synthetic construct
  misc_feature 1..540: note = Description of Artificial Sequence: Synthetic coding sequence
  source 1..540: mol_type = other DNA
atgtggtccccccaagataggaagtataattcgccgccaacgcagttgtctcttaagcccaattctcagtctctgagatccggaaattggtccgagcgtaagtctcaccggctgccccgactgccaaaacgacactcccatgatgacatgctcctgctggcacagcttagcctaccgtcaagccccagttccctcaacgaggactctctatcaactacctctgagctactgtccagtagaagggctcggcggatcccaaagctcgtacagaggattaattcgatatacaatgcaaagcgtggtaaaaaacgcctaaagaagctgagtatgtcctcaatcgagacagcgtctctacgcgacgaaaactccgagagcgaaagtgactctgacgacagattcaaagcccacacccagaggctggtgcatattcagtcaatgctgaagcgggccccttcgtaccgcactctggaactcgagttgttagaatggcaggaaagggagctgtttgaatattttgttgtcgtgtcactcaagaagtag

SEQ ID NO: 136642 - DNA, 2154 bp, synthetic construct
  misc_feature 1..2154: note = Description of Artificial Sequence: Synthetic coding sequence
  source 1..2154: mol_type = other DNA
atgaccatgaccgcaaataagaactcctcaatcactcacggggctggagggactaaagcccccagaggaactctttcgcggaagtcgtttgagttcgaggacgcgagcagtcttcagtccctgtatccaagctcaccgacggagaacggaaccgagaaccaacccaagtttggtagtaagagcaccctggaggagaacgcctatgaggacatcgtgggcgatctcccaaaggaaaacccctatgaggatgtagatctgaaatctcgaagagctggacgcaaaagtcagcagttatcggagaacagtttggattcgttgcacagaatgtggtccccccaggatcggaagtataacagcccaccaacccagctgagccttaagccgaactctcagtccttgcggtcgggcaattggagcgagcgcaagagccataggctgccccggcttcctaaacgacatagtcatgacgacatgttgctcttagctcaattgtctctgccgagcagtcccagcagtctgaatgaggatagccttagcaccaccagtgaacttctaagctcaaggcgcgcaagacgaatcccaaaactggtgcagaggattaacagtatttataacgcaaaacggggcaagaaacgcctcaagaagctgagcatgagctctatcgagaccgcttctttgcgtgatgaaaactctgaaagcgagtctgattccgatgacagattcaaggcccatacccagcgactggtgcatatccagtctatgctcaagagagctcccagttatcgcaccctagaactggaattacttgagtggcaggaaagggagctcttcgagtattttgtcgtggtgtctctgaagaaaaagccctcccgaaatacatacctgccagaagtgtcttatcagttccccaagctggaccggcctacaaagcagatgagagaagccgaagagcgtcttaaagcaattcctcagttctgctttcctgacgccaaggattggctgccagtttccgagtacagttcggaaaccttctcatttatgctcacaggcgaagacggttccagaagatttggatactgccgccgcctactgccgtccggcaaggggccaagacttcctgaggtttactgtgtgatcagccgcttgggctgtttcggccttttcagtaaggtcctggatgaggtggaacgacgaagggggatctccgcagccttggtgtatcccttcatgagaagcctcatggagagtccattccctgctccaggaaagaccatcaaggtaaaaactttcctgccaggtgcgggcaacgaagtgttagaacttcggcgacccatggactcccgactggaacacgtggactttgaatgcttgtttacatgtctctccgtacggcaacttatccgtattttcgctagcctgctcctagaacgaagggtcattttcgtcgcagataagctgagcacgctgagctcttgctcccatgccgtagtggccctactctatccgttcagttggcaacatacattcatccctgtgctccctgcctctatgatcgacatagtttgctgccctacaccattcctggtcggtctgctgtcatcctctctccccaagctaaaagagctgccagtggaggaggccctcatggtgaatttggggtcagataggtttatccgtcagatggacgatgaagatactctgttaccacggaaactgcaggccgccttggagcaggccctcgaacggaagaatgaactaatctcccaggatagcgattcggattctgatgatgagtgcaatacattaaatggccttgttagtgaagtgtttattcggtttttcgtggaaactgtcggccactactctctgttcctgactcaatcagagaagggagaaagagctttccagcgagaggcttttcgcaagagcgttgcatctaaatctataagacgcttcttagaagttttcatggagagtcagatgttcgccgggtttattcaagaccgcgaattgaggaagtgtagggccaagggtctgtttgaacaacgtgtggagcagtatttagaggagcttccagataccgaacagtccggcatgaacaagtttctgcgaggactaggaaataagatgaagttcctacataagaaaaattag

SEQ ID NO: 136643 - DNA, 411 bp, synthetic construct
  misc_feature 1..411: note = Description of Artificial Sequence: Synthetic coding sequence
  source 1..411: mol_type = other DNA
atgacaatgaccgctaacaagaacagcagcataacgcacggggccggaggcactaaggcccctcgcggaaccctttcgcggaaatcattcgaatttgaggacgcttccagtcttcagtcactgtacccatcctctcccacagaaaacggcactgaaaaccagcctaaattcggctctaagtctacactggaggagaacgcctatgaggacatcgtgggcgatcttcctaaggagaacccgtatgaagatgtcgacctgaaatctcggagggccgggcgcaagagtcagcaattgtccgaaaattccttggatagcctgcacaggatgtggtcacctcaggatcgtaaatacaactctccaccaacccagttatccctgaaacccaactctcaaagtcttaggagtggctag

SEQ ID NO: 136644 - DNA, 225 bp, synthetic construct
  misc_feature 1..225: note = Description of Artificial Sequence: Synthetic coding sequence
  source 1..225: mol_type = other DNA
atgactatgactgcaaacaaaaatagctccatcacccatggcgctggaggtacaaaggccccgagaggcactctgagtcgcagccagagcgtgtcaccgcctcccgtcttatcacctccaaggtcacccatttaccctttgtctgacagtgagaccagcgcttgccgatacccctctcactcatcctcaagagtgcttctgaaggatcgacatcctcctgcatag

SEQ ID NO: 136645 - DNA, 420 bp, synthetic construct
  misc_feature 1..420: note = Description of Artificial Sequence: Synthetic coding sequence
  source 1..420: mol_type = other DNA
atgacaatgaccgcaaataagaattcctctattacacacggggctggggggacaaaggcccctcgagggaccctttctagaagccagagcgtttccccaccccccgtgctttccccgccacgatctccaatttatccactgtccgactctgaaaccagtgcctgcagatacccgtcacacagctctagccgcgtgctgctgaaagaccgccaccctcctgcaccctccccccaaaatccacaggaccccagtcctgatacatccccgcctacctgcccctttaaaaccgcatcatttggatacctggacagaagcccaagcgcctgcaagcgagatgcgcagaaagaatccgtgcagggcgccgcccaggacgttgcgggggtggccgcctgtttaccacttgctcagagtactccctag

SEQ ID NO: 136646 - DNA, 1830 bp, synthetic construct
  misc_feature 1..1830: note = Description of Artificial Sequence: Synthetic coding sequence
  source 1..1830: mol_type = other DNA
atgtggagcccccaggacaggaaatataactcccctcccactcagctgtccctgaaaccgaacagtcagtccctacggagcggaaattggtccgaacgaaaatctcaccggctcccccgcctgcccaagagacacagccacgatgacatgttactgctggcgcagctgtctctcccttcctccccatcttccctcaacgaagattcgttgtcgacaacctccgagcttttatctagcaggcgggcgcggaggatcccaaagctggtccagcggattaattcaatctataatgccaagcgcggtaaaaaaagactaaagaagctcagtatgtcttcgattgaaacagcaagcctgagggatgagaacagcgagagcgagtctgactccgatgaccgttttaaagcacatacacaacgactggtgcatatccaaagcatgctcaagcgcgccccgagctatcgaaccctggaactggagcttctggaatggcaggagcgagagctttttgagtacttcgtggtggtgtctctgaaaaagaagccgagtaggaatacctacctacctgaggtcagctaccagtttcctaagttggacagaccaacgaaacagatgagggaggccgaggaaaggctcaaggctatccctcagttctgcttccctgatgctaaggactggttacccgtgtctgaatactctagcgagactttttccttcatgttgaccggcgaggacgggtctcgccggttcgggtattgtagacggcttttgccatccggaaagggccctaggttaccagaggtgtactgtgttatctccagactggggtgttttgggctctttagtaaggtgttagatgaggtggagcgcagacgcggcatcagtgccgcactggtctatccatttatgcggtctctaatggagtccccttttccagccccaggaaaaactattaaggtcaaaactttcctccctggggctggaaatgaggtgcttgagttgcgtcgaccaatggatagtaggctagaacacgtggatttcgaatgtctatttacttgtctcagcgtgcggcagcttataagaatctttgcatctctgctgcttgaaaggagggtaatctttgtagccgataagctgagcaccctgtccagttgttcacatgccgtcgtcgctcttctatatccattctcgtggcagcacacattcattccggtactaccagcttccatgatagacattgtatgctgccctacacccttcctggtcggcctgcttagctcaagcctgccaaaactaaaggagctgcccgttgaagaggcactgatggttaacttagggtcagacaggtttatccgccaaatggatgatgaggatactctcttaccgaggaaactgcaggccgctctggaacaagctctcgagagaaagaacgaattaatctcacaggattccgactctgactcggacgacgagtgcaatactctgaatgggctggtgtctgaggtcttcatccggtttttcgtagaaaccgtgggccactatagtttgtttttaacacagagcgagaagggggaaagggcttttcagagagaagcttttcgaaagtcggtggcctcaaaatctataagacgattcctggaggtgttcatggaatcccagatgttcgccggctttattcaggaccgcgaactgcggaaatgtagggcgaagggtctcttcgagcaacgagtggaacagtacctggaagaactgccagacaccgaacaaagcggaatgaataagtttttgcgaggactcggaaacaagatgaaatttctgcataagaagaactag

SEQ ID NO: 136647 - DNA, 234 bp, synthetic construct
  misc_feature 1..234: note = Description of Artificial Sequence: Synthetic coding sequence
  source 1..234: mol_type = other DNA
atgactatgaccgcaaataagaactcttctattacccacggagccggcggtactaaagccccaaggggcacactgtcacggaaatcatttgagttcgaagatgcctctagtctgcagtcgctttatccatcatcacctacggaaaacgggactgaaaaccaacctaagtttggaagtaagtcaacactcgaggagaacgcttacgaagatattgtgggtgatctcccaaagtag

SEQ ID NO: 136648 - DNA, 81 bp, synthetic construct
  misc_feature 1..81: note = Description of Artificial Sequence: Synthetic coding sequence
  source 1..81: mol_type = other DNA
atgacaatgaccgcgaataagaatagttccattacccacggcgccggcggcaccaaggcacctagaggaacccttagttag

SEQ ID NO: 136649 - DNA, 1035 bp, synthetic construct
  misc_feature 1..1035: note = Description of Artificial Sequence: Synthetic coding sequence
  source 1..1035: mol_type = other DNA
atgtggtccccccaggaccgtaagtacaatagcccacccacccagttgagcctcaagcccaatagtcagtccctgaggtctggtaactggtctgagagaaagtctcacagactgcccagactccctaaacggcattcacacgatgatatgctgctgctcgctcaactgagtttgccctctagtcccagttctctcaacgaggacagcctcagtaccacttctgagttgctctcttcccgcagggccagacgaatccccaagctcgtgcagcggatcaacagcatttacaacgctaaacggggaaaaaaaaggctcaagaagctgtcaatgtcttcgattgaaacagcctccctcagagacgagaacagtgagtctgaaagcgactccgatgaccggtttaaggcccatacgcaacgtctagttcacatccaatctatgcttaaacgcgcaccctcctacagaactctagagctggaactattagagtggcaagaaagggaacttttcgagtactttgttgtggtgagtctgaaaaagaagccatcccggaatacatatcttcccgaggtaagttatcaatttccaaagctggaccggccaacaaaacagatgagagaggccgaagaacgcctgaaagccatcccgcaattttgtttcccagatgccaaggattggctccctgtctccgaatactcatccgaaaccttttctttcatgctaactggggaggatggatccaggcgtttcggttactgtcgtcgcctgctgccctccgggaaggggcccagacttcccgaagtctactgcgtaattagccgtttgggctgttttggactgtttagcaaagtgctcgacgaggtcgaacgtagacgaggcatctctgcggcacttgtttatccctttatgcgatcccttatggagtcacctttcccagctcccgggaagaccattaaggtcaaaacgtttcttccgggcgcagggaatgaggtactcgagctgagaagaccaatggacagtcggctggaacacgtttag

SEQ ID NO: 136650 - DNA, 231 bp, synthetic construct
  misc_feature 1..231: note = Description of Artificial Sequence: Synthetic coding sequence
  source 1..231: mol_type = other DNA
atgacaatgactgctaataagaattcaagcatcacccatggcgctgggggtacgaaggcccctagagggacactgagccgcaaatcttttgaatttgaggacgccagttcactgcagtccctctacccctcatcccctactgagaacggtactgagaaccagccaaaattcggtagtaagtccacactcgaggaaaatgcctacgaagacattgttggcgacctgccctag

SEQ ID NO: 136651 - DNA, 225 bp, synthetic construct
  misc_feature 1..225: note = Description of Artificial Sequence: Synthetic coding sequence
  source 1..225: mol_type = other DNA
atgacaatgaccgccaacaagaacagtagcattactcatggggccggtggcacgaaggcgccaaggggcaccttatcaagatcacagtccgtctcaccacctccagtcctctcaccgcccaggtcaccaatatatccgttgtccgatagcgagacatctgcttgccgatacccaagccactctagttctagggtgctcctgaaggatcgacatccccccgcctag

SEQ ID NO: 136652 - DNA, 435 bp, synthetic construct
  misc_feature 1..435: note = Description of Artificial Sequence: Synthetic coding sequence
  source 1..435: mol_type = other DNA
atgaccatgacagcaaacaaaaactcctccatcacccatggagccggcggaacaaaagccccaaggggaacactgtcaagaagccagagtgtgtcacccccgccagttttaagcccaccgagaagccctatttatcctctgagtgattctgaaacgtccgcttgtcgttatccatcccactcaagctcccgtgtgctgctcaaggatcgacatccgccggcgcccagcccacagaaccctcaggacccttctcctgataccagcccccccacatgtccattcaagacggcttccttcggctatcttgatagaagtccctctgcttgtaaacgagacgcacagaaagagtcagtccaaggtgccgcccaggacgtggccggcgtggccgcctgtctgcccctggcacagagcactccatttcctggtcccgcgtag

SEQ ID NO: 136653 - DNA, 3414 bp, synthetic construct
  misc_feature 1..3414: note = Description of Artificial Sequence: Synthetic coding sequence
  source 1..3414: mol_type = other DNA
atgactatgactgccaataaaaattcgtctatcacacacggcgccggcgggactaaggcaccaaggggtacccttagccgtagtcagtccgtctctccacctccagtgctctcacccccgcggagtcctatctacccgctcagcgattcagaaacctcggcctgccggtacccgagtcatagcagttcccgagtgctgctgaaggatcgccaccctcccgctccttcgccacagaacccccaggacccctccccagacacctctccacccacttgcccatttaaaactgcatcttttggatatctcgatcgatcacctagcgcgtgtaagagagatgcgcagaaagagtctgtgcagggcgctgcccaagatgttgccggggtggctgcctgtctgcccttagcccagagcacccctttccccggtcccgccgccgggcctcgcggtgtcttgctaacaagaaccggtacacgcgcccacagtctcggaatacgcgaaaagataagtgcctgggagggacgcagagaggcctctcctcgcatgtccatgtgcggcgagaagcgagaggggtccgggagtgaatgggccgcctccgagggctgtcccagcttgggatgccccagtgtggtgccttctccttgttcctctgagaagacatttgacttcaaagggctgaggcggatgagtagaacctttagtgagtgctcgtaccccgagacagaagaggagggcgaggccttgcccgtgagggatagcttttatagactggagaagagactgggacgttcagaaccatcagcctttcttcgcggccacggaagccgcaaggagagttcagcagtacttagtagaatccaaaagatcgagcaggttctgaaagagcaaccaggaagagggctgccacagctcccaagttcctgttacagcgtcgaccggggcaagcggaagaccggtacattgggttccctggaagagccggctggtggcgctagtgtctcagcaggcagtcgagccgttggggtagccggagtggctggggaggccggacccccacccgaaagggaaggtagcggaagtactaagcctgggactcctggcaattcaccttcttcacagcggctcccctctaagagtagcttggaccccgctgtcaatcctgtgccaaagcccaaaaggacattcgagtatgaggccgataagaacccaaaatccaagccttctaacggtctgccaccttcccccactcccgccgccccaccacctctgccatcgacgcctgctccccctgttacacgtcggccaaagaaggacatgagaggccatcgtaagagccagagcaggaaaagctttgagtttgaagatgccagctcattgcagtccctatatcctagttcccccaccgaaaacggtactgagaaccagcccaaattcgggtcaaagagcactctggaggagaatgcttacgaagatattgttggcgaccttcccaaggaaaacccctacgaggatgtcgatcttaaatctagacgcgccggtcgaaaatcccagcagctgtcggaaaactctctggattcattgcaccgtatgtggtccccacaagaccgtaagtacaacagtccgcccactcagctgtctctgaaaccaaattctcaaagcttgcggtctggcaattggtccgagaggaaatcccaccgtctgcccaggttacctaaacgacattcccatgacgacatgctgctgctcgcccagctgtccctcccctcaagccctagttccttgaatgaagatagcctgagcaccacttccgagctgctgagtagccggcgtgccaggcgtatcccaaagctagttcagcggataaactccatttataatgccaagcgcgggaaaaagcggctgaaaaagttaagtatgtcctctattgagacagcctcattgcgggacgaaaactctgaaagtgagagcgacagcgacgaccgattcaaggcacatactcagagacttgttcatattcaaagcatgctgaaaagagccccatcctatcgcacacttgagttggagctgttggaatggcaggaacgcgaactgtttgagtatttcgttgtggtttccctcaagaaaaaaccgtcaaggaacacctatcttccagaagtgagttaccagttccctaagctcgacaggcctaccaaacagatgagggaagccgaagagaggttgaaagccattccacaattctgttttcctgacgccaaggattggctgcccgtttcagagtactccagtgagaccttttcatttatgctcacaggagaagatggtagtagaaggttcggttattgcaggcggctgttaccatccgggaagggcccgagactccccgaggtgtactgtgtgatcagccgtctgggctgctttggcctcttttcaaaggtgttggatgaggtggaaagacgtagggggatcagcgcggcactggtttacccatttatgcgctctcttatggaatcgccattccctgcacccggcaagaccataaaagtgaagacgtttctgccaggggcaggaaatgaggttctcgaactgcgccgcccaatggatagccggctcgagcatgtggatttcgagtgtctcttcacatgtctttcagtccgtcagctgatcagaatttttgcctctctcctgctggaacggagagtgatatttgtcgcagataagctgtctaccctgagcagctgctctcatgccgtggtagcattgttgtaccccttctcctggcaacacaccttcatacccgtgctcccggcttctatgatagatatcgtctgttgtccaacacccttcttagtagggctccttagttccagcctgccgaagctgaaagaactgccggtggaagaggccctgatggttaatctgggttccgacaggtttatccggcagatggatgacgaggataccctgttgccccgcaagttacaggcggccttagaacaggccctggaacggaaaaatgagctgatctcacaggactctgacagtgattccgatgatgaatgtaatacactaaatggcctagttagcgaagtgttcataaggttctttgtcgaaaccgtcggccattacagcctcttcctgacccagagcgagaaaggcgaacgggcttttcaaagggaggccttccgaaagagcgtcgcatcaaagagcattaggcgctttttggaagtttttatggaaagccagatgttcgccggcttcatccaggatagagaactgaggaaatgtcgcgctaaaggactgttcgagcagagggtggaacagtatctggaggagcttcctgatacagaacagtcgggcatgaacaagtttttacgaggcctcggcaacaaaatgaagtttctccacaagaaaaattag

SEQ ID NO: 136654 - DNA, 369 bp, synthetic construct
  misc_feature 1..369: note = Description of Artificial Sequence: Synthetic coding sequence
  source 1..369: mol_type = other DNA
atgacaatgacagccaataagaactcgagcatcacacacggcgccggtggcacaaaggcaccaagaggaacgctctctcgtagtcagtcagtgtccccccctcccgtgctgagcccaccgcgatcacccatatacccactgagtgactccgaaactagcgcctgtcggtatccatcccattcttcctcacgcgttctactcaaagatcgacaccctccagctcctagcccacagaacccccaagaccccagcccggacacatctccccccacttgcccctttaaaacggcatcgtttgggtaccttgaccgctccccaagtgcctgtaagagagacgcacaaaaagaaagcgtccagggggccgcatag

SEQ ID NO: 136655 - DNA, 93 bp, synthetic construct
  misc_feature 1..93: note = Description of Artificial Sequence: Synthetic coding sequence
  source 1..93: mol_type = other DNA
atgaccatgacagcaaataaaaattctagcatcacacacggggcaggggggactaaggctccccgtggaaccctgtctaggagccagtcttag

SEQ ID NO: 136656 - DNA, 1758 bp, synthetic construct
  misc_feature 1..1758: note = Description of Artificial Sequence: Synthetic coding sequence
  source 1..1758: mol_type = other DNA
atggccgaggccgccacagggtttctagagcagctgaaaagctgtatcgtctggtcctggacgtatttgtggacagtgtggttctttattgtgctgttcttggtttatatcctacgggtgcctctcaaaattaacgataatttgtctactgtaagtatgttcctgaacaccctgacacccaagttctatgtggctctcaccgggactagctccctcatttccggccttatcctaatcttcgagtggtggtattttcgcaaatacggaaccagcttcatcgagcaagtctccgtgtcgcatctgagacctttattaggcggagtggataataactctagcaataattccaactcttcaaatggtgattctgattctaacaggcagtcggtgtccgaatgcaaagtttggaggaatccccttaatctctttagaggtgcagaatataatcggtacacttgggttactggacgggagccactgacatattatgacatgaatctttccgctcaggaccatcaaacatttttcacctgcgattcggatcaccttagaccggccgacgctatcatgcaaaaagcatggcgcgaaagaaatcctcaagccagaatctcagcagcccacgaagccctggagatcaacgagattaggtcacgcgttgaagtgccactaatcgcttctagtaccatctgggagatcaaactgctccccaagtgtgcaacagcttacatactgttagccgaagaggaggccacgaccatcgccgaggcggaaaagctgtttaaacaggctctgaaagcgggtgacggctgttatagaaggtcccaacagctacagcaccatgggtctcagtacgaggcccaacacaggagggataccaacgtgttggtgtacattaagagaagactggctatgtgcgcccgcaggttaggccgtacccgcgaggctgtgaagatgatgcgtgatttaatgaaggaatttccgctcctgagcatgtttaacatccacgaaaacctgcttgaggctctccttgagctgcaagcatatgccgatgtgcaggcagtactcgctaaatacgacgacatctctctccctaaatcagcaacaatctgttataccgcggcattattgaaggcgagggccgtctctgataaattctctccggaagctgcttcaagaaggggcctgtccacagcggagatgaacgccgtggaagccatccatcgggctgttgagttcaatccccacgtgcctaagtacctgctagagatgaaatcactgatcctcccacctgagcacatcctaaaacgtggcgactccgaggccatcgcttatgccttctttcaccttgctcattggaagagagtggagggggcccttaatctgctccattgcacatgggagggaaccttccgaatgattccatacccactggagaaaggacatttgttttacccctatcccatctgcaccgaaacggccgacagagagctcctaccatctttccacgaggtgtctgtctaccctaagaaggagttaccattctttatactgttcactgccggtctctgttcattcacagctatgctggccctactcacacaccaattccctgaacttatgggcgtattcgccaaggctatgatcgacattttctgctccgccgagtttagagactggaactgcaaaagcatcttcatgagagtggaagacgagttggaaattccgcctgcacctcagagtcaacatttccagaattag

SEQ ID NO: 136657 - DNA, 1500 bp, synthetic construct
  misc_feature 1..1500: note = Description of Artificial Sequence: Synthetic coding sequence
  source 1..1500: mol_type = other DNA
atgagtatgtttcttaatacactgactcccaaattctacgtggctttaacgggaaccagttccctaatctcggggttaattcttattttcgaatggtggtacttcagaaaatatggaacatctttcattgagcaagtgtccgtgagccacctgcggccacttctgggcggagtggataataatagcagtaataatagtaattcatctaacggcgatagtgattccaatcgtcagtcagtctctgagtgtaaagtctggaggaatccacttaacctcttcagaggcgccgagtataaccgctacacctgggtgacgggacgcgagcctctgacctattatgatatgaacctatcagctcaggaccatcagacattcttcacgtgcgacagcgaccatctccgtcctgctgatgccataatgcagaaggcatggcgggaaaggaatcctcaggcccgaatctcagcagcacatgaggctctggagataaacgagtgtgctacagcatacatattgctggccgaggaagaggcaacgacgatagctgaagccgaaaaactgtttaagcaggcactgaaagcgggtgacggttgctaccgcagatcacaacagctgcaacaccacggatcacagtacgaagcacagcataggcgggacacgaacgttctcgtgtacataaaaaggaggctggccatgtgcgccaggagacttgggcggacaagggaggcagtcaagatgatgagggaccttatgaaggagtttccactactttccatgttcaatattcatgagaacctgctcgaggccttacttgagctgcaggcctatgccgacgtgcaggctgtgctggccaagtatgatgatatctctctacccaaaagtgcaaccatatgttacacggctgccttattgaaggctagggccgtcagcgataaattcagcccggaagctgcttcgaggcgcggcctttcaactgcagaaatgaacgccgttgaagccatccacagggccgttgagtttaatccccacgtgccaaagtatcttttggagatgaagagcctgatcttgccaccagaacacatattgaaacggggtgactctgaagctatcgcctacgcgttcttccacctcgctcattggaaaagagttgaaggcgccctgaaccttctgcactccttccgcatgattccctacccactcgaaaagggccatctattttacccttaccctatttgtacagaaacagctgaccgcgaattattacccagttttcacgaggtctccgtatatcctaagaaagagttgccttttttcatcctgtttaccgccgggctctgttctttcaccgccatgctcgctctattgacacaccagtttccggaactgatgggcgtgttcgctaaggccttcctcagcacactgttcgctcccctgaattttgtgatggagaaggtggagtctatcttgccatcttccctgtggcatcaactcaccagaatttag

SEQ ID NO: 136658 - DNA, 1536 bp, synthetic construct
  misc_feature 1..1536: note = Description of Artificial Sequence: Synthetic coding sequence
  source 1..1536: mol_type = other DNA
atgttcggtacagaatcttcactgtccatgtttctgaacacgctgacaccaaagttctatgtggccctaacaggcacctcatcacttatatccggccttatcctgattttcgagtggtggtacttccgcaagtatggtactagcttcattgaacaggtgagcgtaagccaccttagacctctcctgggaggggtagacaataattcatcaaacaactcaaactcatcaaatggcgattctgactctaaccggcagagcgtgagtgaatgtaaagtatggaggaaccccctgaacttattccgcggggcagagtacaacagatatacatgggtaaccggaagagagcccctcacttactatgacatgaacttgtccgctcaggatcatcagacctttttcacctgcgactcagaccaccttaggcccgctgacgccatcatgcagaaggcctggcgggagaggaacccacaggctaggatttcggctgcgcacgaagcgctggagattaatgagtgtgcgaccgcctatattctactggccgaggaggaggctaccacaatcgccgaagccgagaagctgttcaaacaggccctgaaagccggtgatggatgctataggaggtctcagcagctgcagcaccacgggtcacaatatgaggcccaacatcggcgggacaccaacgtcctagtgtatatcaagaggaggttggctatgtgtgcccggaggttgggacgtacccgggaagccgtgaagatgatgagagatctgatgaaagagtttcctctgctatccatgtttaatattcacgagaatctgttggaggcactgttggagttgcaagcatacgcggacgtccaggccgtcctggccaagtatgacgacatatctctgcctaaaagcgctacaatctgctacacagctgcactcctaaaggcacgcgctgtgtcggacaagttcagccccgaggccgctagcagacgcggtttgtctacagccgagatgaatgcagttgaagccattcaccgagccgtagaatttaatccgcacgtccccaagtatcttctagagatgaagtctctcattctaccacccgagcatattcttaaaagaggggactctgaagccatagcatatgcattcttccatctggcccattggaaaagagttgagggagccttgaatcttctgcactgtacttgggaaggtaccttccggatgatcccttaccctctcgagaaaggccatctgttctatccataccccatctgcactgaaacggctgaccgcgaacttctgccctcttttcatgaggtcagtgtctacccaaagaaagagctgccatttttcatcctgtttactgccggtctgtgctccttcacagccatgctcgccctgctgactcaccaatttccagagctcatgggggtttttgccaaggccttcctaagtaccctgttcgctccattgaactttgtgatggagaaagttgagtccattctgccatcttccttgtggcaccaactgacacggatttag

SEQ ID NO: 136659 - DNA, 1605 bp, synthetic construct
  misc_feature 1..1605: note = Description of Artificial Sequence: Synthetic coding sequence
  source 1..1605: mol_type = other DNA
atgttcggtaccgagagttctcttagcatgtttctgaacacactcacacccaagttctacgtcgcgctcactggtacctcttccctgataagcggcttaattctcatttttgagtggtggtacttcagaaagtatgggacttctttcattgagcaggtgtctgtcagtcacctccggccactgcttggtggggtggacaacaattcatctaacaacagcaactccagtaatggggacagcgactccaacaggcagtctgtcagtgagtgtaaagtgtggcgaaatcctcttaacctgttcagaggagcagagtacaatcggtatacctgggttactggacgggaacctctgacttactacgacatgaatctcagtgcccaagaccaccagactttctttacttgtgatagcgatcatctccgccccgccgacgctattatgcagaaggcttggcgtgagaggaatccccaggctcgaatatccgcagcccacgaagcactagagataaacgagatacgttctagagttgaagtgcctctgatcgcgtcctctactatttgggaaatcaaactattgccaaagtgcgcgacggcctatattctactcgccgaggaggaggcaacaactatcgccgaagccgaaaagctgtttaagcaggccttgaaggccggtgatgggtgttaccgcaggtctcagcagttgcagcaccatgggtcccagtatgaggcccagcacaggcgggacacaaacgtgctagtctatatcaagcggaggctggctatgtgtgccagaagactcggacgtacaagagaggctgtgaagatgatgagagacttgatgaaggagttcccactactgtcaatgtttaacatacacgaaaaccttctggaggccctgttggagctccaggcatatgctgacgtgcaggctgtgctggctaagtacgacgatatctcacttccaaagtcagcaacgatttgctacaccgcagccctgctgaaggcgagagccgtgtctgacaagttttcccctgaggcagcttctcgccgcggcctctccacagccgagatgaatgccgttgaggcgattcaccgtgcagtcgaattcaatccacatgtccctaagtatctactggaaatgaagtccctcattctgccacctgagcatattctgaaacgcggagattccgaagcaatagcctatgcatttttccatctcgcccactggaaaagggtggaaggcgcactgaatctgctgcattgtacttgggagggcacgttccgcatgattccctacccgctcgaaaaggggcacctgttctatccttatcctatatgcactgaaacagccgatagagagttgctgccgtcctttcatgaagtgagcgtatatcccaagaaagagctgccttttttcatcctcttcactgcagggctttgttccttcacagcaatgctggccttactgacgcatcagtttccggagctcatgggtgtgtttgccaaagccttcctcagcaccctctttgctcccctaaatttcgtgatggaaaaagtagaatcaattctgcccagttcattgtggcaccagctgaccaggatctag

SEQ ID NO: 136660 - DNA, 1665 bp, synthetic construct
  misc_feature 1..1665: note = Description of Artificial Sequence: Synthetic coding sequence
  source 1..1665: mol_type = other DNA
atggcggaggctgccaccggcttcctggaacagcttaaatcatgcatcgtgtggtcttggacatatctttggaccgtctggttcttcatagtattgtttttggtgtacatactaagggttccgctgaaaattaacgacaatctatccactgtctcaatgtttctcaatacgttgacacctaagttttatgttgccctgacgggtacaagctcactaattagtggcctgattctgatcttcgagtggtggtatttcagaaaatatggaacttcctttatcgagcaggtgtcagtaagtcacctcagacccttactaggaggagtagataacaactcttccaataatagtaacagcagcaacggtgatagtgattcaaaccgacagtcagtcagcgagtgtaaggtgtggaggaaccctctaaacctattccgcggagcagaatataaccgctatacctgggttaccggacgtgagcctttaacttattacgatatgaacctctcagctcaggaccaccagacgttcttcacctgcgattccgatcatctaaggcctgcagatgctatcatgcaaaaggcctggcgggaacgtaacccccaggcccgtattagcgcagcacatgaagctctggagatcaatgagtgcgccactgcatatatcctgctggccgaagaggaagccaccacaattgctgaagccgaaaagctctttaagcaggcactgaaagctggcgacgggtgctatcgccgctcccagcagctgcaacaccatgggtcacaatacgaggcacaacatcgccgagacaccaatgttcttgtatacatcaagaggaggctcgctatgtgcgccaggaggctcggccgtaccagggaggccgtgaaaatgatgcgagatctcatgaaagagttcccattgcttagtatgtttaatatccatgagaacttactcgaggccctcctggagctccaggcttatgccgatgtacaggctgtgcttgcaaagtatgatgatatttcattacccaaatccgcgaccatttgttatacagctgccctgctgaaagctagagcggtatcagacaaattttcccccgaggcagcctcacgtcgtggcctcagcacagccgaaatgaacgccgtggaggccatccaccgcgcagtggagttcaatccacacgttcccaagtatctcctggaaatgaagtcactaatccttccccctgaacatatcctcaaaaggggcgacagcgaagcaattgcctatgcctttttccatctcgcccattggaaacgcgtcgagggtgcactgaacctgctgcattgcacgtgggaagggacttttcggatgattccttaccctcttgaaaagggccacttgttttatccctaccccatctgcactgagactgcagatcgggagctgttgcctagttttcacgaggtcagcgtctatccaaagaaagagttgccatttttcatactctttaccgctggactgtgctcttttacagccatgctagcattactaacacaccagttcccagagttgatgggtgtttttgcaaaagcttttctttcaacactgttcgcacccttaaacttcgtgatggaaaaggtggaatctatacttccttcctccctgtggcatcagctaaccagaatatag

SEQ ID NO: 136661 - DNA, 189 bp, synthetic construct
  misc_feature 1..189: note = Description of Artificial Sequence: Synthetic coding sequence
  source 1..189: mol_type = other DNA
atgagtatgtttctgaacaccctgactccgaagttctatgtagcactgactggaacttcttccttgatttcaggcctgattttaatcttcgagtggtggtattttaggaagtatggcacctctttcattgaacaagtctcagtgtcccacctccggcctctcctgggcggtgttgacaataattcttag

SEQ ID NO: 136662 - DNA, 264 bp, synthetic construct
  misc_feature 1..264: note = Description of Artificial Sequence: Synthetic coding sequence
  source 1..264: mol_type = other DNA
atgtccatgtttctcaacacactaactccaaaattttacgtcgccctgaccggaacgtcctccctgatttccggactgattttgatatttgaatggtggtactttcggaagtatggcacctcttttatagaacaggttagcgtgagccacctaagacccctactggggggtgtggacaataattccagcaataatagcaacagctcaaacggagatagtgacagcaaccgccagtctgtctccgagtgcaaagtctggaggtag

SEQ ID NO: 136663 - DNA, 1323 bp, synthetic construct
  misc_feature 1..1323: note = Description of Artificial Sequence: Synthetic coding sequence
  source 1..1323: mol_type = other DNA
atggccgaaaacaatgagaatattagcaagaacgtggacgtacgaccaaaaacgtctcggtctcgctcagccgacaggaaagacgggtatgtctggagcggtaaaaagcttagttggtcaaagaagtctgagtcttactccgacgccgaaacagtaaacggaatcgagaaaaccgaggtatccctcagaaatcaagagcgcaagcactcatgctcaagcatcgaattggacttagaccattcatgtggccacagatttcttggaaggtcattgaaacagaaactgcaggacgctgtgggacaatgctttccgattaagaattgctcttctagacattcatccggactgcccagcaaacgcaaaatccatatttccgagttaatgctggacaagtgcccattcccccctcggtccgatctagcattcagatggcacttcataaagcggcatacggcccccattaacagcaagagcgatgaatgggttagtaccgatctaagccagaccgagcttagggacggacagctaaaacgacggaacatggaagaaaacatcaactgctttagccacactaacgtacagccatgcgttattaccacggacaacgcactgtgcagagagggccccatgaccggaagcgtgatgaatctcgtttctaataactctatagaggatagcgacatggacagcgacgacgagatcctcacactgtgcacatcctcgaggaaacgtaataaaccaaaatgggacctggatgacgagatcctgcagctggaaaccccccccaagtaccacacacagatagactatgttcactgtctcgtgcctgacctgctgcaaattaacaataacccttgctattggggcgtcatggacaaatatgctgctgaggcactgcttgaggggaagccagaaggcactttcctgctacgtgactctgcccaggaagactatttatttagcgtgtcattccgcagatactcaagaagcttacatgctagaatcgagcagtggaatcataatttttctttcgatgcccacgatccctgcgtcttccactccccagacattactggcctgctggagcactataaggatccttccgcctgcatgtttttcgagcccctgttgtctacccctctgattcgcacctttccttttagccttcagcacatctgtagaacggtaatatgcaactgtacaacttatgacggaatagatgccctccccatcccttcgagtatgaagctctacctgaaagagtaccactacaaatcaaaagtcagggtgctgcggattgacgcgcccgaacagcagtgttag

SEQ ID NO: 136664 - DNA, 1323 bp, synthetic construct
  misc_feature 1..1323: note = Description of Artificial Sequence: Synthetic coding sequence
  source 1..1323: mol_type = other DNA
atggccgaaaacaatgagaatatctcaaaaaacgtcgacgtgcgacctaaaacctcccgctctagatccgccgaccgcaaagacggttacgtgtggtccggcaaaaagctgagttggtctaagaagtcagagagctactctgacgcagaaaccgtcaatggcattgagaaaactgaggtatccttaaggaatcaggagcggaagcatagttgttctagcatcgaactggatctggatcattcctgcgggcaccgcttcctgggacgatccttaaagcagaagttgcaggacgcagtcggacagtgctttccaatcaagaactgcagctctaggcactcctccgggctaccttctaagcgcaaaatccatatctccgagcttatgctggacaagtgccccttccctcccaggtccgacctcgcattcaggtggcactttattaaacgtcacaccgctcctatcaactccaagtccgacgagtgggtgtccaccgacctgtcccaaactgagctacgcgacggtcaactaaagaggcgaaacatggaggagaacattaattgcttttcgcacacgaatgttcagccgtgcgtgattactaccgacaatgccctttgccgagaggggccaatgaccggctcagttatgaatcttgtgtctaataactcaatcgaagatagcgatatggattcagatgacgaaattctgacattgtgcacatcatctagaaagcgaaacaaacctaagtgggacctagatgatgagatccttcaacttgagaccccccccaagtatcatacccagatagactacgtccactgtttggttcctgatctcctccagattaacaataacccttgttattggggcgtcatggataagtatgctgccgaggctctcctagagggcaaaccggagggaacatttcttctccgcgacagcgctcaggaggactatctgttttcagtttccttccgtaggtatagcaggagtttacacgcacgcatcgaacaatggaatcacaacttttcttttgacgctcatgacccctgtgtgttccacagtccagatattacaggcctcttagagcactataaggacccctccgcgtgtatgtttttcgaacctctactgtccacacccttgatcagaacctttccgtttagtctacagcacatctgtagaacggttatttgtaactgtactacttacgacggaatcgacgccctcccaattccttctagcatgaagctctacctcaaggagtatcattacaaatccaaagtcagagtactgcgaatcgacgctcccgagcagcaatgttag

SEQ ID NO: 136665 - DNA, 1323 bp, synthetic construct
  misc_feature 1..1323: note = Description of Artificial Sequence: Synthetic coding sequence
  source 1..1323: mol_type = other DNA
atggctgagaataacgaaaacatcagcaaaaatgtggatgtgcgtccaaagacctcaagatcacgaagcgcggaccggaaggatgggtacgtgtggagtgggaaaaagttgtcttggtcaaaaaaatctgagagttattcagacgcagagacggtgaacgggattgaaaagaccgaggtctcactgcgcaaccaggaacgtaagcatagctgctcaagcatcgagctcgacttagaccatagctgcgggcaccgctttttgggacggagcttaaagcaaaaactacaggatgctgtagggcagtgcttccccattaaaaactgctccagccgacactctagcggcttacctagcaaaagaaaaattcacatttccgaactgatgctcgacaagtgtcccttccctcctagaagcgacttagcattccgctggcactttatcaaaagacacactgctccaatcaacagcaagagcgatgagtgggtgtccacagaccttagccagaccgaactgagggatggccagttaaaacgacgaaacatggaagaaaatataaactgcttctcccatacaaatgtacagccctgcgtgatcactaccgataacgcattatgtcgagagggtcctatgaccggctcggtgatgaacctcgtgtccaataacagtatagaggacagtgatatggattctgacgatgagattctgacactatgtacgagcagtaggaaacgcaacaaacccaaatgggatctggatgacgagatccttcaactggagacaccaccaaaataccatactcagatcgattatgttcattgtttggttcctgaccttctgcagatcaacaataatccatgttactggggcgtgatggataagtacgcagccgaggctttgcttgaaggtaagcctgagggaaccttcctgttaagggatagcgcccaggaagactatctcttttctgtgtccttccggcgatactctcggtcactgcacgccaggatcgaacagtggaaccacaatttttccttcgatgcacacgacccatgcgtcttccacagtccagacataaccgggctccttgaacattataaggatccaagcgcctgtatgtttttcgaaccgctcctgtctacaccgttgattcggaccttcccgttcagtttacaacacatttgtcgaaccgtcatctgcaattgtacaacttacgatggcatcgacgctttgcccatcccttcatctatgaagctgtacttaaaagagtaccactacaagagtaaggtgagggttctgaggatagatgcacccgaacaacaatgctag

SEQ ID NO: 136666 - DNA, 1611 bp, synthetic construct
  misc_feature 1..1611: note = Description of Artificial Sequence: Synthetic coding sequence
  source 1..1611: mol_type = other DNA
atggacaaagtgggcaaaatgtggaataacttcaagtacaggtgccaaaacctttttggtcacgaggggggcagtaggagcgagaatgtcgacatgaactctaatcggtgtttaagcgtcaaagaaaagaacatctccattggcgactctactccgcagcagcagtcatcccctctgagggagaatattgcactgcagcttggcttgtcaccatcaaagaactcaagtagaaggaaccagaactgtgctaccgagatccctcagatcgtggaaattagtatcgaaaaggataacgatagctgcgtaacacccggcacgcgactcgccaggagagactcttactccaggcacgcaccctgggggggaaaaaaaaagcattcctgtagtactaagacacagagctctttagatgccgacaagaaattcgggcgtacaaggtccgggctgcagcggagagagcgccgctatggcgtgagcagcgtgcacgatatggacagcgtctctagcagaaccgttggatcccggagcctgagacaaagacttcaggacactgttggtctgtgtttccccatgagaacgtactccaaacagtctaaacccctcttcagtaataaacgaaagatccatttgagcgaactgatgctggagaagtgcccatttcctgccggatccgacctggcacagaagtggcacctgataaaacaacacacagcaccagtgtccccacatagtaccttcttcgacacttttgaccctagtctcgtgtccaccgaggacgaggaggataggctccgcgaacgcagacggctgtccatcgaagagggcgtcgacccacctcccaacgctcagatccacacatttgaggccactgcgcaggtaaacccactgtacaagctgggaccgaaacttgcgccaggcatgactgagatttcgggcgacagcagtgccatcccacaggcaaattgtgattctgaggaagacacgacaaccctttgcttgcaaagccggcgccaaaaacagaggcaaatttctggtgattcccacacacatgtgtctcgtcaaggcgcatggaaggttcatactcaaatcgattacattcactgtttggtccctgacctccttcaaatcactgggaacccctgttactggggcgttatggaccgatatgaagcagaagccctgctcgagggaaagcccgaagggacctttctgctgcgggatagcgctcaagaggactatctgttctctgtctctttcaggagatacaatcggtctctccacgcacgcatcgagcagtggaatcataatttctccttcgatgcccatgacccctgtgtgttccactctagtactgtgacaggactgttggagcactacaaggatccatccagctgcatgttcttcgagcccttacttacaattagcttaaatcgaacgttccccttctcattgcagtacatttgtagggccgtgatctgccggtgcaccacatatgacggaatcgacggtctgcccttgccatcaatgttgcaggactttctcaaggagtaccactacaagcaaaaggtcagagtgcggtggctggaacgcgaacctgtgaaagctaagtag

SEQ ID NO: 136667 - DNA, 1611 bp, synthetic construct
  misc_feature 1..1611: note = Description of Artificial Sequence: Synthetic coding sequence
  source 1..1611: mol_type = other DNA
atggacaaagtcggtaagatgtggaacaacttcaaataccgctgccaaaacctttttggtcatgagggcggcagtcgcagcgaaaacgtggacatgaatagcaatcgatgtctcagtgtgaaggagaagaatatctccattggtgattctacccctcagcaacagagctcaccattgcgggagaatattgctctgcagctgggcctctccccaagcaagaatagtagccgcagaaaccagaactgtgctacggagatccctcagatcgtcgagatatctattgagaaagataatgattcatgcgtcacgcctggaacccggttggctaggcgggattcttactcaaggcacgcaccttggggagggaagaaaaaacattcttgttctacaaaaactcagtcttcgctagacgcagataagaagtttggcagaacaaggagcggcctgcaacgaagggagcggcggtatggagtgagcagcgtccacgacatggacagtgtcagctctcgtactgtcggttcgcgtagtctcaggcagagactacaggacaccgtgggcttgtgtttccctatgagaacttattctaaacagtccaagcctctgtttagcaataagaggaagattcatctgagcgagcttatgctggagaagtgcccattcccggcaggatcagacctggctcagaagtggcaccttataaaacagcacactgcacctgttagccctcactcaaccttttttgatacatttgacccctctctcgtaagtacagaagatgaggaggaccggctcagagagcggaggagactaagcattgaagaaggagtggacccccctcctaatgcacagatacacaccttcgaggccactgctcaggtgaaccctttgtacaagctggggccaaagctggcaccggggatgactgagatctctggtgacagtagcgcaattccccaggccaactgcgattctgaggaagatacgaccacgttatgtctacagagcaggagacagaagcagagacagatctccggcgattcccacacccatgtgagtcgccagggagcatggaaggtccatacacagatcgattacatccactgtttggttccagatctcctccagattacaggcaacccgtgctactggggagttatggatagatacgaggcagaagccctgctggaagggaaaccagaaggcactttcctgctgagagattctgcccaagaagactacctctttagtgtgagttttcgcagatataaccggtctctgcacgcgcgcatcgaacaatggaaccataatttctccttcgatgcccacgacccctgcgtgttccactcctcaacagtcaccggtttgttggagcattacaaggacccttcatcttgtatgttcttcgaaccactgctcactatcagcctgaatcgcactttcccatttagcctgcagtatatttgtagggctgtgatttgccggtgcacaacctacgatggaattgacggtctgccgctgccctctatgctacaggacttcctgaaggaataccactacaaacagaaggtgcgggttagatggcttgaaagggaacccgtgaaggcgaagtag

SEQ ID NO: 136668 - DNA, 3264 bp, synthetic construct
  misc_feature 1..3264: note = Description of Artificial Sequence: Synthetic coding sequence
  source 1..3264: mol_type = other DNA
atgtccgacagtgaggactccaactttagcgaggaggaggactctgagcggtccagcgatggagaggaggctgaagtagacgaagagaggaggagtgcggctggctcagagaaggaagaagaaccagaggacgaggaggaagaagaagaagaggaggaatacgacgaggaggaagaggaggaggatgacgatcgcccaccgaaaaaaccaaggcacgggggattcattctggacgaggccgacgtggatgacgaatatgaggacgaggatcaatgggaagacggagctgaagacatccttgaaaaagaagagatcgaggcaagtaacatagacaatgtggtgttggatgaggatcggtccggcgcaaggcgcctgcagaacttgtggcgcgatcagagggaggaagagttaggcgagtattatatgaaaaagtatgcaaaaagcagtgtgggcgagactgtgtatggaggctccgatgagctcagcgacgacattacacagcaacagttattgcctggtgtgaaagaccccaacttatggaccgtgaaatgtaaaattggcgaggagcgggcgacggctatttcccttatgagaaagtttattgcttaccagttcaccgacacaccccttcaaattaagagtgtggtggcccccgagcatgttaaaggctatatttatgtggaggcatataaacagacccacgttaagcaagcgatcgaaggagttgggaacctgcgactaggatattggaatcagcagatggtccccattaaagaaatgactgacgtactaaaagtggtgaaggaggtcgcgaatttaaagcctaagtcttgggtgcgcctgaagcgtggcatttataaagatgacatcgctcaggtcgactatgtggagccatcgcagaatactatctctctcaagatgattccccgcatagattatgatcgcatcaaggcacgcatgagtcttaaagattggtttgcaaagcgcaagaagttcaaacggccaccgcagagactcttcgatgcagagaagatccgaagtctggggggcgacgtggcctccgacggggatttcctaatttttgagggaaatcggtatagccgcaagggctttttgttcaaaagcttcgcaatgagcgctgtcatcactgagggcgttaagcccacattgtccgagctcgagaagttcgaagatcaaccagaaggaatcgatctcgaggtcgttaccgaatcaactggtaaggagcgcgagcacaactttcagcctggcgataatgtggaagtctgcgaaggcgaactgattaatctccaaggaaaaattctttctgtagatggaaataagatcactataatgcctaagcacgaggacctgaaggacatgttagaatttcccgcccaagagttaagaaagtactttaaaatgggggaccacgtgaaggtgatcgccggaagatttgaaggcgacaccggcttgatcgtgagagtggaggagaactttgtcatcctgttcagtgacttaactatgcacgaactgaaagtgctccccagagacctacagctgtgcagcgaaacagccagtggtgtggatgttgggggtcagcatgaatggggagaactggtgcagttagatccccagacagttggggtgatagtcagactagagcgcgagaccttccaggtcctgaatatgtatgggaaagtggtgacggttagacatcaagctgtcactagaaagaaggacaaccgcttcgctgttgctttggactccgaacaaaacaatatccatgtcaaagatattgtgaaagtcattgacgggccgcactctgggcgggaaggtgagatcagacatctcttccggtcttttgcattcttacactgcaaaaagctggtggagaacggcggtatgtttgtttgtaagacaagacacctagtgttggctgggggatcaaaaccacgggatgtcacaaacttcacagtgggtggtttcgcccccatgtctcctcgcatttcaagccctatgcacccctccgcaggaggacagagaggtggttttggtagccccgggggcggtagtggtggcatgtcccgcgggaggggccggcgggacaatgagcttatcgggcagacagtgcgcattagtcaaggcccctataagggctatattggtgtagtgaaagatgcaactgaatccaccgctcgggtagaactccatagcacatgtcagaccatttcggtcgaccggcagaggcttacaacagtgggatctcgccgccccggcgggatgacctctacctatggacgcactcctatgtatggctctcaaacaccaatgtatggtagtggcagtcgcacccctatgtacgggtcacagacgcctttacaggacgggtcaagaacaccacactacggcagtcagacgccgctacacgacggcagtagaacaccagcccagagtggagcctgggaccctaataaccccaacacaccatccagagctgaagaagaatatgaatacgcatttgacgacgaaccaacaccatctccgcaggcttatgggggcactccaaacccacagactccaggctacccagatccctcctcgcctcaggtgaatccccaatacaaccctcaaactcctggcacaccagctatgtataacaccgatcaattctctccttacgccgctcctagcccccagggctcataccaaccttcaccctcaccacagtcctatcaccaggtggcaccgagccccgcaggataccagaacactcactctcctgcttcctatcatccaactccttcccccatggcgtatcaagccagtccatctcctagccccgtcggctacagccctatgaccccaggggccccaagccccgggggctataacccccacacacccggttccggcatagaacagaatagtagtgactgggttactacggatatccaggtcaaggttcgcgatacctatctggatacacaagtcgtagggcagactggggtcatccgctccgtgaccggaggaatgtgctccgtctatctgaaggacagtgaaaaagttgtctcgatttcctcggagcatctagaacctatcacccctactaagaacaataaggtgaaagtcatcttgggagaggatagagaagccactggggtcctactgtctattgatggcgaggatggtatcgtacgcatggacctggacgaacagttgaaaattttgaacttgcggttcctggggaagctgttggaggcttag

SEQ ID NO: 136669 - DNA, 3198 bp, synthetic construct
  misc_feature 1..3198: note = Description of Artificial Sequence: Synthetic coding sequence
  source 1..3198: mol_type = other DNA
atgagcgactccgaagactccaacttcagtgaggaagaggactctgagcgctcgtcggatggagaggaggccgaagttgatgaggagcggcgtagcgcagcaggaagcgaaaaagaagacgatgatcgcccccctaagaagccaaggcatggggggtttatcctggatgaggccgacgtggacgatgaatatgaggacgaagaccaatgggaggacggagcggaagatatactcgagaaggaggagatcgaagcatccaacatcgacaatgtggttttggatgaggacaggagcggtgctcggcggctccaaaatctgtggagggatcagagagaggaagagttaggggagtattacatgaaaaagtacgcgaagtccagtgtgggagagaccgtgtatggcggcagcgatgaactgtccgatgacatcacacagcagcagctactgcctggcgtgaaggaccccaatctgtggactgtgaaatgcaagatcggggaagaacgggccaccgccatctccctgatgcgcaagtttatcgcttatcagttcacagatactcctctgcaaattaaatctgtcgtggccccagagcacgtgaagggctacatatatgtggaagcgtacaagcagacacacgtgaagcaggctatcgagggcgtaggcaacctgagattggggtattggaatcagcagatggttcctattaaagagatgacagatgtattaaaggtggtgaaagaggtggctaacctcaaaccaaaaagctgggtgcgccttaaaagaggcatctataaggacgacatcgcgcaagtggattatgtcgagcccagtcaaaacaccatcagcctgaaaatgatacctcgtattgactatgatagaatcaaggccagaatgagtcttaaagattggttcgccaaacgcaagaaatttaaacggccccctcagcgcttgttcgatgctgaaaagatcagaagtcttggcggcgatgtggcgtcagacggagattttctgatcttcgaggggaatcgctacagcaggaagggatttctctttaagtcttttgccatgagcgccgttatcactgagggagtgaaacccaccttgtccgagctggagaagttcgaggatcagccggaaggcatcgatctcgaggtggtgactgagtccacgggaaaagaaagggaacataattttcaaccgggagataacgttgaagtttgtgaaggagaactgattaacctccaagggaagatccttagtgtggacggcaataaaatcaccatcatgcctaaacacgaggatctgaaggatatgttagaattccccgctcaggagctgcgtaaatattttaaaatgggggaccacgtcaaagtcatagcaggacggttcgaaggcgacacggggctcattgtgcgggtggaggaaaactttgtcatcctgttttccgacctgacaatgcacgagctgaaagtgctgccacgggacctgcagctttgcagtgagactgcgtccggagtggacgtgggcggccagcacgagtggggcgaactcgtgcagcttgaccctcagacagtgggcgtcattgttaggcttgagcgcgagacgtttcaggtgctcaatatgtatggcaaagttgtaaccgttcgccaccaggcggtgaccagaaagaaggataaccgcttcgcagtggccctagattctgaacagaacaacattcacgtgaaagatattgtgaaggtaattgacggccctcactccggtcgcgaaggagaaatccggcatctctttcggagcttcgcatttctgcattgcaaaaagctagttgaaaatggcggaatgtttgtgtgcaagacaagacacctggttctagcaggaggaagtaagccccgcgatgtcaccaacttcaccgtaggaggtttcgcgcccatgtcaccacgcatttcctctcctatgcatcctagtgctggtggacagcgaggcgggttcggttcgccaggcgggggttcaggcggaatgtcaaggggtagaggccgaagagataatgaactgattggccagactgtacgaatctcacaaggcccttacaaaggttacataggcgtggtgaaggacgctactgagagtactgccagggtcgaactgcattccacctgtcaaactatcagcgtcgatcgacaacgactgacaactgtaggtagccggaggccaggcggaatgaccagtacttatgggcgaacccctatgtatggaagccagaccccaatgtacggttccggctcacgcacacccatgtacggatcccaaacacccctccaggacggcagccgaacaccacactacggctcccagacaccactccatgacgggtccagaactccagcacagtcaggcgcttgggaccccaataatccaaacaccccttccagggccgaggaggagtatgagtatgcatttgatgatgagccgacaccaagccctcaggcctacggcggaactcccaacccacagacacctggctatcctgacccaagttctccacaagtcaatccacagtacaacccccagacaccaggcacaccagctatgtacaatactgaccagttcagtccgtacgcggcaccaagccctcagggatcgtatcaaccatcaccatcaccgcagtcttatcatcaggtggctccaagtccagcagggtaccaaaacacgcactcacctgctagctaccatcccaccccctcaccaatggcatatcaagcctcaccatcccccagccctgtgggatatagccccatgaccccaggtgcacccagtcccggaggctacaacccacacaccccaggttccggcatagagcagaactcctctgactgggtgacaaccgatatacaagtgaaggtaagggacacgtacctggatacgcaggtagttggtcaaaccggtgtgatcagaagtgttactggcggaatgtgttctgtttaccttaaagactctgagaaagtagtctccatcagctcagagcacctggaaccaattactccgaccaagaacaacaaagtaaaggtgatcctgggtgaggacagggaagcaacaggagtgttgcttagtattgacggtgaagacggtattgtgcggatggaccttgacgagcagctaaaaattcttaaccttcgatttctcggcaagttgttggaagcatag

SEQ ID NO: 136670 - DNA, 3252 bp, synthetic construct
  misc_feature 1..3252: note = Description of Artificial Sequence: Synthetic coding sequence
  source 1..3252: mol_type = other DNA
atgtcagacagtgaagatagcaatttctcagaagaagaagatagcgagaggagttcggacggggaggaggccgaagttgatgaagagcgaaggtccgccgccggctccgagaaggaagaagaacccgaggacgaggaagaggaagaggaggaagaggagtacgacgaggaggaggaggaagaagatgatgaccgacccccaaagaagcccaggcatggcggatttatactggacgaagccgatgtcgatgacgaatatgaggatgaagatcagtgggaggacggcgccgaagatatcctcgagaaggcatctaacatcgataatgtggtgctagatgaagatcgcagtggggcacggagattacagaacttatggagggatcagagggaagaggagctgggggagtactacatgaagaaatatgccaaatcaagcgtcggagaaacggtgtatggaggtagcgacgaactgtccgatgacataacccagcaacagcttcttcccggggtcaaagatcctaatttgtggaccgtcaagtgcaaaattggcgaggagagagctaccgcaatatcactgatgcgtaagtttatagcttaccagttcacagacactcctctacagattaaaagtgttgtggccccggaacatgttaaagggtatatttacgtggaggcatataaacaaacgcacgtcaagcaagcgatagaaggagtcgggaatctgaggcttggttattggaaccagcagatggtcccaatcaaggagatgacagacgtcctgaaggttgttaaggaggtggctaacttaaaaccaaaaagttgggtacgcttaaagcgaggcatttacaaggacgatattgcccaggtcgattacgtggagccaagtcagaataccatctcgttgaaaatgatcccaagaatcgactacgaccggatcaaagcccgcatgagtctgaaagattggtttgcaaagcggaagaagttcaaaagacccccacagcggctgttcgatgctgagaaaattcgttcccttggcggcgacgtggcctcagacggcgactttttgatctttgaaggtaataggtattctagaaagggctttctttttaagtctttcgccatgtctgcagtcattaccgagggtgtgaagcctacgctgagcgaacttgagaagtttgaggaccagccagagggcattgaccttgaagtggtcactgagagtacaggtaaagaacgagaacacaattttcagccaggagataacgtagaagtgtgcgaaggggagctcatcaaccttcagggaaaaattctcagtgtagatggcaataaaatcaccattatgccaaaacacgaagacctgaaggacatgcttgagttcccggcccaggagctaaggaaatatttcaaaatgggggaccatgtcaaagtgattgctggcaggttcgagggcgacacagggctgatcgttcgcgtggaggagaatttcgtgatcctttttagcgatttaaccatgcacgagctcaaggtcttgcccagagatttgcaattgtgcagtgagaccgcttccggagtggatgtgggcggtcaacatgagtggggagagcttgtgcagttggatccacaaacagtcggcgtcattgttagactggaaagggagacatttcaggtcctgaacatgtatggcaaggtggtgacagtgcggcatcaggctgtcacgcggaaaaaagacaaccggtttgcggtggctctcgactctgagcagaataatattcacgtcaaagatatcgttaaagttatcgacggccctcacagcgggcgcgaaggcgagatccgccatctgttcaggtcttttgcctttctgcattgtaaaaagctggtggagaatgggggcatgtttgtgtgtaagactaggcatttagtcctggctggtggcagcaagccgagggacgtaactaatttcaccgttggtggattcgccccaatgtctcccagaatctcttcccctatgcatccctccgcgggaggccaacggggcggatttgggtctcccgggggaggatcgggagggatgtcacggggccgcgggagaagagacaatgagttgataggacagaccgtgcgaatctcgcagggcccctataaaggttatataggagtcgtgaaggatgctactgaaagcacggcccgcgtggaacttcactccacatgccaaacaatttccgtcgatagacaaagactaacaaccgtgggatctcgtcggccaggcggcatgacctctacttacggcaggacaccgatgtatggttcgcagacccccatgtacgggtcaggcagccggactccaatgtacggatcccagacgcctctccaagacggctctcgcacaccccactacggcagtcagaccccattacacgacgggtccaggaccccagcgcagtcaggcgcttgggatccaaataatccaaataccccttcacgggccgaagaggagtatgagtacgcatttgatgatgagcctacgccatcaccacaggcgtatggaggaacacccaacccccaaactcctggctaccccgatccatcttctccacaggtgaatccacagtataatccacaaacaccagggactccagctatgtataatacagaccaattttctccctatgcagcacccagccctcaaggctcatatcagcccagccctagcccccagagttatcaccaggtggcaccctctcctgctggataccagaatacacactcccccgcatcctaccaccctacccccagcccaatggcctatcaagccagtccgtccccgtctcctgtgggttattcacccatgacacccggagcccctagtccgggtgggtataatccacatacacccggatcgggaattgagcaaaactcttccgactgggtcaccacggatatccaagtgaaagtacgggatacttatctggatactcaggtggtcggccagacaggcgtgattaggagcgtcactggcggaatgtgctccgtgtatttaaaggactccgaaaaagtggtctcgatttcttccgagcacttggagcctatcaccccaactaagaacaacaaggttaaagtgatcctgggggaggatagagaagctaccggagtcttgctgtctattgatggcgaggacggtatcgtcaggatggatctggatgagcaactcaaaatactgaacctgagattcctgggaaaactgctggaggcctag

SEQ ID NO: 136671 - DNA, 3264 bp, synthetic construct
  misc_feature 1..3264: note = Description of Artificial Sequence: Synthetic coding sequence
  source 1..3264: mol_type = other DNA
atgtccgacagcgaggacagtaatttcagtgaagaagaagacagcgagcgctcctccgatggcgaagaggcagaagtggatgaagagcgaagaagcgccgccggaagcgagaaggaagaagagcctgaggatgaagaagaagaggaagaggaggaagaatacgatgaggaggaagaagaagaggacgatgatcgacccccaaaaaagcctagacatggaggctttattctcgatgaggccgatgttgacgacgaatatgaggacgaggatcagtgggaggacggcgccgaggatatcctggagaaagaggagatcgaagcatctaatatcgataacgtcgtattagacgaggatcgtagtggggcaaggcggttgcagaatctttggagggaccagcgcgaagaagaacttggggagtattatatgaaaaagtacgctaaatctagcgttggtgagacagtctatgggggtagtgatgaattgtcagacgatataacacagcaacagttgctacccggagtgaaggaccctaatttatggacagtaaagtgtaagatcggggaggagagggccaccgcgatatccctgatgagaaaatttatcgcctatcagttcacggatactccgctgcaaattaagtccgtggtggctccagagcatgtgaagggttatatctacgtcgaggcctataagcagacccacgttaaacaggccatcgaaggcgtgggaaatctccgcctcggctattggaatcagcagatggtgcctatcaaggaaatgacagacgtcctcaaggtagtgaaagaggtcgcaaacctcaagcctaaatcctgggtgcgattgaagcgcggaatatataaagacgatatcgcacaggtcgactacgttgaaccttctcagaacaccattagcctgaagatgattccgcggatagattatgaccggatcaaggcgcggatgtcactgaaagactggttcgctaaacggaagaaattcaaaagacccccgcagcggctcttcgatgccgaaaagattcgatctcttgggggggatgtcgcgagcgatggtgacttcctaatcttcgaagggaatagatattcacgaaagggttttctgtttaaaagctttgcgatgtcagcggtcattactgagggtgtgaaacctacgctgtccgaactggaaaagtttgaggatcagcccgagggaattgatctcgaagtggttacggaatccacgggcaaagaaagggagcacaattttcagccaggtgacaatgtggaagtgtgcgagggagaactgatcaacctgcaaggaaaaattctctctgtggacggaaacaaaattactattatgcctaaacatgaggacctgaaagacatgttagagttccctgcccaggaactgcgcaagtattttaaaatgggtgaccacgtgaaggtgattgctggacgctttgagggcgacacagggctgattgtcagagtggaggagaactttgtcatcctgttctcagacctcaccatgcacgaattgaaagtgctgccacgggacctgcagctatgcagcgagaccgcatcgggggtggatgttggcggccaacatgaatggggcgagttagttcagttggacccgcagactgtaggagtaattgtcaggttggagcgagagaccttccaggtgctgaatatgtacggcaaagtggtcacggtccgccatcaggctgtgactagaaaaaaagacaataggttcgcggtggctctcgactcagaacaaaataatattcacgtcaaagatatcgttaaggtgatagacgggccacattcgggccgagaaggtgagataagacacctattcaggtccttcgctttcctgcactgtaaaaaactggtggaaaatgggggtatgttcgtgtgcaagaccagacatctagtgctcgcaggcggctccaagcctcgagacgtaaccaacttcacagtgggggggttcgcacctatgtcccctcgtatcagctcccccatgcatccaagcgccgggggccaaaggggaggcttcggatctcctggaggaggctcaggagggatgagtcgtggcagaggacggagggacaatgagttgataggccagaccgtaaggatcagccagggaccctataagggttacattggagtggtaaaagacgcgaccgaaagtaccgctcgcgttgagctccatagcacatgtcagacgatctcagtcgataggcagcggctgacaactgttgggtcccggcggcccggaggcatgacttcaacctacggacgtacaccaatgtacggcagccagacacctatgtatggcagcggcagcaggacccccatgtatgggtcacagacaccccttcaagatggctctcggaccccgcactatggctcccagacaccactgcacgatggtagtcggactcctgcacaaagtggtgcatgggaccccaacaatcccaacacgcccagccgagccgaggaggagtacgagtacgctttcgacgacgagcccactccctccccccaggcatatggaggaacacctaatccccagacacctggatacccagatccctctagtcctcaagtgaatcctcagtacaacccacaaacacccggtactccggcgatgtataatacagaccaattttccccttatgctgccccttctccacagggatcataccagccctccccctctccacaaagctaccatcaagtcgcccctagcccggccggataccagaatacccactcacctgcaagctaccacccaacccccagccctatggcatatcaggcgtctccttcaccctctcccgtggggtactcaccaatgactccgggtgctcccagtcccggcggatacaatccacacactcctggaagcggcatcgaacagaacagtagtgattgggtgacaaccgacattcaggtcaaggtgcgggacacctatctggatacacaagtggttggtcagaccggggtgattcgctcagtcacaggtggaatgtgttctgtctacctcaaggattctgagaaggtggtgtccatctcttcggagcacctcgaacccattacccccactaagaacaacaaggtgaaagttatcctcggcgaggaccgggaggcaaccggcgtactgctctctattgacggagaggatggaatcgtgagaatggacctcgacgaacaactcaaaatcctgaacctccgctttttgggtaaactgttggaggcttag

SEQ ID NO: 136672 - DNA, 3264 bp, synthetic construct
  misc_feature 1..3264: note = Description of Artificial Sequence: Synthetic coding sequence
  source 1..3264: mol_type = other DNA
atgtccgatagcgaggacagcaacttttccgaagaggaagacagcgagagatcctcagacggggaggaggccgaagttgatgaagaaaggaggagtgcggcaggatcggagaaagaggaggaaccagaagacgaggaagaggaagaggaggaagaggaatacgatgaggaggaagaggaagaggatgatgatcgccctccgaagaaacccagacacggtggatttatcctggatgaggcagatgttgacgacgagtatgaggacgaggaccagtgggaagacggagcggaagacattttagagaaagaggagatcgaagcctcgaatattgataacgtggtacttgatgaggatcgcagcggcgcaagacgcctccagaatttgtggcgtgaccagcgggaagaagagctcggcgagtactacatgaagaaatacgctaaaagcagcgtcggagaaacagtgtacggcggatccgatgagctgtctgacgatataacccaacaacagctcctcccaggagtcaaggatcccaacctttggaccgtgaaatgcaaaatcggtgaggaaagagccacagccatttcgctgatgcgcaaatttatagcctaccaattcactgacaccccacttcagatcaagtctgtggtggcgcctgaacacgtgaaaggatacatttacgttgaagcttacaaacagacacacgtaaagcaagccattgagggtgtggggaacctgagacttgggtattggaaccagcaaatggtacccatcaaagaaatgacagatgtgttgaaggtcgtgaaggaagtcgcgaatctcaagcctaagtcatgggtccggctgaagcgaggaatctataaagacgatatagcacaggtggattacgtggagccttcccaaaacaccattagcttgaagatgattccaaggatcgactacgaccggatcaaggcccgcatgagtcttaaggactggttcgcaaagcggaagaaatttaaaaggcctccgcagcggctctttgacgctgaaaagatccgtagtcttggtggcgacgttgcttcagacggcgacttcctgatattcgagggtaataggtattcgcgtaaaggatttttgttcaagagttttgctatgtcggcagtaataacggaaggcgttaaacccaccctctccgagctcgaaaagtttgaggatcaaccggagggaatagacctcgaggtagtgacagagagcaccggtaaagagcgcgaacataattttcagcccggggataatgttgaggtgtgcgagggcgagctcatcaatctgcagggcaagatcctcagcgtggacgggaataaaatcactataatgcccaaacacgaggaccttaaggacatgctggaattccctgcacaggagttaaggaaatatttcaagatgggtgatcacgtcaaggtgattgctggccggtttgaaggtgacaccggcctcattgtccgagtggaggagaactttgtcatcctgttcagcgaccttacgatgcacgaactgaaagtcctgccccgggacttacagctgtgcagcgaaaccgcctcgggggttgacgtcggaggacagcatgagtggggagagcttgtgcagctagatccacaaactgtaggcgtaatcgtacgcctcgagagagaaacttttcaggtcctgaacatgtatggaaaggtcgtgaccgtgaggcaccaggctgtcactcggaagaaagacaacagatttgcggtcgccttggattctgaacagaacaatattcacgtgaaggatatcgtaaaggtgatcgacggtccacatagcggtcgagagggcgagattaggcatttgtttaggtctttcgccttcctgcattgcaaaaaactcgttgaaaatggtggtatgtttgtgtgtaaaacaaggcatcttgtgctggccggcggcagtaagccaagggacgttaccaacttcaccgttggcggtttcgccccaatgtcccctagaatttccagtcctatgcacccgagcgctggaggacaacgcggcggcttcgggtccccaggcggcggatcaggcggcatgtcccggggaagagggcggagggataacgaacttatcgggcagacagtgagaataagtcagggcccttataaggggtacatcggtgtagtcaaggacgccacggagtccactgcacgcgttgaactgcactccacttgccagaccattagtgtggaccggcaaagacttactacagtgggaagcagacggccaggggggatgaccagtacgtatggcagaaccccaatgtacgggagccagacacccatgtatggctcaggcagccgcactccaatgtacgggagccagactcctctgcaagacgggagccgcacgccccactatggttctcagactccactccacgacggttcacgcacgccggcacagagtggcgcttgggatcccaacaacccgaatacccctagcagggcagaggaggagtatgaatacgccttcgatgacgagccgactcctagtccccaggcttatggggggacccctaatccccagactcctggctaccctgacccaagtagtcctcaggtgaacccacagtacaatccccagacccctgggaccccggcgatgtacaataccgatcaattctccccctacgccgcacccagtccccaaggatcctatcagccttcacctagtccgcaaagttaccaccaagtggcgcccagtcctgcgggctaccagaatacccattctccagcttcatatcaccccactccttcacctatggcctaccaggcctcaccctccccttctccagtcggatactcaccaatgaccccaggcgctccatcccccggcggctacaatccccatacacccggatcgggtattgagcagaattcctctgactgggtgactaccgacatacaggtcaaggtgcgggacacctatctcgatacacaagttgtcgggcaaactggagtcatccggtctgtgaccggggggatgtgtagtgtgtacctgaaagacagcgagaaggtggtttcaattagcagtgaacatctcgagccgatcacgcctacaaaaaataacaaagtcaaggttatactcggcgaggatcgcgaggccaccggagtattgctgagtattgacggagaggacggaatcgtcagaatggacctcgatgagcagttgaaaattttgaacctcaggttcctcggaaaattactggaggcctag

SEQ ID NO: 136673 - DNA, 3264 bp, synthetic construct
  misc_feature 1..3264: note = Description of Artificial Sequence: Synthetic coding sequence
  source 1..3264: mol_type = other DNA
atgtccgattcagaagacagcaattttagcgaggaggaggactcagagcgcagttcggatggggaagaggccgaggtggacgaggagagacgctctgctgccggaagcgaaaaggaagaggaaccagaggacgaggaggaagaggaagaggaggaggagtacgatgaagaggaagaagaagaggacgacgaccgccctcccaagaagccacggcatgggggattcatcctggacgaggcagatgtcgatgacgagtatgaagacgaagatcaatgggaggatggtgcagaggatatcctcgagaaggaagaaattgaagccagcaacatcgataacgtcgtgctcgatgaggatcggtcgggcgctcgccggctgcagaatttgtggagagatcaaagggaggaagagctgggggaatattacatgaaaaaatatgcgaagtctagcgtgggggaaaccgtgtacggaggcagtgacgaactgtccgatgatattacacagcagcaactgctccccggcgtgaaggacccgaatctttggacagtgaagtgtaagataggcgaggagcgggcaacagccatcagccttatgaggaagttcatcgcctatcagtttacggatacccccctgcagataaaatccgtcgttgcaccagagcacgtgaaaggatatatctatgtggaagcttacaaacagacacacgtgaagcaggctatagagggagtggggaatttgcgtctcggttactggaaccagcaaatggtccctataaaggagatgactgacgtgctgaaggttgtcaaagaggttgccaatctgaaaccaaaaagctgggtgcgcctgaaaagggggatttataaggacgacatcgcccaggttgactatgtcgagcccagccagaacacaatctcactcaagatgatccccagaattgattatgaccgcatcaaagccaggatgtcattaaaggactggtttgcaaaaaggaagaagtttaagaggcccccccagaggctcttcgacgctgagaagatccgctccctggggggtgatgtggcttccgacggagattttcttatcttcgagggcaataggtactcgagaaagggctttttattcaaatctttcgcaatgtcggctgtgataacagagggtgtaaaaccaactctgtccgagctcgaaaaatttgaagaccagcccgaagggattgatttagaagtcgtgacagaaagcaccggcaaggagagagaacataattttcagcctggtgacaatgtggaggtgtgtgagggagagctgattaacctccaggggaagattttgagcgttgatggaaataagataactattatgcctaaacatgaagatttgaaggatatgctggaatttcccgcgcaggagctgagaaagtacttcaaaatgggagaccacgtgaaggtgatcgccgggcggtttgagggagatactggacttattgtgcgtgtggaagaaaactttgtgatcctttttagcgatctgaccatgcatgaacttaaggtattgcctagagatctgcagttatgtagcgagactgcctctggagtggatgtcggcggacagcacgagtggggcgagttagtgcaactcgatccccagacggttggcgtgatcgttcgcttggaacgcgagactttccaggtgcttaacatgtacggaaaggtcgtaacagtgcgacatcaagccgtcactcggaaaaaagacaacaggtttgcagtggcgctcgactccgagcagaataacatacatgttaaggatattgtgaaagttatagatggaccccactctggcagggagggcgagatacgtcatctgtttaggtcctttgcttttttgcattgcaaaaagctggtggagaacgggggcatgtttgtgtgcaagacaaggcaccttgtccttgccggtggctcaaaacctagagatgttactaacttcacagtcggtggctttgctcctatgtcgcccaggatctcttctcctatgcacccttctgctgggggacaacggggcggttttggcagcccaggcggggggagcgggggaatgtcacggggaagggggcggagagacaacgagctcatagggcaaactgtccggatttcacagggaccctacaagggctacatcggcgtagtcaaggatgcaaccgagtccaccgcccgggtcgaactgcattccacctgtcaaacgatttccgtggatcgtcaacggctcactacggtgggcagcagacggcccggggggatgacaagtacttacggccggacccctatgtatggatctcaaaccccaatgtatgggagcggcagcaggactccgatgtacggttcacagactcccctgcaggacggaagcaggactcctcactatggcagccagacccccttgcatgacggcagtcggacgccagcccagagtggcgcgtgggaccctaataatccaaacacaccgtccagagcagaagaggaatacgagtacgcatttgacgatgaacccactccctctccccaggcatacggggggactcccaatccccaaacaccgggctatccggacccctcaagtccacaagtgaatcctcaatacaatccgcaaacccccggcacacccgccatgtacaacaccgatcagttcagcccatatgcagctcccagtccccaggggagctatcagccttctccctcaccacagtcataccaccaggtggcacccagccctgcaggttaccagaatactcatagtcctgcaagctatcaccccacgcctagccctatggcctaccaggcatccccaagcccctctcccgttggatatagccctatgactcctggcgccccgtcgcctggaggatacaatccacacacaccagggtccggaattgagcaaaattcaagcgactgggtgaccacagacattcaggtgaaggtccgggatacatatctggacacgcaggtagtcggacagaccggtgtgattaggtcagtgacaggtggaatgtgtagtgtgtatctgaaggattcggaaaaagttgtgagcataagcagtgaacatcttgagccaattacccccaccaaaaataataaggtcaaggtcatcctgggggaagatcgcgaagctacaggagtactgctcagcatcgatggcgaggatggtatagtgcgcatggacctcgatgagcagctcaagatactcaacttacggttcttggggaaactgttagaagcatag

SEQ ID NO: 136674 - DNA, 5181 bp, synthetic construct
  misc_feature 1..5181: note = Description of Artificial Sequence: Synthetic coding sequence
  source 1..5181: mol_type = other DNA
atgtccgacttcgtggagagcgaggctgaggagagcgaagaggaatacaatgatgagggagaggtggtacctagagtaactaaaaaatttgttgaagaagaggacgacgacgaagaggaggaagaggagaaccttgacgaccaggacgagcagggaaatctcaaagggtttataaacgacgacgatgacgaggacgaaggggaggaggatgagggctcagactccggggatagcgaggacgacgtaggccataagaaaaggaagcgcaccagtttcgatgataggcttgaggacgatgacttcgatctcatagaagaaaacctgggggttaaggtgaagcgcggccagaagtaccgtcgggtaaagaagatgtccgatgatgaagatgacgatgaagaagaatacgggaaggaggaacatgagaaagaggcaatcgctgaggaaatcttccaggatggcgagggggaggaaggtcaggaagcaatggaagcccccatggcccctcctgaagaagaggaggaagacgatgaggagagtgacatagacgattttatagtggacgacgatgggcagcctctaaagaagcccaagtggaggaaaaaattgcccggctacacagacgccgccttacaggaggctcaggagattttcggagtagattttgactacgacgaatttgaaaaatataatgagtatgacgaagagcttgaggaggagtatgagtatgaggatgacgaggccgagggtgaaatacgtgtaaggcccaagaagacaactaagaagcgagtgagtagacgctccatcttcgagatgtatgagccttctgagttagaatcatcccaccttacagaccaggacaacgaaatcagagcaaccgacctgccagaacgctttcaactgcgttcgatcccagtaaaaggcgcagaagacgacgagctcgaagaggaagctgattggatttaccgcaatgcattcgccactccaaccatctcccttcaggagagttgtgattaccttgacagagggcagcctgcatctagcttcagcagaaaggggccctcaaccattcaaaagataaaagaggccttgggctttatgcgtaaccaacactttgaggtccccttcatagctttttacaggaaagagtacgtggagcccgagctgcacatcaacgatctctggcgtgtctggcagtgggatgagaaatggacacagctacgtattcggaaggaaaaccttacaaggctgtttgagaagatgcaggcttaccagtacgagcagatcagtgctgaccctgacaagcctctcgcggatggtatacgggccctcgataccacagatatggagaggctcaaggatgtacagtctatggatgagctaaaggacgtgtacaaccacttcctcctgtattatggccgcgatatcccaaagatgcagaatgccgcaaaggcttcaagaaagaagctgaagcgggtcagggaggagggggatgaggagggagaaggtgacgaagctgaggacgaggaacagcggggtcctgagctcaaacaagctagtcggagggacatgtacaccatctgccaatctgctgggttggacgggttggctaagaaattcggtctgacaccagaacagtttggcgaaaatcttcgtgattcctatcagcgacacgagaccgaacagttccctgcagagccactggaattggccaaggattacgtttgctcccagtttccaacccccgaggccgttctcgaaggcgcgcgctatatggtggctctccagatcgcccgagagccgctggtgaggcaagtgctgcgccagacttttcaggagcgagcaaaattgaatatcacacccacaaagaagggtcgaaaggatgtggacgaggcgcactatgcttacagctttaaatacctgaagaataagcccgtaaaggagcttcgtgatgatcagttccttaaaatttgcttggcagaagatgagggcctcctcacaaccgatatctccatcgacctgaagggcgtcgagggttacggaaacgaccaaacttatttcgaagagatcaagcagttttactacagagatgagttctctcatcaggtccaggagtggaatcgccagagaacaatggccattgagagggcgttgcagcaattcctgtatgtgcaaatggccaaagaattgaaaaacaagcttctggctgaggctaaggagtatgtcatcaaggcctgctcccggaaactttataactggcttagagttgctccctaccggcccgaccaacaggtggaagaggacgacgatttcatggatgaaaaccaggggaagggtatcagggttcttggaatcgcattctcatccgccagggaccatccagttttctgcgccctggttaatggcgaaggtgaggtgacagattttctcagactaccgcattttactaaacggagaactgcctggcgcgaagaagagagggaaaagaaagcccaggatattgagaccctgaagaagttcctgctgaacaagaagccgcatgtggttaccgtcgctggcgagaatcgagacgcgcagatgctgattgaagacgtgaagagaatcgtccacgagctcgaccagggacaacagctgtccagcattggagtggaattggtcgacaacgaactcgccatcctgtacatgaactcgaagaaaagtgaagcagagttccgcgactaccccccagttctgaggcaggccgtgtccttggcccgccggatccaggatccattgatcgagtttgcccaggtttgtagctcagacgaggatatcctgtgcctcaaatttcacccactccaggagcacgtcgtgaaagaggagctgctgaacgcgctctactgtgaattcataaacagggtgaacgaagtgggagtcgatgtcaaccgtgccatagcgcacccatattctcaggctctcatacagtatgtgtgtggccttggtccgcgaaagggaactcaccttctcaagattcttaagcaaaataacaccaggctggagtcccgcacacagttagtcaccatgtgtcacatgggacctaaagtgtttatgaattgtgccggctttctgaaaatcgacaccgcgtcactcggcgatagtacagactcctatattgaggttcttgacggctcgcgggtccatcctgagacctacgaatgggccaggaagatggccgtggatgctctggagtacgatgagtccgcagaggatgctaatcccgctggagctctcgaggaaattctggaaaatcctgagcgcttaaaggacctggatctggacgccttcgccgaggaactcgagagacagggctatggtgataaacatatcaccctgtatgatattagagcggagctctcatgcagatacaaggacctacggaccgcttaccgcagtcccaacactgaggagatatttaacatgctaaccaaggaaacaccagagactttttacattgggaagttaattatctgcaacgtgaccgggatcgcccataggcgtccccaaggcgagtcttacgatcaggcaattcgcaatgatgagacaggtctgtggcagtgccctttttgccaacaggacaattttccagagctaagcgaagtgtggaaccacttcgactccgggtcttgccccggccaggccatcggtgtgaagactagactggataatggcgtcaccggctttatacccaccaaattcctatctgacaaagtggtcaagcgccctgaggagagagtgaaggtagggatgactgtacattgcaggattatgaaaatagatattgaaaaattttcagccgacttgacgtgccgaaccagtgatctgatggaccgtaataacgagtggaagttgccaaaggatacatattatgacttcgacgctgaggccgccgaccacaagcaagaagaggacatgaagcggaagcagcagagaacgacatatataaaaagggtgatcgctcacccgtcatttcacaatattaacttcaagcaagcggaaaagatgatggaaaccatggatcaaggggacgtgataattcgaccatcatctaaaggtgagaaccaccttacggttacttggaaagtgtccgatggaatttaccagcacgttgacgtcagagaggagggtaaagaaaatgccttctcgttgggcgctactctttggattaactccgaggagtttgaggacttggacgagatcgtggcaaggtacgtccagccaatggccagcttcgcacgcgatttgctgaaccataagtactatcaggattgctcaggcggagatcgcaagaagcttgaggaattgctgattaagaccaagaaagagaaacccacatttataccttactttatttgcgcttgtaaagagttaccaggaaaattcctgttgggctaccagcctcgcgggaagccaagaattgaatacgtgactgtgaccccagaaggatttagatacaggggccagatctttcctaccgtgaacggcctatttagatggtttaaggatcactatcaagatcccgtaccgggcattacgccttccagttcctccaggaccagaaccccagcttctatcaatgcaacacccgccaatataaacctcgccgacctcaccagagctgtaaatgccctgccccaaaatatgactagccagatgttttcggcaatcgcagccgtgacagggcagggtcagaaccccaacgccactcctgcgcagtgggcgtcctcccagtacggatatggcggctctggtggtgggagctctgcttatcatgtttttccaacccctgcgcaacagcctgtggcaactccgttaatgactccctcatattcctacactacaccctcccaacccatcactacacctcagtaccaccagctgcaggcctctacaactccgcagagcgcccaggctcagccacagccaagcagtagttcgagacaacgacagcaacagcctaaaagtaattcccacgccgcgattgattggggaaagatggccgagcagtggcttcaggagaaagaggctgagagaagaaagcagaaacagaggctcaccccccggccctctcctagtccgatgattgagtcgactcctatgtcgatcgccggtgacgcaacgccgctactcgacgagatggacagatag

SEQ ID NO: 136675 - DNA, 2181 bp, synthetic construct
  misc_feature 1..2181: note = Description of Artificial Sequence: Synthetic coding sequence
  source 1..2181: mol_type = other DNA
atgagtgactttgtggaaagcgaggcagaggaatccgaggaggaatataacgacgaaggagaagtagtgccccgcgtaacaaagaagtttgtggaggaggaggatgatgatgaagaggaagaagaagaaaacctcgatgaccaagatgagcagggtaatctgaaggggtttatcaatgacgatgacgatgaggacgagggcgaagaggacgaggggtccgatagcggtgactccgaggatgatgttggtcacaaaaaaaggaaacggacttccttcgatgacagattggaagatgatgattttgatttgattgaagagaacctcggtgtgaaggttaaaagaggtcagaagtaccgacgcgtgaaaaaaatgtccgacgacgaagacgatgacgaagaggagtatggtaaggaggagcatgagaaagaggccatcgctgaggagatcttccaagacggcgagggagaggagggccaagaagctatggaggcccctatggcccctcccgaggaggaagaagaagatgacgaggagagcgatatcgatgattttatcgtagatgacgacgggcagccactgaagaaacccaaatggcggaaaaagctccccggatataccgatgcagcgctgcaggaagcgcaggagatttttggggtggacttcgactatgacgagtttgaaaagtacaatgagtacgatgaagagctggaggaagagtacgagtatgaagatgacgaagctgagggtgagatcagagtgagacccaaaaagacaactaaaaagcgcgtgagcaggcgctcaattttcgaaatgtacgaaccttccgagttagaatcctcccacctgacagatcaggacaatgagattcgtgctaccgacttgccagaaagatttcaactgaggtctatcccagtgaagggcgccgaggatgatgaactagaggaagaggcagactggatctatcggaatgctttcgccacacctactatcagccttcaagagagttgcgattacctcgaccgcgggcagccggcgtcctctttctctcggaaaggccccagcaccatacaaaagatcaaagaggcccttgggtttatgcgcaatcaacattttgaagtgcccttcatcgctttttatagaaaggagtacgtggagccggaactccacataaatgacctttggcgcgtatggcagtgggacgaaaagtggactcagttacggatccggaaggagaacctgacccgcttgttcgagaagatgcaggcttatcagtatgagcagatttctgctgatcctgataagcctctggcagacggaattcgggcccttgacacaacggatatggagcgcctcaaagacgtgcagtccatggacgaactgaaagatgtatacaaccactttctcctctattatgggcgagatataccgaaaatgcagaatgctgccaaagcgtctcgcaagaagctcaagagggtgagggaagagggggatgaggagggagaaggcgacgaggccgaagatgaagagcaaagaggccccgagttgaagcaggctagccgccgggacatgtatactatttgccaatctgccggtctcgatggcttggcaaaaaagtttggcctgacacccgagcagtttggagaaaacctgcgggatagttatcagagacacgaaaccgaacagtttcctgccgagccacttgagctcgctaaggactatgtgtgtagtcagttccccacgcccgaggccgttcttgaaggcgccagatatatggtcgcattgcagatagccagagagcccttagtccgtcaggtcttacgtcagacttttcaggaacgcgcgaagttaatgacccctagctatagttacaccactccaagccagcctataactaccccgcagtaccatcagctgcaggcaagcactaccccacaatcagctcaggcccagccacagcctagtagtagctccaggcagagacaacagcagccaaaaagtaatagtcacgccgccatcgactggggaaaaatggctgaacagtggttgcaagagaaagaggctgagagaagaaagcaaaaacagagactcactccgcggccatcccccagcccaatgatcgaatccactcccatgtctatcgcaggcgacgccacgccactgttagacgagatggatcggtag

SEQ ID NO: 136676 - DNA, 2361 bp, synthetic construct
  misc_feature 1..2361: note = Description of Artificial Sequence: Synthetic coding sequence
  source 1..2361: mol_type = other DNA
atgtcattcagtagagccctgctgtgggctaggctgccggctggtagacaggctggtcacagagcggcaatttgctcggctcttagaccacatttcggcccttttcctggagtactgggacaggtgtctgtgctggccaccgcctcgagttccgcatccggcgggtctaaaatcccaaacacctctttattcgttccgctcaccgtcaaacctcagggcccttccgcagacggtgatgtaggtgcagagcttaccaggccactcgacaagaatgaagtgaaaaaagtcctcgacaagttttataaacgtaaggagattcagaagcttggggccgactacgggctggacgcacgactgttccaccaggcttttatcagtttcaggaactatattatgcaatcccattctctggatgttgacatccacatcgtattgaatgatatctgtttcggggctgcacacgcagatgacctgtttcctttcttcctcaggcatgccaaacagatctttcctgtgttagattgcaaggatgatctacgcaaaatatctgacctgcgcattcctccaaactggtacccagatgcccgagccatgcagcgtaagattatttttcactcaggccccactaattctggaaaaacataccatgcaattcagaagtatttcagtgccaagtctggcgtttactgtggccctctgaagttgctagcccatgaaatcttcgagaaaagtaacgcggcaggtgtcccttgtgacctcgtcacaggagaagagcgcgtcaccgtgcagccgaacggaaaacaagcgtcgcatgtctcttgcaccgtcgaaatgtgttccgtcacaacaccttacgaagtggctgttatagatgaaatccagatgatccgtgacccggccagaggatgggcgtggacgagagccctgttaggactgtgcgctgaagaggtgcacttgtgcggagagcctgcagctatcgatctggtaatggagcttatgtatacaactggcgaggaagttgaagtgagagattataagcgattgacacccataagcgtgctcgaccatgctttggaatctctcgataatctgagaccaggggactgtatagtatgcttctctaaaaacgatatctacagtgtatctcggcaaatcgagatccgcggactcgagtccgcagtgatctatgggagcctgccacctgggaccaaactggctcaggctaaaaagttcaacgatcccaacgacccttgcaaaattctggttgccaccgatgcaataggcatgggacttaatcttagtatcaggaggatcatcttttacagcctgatcaaaccctcaataaatgagaagggggagcgtgaactggagcctatcactaccagccaggcccttcagatcgcggggcgggcaggccggttcagttcacggttcaaggagggagaagtgactactatgaatcacgaagatctgagtttgcttaaagaaatactaaagaggcctgttgacccgatcagagccgccggactccaccccactgctgaacagatcgaaatgtttgcctatcacctgccagacgccaccctatcgaacttaatagatatcttcgtggactttagtcaggtcgacggacaatatttcgtatgtaacatggatgacttcaaattctcagcagagttgatccagcacatacctttatccttgcgggtcagatatgtcttttgcacagcacctattaacaagaaacaacccttcgtttgctctagtctgctccagttcgccaggcagtactcccgcaacgagcctttgacctttgcctggttgaggagatatatcaaatggcccctgctaccacctaaaaatatcaaggacctcatggacttggaggcagttcacgatgtgttagatctctatttgtggctatcataccgcttcatggacatgtttccggacgcctccctgatacgagatctgcagaaagagctcgatggcatcatccaagacggagtgcataacatcacaaaacttatcaaaatgagcgaaacccacaaactactgaacctggaagggtttccaagcgggagccaatcccgtctgagtggtactctgaagtctcaggcaagaaggaccaggggcaccaaggcccttggctcgaaggccactgaacccccctcgccggacgctggagaattgagcttggcgtccaggttggtccagcaaggcttgcttacccccgatatgcttaaacagctagaaaaagaatggatgacacagcaaaccgaacacaacaaggagaaaaccgaaagtgggacacatcccaaaggtactcgccggaagaagaaagagccagacagtgattag

SEQ ID NO: 136677 - DNA, 792 bp, synthetic construct
  misc_feature 1..792: note = Description of Artificial Sequence: Synthetic coding sequence
  source 1..792: mol_type = other DNA
atgagcttcagcagagcactcctttgggctaggcttcctgcaggccggcaggcaggccatcgagctgcgatttgctcggcattacggccccattttggcccattccctggagtgctggggcaagtgtcagtgttggctacagcatcctcaagcgcaagcggcggctctaagatccccaacacatccctctttgtacctctgacagttaagccacaagggccatccgctgacggagacgtcggcgcggaattaactagacccctcgataaaaatgaggtcgccgtgattgatgagatacaaatgattagggatcccgcacggggatgggcctggacaagggcccttctgggattgtgtgcagaagaagtgcatctctgcggcgaacctgccgccatcgacctggtgatggagcttatgtacacgacaggcgaagaggtggaagttcgagactacaagaggcttaccccaatttcagtgctggaccacgccttagagtcccttgataacttgaggccaggagactgcatcgtgtgtttctccaagaacgacatatactcagtgagtagacagattgaaattagaggacttgagtccgccgtgatttacggaagcctgccccccggaaccaaacttgcccaggccaagaaatttaatgacccgaacgatccctgcaagattctggtggccactgacgccatcggaatgggcctgaacctaagtataaggcggataatcttttatagtctgatcaagccctctattaacgagaagggcgagcgggagctcgagtag

SEQ ID NO: 136678 - DNA, 1233 bp, synthetic construct
  misc_feature 1..1233: note = Description of Artificial Sequence: Synthetic coding sequence
  source 1..1233: mol_type = other DNA
atggcagccgtaggagcagaagccagaggagcttggtgcgtgccctgcctggtatccctggacactttacaggagctgtgcaggaaagaaaaactgacttgcaagtcaatcggcattaccaagagaaacctcaacaattatgaggtcgaatacctgtgtgactacaaggtggtcaaagatatggaatactacctcgttaagtggaaggggtggccggacagtacaaacacatgggaacccttgcagaatctgaagtgccccctcctgctacagcagttctcgaatgataaacacaactacttatcgcaggtgaagaaagggaaggctatcactccgaaggacaacaataagacactcaaacctgcaatagccgaatatattgtaaaaaaggcaaagcagcgaattgccttacagcgctggcaggatgagctgaataggcggaagaaccacaaagggatgatttttgtggaaaacaccgtggatctggaggggcccccgtctgacttttactacatcaatgaatataaaccagccccaggtatttccctggtcaacgaggcaactttcggatgcagctgtacagattgcttcttccagaagtgctgccctgccgaagctggagtgcttttggcatacaacaaaaaccagcagatcaagatcccccccggaactcctatctatgagtgcaactcaagatgccagtgtggacccgattgccccaaccgcatcgtccagaagggaactcagtacagtctgtgcattttccgaaccagcaatggtagaggatggggagtgaaaacccttgtcaaaataaagaggatgtcctttgtcatggagtatgttggcgaagtcatcacgtcggaagaagcagagagacgaggccagttttacgataataagggtataacctatttgtttgatctggattacgagtcagatgagttcacggtggatgcagcccgttacggcaacgtgtcacactttgtgaaccatagctgcgaccctaaccttcaagtgtttaacgtgtttatagacaatttggatacccgccttccccgaatcgccctgttctctacgagaaccatcaacgcaggagaagagctgacattcgactatcagatgaaaggctcaggcgacatttcctccgactctatcgatcacagccccgccaagaagcgggtgagaaccgtttgcaagtgtggggcggtgacctgtaggggctatttgaactag

SEQ ID NO: 136679 - DNA, 693 bp, synthetic construct
  misc_feature 1..693: note = Description of Artificial Sequence: Synthetic coding sequence
  source 1..693: mol_type = other DNA
atggccgccgtcggggctgaagcccgaggcgcctggtgcgtgccttgcctcgtcagcctcgacaccctccaggagctctgtcgaaaagaaaagcttacctgcaaaagtatcggcatcaccaagcgcaacttgaataattatgaggtcgagtacctgtgtgactacaaggtcgtgaaggacatggaatactacttggttaagtggaaaggctggccggactcaaccaatacctgggaaccactacagaatttgaagtgccccctgttacttcagcagtttagcaacgacaaacacaattacctgtctcaggtgattacatccgaggaggctgagcgccggggacagttttatgataataagggtataacgtaccttttcgacctagactacgaaagcgacgaatttacggttgacgctgcccgatacgggaacgtgagtcattttgtcaatcatagctgtgaccccaacctgcaggtgttcaacgtgttcatcgataatcttgatacacgactaccaaggattgcactgttcagtacacggaccatcaacgcgggcgaagagctcacttttgattaccaaatgaaaggatctggagacatcagtagcgacagtatagaccacagtccggcaaaaaagcgcgtccgaaccgtatgcaaatgtggagccgtcacttgtcgcggatacttaaattag

SEQ ID NO: 136680 - DNA, 459 bp, synthetic construct
  misc_feature 1..459: note = Description of Artificial Sequence: Synthetic coding sequence
  source 1..459: mol_type = other DNA
atggagtattatttggtgaaatggaaaggctggcccgacagtactaatacatgggagcctttgcagaatctaaaatgccctctgctgctccagcagttttctaacgacaagcacaattaccttagccaggtgatcacgagtgaagaggccgagaggagaggccagttctacgataataagggcattacctatctgtttgacctggactacgaaagcgacgaatttactgttgatgcagcgcgctatgggaatgtgtctcacttcgtcaaccactcttgcgatccaaacttgcaggtgttcaacgtgttcattgacaacctggacacccgactgccacggatagccttattcagcactagaacaattaacgctggcgaggagcttacctttgattaccaaatgaagggatctggagacattagctccgattcgatcgaccattcacccgcgaagaaatag

SEQ ID NO: 136681 - DNA, 1053 bp, synthetic construct
  misc_feature 1..1053: note = Description of Artificial Sequence: Synthetic coding sequence
  source 1..1053: mol_type = other DNA
atggaatactacctggtcaagtggaagggctggcctgattctacgaacacatgggaacctctgcagaacctgaaatgcccattactgcttcagcagttctcaaacgataagcataactacctgtcccaggtgaagaagggtaaagcgatcactccaaaggataacaataagactcttaagcccgcgattgccgagtatattgtaaagaaagctaagcagcgcatcgccctgcagaggtggcaggatgaactgaacaggaggaagaaccataaagggatgatctttgtagagaacaccgtggacctggaaggccctccttccgacttctattatataaacgagtacaagcctgctcctggaattagtctcgtgaatgaggcaacattcggatgctcctgcactgactgcttcttccagaaatgttgcccagccgaagccggggtgcttctcgcatacaataaaaaccagcaaatcaaaattccccccggtacaccaatttacgaatgtaactcccgatgccagtgtggccctgattgtccaaaccgtattgtccagaaaggaactcaatactcgctgtgtatcttccgcacgagtaatggacgcggctggggcgtaaagactctggtgaagataaaaaggatgtcctttgtgatggagtacgttggcgaagtgatcacatctgaagaggcagagagacggggtcagttttatgataacaaggggattacctatctctttgaccttgattacgaaagcgatgaattcaccgttgatgccgcaaggtatggcaacgtttcgcatttcgtaaatcactcttgcgaccctaatttgcaagtcttcaatgtgtttattgacaatctggatacaagacttccacggattgccctattcagcaccagaaccatcaacgccggtgaggagcttacattcgactaccagatgaaagggtctggcgatatttcctcagatagcatcgaccactctcctgctaagaagagagtgcggacagtgtgtaagtgcggcgcagtcacatgccgcggatatcttaattag

SEQ ID NO: 136682 - DNA, 2658 bp, synthetic construct
  misc_feature 1..2658: note = Description of Artificial Sequence: Synthetic coding sequence
  source 1..2658: mol_type = other DNA
atgaaatggctgggcgagtctaaaataatggtagtcaatggcagaaggaacgggggcaagctctcgaacgatcaccagcagaaccagagtaagctacagcacactggcaaagatacactaaaggcaggcaaaaacgcggtggagaggcgaagtaaccgatgcaatggaaatagcggattcgaagggcagagtcgttatgtgcctagctcagggatgagtgccaaggagctttgtgagaacgacgacctggccactagcctggtattagatccttatctaggcttccagacacataagatgaatacatccgctttcccatccaggtcttcaagacattttagcaagtcagatagtttcagccacaataaccctgtccgatttagacccatcaaagggcggcaggaagagttgaaggaagtgatcgagcgtttcaaaaaagacgaacacctggagaaagcgtttaagtgcctgacatctggcgagtgggctagacattatttcttaaacaaaaacaagatgcaggagaagctgttcaaggagcatgtgttcatttacctcaggatgttcgctacagacagtggctttgaaatcctaccgtgcaatcgctactcctccgaacagaacggggcaaaaatcgtggcaactaaggaatggaagaggaacgataagattgaactgcttgtggggtgtatagctgaactctctgagatagaggaaaatatgttgctcaggcacggtgagaacgattttagcgtgatgtacagcacccggaagaactgtgcacaactgtggctgggccctgcagcatttattaaccacgactgtcgtccaaattgtaaattcgtgtccactggcagagatacagcatgtgtaaaggccctccgcgatatagagccaggagaggaaatcagttgctattatggggatggctttttcggcgagaacaacgagttctgcgagtgctacacttgcgaacgcagaggaacaggagcctttaagtcacgggtcggcctccctgcaccagcccctgttatcaactcaaaatacgggctgagagaaaccgacaaaaggctcaaccggttgaaaaagctgggagacagtagcaagaacagtgactcccagtccgtgagctctaacactgacgcggataccacacaggagaagaataacgctacttccaataggaagtctagcgtcggagtgaaaaaaaacagtaagtccagaacactgactaggcagtccatgtccaggatacctgcttcctccaactcgacaagctcgaaacttactcacattaataacagcagagtgccaaagaaactgaaaaaaccggcaaagcctctgctgtccaagatcaagctgcgtaatcattgcaaaagattagagcaaaagaatgctagccgaaaactggaaatggggaatttagtgctcaaagagcctaaggtggttttgtacaagaatttaccaatcaaaaaagataaagagcccgaaggtcccgcacaagccgccgtcgctagtgggtgtctcacacggcatgccgcccgagaacataggcagaatcctgtgagaggagcccatagccagggagagtcatcaccctgtacatacatcaccaggaggtccgttcggacgaggaccaacttaaaagaggcttccgacataaaattagaacccaacactttaaacggttataagtcctccgtcactgaaccctgtcctgactccggagaacagctgcaacctgcacccgtgctccaggaagaggaactcgcccacgaaactgcacagaagggagaggccaagtgccacaaatccgacacaggtatgtcaaagaagaagtctagacaggggaagctggtgaagcagttcgcaaaaatcgaagaatcgactccagttcacgactccccaggcaaagacgacgcagtcccggatctgatggggcctcatagtgaccagggagagcactcaggaaccgtcggcgtgccagtatcttatacagattgcgcaccctcccctgtgggctgctcagttgtcacctctgacagctttaaaactaaagactctttccgcaccgcaaagagcaagaaaaaaaggaggattactcgatacgacgcacaattgatcctcgagaataattctggaattcccaagctcactctccgccgaaggcacgacagcagctctaagacgaatgatcaagagaacgacggaatgaattcctcaaagatcagcataaagctgtcaaaggatcacgacaacgataacaatttgtatgtagccaaacttaacaacggcttcaactcgggctccgggtcatcgtccactaagctgaaaatccagttaaaacgcgatgaagaaaacagagggtcctatactgaaggcctgcatgaaaacggggtgtgctgcagcgatcctctcagtctcttggagtccaggatggaagtcgacgattactcacaatacgaggaggagagcaccgatgactcctcatctagcgagggcgatgaagaggaggatgactacgatgatgacttcgaagacgattttatccccctgcctcccgcaaagcgccttaggttgatagtggggaaggattctattgatattgacatcagcagccgcaggcgggaggaccagtctctccgccttaacgcttag

SEQ ID NO: 136683 - DNA, 1182 bp, synthetic construct
  misc_feature 1..1182: note = Description of Artificial Sequence: Synthetic coding sequence
  source 1..1182: mol_type = other DNA
atgaagtggttgggtgagtccaaaatcatggtggtcaacggacggcgaaatggcgggaagcttagcaatgaccatcagcagaaccagtctaagctgcagcacactggtaaggacactctgaaggctggaaaaaatgccgttgaacggcgaagcaatagatgcaatgggaactctggcttcgaggggcagtctaggtacgtcccttcatctggaatgtccgctaaggagctgtgtgagaatgatgacttggccacttcactggtcctcgacccctatctgggattccagacccataagatgaacacgagtgcatttcctagcagaagctcacggcacttttctaagtctgactcgttctctcataataaccccgttcgttttcggcccatcaagggacgtcaggaggaactgaaagaggtgatcgagcgcttcaagaaggacgagcacctggagaaggcctttaaatgccttacctccggagagtgggcccgccattacttccttaataaaaacaagatgcaggagaaactgttcaaggaacacgttttcatttatctgcggatgtttgcaactgatagtggcttcgagattcttccatgtaatcggtacagttcagagcagaatggagccaaaattgtggcaacaaaggaatggaagaggaatgataagatcgaactgcttgtggggtgtatcgcagagctgagcgaaatcgaagagaatatgctgcttcgccacggtgaaaacgatttttcagttatgtacagtacgcgaaagaactgtgctcagctgtggctggggccagcggcttttattaatcatgactgtaggccaaactgtaagttcgtgagtacaggcagggacacggcctgtgtgaaagcactgcgggacatcgagcccggtgaggaaatttcctgttattacggtgatggcttctttggtgagaacaatgagttctgtgagtgctacacgtgcgagcggcgtgggacgggcgctttcaaaagtagggtgggtctgcctgctcccgccccagtgattaattctaagtatggattacgcgagactgacaaaaggctgaatcggctcaaaaaactcggggattcatctaaaaattctgacagccagagcgtgagtagcaacaccgatgcagatacaacccaagagaaaaataacgcctcaaaatag

SEQ ID NO: 136684 - DNA, 1182 bp, synthetic construct
  misc_feature 1..1182: note = Description of Artificial Sequence: Synthetic coding sequence
  source 1..1182: mol_type = other DNA
atgaagtggctgggagaatccaaaattatggtcgttaacggcaggcggaatgggggcaaactgtccaacgaccaccaacagaaccaatctaagctccagcatacaggcaaggacacacttaaggccggcaagaacgccgtggaacggcgttctaatcggtgcaacgggaattcaggctttgaaggtcagtcgcgctacgtgccgagcagcgggatgtccgccaaggagctgtgcgagaatgatgatctggctacgagtctcgtcctagatccctacctcggatttcagactcataagatgaacaccagcgctttcccttcgcgctcaagcaggcacttttctaaatctgacagtttctctcataacaacccagtgcggtttcggcctatcaagggaaggcaggaggagctgaaggaggtaatcgaacgatttaagaaggacgaacatcttgaaaaggcctttaaatgccttactagcggcgaatgggctcggcattatttcctgaataagaacaaaatgcaggaaaagctgttcaaggagcacgtatttatttatcttagaatgtttgccactgactccggtttcgagatactcccttgtaatcggtattccagcgagcagaacggtgccaaaatcgtagcaacaaaagagtggaagcgcaatgacaagattgaactcctcgtcggctgtatcgcggagttgagcgagatagaggaaaatatgctcttgcggcatggagagaatgacttttcagtgatgtattccacaagaaagaattgtgcccagctttggctaggcccagccgcttttatcaatcacgactgtcggcctaactgtaaattcgtttctacagggcgggataccgcatgcgtgaaagctctgagagacatcgaacctggagaggaaatctcttgctattatggcgatggcttttttggggagaacaacgaattctgcgaatgctacacttgtgagcgtaggggaacaggcgcattcaaatcccgcgtgggcttgccagccccagcaccagtgatcaattccaaatatggacttcgggagactgacaaacgactaaatcggttgaaaaaattgggggattcctcaaagaattcagactcccaatcagtctcctctaatacggacgccgacaccactcaagaaaaaaacaatgccagcaaatag

SEQ ID NO: 136685 - DNA, 357 bp, synthetic construct
  misc_feature 1..357: note = Description of Artificial Sequence: Synthetic coding sequence
  source 1..357: mol_type = other DNA
atgaagtggcttggagaaagtaagatcatggttgtgaacggccgcaggaacgggggcaaactgagtaacgaccaccagcagaatcaatctaaattgcagcacaccggaaaggacaccctgaaagctgggaaaaacgccgttgaaaggaggtcaaatagatgcaatggcaattctgggttcgaaggtcagtccagatacgtaccatctagtggcatgtccgccaaggagctgtgcgaaaatgacgaccttgctactagcttagtactggacccatacctcggctttcagactcataaaatgaacacaagcgccttcccttctcgatcctctagacacttcagcaagtccgatagctag

SEQ ID NO: 136686 - DNA, 1389 bp, synthetic construct
  misc_feature 1..1389: note = Description of Artificial Sequence: Synthetic coding sequence
  source 1..1389: mol_type = other DNA
atgggacctgatagggttacagcccgagagctgtgtgagaacgatgacctggctacctcattagtgctcgatccttatctagggttccgcacccataaaatgaatgtgtcacccgttcctcccctgaggcgacagcagcacctgcggtctgcacttgagacgttcctcaggcagcgggatctggaggctgcatatagagctctgaccctcggcggctggacagcccgttactttcagagcagaggccctagacaggaagcagcccttaaaacccacgtatacagatatctacgcgccttcctccctgaatcaggctttaccattctcccgtgcactcggtattctatggaaactaatggtgcaaagattgttagtaccagagcgtggaagaagaacgaaaaactcgagcttttggttggttgtatcgcagagctgagggaagctgatgaaggcctcttgcgagccggtgaaaacgatttttcgatcatgtactctaccagaaagagatcggcgcagctgtggttgggacccgcggcatttataaatcacgactgtaagccaaattgtaagtttgttccagcagacggcaatgcagcctgtgtcaaagtgctccgggacatagagcctggagacgaggttacctgcttctacggcgaaggtttctttggggaaaagaacgagcattgcgaatgccacacatgtgaacgcaaaggggagggagcattccgcacccgtccccgagaaccagccctgcctccacggccactggacaagtaccagctgcgggagaccaagagacggctgcagcagggacttgacagcggttccagacaggggctgttaggcccccgagcgtgtgttcacccctctccacttcgcagagatccattctgcgctgcttgccagcctttgcgcctgcccgcatgctccgcacgcccagatacctcccctctgtggctgcagtggttgcctcagccacagccaagggtgcgtccaagaaagcggcgccgacctcgcccacgtcgggcccctgtgctcagcacccaccacgccgcccgcgtttcattgcaccggtgggggggttgtgggccacattgccggctgcggggggaggcgctggtggccctgggccagccacctcacgctcggtgggctcctcagcaggactggcattgggctcggagatacgggctgccatatgtcgttcgggtcgaccttaggcggctcgccccagcccctccagcgacacccgctccagcaggaacaccaggacccatcctaatcccgaagcaagcgctcgccttcgctcccttctctccacctaaaagattgcgacttgtagtgtcacacggtagtatcgacttggatgtcggtggggaggagctctag

SEQ ID NO: 136687 - DNA, 390 bp, synthetic construct
  misc_feature 1..390: note = Description of Artificial Sequence: Synthetic coding sequence
  source 1..390: mol_type = other DNA
atgcccagacggggccggtggctgtcctgcagcccagaagcggagggtataagaagagtaggtagccgtgccgccttgagagtacatccattagagcaccgcccccgatggggtactccaggaggcatgacaaaaggatcccgtttcctcgcaccggagtccgagctgtcttgggggcccggcgacgcaacccccggcctttggtttttcattagtgacggggtcggcgaggacctgtggaattccgctggctggagttcggtgccagagggatttggacaacgcatgagaggtccaggcctgacgccccacacagatgcagggggcgatggcaacaaaaggaggcactctgaacggctgtgcagagcatctgtcctccaacccccatag

SEQ ID NO: 136688 - DNA, 744 bp, synthetic construct
  misc_feature 1..744: note = Description of Artificial Sequence: Synthetic coding sequence
  source 1..744: mol_type = other DNA
atgcacctggcgcgactcgtgggatcatgttccctgttgctccttctgggcgccctgtccgggtgggccgcatccgacgaccccattgaaaaagtgattgaaggtatcaatagggggctgtcaaatgcagaacgcgaagtgggaaaggctttggacggcatcaatagcggcatcactcacgccggacgagaggtggaaaaagtgtttaacggactctcaaatatgggttcccataccgggaaagaactggataagggggttcagggactgaatcatggaatggataaagtggcccatgagattaatcatggtattgggcaggcaggcaaagaagccgagaaactcggacacggagtgaacaacgccgctggtcaagcagggaaagaagctgacaaggccgtgcagggctttcacaccggtgtccatcaggcgggcaaagaggccgaaaagctgggacaaggcgtcaatcacgcagctgaccaggccggcaaggaggtggagaagcttggtcaaggtgcccatcatgctgcgggacaggccggcaaagagctgcaaaacgcccataacggcgttaaccaagcctcaaaggaagctaatcaactccttaatggcaatcaccagagtggatctagttcccatcaggggggggcgacaaccacgcccctggctagcggggcttcagtgaataccccattcattaacctgcctgcactgtggagatccgtggccaacatcatgccttag

SEQ ID NO: 136689 - DNA, 1773 bp, synthetic construct
  misc_feature 1..1773: note = Description of Artificial Sequence: Synthetic coding sequence
  source 1..1773: mol_type = other DNA
atgcatctcgccaggctggtggggagctgcagcctcctgctcctacttggagccctgtcgggctgggcagcctccgatgatcctatcgaaaaagttattgaagggatcaaccggggtctcagcaacgctgagagagaagtgggcaaggccctggacggaatcaattccgggattacacacgccggtagggaagtggaaaaggtctttaacggtctttcaaatatgggctctcacactggtaaggagttggataaaggggtgcaggggctgaaccatggaatggataaggtcgcccatgagattaatcatggaataggccaagcaggcaaagaagctgagaagctgggccacggtgtgaataatgcggccgggcaagtggggaaggaagccgacaagctgatccaccacggggtgcatcacggagcaaaccaggcggggtccgaggcaggcaaattcggacaaggggtggacaacgctgcaggtcaggctggtaacgaagcgggccgtttcgggcagggagtacatcatgccgcagggcaagccgggaatgaggcagggcgatttggccagggcgtacatcacgcggctggtcaggccgggaacgaagcaggccggttcggacagggcgcacatcacgggctgagcgaaggctggaaggagaccgaaaagtttggccaggggatccaccacgccgccggacaggttggcaaagaggccgaaaaattcggtcagggtgcccaccatgcggcaggtcaagcaggaaacgaggcaggtcgtttcggacagggtgtacaccatggcctgagcgagggctggaaggaaacagaaaagttcgggcaaggagtccaccacacagcaggccaggtaggtaaggaggcagagaaatttggccaaggggcccatcatgccgccgggcaggctggcaatgaggccggtcgatttggccaaggcgcacaccacgctgctggacaagcaggaaacgaggccggtaggttcggacaaggggtccatcatggtttgtcggaaggctggaaagagacagaaaaattcggccagggggtacatcatgccgcttcacagttcggaaaagagaccgagaagttagggcatggcgtgcaccacggagtgaatgaggcctggaaggaggcagagaaatttggtcaaggcgttcaccacgcagcaagccaggtggggaaggaggaggaccgggttgtacaaggcctccatcatggcgtcagccaagccggaagagaggcaggccagtttggtcacgacattcatcataccgcgggacaggccggcaaggagggggatatcgcggtgcatggagtccaaccaggcgtgcacgaggccgggaaagaggccggccagttcggtcagggagtgcatcatacccttgagcaggccggaaaagaagccgacaaggccgtgcagggatttcatactggagtgcatcaggccggaaaggaggctgagaagttgggccagggtgtcaatcacgctgccgatcaggccgggaaagaagtggaaaaactcggccagggagctcaccatgccgctggacaggccgggaaggagcttcagaatgcgcataatggggtgaatcaggcttctaaggaggcgaaccagctcctgaacggcaatcatcagtcaggaagctcttctcatcaggggggcgccacgaccactcccctggcaagtggggcctctgttaatacacccttcattaatctgccagccctgtggaggagcgtggccaatataatgccctag

SEQ ID NO: 136690 - DNA, 288 bp, synthetic construct
  misc_feature 1..288: note = Description of Artificial Sequence: Synthetic coding sequence
  source 1..288: mol_type = other DNA
atgggctcccacaccgggaaggagctcgacaaaggggtccagggactgaaccacggcatggataaggtcgcgcacgaaataaatcatggcattgggcaggctggtaaagaagccgaaaagttgggccatggagtgaataacgccgccggacagggcaatcaccagagtggctccagttcacaccagggtggcgcgaccaccactcccctggctagcggcgcctccgtgaacacacctttcatcaacttacctgccttatggcggagcgttgctaacatcatgccttag

SEQ ID NO: 136691 - DNA, 738 bp, synthetic construct
  misc_feature 1..738: note = Description of Artificial Sequence: Synthetic coding sequence
  source 1..738: mol_type = other DNA
atgtggttatgtcccctggccctgaatttaatattgatggcagccagtggagcagtctgtgaagtgaaagatgtttgcgtcgggtcccctgggatccctgggaccccaggtagccacgggctgcccggtagagacggaagagatggcttaaagggggatcctggccccccgggcccgatgggaccaccaggcgagatgccttgtccgccggggaatgacggcctgcccggcgcaccgggaatacccggtgagtgcggagagaaaggagagcctggcgagcggggaccacctggcttgcctgcccatctggacgaggaactccaggcaactctgcatgattttcgccaccaaatactgcaaacgcgtggggctctgagccttcaggggagcattatgactgtcggagaaaaagtcttttcaagcaatggacagagcatcacgttcgacgccatccaagaagcatgcgcacgcgcaggcggtaggatcgcggtacctcgcaaccccgaggagaacgaggctatcgcctctttcgtaaaaaagtacaacacttacgcctatgtggggctcacagagggaccgtctccaggggactttagatattcagatggcacccctgtgaactacaccaactggtatagaggcgagcccgcaggccgcgggaaagaacaatgcgtggagatgtacactgatggacagtggaatgaccgcaactgcctatactcccgactgaccatctag

SEQ ID NO: 136692 - DNA, 570 bp, synthetic construct
  misc_feature 1..570: note = Description of Artificial Sequence: Synthetic coding sequence
  source 1..570: mol_type = other DNA
atggggcctccaggtgaaatgccatgcccccccggcaatgatggactgcccggagcccctggcattcccggcgagtgcggcgagaaaggagaacctggcgagaggggaccgccgggacttcctgcacacttggacgaagagttgcaggcaaccctgcacgactttcggcaccaaatattacaaacgagaggcgcgcttagcttacaaggtagcatcatgacagtcggggaaaaagttttctcaagtaatgggcagtcgattacctttgacgcaatccaagaagcatgtgctagagctggggggcggatcgcagtgcctagaaatcccgaagagaatgaagctatcgcaagcttcgtaaaaaagtacaatacctatgcgtatgtcggactgaccgagggtccaagtccaggggacttcagatatagcgacggcacacccgtgaactacacaaactggtatcgaggggagcccgctggcaggggaaaagagcaatgtgtagaaatgtacactgatggccagtggaatgaccggaattgcctgtacagccgactgaccatctgcgaattttag

SEQ ID NO: 136693 - DNA, 747 bp, synthetic construct
  misc_feature 1..747: note = Description of Artificial Sequence: Synthetic coding sequence
  source 1..747: mol_type = other DNA
atgtggctttgccccctggccctgaacctaatcctgatggctgcttccggcgccgtgtgcgaggtgaaggatgtttgtgtgggctccccaggcattcctggcacgccaggttcacatggactcccgggacgggatgggcgcgatggcttaaaaggtgatcctggaccgcctggaccaatgggacccccaggcgagatgccatgcccaccaggaaatgacggcttgcccggggcccccgggatacccggcgaatgcggggagaagggtgagcctggagaacgtggtcctccgggactcccagctcaccttgacgaggagttgcaggccactcttcacgatttccggcaccagattctacagacaagaggcgccctcagtcttcagggaagtattatgaccgtcggcgagaaggtgttctcctccaatggacagagcataaccttcgatgctattcaggaagcctgtgcacgggcaggcggcagaatcgctgtacccagaaatccagaggaaaacgaggccatcgcatcgtttgtgaagaagtacaacacatatgcatatgtggggttgacagagggacctagtcctggtgattttaggtactctgatggtaccccagtcaattacacaaattggtaccgaggcgaacccgcgggtaggggtaaagagcaatgcgttgagatgtacaccgatggacaatggaatgaccgcaactgtctctatagcaggttgactatctgcgagttctag

SEQ ID NO: 136694 - DNA, 747 bp, synthetic construct
  misc_feature 1..747: note = Description of Artificial Sequence: Synthetic coding sequence
  source 1..747: mol_type = other DNA
atgtggttatgccctttagctttgaatctgatcctgatggccgccagcggcgctgtttgcgaggtaaaagatgtgtgtgtcgggtcacctggaatccccggtacccctgggtctcacggattaccaggcagggatggccgagacgggttgaaaggagatcctgggcccccagggcctatggggcctcccggggaaatgccttgtccacccggtaacgacgggttacctggagctcccgggatccctggagagtgcggggagaagggcgaacccggtgaaagaggacccccagggttgccagcgcatctggatgaggagctccaagcgacactacatgacttcaggcaccagattttgcagacacggggggctctaagccttcaaggctctatcatgactgtcggcgagaaggtgttctcctctaatgggcagagtattacatttgacgccatccaggaggcctgtgccagggcgggcggacggatcgccgttcctagaaaccctgaggaaaatgaggcgatcgcgtcttttgtgaagaagtataatacctacgcatacgtgggactgactgaaggcccatctcctggagatttccgttatagtgacggcaccccagtcaattacacaaactggtatagaggcgaacccgctgggcggggcaaggagcagtgtgtggagatgtataccgacgggcagtggaatgatcgtaactgcctctactcacggttgaccatttgcgaattttag

SEQ ID NO: 136695 - DNA, 792 bp, synthetic construct
  misc_feature 1..792: note = Description of Artificial Sequence: Synthetic coding sequence
  source 1..792: mol_type = other DNA
atgagaccatgtcaggtgcccggtgccgctaccggccctagggccatgtggctttgtccactggctctcaatctgattttaatggcagcgagtggcgccgtttgtgaggtgaaggacgtctgcgtcggcagccccgggatccccgggacccctggaagtcatggcttacctggccgagacggccgagacggattgaagggagacccagggccgcctggccctatgggcccaccaggagaaatgccatgccctcctggcaacgatggcctccctggtgcccctgggataccaggagaatgtggtgagaaaggcgagcctggggaaagaggaccgccggggctccctgcccatctcgatgaggagcttcaagcaaccttgcacgattttcgtcaccagatcctccagacacgcggcgcactgagcctgcagggctcgattatgactgtgggcgaaaaagtcttttcctcgaacgggcaatccattactttcgacgccattcaggaggcgtgtgctcgtgctggcgggagaatagccgttccacgcaaccccgaggaaaacgaagcaatagcatcttttgtcaagaaatacaatacttacgcttatgtgggcctaaccgaggggccctcccctggagattttagatacagcgatgggacccccgtgaattacactaactggtaccggggcgagccagctggccgggggaaagagcagtgcgtcgagatgtacacagacggccagtggaacgaccgaaattgcctgtactcccgcctgacgatctgtgagttttag

SEQ ID NO: 136696 - DNA, 747 bp, synthetic construct
  misc_feature 1..747: note = Description of Artificial Sequence: Synthetic coding sequence
  source 1..747: mol_type = other DNA
atgtggctttgccccctggccttgaacctgattcttatggccgctagtggcgctgtttgtgaagtgaaagacgtgtgcgtaggctctcccggaatacctggcactcccggatcacacgggctgccaggtagggacggtcgcgacggcctgaaaggcgaccccggaccacctggacccatggggcctccaggtgaaatgccctgtccgcctggtaacgacggcctacccggcgcgcctggaatacctggcgagtgtggggagaagggagagcctggagaaagaggcccccccgggctcccagcccacctggacgaagagcttcaggccactctgcacgatttcagacatcagatcttgcagacacggggcgcactgagtctgcaggggagtataatgactgtgggagagaaagttttctctagtaacggtcaaagcatcacgttcgatgcaatacaggaggcatgcgccagagccggtgggcgcatcgccgtccctagaaacccagaagaaaatgaggcaatcgcttccttcgtcaagaagtataacacgtatgcctatgttgggctgacagaggggcctagcccaggggacttcaggtactctgacggaacaccggttaattatactaactggtatcggggagagcccgccggccgaggcaaggagcagtgcgttgagatgtatactgatggacagtggaatgaccggaattgtttatactcccgtctgaccatttgtgaattctag

SEQ ID NO: 136697 - DNA, 477 bp, synthetic construct
  misc_feature 1..477: note = Description of Artificial Sequence: Synthetic coding sequence
  source 1..477: mol_type = other DNA
atgtggttatgtccccttgccctgaacctgatcctgatggcagcatctggcgccgtctgtgaagttaaagacgtgtgcgtcggctctcccggcatccccgggacaccaggttcacatgggctccctgggagagatggccgcgacggactcaagggcgaccccggtccaccaggacctatgggtccaccaggagagatgccatgtccccctggtaatgacggcctgccaggggcacctggaatacccggcgagtgtggcgagaagggggaacccggagagagaggtccacccgggctaccagcccacctcgatgaagagctgcaggccaccctgcatgattttcgccaccagattttgcagactcgcggagctctgtccttacagggaagtattatgaccgtcggggagaaagtcttctccagcaacggccaatctattacctttgacgccatacaggaagcctgcgccagggcttag

SEQ ID NO: 136698 - DNA, 477 bp, synthetic construct
  misc_feature 1..477: note = Description of Artificial Sequence: Synthetic coding sequence
  source 1..477: mol_type = other DNA
atgtggctgtgtcctctggccctgaaccttattctgatggcagcctctggcgctgtttgtgaggttaaagatgtgtgcgttgggtcaccaggaatccccggtacacccgggtcacacggtttgccaggaagggatggtcgggacgggttaaaaggcgacccaggcccccctggcccaatgggtcctcccggggagatgccttgcccgccaggcaacgacggactcccaggagctcccggcatccctggcgaatgtggcgaaaagggcgagccaggagaaaggggcccccccggtttacctgcccatcttgacgaagagctccaagccacattgcacgattttaggcaccagattctgcaaaccagaggcgctttgtctctgcaggggtccataatgactgtcggtgaaaaggtcttttcaagcaacggacagtcaattaccttcgatgctatccaagaggcatgtgccagagcttag

SEQ ID NO: 136699 - DNA, 747 bp, synthetic construct
  misc_feature 1..747: note = Description of Artificial Sequence: Synthetic coding sequence
  source 1..747: mol_type = other DNA
atgtggctgtgtccacttgccctaaccctgatcttaatggccgcatccggtgcagcatgtgaagtgaaggatgtgtgtgtaggcagtcccggcatcccggggacaccaggatcacatggccttcctgggcgtgacggccgagacggggtcaaaggcgaccccggccctccaggccccatgggaccacccggcgaaacgccgtgcccgcctggcaacaatgggttgcctggagctccgggtgtgccaggcgaacggggtgagaagggcgaggccggggaacggggccccccgggattgcccgcccatcttgatgaagaactgcaggccacactgcatgacttcaggcaccagatcctacagactagaggtgccctgtcccttcagggtagcatcatgacagtgggagaaaaggtgtttagttcaaatggacaaagcattaccttcgatgcaatccaggaagcctgcgcaagggctggaggaagaatagccgtcccccgtaaccccgaagagaatgaggcaatagccagcttcgtgaagaagtataatacctatgcctacgttggcctgacagaagggcctagccctggcgactttaggtattcggacggcaccccggtcaactacactaactggtatcgcggggagcctgccggcagagggaaagagcaatgtgtggaaatgtatactgatggccagtggaacgatcgcaattgtctttacagtcgcctgactatatgcgaattttag

SEQ ID NO: 136700 - DNA, 747 bp, synthetic construct
  misc_feature 1..747: note = Description of Artificial Sequence: Synthetic coding sequence
  source 1..747: mol_type = other DNA
atgtggctgtgtcccctcgctctgaccctcatcctcatggcggctagtggtgccgcctgtgaagtaaaggatgtgtgcgttggtagcccaggaattcccggcactcctggaagccatggcctgcccggcagagacgggagggacggtgtcaaaggggatcctggacctcccggccctatggggccaccaggggaaacgccttgccccccaggtaataatggtttgcctggcgcccccggcgtgcccggagaacggggcgaaaaaggagaggcgggggagaggggacctcctgggcttcctgcccaccttgatgaggagttgcaggcaaccctgcatgattttagacatcagattcttcagacacgaggggccttgtctctccagggatccattatgactgtgggcgaaaaggtcttctccagtaacgggcaatccattacgtttgacgccatccaggaagcctgtgctcgggcagggggccgcatcgcagtgccccgaaatccagaggagaacgaagcgattgcaagctttgtcaagaagtataacacctacgcatacgtcggtctgaccgaggggccctcccccggggacttcaggtatagcgatgggacccctgttaactacaccaactggtataggggggagccagccggccgtggcaaggagcagtgcgtcgagatgtatacagacggccaatggaacgatcggaattgtctctattcaagactaactatctgcgagttttag

SEQ ID NO: 136701 - DNA, 477 bp, synthetic construct
  misc_feature 1..477: note = Description of Artificial Sequence: Synthetic coding sequence
  source 1..477: mol_type = other DNA
atgtggctgtgtccattggcactaaccctgattcttatggccgcctctggggccgcctgcgaggtgaaggatgtgtgcgtcggatcacccggtattccaggaacaccaggctcccatgggttgccgggccgggatgggcgagatggcgtaaagggagatcccggaccccctggacctatggggccgccaggcgagactccttgccccccaggcaacaatggcttgccgggggcaccaggcgtgccaggggaaagaggggagaagggggaagctggcgagaggggccctcccggtttaccagctcatctcgatgaagaactgcaggcaacgctgcacgactttcgccaccagatcctgcagacacgcggcgccctttcgctccaaggctctattatgacagttggagagaaggtttttagcagcaacggccagtctatcacctttgatgccatccaggaggcttgtgcaagggcttag

SEQ ID NO: 136702 - DNA, 645 bp, synthetic construct
  misc_feature 1..645: note = Description of Artificial Sequence: Synthetic coding sequence
  source 1..645: mol_type = other DNA
atgaggccctgtcaggttcccggcgctgccacaggacctagggctatgtggctgtgccctttagctttgacacttatccttatggccgcttctggagccgcatgtgaggttaaagatgtgtgcgtgggctcccccggcattccaggaaaacggggagagaaaggcgaagccggcgagaggggcccccccgggctgcccgcccacttggacgaggaattgcaggccacgctacacgattttaggcaccagatcctgcagactcgtggagctttgagcctccaaggcagcattatgaccgtgggcgagaaggtcttctcctctaatggccagtctataacttttgatgccatacaagaagcttgcgcaagagccgggggccgcatcgctgtcccacgtaatccggaagaaaacgaggcaattgcctcctttgttaagaagtacaatacttacgcatatgtggggctgactgaaggaccatcccccggtgacttccgttactccgatggaacccccgtcaattataccaattggtataggggggaaccagctgggaggggtaaggaacagtgcgtcgagatgtacactgatggacagtggaacgataggaattgcctgtatagtcgcttgaccatttgcgagttttag

SEQ ID NO: 136703 - DNA, 1146 bp, synthetic construct
  misc_feature 1..1146: note = Description of Artificial Sequence: Synthetic coding sequence
  source 1..1146: mol_type = other DNA
atggctgaatctcacctgctgcagtggctgctgcttctcctacccactctctgcggacctggtactgccgcctggaccacttcgtcactggcttgcgcgcaaggtcctgaattttggtgtcagtccttggagcaagccttgcagtgtcgggccctcgggcactgtctccaggaggtgtggggtcacgtgggagcagacgatctctgccaggaatgcgaggacattgtgcatatactcaataagatggcgaaggaagccatctttcaggatacgatgagaaaattcttggaacaggagtgcaacgtgctgccattaaagctgcttatgcctcagtgtaaccaggtgctagatgattatttcccactggtgattgattattttcagaatcagacagatagcaatgggatttgcatgcatctgggcctgtgtaagtcccggcagcccgagcccgaacaagagcccggtatgtccgatcctttgccgaagccactccgagatccactgccggaccccttgctcgataagttggtgttgcccgttttgccgggagccctgcaagccagacccggtccccatactcaggatctaagcgagcagcagttcccgatcccgctgccctattgctggttgtgccgggccctgatcaaaaggatacaggcaatgatccccaaaggggcactggccgtggcagttgcccaagtttgccgcgtggtgcccctcgtggccggcggcatctgtcagtgtcttgcagagaggtatagcgtgatattgctggacactttattgggtagaatgctgccacagctcgtatgcaggctcgttctgagatgcagcatggatgattcagccggcccccgaagccccaccggtgaatggctgccccgggattccgagtgccacctgtgtatgtcagtcaccacccaggcaggaaactctagcgaacaagccatccctcaggccatgctgcaggcatgtgtaggctcatggttggaccgcgaaaagtgcaagcagttcgtggagcagcacacaccccaattgctgaccctggtgccgagggggtgggacgctcacacgacatgccaggcgttgggcgtgtgtggtaccatgagctctcccctgcaatgcattcattcacctgatctgtag

SEQ ID NO: 136704 - DNA, 1128 bp, synthetic construct
  misc_feature 1..1128: note = Description of Artificial Sequence: Synthetic coding sequence
  source 1..1128: mol_type = other DNA
atgttactgtttcttctgtccgccctggtgctgctcactcaacccctcggatacttggaagctgagatgaaaacatatagccatagaaccatgccgtctgcgtgcaccctggtgatgtgctcttccgtcgagtctggcctgcctgggcgcgacgggcgcgacgggcgcgaaggacccagaggggagaaaggggaccccggtctgcccggcgccgccggccaagccgggatgccagggcaggctggccccgtgggcccaaaaggcgacaatggatccgtgggtgagcccgggccgaagggggacactgggccatctggcccgccgggtccgccaggagtccctggccccgcaggtcgcgaaggcccactaggaaaacagggcaatatcggtccccaaggtaagcccggtcctaaaggcgaggcaggaccgaaaggagaagtgggcgcccccggaatgcagggcagcgccggagcccgcggcctggccggacctaagggcgaaaggggggttcccggtgagcgaggagtgcctggtaatactggggcagccggtagcgcgggcgcaatggggcctcagggctctcccggcgccagaggccccccgggcctcaagggcgataagggcatccccggagataagggcgccaagggcgagagcgggctgcctgatgtggcaagtctgcgccagcaggtcgaggctctccagggtcaggtccaacacctgcaggcagcctttagccagtacaaaaaggtggagttgttccccaacgggcagagcgtgggggagaagatcttcaagacggcagggtttgtaaagcctttcactgaagcccagctgctctgcacacaggccggaggacagcttgcgtcgcctagaagcgccgcagaaaacgcggccctgcaacagctagttgtggcaaagaatgaggccgcctttttatcaatgacggacagcaagacagagggtaagtttacctaccccaccggcgaaagcctagtatactccaattgggcccccggggagccaaacgatgacggtgggtcggaagactgtgtggagatcttcaccaacggcaagtggaatgatagagcctgtggcgagaagaggcttgtagtatgcgagttttag

SEQ ID NO: 136705 - DNA, 657 bp, synthetic construct
  misc_feature 1..657: note = Description of Artificial Sequence: Synthetic coding sequence
  source 1..657: mol_type = other DNA
atgttcttgtccactagcaagcacggacgtcaagaagcgatgttattattcctcctgagcgctttggtcctgctgactcagccactcggctacctggaagctgaaatgaagacctatagccaccgcactatgccctccgcctgtactctcgtgatgtgctcttccgtagaaagcggactacccgggcgggacggaagagatgggcgggagggcccccgcggggagaagggcgacccagggctacccggggctgctggacaggccggcatgccggggcaggcaggccctgttggtcccaaaggcgataatgggagcgtcggcgaacccggccccaagggggatactggaccaagcggccctccaggcccacccggcgtgccgggccccgctggacgggaaggacctctcgggaagcaggggaacatcggaccacaaggtaaacccggcccgaagggagaggctggtcccaagggtgaagtgggcgcacccggtatgcagggtagtgcaggggcacggggtcttgccggtcctaagggggagcgtggagtaccaggtgagcggggtgttccgggaaatacaggggcagcgggtagtgccggagctatgggacctcaaggctcccccggggcgcgtggtccgcccgggctgaaaggctag

SEQ ID NO: 136706 - DNA, 903 bp, synthetic construct
  misc_feature 1..903: note = Description of Artificial Sequence: Synthetic coding sequence
  source 1..903: mol_type = other DNA
atggcagcagtcgctgcccttcagctcggattgcgagctgcagggctgggccgggcccctgcaagcgccgcttggagatcagtactacgagtttcgccccgacccggcgtggcttggaggccttcacggtgtggctcttccgcggctgaggcctctgccacaaaagcagaagatgatagtttcctccaatgggtgctgttactgatccccgtcaccgcattcggactcggaacctggcaggttcagcgccgaaagtggaaacttaaccttattgccgagcttgagagccgagtattggccgagcctgtgccccttccggccgaccctatggaactcaagaatctggaataccgccccgttaaagtaaggggttgcttcgatcacagcaaagagctgtacatgatgcctcgtactatggttgatccggtgcgggaggccagggaaggcggcctgattagcagctcgacacagtccggcgcttatgtggtgacaccattccactgcacagatctcggcgtcaccattctcgttaacaggggatttgttccccgtaagaaggtgaatccagagactagacagaaaggtcagatcgaaggcgaggtagacctcatagggatggtccgtctaacagaaaccagacagccgttcgttcccgaaaataatcctgagcgcaaccattggcactatcgggatctggaagccatggcccgcattactggggctgagccaatctttatcgacgcgaattttcagagcaccgtgcctggaggacctattggcgggcagacgagggtaacactcagaaatgaacacctgcaatatatcgtgacctggtatggtctcagcgcagctacatcatatctgtggttcaagaaattcctaagggggacaccaggagtgtag

SEQ ID NO: 136707 - DNA, 813 bp, synthetic construct
  misc_feature 1..813: note = Description of Artificial Sequence: Synthetic coding sequence
  source 1..813: mol_type = other DNA
gcaccagccagcgcagcttggcggtcggtgttaagggtgtcccctaggcccggcgtggcttggagaccttcacgatgcgggagctctgcggccgaagctagtgcgactaaggcagaggatgattcattcctgcaatgggtgttactgttgatacctgtgacagcttttggcctcggcacttggcaggtgcaaaggcgcaagtggaaactcaatctcattgctgagctggaatctcgagtgctggcagaaccagtcccgctgcctgctgaccctatggagctgaaaaacctcgaatatcggccagtgaaagtgcgtgggtgtttcgatcactccaaagaactctacatgatgccacgtacaatggtggacccagtccgcgaggcacgagagggtgggctcatttcatcgtcaacacaaagcggcgcctacgtcgtgacccctttccactgcacagatcttgggaaaaaagttaacccagagacacgtcagaaagggcagattgagggagaggtggacctgatcggcatggtccggctgactgagacgcgtcagccatttgtgcctgaaaacaatcccgaacggaatcactggcattatagggacctcgaagccatggcaagaatcaccggggccgagccaattttcatagatgcaaacttccagagtacggtgcccggtggtcccattggagggcagactagggtcaccttgaggaacgagcatctgcagtatatcgtgacttggtacggactgtccgccgccacaagttatctctggtttaaaaaattcctgcgaggtacccctggagtatag

SEQ ID NO: 136708 - DNA, 771 bp, synthetic construct
  misc_feature 1..771: note = Description of Artificial Sequence: Synthetic coding sequence
  source 1..771: mol_type = other DNA
atgtcagagcttcccggcgacgttagagcttttctccgcgagcacccttctctgaggctgcagacagatgcccgcaaggtaagatgcatcttgacaggacatgagctgccttgtaggctccccgagctgcaggtgtacacaagaggcaagaagtatcagcgactggtacgggcatctcctgccttcgattatgccgagtttgagccccatatcgtcccatccacaaagaatcctcatcagctcttttgcaagctaacacttagacacataaacaagtgtccagaacatgtgctccgccatacacaagggcggcggtatcagcgtgcgctatgtaagtacgaggaatgtcagaaacagggcgtggagtatgtgccggcttgtcttgtgcatagacggagacgaagagaagatcagatggacggagatgggccccggccacgcgaggctttttgggagccgacatcctccgatgagggtggagccgcttcagacgattccatgaccgatctgtaccccccagagttgttcacccggaaggacctgggctcaacagaggatggcgacgggaccgacgactttctcacagataaagaggacgagaaagccaagccccctcgtgaaaaggccacggacgagtcacggcgagagaccactgtctatagaggcctcgtgcagaaacgcggcaagaaacagttgggcagtcttaagaagaagtttaagagccaccatcgaaaacctaaatctttctcttcatgcaaacaaccaggatag

SEQ ID NO: 136709 - DNA, 810 bp, synthetic construct
  misc_feature 1..810: note = Description of Artificial Sequence: Synthetic coding sequence
  source 1..810: mol_type = other DNA
atgggacagaatgacctcatggggactgccgaggatttcgccgaccaattcctgcgggtgacaaagcagtatttacctcacgttgcaaggctgtgcctaattagtacattcctggaggatggtattaggatgtggttccagtggtctgaacagagggactacatcgacacgacatggaactgcggttatctgctggcgagttcctttgtgtttctgaatctccttgggcaactcacggggtgcgtattagttttgagccgcaacttcgtccagtatgcatgctttggactattcgggatcatcgcgcttcagacaatagcttactccatactgtgggatctgaagtttctcatgcggaacctggcactggggggaggtctcctcctgctactcgcggaatcccgctcggagggcaaaagcatgtttgcaggagtgcccacaatgcgagagtcgagtcctaagcagtatatgcagctcggcggaagggtactgctggtgttaatgttcatgaccctcttacacttcgacgcgtcctttttctccatcgtgcagaacatagtaggtaccgccctgatgatccttgtcgcgattggctttaaaacgaaactggctgctctcacgcttgtggtgtggctgtttgccatcaatgtttactttaacgctttttggactatcccagtttacaagccaatgcacgattttctcaaatacgacttcttccagacaatgtccgtgatcggcgggctgttacttgtcgtggctcttggccccggaggagtctctatggacgaaaaaaaaaaggagtggtag

SEQ ID NO: 136710 - DNA, 561 bp, synthetic construct
  misc_feature 1..561: note = Description of Artificial Sequence: Synthetic coding sequence
  source 1..561: mol_type = other DNA
atgggccagaacgatctcatgggcacagctgaagacttcgccgatcagtttcttagagtcactaaacagtaccttcctcacgttgctagactttgtttgatcagcaccttcctggaggatgggattagaatgtggtttcaatggtccgagcagcgagattatattgacactacttggaactgtggatatctgctggcctcctcatttgtgtttctaaacttactcgggcaactgactggctgcgttctagtccttagtcggaactttgtgcagtacgcatgcttcggattgttcggaatcattgctctccaaacaatcgcatactccatcctttgggatctcaagttcttaatgaggaacctggcactggggggcggtctgctgcttcttcttgccgagagccgttctgaaggcaagtccatgttcgccggcgtgcccaccatgcgggagtcaagccctaagcagtacatgcagctgggcggccgggtcctcctcgtgctgatgtttatgaccctgctgcactttgacgctagcttttttagccagccatctcaacaatag

SEQ ID NO: 136711 - DNA, 567 bp, synthetic construct
  misc_feature 1..567: note = Description of Artificial Sequence: Synthetic coding sequence
  source 1..567: mol_type = other DNA
atggggcagaacgacctgatgggtacagctgaggactttgctgaccaattcctgagggtgactaagcagtatctgcctcacgttgcgcggttatgcctcatctccaccttcctagaagatggaatccgtatgtggttccagtggtctgagcaacgggattacattgacaccacttggaattgtggctacttgctcgcttcttcttttgttttccttaaccttctggggcagttaactggatgtgttctggtgctttcccgcaacttcgtgcagtatgcatgtttcggactattcggcatcatcgcactgcagaccatcgcttactccatactttgggatctcaagttccttatgaggaatttggccctgggcggaggcctgttattgctgctagccgaaagccggtcagaggggaaaagtatgtttgcaggcgtaccaaccatgcgagagtcatcccctaaacatacctgtctcgccaagacaagagggaggcagggccttgtgcggggcggcttcaataaaacagcaagtttttatgtttcaagctctcttccccttccatggtag

SEQ ID NO: 136712 - DNA, 783 bp, synthetic construct
  misc_feature 1..783: note = Description of Artificial Sequence: Synthetic coding sequence
  source 1..783: mol_type = other DNA
atgcgctcattagcaacagagtttttgcgcgtcacgaagcagtacctcccccacgtggctagattgtgcctgatttctaccttcttggaggatgggatccgcatgtggttccagtggtctgaacagagggactacatcgataccacatggaactgcggctatctgctggcttcttctttcgtctttttgaaccttctcggccaactcactgggtgcgtgcttgtcctgagtcgcaactttgtgcaatatgcctgcttcggcctgttcggtatcatcgcgttacagaccatagcatatagtatcctttgggatcttaaatttctcatgcggaaccttgccctgggcggaggtcttctgcttttattggcagaatcccggagcgagggaaagtcaatgtttgccggtgtccctaccatgcgagagagttcccccaaacagtacatgcagcttggcgggcgcgtgctgcttgtcctcatgtttatgactctgctgcatttcgacgcgagttttttttcaatcgtacagaatatagtcggcacagccctgatgatcctggtggccataggcttcaaaaccaagctggcagccctgactctcgtggtttggttgttcgcaattaatgtgtattttaacgcattctggaccatccccgtgtataagccaatgcatgattttctaaagtatgacttcttccagacaatgtccgtcataggcggccttctcctggtggtcgctctaggccctggcggcgtgagtatggatgaaaaaaagaaagaatggtag

SEQ ID NO: 136713 - DNA, 387 bp, synthetic construct
  misc_feature 1..387: note = Description of Artificial Sequence: Synthetic coding sequence
  source 1..387: mol_type = other DNA
atgggtcagaatgatctcatggggaccgcagaggacttcgcagatcagttcctcagggtgaccaaacagtacttgcctcacgtggcaagactctgccttatctcaacatttttggaggatggaatccgcatgtggttccagtggtcggagcagcgcgactatattgacaccacctggaactgcgggtatttgctggctagttcattcgtttttctgaatcttctcggccagctgactgggtgtgtgctcgttctcagtagaaacttcgtacagtacgcctgtttcgggctctttggaatcattgcacttcagactatcgcctattctatactctgggacctgaaattcctgatgcgactgagtcgcaccagctgggcgcagctctag

SEQ ID NO: 136714 - DNA, 1086 bp, synthetic construct
  misc_feature 1..1086: note = Description of Artificial Sequence: Synthetic coding sequence
  source 1..1086: mol_type = other DNA
atggcgtctctgctcgcgaaagatgcctacctccagagtctggccaagaagatctgttcacattccgctcccgagcaacaggcacgaacacgagcagggaagacccaagggagcgagacagcaggcccgcctaagaaaaagcgaaaaaaaacacaaaaaaaattcagaaaaagggaggaaaaagccgctgagcacaaagccaagtcactgggcgagaagtctcccgcagcatctggtgcccgcaggcccgaggccgccaaggaagaggctgcctgggcaagctcatcagctggaaatccagcggacggactggcaacggagccagaaagcgtgtttgccttggatgtcctgcggcaacgcctacacgagaagatccaggaagcaagaggccaaggcagcgctaaggaattaagcccagccgctcttgaaaagagaagacgcaggaagcaggagagggataggaaaaagcggaaaagaaaagaattgagagccaaggagaaggccagaaaagctgaagaagctacagaggcccaggaggtggtggaagcaacgcccgaaggagcatgcaccgagccccgcgagcctcctggacttatctttaataaggtggaggtgtccgaagacgagccagcatcgaaggcacagcgaagaaaggaaaagaggcagcgagtgaaagggaacctgacacccctgaccggtcggaactatcgtcaactgctcgaacgtttgcaggctcggcagtcccgactggacgagcttcgcggacaggacgagggtaaggcacaggaactagaggcaaaaatgaagtggactaacttgctctacaaggctgagggggttaaaataagagatgacgagaggctcctacaggaagctctaaaacgcaaggaaaagcgtagggcacaacgtcagagaagatgggaaaagcgaactgccggggtagtggagaagatgcaacagagacaagacagacgacgccaaaacctgagacgaaagaaggcagcacgagctgaaaggcggttactccgcgcgcgcaaaaaaggaaggattctgccgcaagacctggaacgcgcagggctggtctag

SEQ ID NO: 136715 - DNA, 789 bp, synthetic construct
  misc_feature 1..789: note = Description of Artificial Sequence: Synthetic coding sequence
  source 1..789: mol_type = other DNA
atggccatgtcctcgggcggctccgggggtggtgtgcccgagcaggaggatagcgtactgttcagacgcggcactggccagagtgacgacagtgacatctgggatgataccgcgctgatcaaagcatacgataaggcagtggcctccttcaaacatgctctgaaaaatggcgacatatgcgagacaagtgggaaaccgaaaaccacaccaaaaagaaaacccgcgaagaagaataaaagccaaaaaaagaataccgcagcctcactccagcaatggaaggtcggagataaatgctccgcaatttggagtgaggatggatgtatctatcctgctaccattgcctcaatagattttaaacgggagacctgtgtcgtagtctacactgggtacgggaaccgcgaggaacagaacctctccgacctgctgtcccccatttgtgaggtggctaataacatcgaacagaatgctcaggagaacgagaatgagtcccaggtctcaacggacgaatccgaaaattcacggtcccccggtaataaatccgacaatatcaagcccaagagcgctccctggaactccttcctgccgcccccgccgcctatgccagggcctaggctcgggcccgggaagataatacctccaccccccccaatatgccccgatagccttgacgacgctgatgcactgggaagtatgctcatatcttggtatatgtccggttaccataccggatactacatgggcttccggcagaatcaaaaagagggccggtgctcccattccctcaactag

SEQ ID NO: 136716 - DNA, 885 bp, synthetic construct
  misc_feature 1..885: note = Description of Artificial Sequence: Synthetic coding sequence
  source 1..885: mol_type = other DNA
atggctatgagttcaggagggagtggcggtggagtacctgagcaggaggactcggtgctgtttcggcggggcaccggtcagtcggacgattccgacatctgggacgatacagctctgataaaggcatacgataaagccgtggcttccttcaagcatgctctgaagaacggagacatttgtgagactagtggtaaacctaaaacaactcctaagcggaagcccgccaagaaaaataagtcacaaaagaagaataccgcagcctctctacagcaatggaaggtaggggataagtgttctgccatatggtcggaggatgggtgtatttaccccgcaaccattgcaagcatcgacttcaaaagggagacatgtgttgtggtgtatactgggtacggcaatagggaagagcagaacctgagcgacttgctatcgccaatctgtgaggttgcaaacaatattgagcagaatgcccaggaaaacgagaatgagagccaagtgagcaccgacgagtctgaaaacagtagatccccaggcaacaagtccgataacatcaaacctaagtcagcgccgtggaattcttttctgcctcctcctcctcccatgcccggcccccgattgggtcccggcaaacccggtctgaaatttaatgggcccccacccccccctcccccaccacccccgcatctgctatcttgctggttgcccccattcccgtcagggcctccgattattcctccccctccccctatctgccctgactccctggacgatgcagacgcattaggaagcatgttgatttcatggtacatgagcggctatcataccggctactacatgggattcagacagaaccagaaggagggtcggtgttcccattccctgaactag

SEQ ID NO: 136717 - DNA, 789 bp, synthetic construct
  misc_feature 1..789: note = Description of Artificial Sequence: Synthetic coding sequence
  source 1..789: mol_type = other DNA
atggccatgtcctcaggtggatcaggagggggcgtccctgaacaggaggatagcgtcctgttcagacggggtactgggcagtctgacgactcagatatatgggatgacacagctctcatcaaagcctacgataaggcggtggcttccttcaaacatgctttaaaaaacggtgacatctgtgaaacctcaggaaaacctaagaccaccccgaagcgtaaaccagccaagaagaacaaatcccagaaaaaaaataccgcagccagccttcagcagtggaaggtaggtgataagtgttccgccatttggtctgaagacggatgtatttatcctgcaaccatcgcttctatcgatttcaaaagggaaacgtgcgtcgtcgtgtataccggctacgggaatcgcgaagaacaaaacctgagtgatctgctgtcaccaatctgcgaagtggcaaataacatcgaacagaacgctcaggagaatgagaatgagtcccaggttagtaccgacgagtcagagaactcccggtcacccggcaacaagtcggacaatatcaaaccaaagagtgccccctggaatagttttttgcctccaccacctcccatgcccgggccacggctgggccctggtaagataattcctccacctcctcccatctgtcccgactctctggatgacgcagatgccctggggtccatgctcatttcctggtatatgagcggataccacactggatactatatgggctttaggcaaaaccagaaggaggggcggtgcagtcactcactcaactag

SEQ ID NO: 136718 - DNA, 849 bp, synthetic construct
  misc_feature 1..849: note = Description of Artificial Sequence: Synthetic coding sequence
  source 1..849: mol_type = other DNA
atggcaatgagctcagggggttctggggggggggtaccggaacaggaggattccgtattgttcagacgaggaacaggccagtctgatgattctgatatctgggatgatactgctttgattaaagcctatgataaggctgtcgcttctttcaaacacgccctgaagaatggggatatttgcgaaacttccggaaagccaaagactactccaaagcggaagcctgcaaaaaagaataaatctcagaaaaaaaacacagctgcttccctgcagcagtggaaggtgggggataaatgcagcgcaatctggagcgaagacggctgtatctaccccgctacaatagcctccatcgacttcaaaagggagacctgcgtggtggtgtataccggctacggtaaccgagaagaacagaacctatctgacctgttgtcacctatctgcgaggtcgctaacaatatcgagcaaaacgcccaagagaatgagaatgagtcgcaggtatctaccgacgaatcagaaaacagcaggagccccggcaacaaaagcgataatatcaagccaaaaagcgcaccttggaatagcttcttgcctcccccacctccaatgcctggacccagactggggcctggaaaacccggactgaaattcaacggcccaccgccacctccaccgccacccccccctcatcttctcagttgttggctcccaccttttcctagtgggccccccatcatacccccacctcctcccatttgtcccgattctctcgacgacgccgacgctcttggatccatgctcattagctggtatatgagcgggtatcatacaggctactatatggaaatgttagcatag

SEQ ID NO: 136719 - DNA, 885 bp, synthetic construct
  misc_feature 1..885: note = Description of Artificial Sequence: Synthetic coding sequence
  source 1..885: mol_type = other DNA
atggctatgtccagcggcgggtccggcggcggggttccggagcaagaagacagcgtgctctttagacgtggaaccggacagtctgacgattccgacatatgggatgatactgccctgataaaagcttatgacaaggcagtggcctcatttaagcacgctcttaaaaatggggacatctgcgaaacgtcagggaagccaaagactacacccaagaggaaacccgcaaaaaagaacaaatcacagaagaagaatactgccgcctccctgcagcagtggaaggttggcgataaatgtagcgctatctggtctgaggacggttgtatttaccccgcgaccatcgcctccatagatttcaagcgcgagacttgcgttgtcgtgtataccgggtatggcaatcgcgaagagcagaacctcagcgacttactctcgcctatttgcgaggtagctaataacatcgaacagaacgcccaggaaaacgagaatgaatcacaggtttcaaccgatgagtccgaaaactctcggagtccaggtaataagagcgataatatcaaacctaaaagtgccccatggaattcttttctgccgcccccgcctccgatgcctggcccgagacttggtcctggcaagccaggactgaaatttaatggccctccgccaccacctcccccaccccccccacacttgttgtcctgctggcttccaccattcccttccggccctccaatcattccaccaccacctcctatctgtcccgactcactggatgacgccgatgcactaggctctatgcttatctcctggtacatgagcggctaccacaccggctactacatgacaggattccattgcgtttcccaggacggactgaacttactcacaccctag

SEQ ID NO: 136720 - DNA, 684 bp, synthetic construct
  misc_feature 1..684: note = Description of Artificial Sequence: Synthetic coding sequence
  source 1..684: mol_type = other DNA
atggccatgtcatcaggcggtagtggaggtggggtgcccgagcaggaggactcagttctctttaggcgtggaaccggccagagtgacgatagcgatatttgggatgacactgcccttattaaagcctatgacaaagccgtcgcctcattcaagcacgcccttaagaacggggacatttgcgagacttctgggaaaccgaaaaccaccccaaaaaggaaaccagctaaaaagaacaaaagccagaaaaagaatacagctgcatccctgcagcaaaatgagaatgagtcacaggtgagcaccgatgagtccgagaactcccgctctccagggaacaagagtgataacattaaaccaaaaagcgcaccttggaacagtttcctgccaccgcctccccccatgcctgggccccggctgggccctggtaagcctgggctgaagtttaacggcccacctccacctccgccacctccgccacctcacttgctctcatgctggctcccacctttccctagcggcccaccaataattccgcctcctcctcccatttgcccagatagtcttgacgacgcagatgcgctgggatccatgctgatctcttggtacatgtctggttaccatacaggttactatatggggttcaggcagaatcaaaaagagggaaggtgtagtcatagtctgaattag

SEQ ID NO: 136721 - DNA, 849 bp, synthetic construct
  misc_feature 1..849: note = Description of Artificial Sequence: Synthetic coding sequence
  source 1..849: mol_type = other DNA
atggcgatgagttcaggaggatccggggggggcgtacccgagcaagaagacagcgtgctgtttaggcggggaacaggtcagagtgacgattccgacatttgggatgacacggctttaatcaaagcatacgacaaggctgtggcgagtttcaaacacgcactgaagaatggtgatatctgtgaaacatccggcaagcccaagactactcccaaacgcaagcccgcgaagaaaaacaagtcccagaagaaaaacactgccgccagcctgcaacagtggaaggtgggggataagtgctccgcaatatggtcagaggacggttgcatctaccctgccactatcgcctctatcgacttcaaacgcgagacatgcgtggttgtgtacaccggctacggaaacagggaggaacagaacctaagcgatctgctctcccccatttgcgaggttgcaaataatatcgaacagaatgcccaggagaatgagaatgagtctcaagtatctaccgacgagtccgagaacagtaggagtcccggaaataagagcgataacatcaaacctaagtcagcgccctggaatagctttctccctccacctcccccaatgccaggacccagactgggacctgggaaaccagggctcaagttcaacggccctccaccaccacctccacctccacccccacacctgttaagctgctggctgcccccatttccatctggcccccctataatccctccacctccccctatctgtcccgattccctggacgatgccgatgccctcggatcaatgctgatctcttggtatatgagtggctatcataccggctactacatggaaatgctggcttag

SEQ ID NO: 136722 - DNA, 789 bp, synthetic construct
  misc_feature 1..789: note = Description of Artificial Sequence: Synthetic coding sequence
  source 1..789: mol_type = other DNA
atggcaatgagctccggcggatcaggtgggggtgttccagagcaggaggactccgtactgttcaggcgcggaacaggacagagcgatgattcagatatatgggacgacacagccttgataaaggcatatgataaggccgtagccagtttcaagcatgctcttaagaacggcgacatctgcgagacaagtgggaaaccaaagacgaccccgaagagaaagcccgctaagaagaataaaagtcagaaaaagaacaccgccgctagccttcagcagtggaaggtgggtgataaatgctccgctatttggtctgaagacggatgcatatatcccgctactattgcctcaattgacttcaagcgggagacctgtgtggtggtgtatacaggctatggaaatagagaggagcagaatctaagcgacctgctgtctccaatttgcgaggtggcaaataacatcgaacagaatgcccaggagaatgaaaatgaaagccaggtaagcacggatgagagcgagaatagccgaagccccggcaataagtcggacaacattaaacctaagagcgccccttggaatagctttctgccccctcctccaccaatgcctggtccacgtctgggccccgggaaaattattcccccgcctccacccatttgccctgacagccttgatgatgctgacgcactcggctccatgctgatctcatggtacatgtcaggctaccacactgggtactacatggggttccgtcaaaatcaaaaggaggggcgatgttcacattccttgaattag

SEQ ID NO: 136723 - DNA, 885 bp, synthetic construct
  misc_feature 1..885: note = Description of Artificial Sequence: Synthetic coding sequence
  source 1..885: mol_type = other DNA
atggccatgtcttccggaggatccggaggtggcgtacccgagcaggaggactccgttctcttccgcagggggacgggacagagtgatgactcggatatatgggatgacaccgcactgattaaggcttacgacaaagcggtcgcatcatttaaacacgccctgaaaaacggcgacatatgtgaaacatcagggaagccgaaaacgacacctaaaagaaagccggccaaaaagaataaatctcagaagaagaacactgctgcatccctgcaacagtggaaggtgggcgataagtgttccgcaatctggagcgaggacggttgcatctacccggcgacgatcgccagtatcgattttaaacgtgagacctgcgtggtcgtgtacactggctacggcaatagagaagaacaaaatctgtccgacttactttcacccatatgtgaggtggctaacaatattgaacagaacgctcaggagaacgaaaacgaatcacaggtttctactgatgaatcagaaaactcccggtcccccggcaacaagagtgataacattaagccgaaaagtgctccatggaactcctttctgcctccaccaccccctatgcctgggccccggctcggcccagggaagcctggactaaagttcaacgggcctccccctcctcctcctccccctccaccacatctcttatcctgctggctcccaccattcccgagtggaccgcctataatccctcctccacctcctatctgtccagattcacttgacgacgccgacgctttggggagtatgttaataagttggtacatgtctggctatcatacaggctattacatgggtttccggcagaaccagaaagagggtcgatgtagccacagcctgaattag

SEQ ID NO: 136724 - DNA, 885 bp, synthetic construct
  misc_feature 1..885: note = Description of Artificial Sequence: Synthetic coding sequence
  source 1..885: mol_type = other DNA
atggctatgtcctctggagggtccggtggaggagtccctgagcaggaagactccgttctattccgccgaggtaccgggcaaagcgatgattctgacatctgggatgacacggctctcatcaaggcctacgataaagcggtcgcatcctttaagcacgctttaaagaatggcgatatatgcgagacttcaggcaaaccaaagactacgccaaaacggaaaccagctaagaaaaacaaatcacagaaaaaaaatacggctgcctccctccagcaatggaaagtgggcgacaaatgcagcgcaatctggtcagaggacggctgcatctaccccgcgacgatcgcgtccatcgactttaaacgcgagacatgtgttgtggtctacacagggtacggaaatcgggaggagcagaatctgagtgatttgctgagcccaatctgcgaggtcgccaataacattgaacaaaacgcccaggagaacgaaaacgagtcacaggtttcaactgatgagtccgagaacagtcgcagccccggaaacaagtctgacaatataaaaccaaaatccgccccttggaattccttcctgccacctccgccccctatgcccgggccacggctcggacctgggaaacctggccttaaatttaatggccccccgcctccccccccacctccgcctccccatctcctgtcatgttggctcccccctttcccaagtggcccacccataattcccccgcccccccctatctgtccggactccttagacgatgccgacgctctgggctccatgcttatttcgtggtacatgtctggataccacactggatactatatgaccggttttcattgtgtgtcacaagacggactgaatcttctaaccccttag

SEQ ID NO: 136725 - DNA, 684 bp, synthetic construct
  misc_feature 1..684: note = Description of Artificial Sequence: Synthetic coding sequence
  source 1..684: mol_type = other DNA
atggctatgagcagcggaggcagcggcggaggtgtgccggagcaggaggattccgtgctgttccggcgaggaaccggacagtctgacgacagtgatatttgggatgacacggccctaatcaaagcatacgacaaggctgtcgccagttttaaacatgctctcaagaatggtgatatttgtgaaacgtccggaaagccaaaaacaacacctaagcgcaagccagccaaaaaaaacaagtcccaaaaaaagaacaccgcagcctctcttcaacaaaacgaaaacgaatctcaggtgagtacagatgaatcagaaaactctagatcccctggcaacaagtcagacaacattaagcccaaatcggcaccctggaatagctttctcccaccacccccacccatgcctggaccacgtttaggaccagggaaacccgggctgaagttcaacggaccgccacctcctccaccacctccgcctccccacttgctatcgtgttggctgcctccattcccttcaggccctcccattattccaccaccacctcccatctgccccgattcgctcgacgacgctgatgcactcggtagcatgctcatatcctggtatatgagtggttatcatacgggctactacatggggtttcgtcagaaccagaaagaaggtagatgttcccactcactgaactag

SEQ ID NO: 136726 - DNA, 4494 bp, synthetic construct
  misc_feature 1..4494: note = Description of Artificial Sequence: Synthetic coding sequence
  source 1..4494: mol_type = other DNA
atgccccgatgcatcgcgcacttttgtgaaaagccccccagcgtgtcgtacagtatcttagagtccgtgagtaaggcaaagtttgccgcggggtctgtcgtttcgttcaaatgcatggaaggtttcgttctgaacaccagcgccaagatcgaatgtatgagaggaggtcagtggaatccgtccccaatgtccattcaatgcatcccagtgcggtgtggagagcctcctagcatcatgaatggttatgcatctggctccaactatagcttcggcgccatggtcgcttatagttgtaacaaaggattttatatcaaaggagaaaaaaaaagcacttgtgaggcaaccggccagtggtcaagtccgatccctacatgtcatcccgtcagctgcggggaaccacccaaggtggagaacggatttttagagcacaccactggcagaatattcgaaagtgaggtgcgctatcaatgcaatcccggctataagagcgttggatctcctgtctttgtatgccaggcaaatagacattggcacagcgaatcacccttaatgtgtgtgcccttggattgcggcaaacctcctcccattcagaatggcttcatgaaaggggaaaacttcgaggttgggtctaaagtgcaattcttctgtaatgaaggctatgagctggtcggagatagttcttggacatgtcagaaatctggcaagtggaacaaaaaatctaaccctaagtgcatgcctgcgaagtgccccgaaccgcccctgctcgaaaatcagcttgtactcaaggagctcacaacggaggtcggcgttgttactttcagttgcaaagaaggacacgtgttacaggggccctctgtgttgaaatgtctgccgtcacagcagtggaacgactcattccccgtctgcaagatcgttctgtgcactcctccccctcttatctcgttcggggtccctattccttcctctgcgcttcatttcggtagtaccgtcaagtactcctgcgtgggcgggttctttctgcgtgggaactctaccacactctgccagccagacggtacatggagcagtccactgcccgagtgtgtccccgtcgagtgtccacaaccagaggagattcctaatggcattatcgacgtgcagggcctggcctatttgtcgaccgccttgtacacttgcaagccgggatttgaattggtggggaacacaactaccttgtgcggggaaaacgggcactggcttggcggaaaacctacctgcaaggctatcgagtgtctaaagccaaaggagatcctaaatggtaaattctcttatactgatctccactacggccagacggtcacctactcatgtaatcgggggttcaggttggagggcccctcggcgctgacttgcctcgagaccggtgattgggacgtggacgcaccaagttgtaacgctatacactgcgactctccccagcctattgagaatggctttgtggagggtgcggactatagctacggagctattatcatctactcttgcttccccggcttccaagtagccggccatgcaatgcagacatgcgaggagtccggatggtccagctcaattccgacctgcatgccaatcgattgcgggctgccgccccatattgatttcggcgattgcacgaagcttaaggacgaccagggttacttcgagcaagaggatgatatgatggaggtgccgtacgttacccctcatccgccctatcacctgggggccgtggctaagacgtgggaaaatacaaaggagtctcctgcaacgcattcaagtaactttctgtacggtaccatggtgtcttacacttgtaatccgggctacgagctgctgggaaatcccgtgctgatctgtcaggaagacggtacttggaacggatctgccccaagctgcattagcattgagtgcgacctgcccaccgccccagagaacggatttcttaggttcacggagaccagcatgggatctgccgtgcagtactcctgtaagcccggacatatcctggccggctccgatctgagactgtgcttagagaacaggaaatggagcggagcctctccccgatgcgaagcaatctcatgtaagaagccgaacccggtcatgaacggcagtatcaagggcagcaattacacctaccttagcactctatactacgaatgcgacccaggttacgttctgaatggcacagaacggcgcacctgccaggacgataagaattgggacgaggacgagcccatctgtattcctgtcgactgctcttcgccgccagtgagtgcaaatggacaggtacgcggtgatgaatacacattccagaaagagatcgaatatacatgtaatgagggattccttctggagggcgctcggtctagagtctgcctggctaacggctcatggtcaggtgcgacgcctgattgcgtgcctgtgagatgcgctacacccccccagttggcaaatggggtgactgagggtctggattacggattcatgaaggaagtgacattccactgtcacgaggggtatattctgcacggcgcacccaaactaacctgccagagtgatgggaactgggacgctgagatcccactgtgcaaaccggttaactgtgggccacctgaggaccttgcccatgggttccccaacggctttagcttcatccacggaggacatatacaataccaatgttttcctggatacaaactgcacggcaacagttcacggagatgcctgagcaacggatcctggagcggttcatcaccttcctgtttgccttgtaggtgcagcactccagtgatcgagtatggcaccgtaaatggtacagacttcgactgcggcaaggcagccagaatccagtgctttaagggtttcaagttgttggggctgagcgagattacatgtgaagccgatggacagtggtcgtctggcttcccccattgtgagcacacatcatgtggctcattacctatgatacctaatgcatttattagtgagacaagctcctggaaggagaatgtgatcacgtattcgtgtcgcagcggatacgttatccagggcagttccgaccttatctgcaccgagaagggcgtctggtctcagccatacccagtgtgtgagcccctgagctgtgggtcacccccttctgttgccaatgcggtggccacgggcgaagcccacacatatgagagcgaggtgaagctgcggtgtctcgagggctacactatggacaccgacactgacaccttcacttgtcagaaagacggcaggtggttccccgagagaatctcctgctcacccaaaaagtgcccgttgccagagaacataacccacatactcgtccatggggacgacttctcagttaatcgccaggtgtccgtctcttgcgctgaaggctacaccttcgaaggggtgaacatcagcgtgtgccagttggacggcacttgggaacctccattttccgacgagtcctgcagcccggtgtcctgtggaaagcccgaatccccagaacacggcttcgtggtaggctctaagtatacctttgagtccaccattatttatcagtgcgaacccgggtacgagctggaggggaatcgggagagggtgtgtcaggagaatcggcagtggtcaggcggggtggccatctgcaaggagacacgctgcgagacgcctctcgaattcctgaacggaaaagccgatattgaaaacagaaccactgggcctaacgttgtgtattcgtgcaatcggggctattccctagaggggccctctgaagcccattgcacagagaatggcacgtggtcacacccagtgcctttgtgcaagcccaacccttgcccggttccattcgtgatccctgagaatgccttattatccgaaaaggaattctatgtggatcagaatgtcagcattaaatgccgcgaaggatttctcttgcagggccacgggattatcacttgtaatcccgacgagacatggacgcagacttccgcaaagtgcgagaagatatcgtgcggcccacctgctcacgtggagaatgccatagcgaggggcgtgcattatcagtacggggacatgatcacctacagctgttacagcgggtatatgctggagggatttcttcgtagcgtgtgtttagaaaacggcacctggacttccccccccatctgcagagctgtctgtagatttccctgtcaaaacgggggcatttgtcagcgtcctaacgcctgctcatgtccagagggctggatgggccgcctgtgtgaagagcctatctgtatcctgccctgcctcaacggtggaagatgtgtagcgccttatcagtgcgactgtccccctgggtggactgggtcgcgttgccacacagccgtctgccagtccccatgcctcaacggtggaaaatgtgtccgcccaaataggtgtcactgcctgagttcgtggaccggccataactgttctagaaagagaaggaccggtttttag

SEQ ID NO: 136727 - DNA, 4650 bp, synthetic construct
  misc_feature 1..4650: note = Description of Artificial Sequence: Synthetic coding sequence
  source 1..4650: mol_type = other DNA
atgtggcctcgcttggctttttgctgttggggactggccctagtgagcggatgggcgacgttccagcagatgagtccaagtcggaacttctctttcagacttttcccagaaaccgctcctggagccccaggaagtatccctgccccccctgctcctggggacgaagccgccggtagtcgggtggagcggctggggcaggcttttagacgtagagtcaggcttctgagagagctgtctgaaaggctggagctggtgtttctggtagatgatagtagtagcgttggggaggtgaatttccgcagcgagctcatgttcgtccgcaagctgttaagcgacttccccgtggtacctacagcaacccgagtggctatcgtgacattttcctcaaagaactatgtggtgccaagggttgattacatttcaactcgccgcgcacgccagcataagtgcgcactcctgctgcaggaaataccggctatctcttaccgaggcgggggaacatacaccaaaggtgctttccagcaggcagcacagattttgctgcacgcccgggagaacagcactaaggtcgtgtttctcataactgatggatacagtaacgggggggacccccgccccatagccgcatctctcagggattcaggagtcgaaatcttcacgtttgggatttggcaggggaatatccgggaactgaatgacatggcatcaacccccaaagaggaacactgttacttgttacattctttcgaggaattcgaggcactggcccgccgggctctccacgaagacttgccctctggatcctttattcaggacgatatggtgcactgttcatatttatgcgacgagggcaaagactgttgtgatcgcatgggcagttgcaaatgcggcactcacacaggtcatttcgaatgtatctgtgaaaagggctattacggaaaaggactgcagtatgaatgcactgcctgtcctagtggtacttataaaccagagggcagtccaggcggcatcagctcttgcataccgtgccctgatgagaaccacacatctccacccggaagcactagccccgaagattgcgtctgtagagaaggataccgggcctctgggcaaacgtgcgagctggtccactgtccagcacttaaaccacctgagaatggctacttcattcagaacacctgtaacaaccattttaatgccgcctgcggagttaggtgccaccccggattcgacctggtggggagctccataattttgtgcctgcccaacggtttgtggtctggctctgagagttattgtcgggtaagaacgtgtccccaccttagacaacccaagcacgggcacatcagctgtagcaccagggaaatgctatataaaactacctgccttgtggcctgcgacgaggggtatagactcgaagggagtgataagctgacatgccaagggaactcccagtgggatggaccagaacctcgttgtgtcgagcgacactgctccacgttccagatgcccaaggatgtgattatatccccacataactgtggaaagcagcccgccaaattcgggaccatctgctacgtttcctgtcgacagggcttcattttatccggcgtaaaagagatgttgcgctgtactactagtggcaagtggaacgtcggcgttcaggccgccgtctgcaaggatgtagaagccccccaaatcaattgtcctaaggatatagaggccaagaccttggaacagcaagactccgccaatgtcacctggcagattcccaccgcaaaggataacagtggcgaaaaagtctctgtccacgttcacccagcttttactccaccctacctcttccccatcggcgacgtggccatcgtgtatactgctactgatctgtctggtaaccaggcctcatgcattttccacatcaaggtaattgatgcagagcctccggtcatagattggtgcaggtcccccccaccagttcaggtgagcgaaaaagtgcatgctgctagctgggacgagccacagttttcagataactcaggcgccgaactcgtcattacacggtctcatacccagggagacctgtttccgcaaggagaaacaatcgtacagtatactgcaaccgacccaagtggcaacaaccgtacttgcgatatccatattgtgatcaaaggctctccatgtgagattccattcaccccagtgaacggcgatttcatctgtacccctgacaacaccggtgtcaactgtactctgacctgtctggaaggttacgattttactgaggggtccaccgacaagtactattgcgcttatgaggacggcgtatggaaaccgacttatacaacagaatggccagactgtgccaaaaagcgatttgcgaatcacggattcaaaagcttcgaaatgttctataaggcagccaggtgcgacgatacagatcttatgaagaagtttagcgaggccttcgaaacaaccctcggaaagatggtcccttcgttttgcagtgatgcagaagacattgactgtcgtctggaagaaaatctgactaagaagtactgtctggagtacaactacgattatgaaaatggtttcgctatcggtccgggcggttggggagcagccaatcgcctcgactatagctatgacgatttcctggacacagttcaggagaccgcaacaagcattgggaacgcaaagtccagcagaattaaaagatctgccccactcagcgattataagattaagcttatcttcaacattacagcttcagtcccactgcctgatgaacgtaacgatactctagagtgggaaaaccagcagaggctgctgcagactctagagactattaccaataagctcaaaagaaccttgaacaaggatcccatgtacagtttccaactggcctccgagattctcatcgcggatagtaattcgctagaaaccaagaaggcttctcctttctgccgccccgggagcgtactgcgcggtcgcatgtgtgttaattgtccattgggaacctactataacctggagcactttacatgcgaatcttgcaggataggaagctaccaggatgaagaaggccagcttgagtgtaagctgtgtcctagcgggatgtacacagagtacattcactctagaaacatatccgattgcaaggcgcaatgtaagcagggcacgtactcctactccggtctcgagacctgcgaaagttgcccactgggaacctaccagcccaaatttggatctcgaagctgcctaagttgccccgaaaataccagcaccgtgaaacgcggcgctgtgaacattagtgcatgtggagtgccctgtcctgaggggaagttctcccggtcaggcctgatgccgtgtcatccttgtccccgtgactactaccaacctaatgctggaaaggcattctgtctggcttgcccattttacggaactaccccctttgccggttccagatctatcaccgaatgctccagcttctcctcaactttttcggctgcagaggagagtgtagtgcctccagccagtttggggcacatcaaaaagagacacgaaatctcttcgcgcgtgttccacgaatgtttttttaatccatgccacaattcagggacttgtcagcagttaggtcgcggctatgtctgtctgtgccctttgggatacaccggcctgaaatgcgagaccgacatagacgagtgttccccgttaccatgtctgaacaatggtgtctgtaaagatctcgtgggagagttcatctgcgaatgccctagcggttatactggccagcgctgtgaagagaacattaatgagtgctcatcctcaccctgtttaaacaaaggaatctgtgtcgacggcgtcgcaggttaccgatgtacatgcgttaaaggttttgtgggactgcactgtgagaccgaagtcaatgaatgccagagcaatccatgcttgaataacgccgtttgcgaggatcaggtcggaggatttctgtgcaagtgtcctccaggcttcttaggcacccggtgtgggaaaaacgtcgacgagtgtctgtcccaaccatgcaaaaacggggcaacatgtaaagatggggctaacagctttcggtgtttgtgcgctgctggcttcaccggtagtcactgtgagctgaacataaacgagtgccagtccaacccatgcaggaaccaggcgacttgtgtcgacgagcttaattcctactcatgtaagtgccagcctggatttagtggaaaaaggtgcgagaccgaacaaagcaccggatttaacctcgacttcgaagtgtctggtatctacgggtatgttatgctggatgggatgctaccctccctgcatgctcttacttgtactttctggatgaagagcagcgacgatatgaattacggcacacctatctcttatgcagtcgataacggctccgataatacactactcctgaccgactataacggatgggtactgtacgtgaacgggagggaaaagatcaccaactgtccgtctgtcaacgacggccgctggcatcatatcgccattacatggacttctgctaacggcatttggaaagtatacatcgacgggaagctcagcgatggaggcgcagggttatccgtaggactacccatccccggcatgttttag

SEQ ID NO: 136728 - DNA, 2538 bp, synthetic construct
  misc_feature 1..2538: note = Description of Artificial Sequence: Synthetic coding sequence
  source 1..2538: mol_type = other DNA
atgagcccctcgcgcaatttttccttccgcctgttccccgagacagccccaggggcccctggctcaataccagcgcctccagcacccggcgatgaagccgccgggagccgggtggagcggctagggcaagcatttcgacgccgcgttcggctgctgcgtgaactgagcgaaaggcttgaactggtcttccttgtagacgattcatcaagtgttggagaggtcaacttccgctccgagctgatgtttgtgagaaaactgttgagtgattttcctgtggtgccaacggctactcgcgtcgctatagtgactttttcctctaaaaactatgtggtgcccagagtggattatattagtaccaggagggccagacaacataaatgcgcgctgctccttcaggagatcccagctatttcttacaggggggggggcacctacacaaaaggcgcattccaacaggccgcgcaaatcctgctccacgctcgggaaaacagtacaaaagtggttttcctcatcactgacggatactcaaatggtggagacccccgccccatcgccgcatccctgagagacagtggagtggagatcttcacattcggcatttggcaaggaaatattagggaactgaatgatatggctagtaccccaaaagaagagcattgttacttgctgcactccttcgaagaattcgaagccctcgcccgaagagctttgcatgaggatcttccctcagggtccttcatccaggacgacatggtccattgttcttacctgtgtgacgaaggcaaagattgttgcgatcggatgggtagctgcaagtgcggaacacacacaggccacttcgagtgtatttgcgagaaagggtattacgggaaggggctgcagtacgagtgtacagcatgtcccagcgggacctacaagccggaaggcagcccgggcggaatttcttcttgcattccttgcccggatgaaaaccacacctctcccccaggctcgacaagccccgaggactgcgtttgcagagagggttatagagcctccgggcagacgtgcgagctcgttcactgcccggccctgaagccccctgagaatggttatttcattcaaaacacctgcaataatcacttcaacgcagcctgcggggtgaggtgtcacccgggatttgaccttgtcggcagcagcatcatcctgtgcctgcctaatgggctgtggtcaggcagcgagagttattgccgggtgcgcacctgccctcacctgagacagcccaagcacgggcacatctcctgtagtactcgagagatgctgtataagacaacctgcctggtagcttgtgacgaaggctatcgacttgaaggctcagacaagctgacctgtcaaggaaatagccagtgggacggcccggagcccagatgtgtggagcgtcattgttctaccttccaaatgcccaaagacgtgatcatcagtcctcacaactgcgggaagcagccagctaaattcgggacaatttgctacgtgagctgcaggcaaggttttatcctctccggagtgaaggagatgctgcgttgcactacgagtggtaagtggaatgtgggagtgcaggccgcggtctgcaaagatgtagaggcccctcagattaattgccctaaagatatcgaggccaaaacactggagcagcaggattcagccaacgtcacctggcagatccccacagccaaggacaactccggcgaaaaagtgtcagtgcatgtgcatccggcatttacacccccctacctgttccctatcggtgatgtagccatcgtgtataccgctactgatctcagcgggaaccaggcgagttgtatcttccacattaaggtgatagatgccgagccacccgtgatcgattggtgccggtctccccctcccgtccaggtcagtgaaaaggtccatgccgccagctgggacgagcctcaattttccgacaattccggagccgaacttgttataactagaagccacacccagggtgatctatttccgcagggcgagactatagtccagtacaccgctaccgatcccagtggcaacaatagaacttgtgacatccatattgtgatcaaggggagcccttgtgagatcccattcactccagtaaacggcgattttatctgcaccccggataatactggcgtgaactgtaccctcacctgcttagaggggtacgatttcactgaaggaagtacggataaatactactgcgcgtatgaagacggggtgtggaagcccacctacactacggagtggcccgactgtgctaagaagaggtttgcaaaccacgggtttaagagcttcgaaatgttttacaaagcagcccgatgcgatgacactgacctgatgaaaaagttctctgaagcttttgaaactaccctcggaaaaatggttccctccttctgcagtgacgcagaggatatcgactgtcggctggaagaaaacctgaccaaaaagtactgcctggagtacaactatgattacgagaatggtttcgcaatcggtaactag

SEQ ID NO: 136729 - DNA, 1548 bp, synthetic construct
  misc_feature 1..1548: note = Description of Artificial Sequence: Synthetic coding sequence
  source 1..1548: mol_type = other DNA
ctggagaaccagctggtccttaaagaactcactactgaagtaggtgtggtgacattttcatgtaaagagggacatgtgctacagggcccaagcgttcttaagtgcttacccagtcagcagtggaacgactcatttccagtgtgtaagatcgtactgtgcacacctccacctctgatctctttcggagtgccgatccctagctccgctctgcacttcgggtcaacagttaagtattcgtgtgtgggcggtttctttttgaggggaaactccaccaccctgtgtcagccagatggcacatggagtagcccactccccgagtgcgtgccagttgaatgcccccagcctgaggaaatccccaatggcattattgatgtgcagggtctcgcctacttgtctacagctctatatacctgcaagcctggcttcgaactggttgggaacacaacaacattgtgtggagaaaacggccattggctcggaggcaaaccaacatgtaaagccattgaatgtctgaagcccaaggaaattttgaacggcaagttttcctatacggacttgcactacggacagacagtcacatactcctgtaatagaggcttccgactggaaggacccagtgcgttaacctgtctcgagactggggattgggacgtggatgccccttcatgcaacgcaattcattgtgatagtccacagccaatcgagaacggctttgttgagggcgctgattacagttatggggcgattattatttatagctgcttccccgggttccaggttgccggacatgccatgcagacatgcgaggagtcagggtggagcagcagcatacctacttgcatgccaatcgattgcgggctcccaccacacatcgattttggcgactgcacaaagctaaaagacgatcaaggttattttgagcaagaagacgacatgatggaggttccctatgtgactcctcatcctccttaccacctgggtgccgtcgcaaagacatgggaaaacacaaaagaatcccccgcaactcacagttcaaatttcctgtacggcacaatggtttcctacacgtgcaacccaggctatgaacttctggggaatcccgtgctcatttgccaagaggatggtacctggaacggtagcgcgccttcatgtataagtattgaatgtgatctaccaactgctcccgagaacggcttccttcgcttcaccgagacctcaatgggttccgcagtgcagtattcttgcaaacccggacacatccttgcaggctcggatctgcgtctctgcctcgaaaacaggaagtggagtggcgccagtccccggtgcgaagccatttcttgcaagaagccaaaccccgtgatgaatggatcaatcaagggctcgaattacacgtatctttccacattatactacgaatgcgatcctggctacgtgctgaacggcactgaaaggcggacatgccaggacgataagacagggatgcgcatgagtccctttgcatttctgtggacagctgttcatcctcagtcccagcccatggctagatag

SEQ ID NO: 136730 - DNA, 10647 bp, synthetic construct
  misc_feature 1..10647: note = Description of Artificial Sequence: Synthetic coding sequence
  source 1..10647: mol_type = other DNA
atgtctccctccaggaacttctcatttcgtctattcccagagacagctcctggtgctccagggtccattcctgcgcctcccgcgcctggagatgaagctgccgggtcacgggtcgagagacttggccaagcctttagacgccgggtgcgtttactgcgggagctttccgaaagactggaactggtcttcctcgtggacgattctagttccgtgggggaagtaaactttcggagcgagttaatgtttgtgcgcaaacttcttagtgactttccagtggtgccgacagcaacacgggtagcaattgtgacattcagctcgaaaaactacgtagttccccgcgtggactacattagcactaggcgagctagacagcacaaatgcgctctcctcctacaggagatcccagccatcagttaccgcggtggtggaacctatacaaagggtgcctttcagcaggcggcccagatcctactgcacgcccgtgagaactccaccaaggtcgtgtttcttatcacggacggttattctaatgggggcgatcccagacctattgcagcttctctgagggattcaggagtcgagatcttcacttttggtatttggcagggaaatataagggaactcaacgatatggccagcacaccgaaagaagaacactgctatttactccacagcttcgaagaatttgaagccctggctaggagagctctccacgaagatctaccatccggatccttcatccaggacgatatggtacattgctcctacctgtgcgatgaaggcaaggattgttgcgatagaatgggctcttgcaaatgcggcacacacaccgggcacttcgaatgtatctgtgaaaagggatactatggcaaaggcctccaatacgagtgcactgcgtgcccaagcggcacgtataaacctgagggtagtcccggcggaatttcctcttgcattccctgtcctgacgagaatcacacatcacccccaggttccacaagtccagaggactgcgtgtgccgggagggatatagagcctcgggacagacctgtgaactcgtgcactgcccagctctcaagccacctgaaaacgggtactttatccagaacacatgtaataatcactttaatgctgcgtgcggcgtaaggtgccacccggggttcgatctggtcgggtcctctattatactgtgcctgccgaacggattatggtcagggtcggagtcctactgtcgcgtgaggacatgcccacacctgagacaacctaaacacggccatatctcctgcagcacccgagagatgctctataagactacatgtctcgtggcctgtgacgaaggatacaggttggagggatcggataagttgacctgtcaggggaatagccaatgggatggcccagaaccccggtgtgtcgagcgccattgttcaactttccagatgccaaaagatgtcataatctcaccccacaactgcggaaagcaacccgctaaatttggtactatctgttatgttagctgtcggcaaggtttcatcttgtccggcgttaaagaaatgcttcggtgcaccacctctgggaagtggaatgtgggggtgcaggccgctgtctgcaaagacgtcgaagccccacagatcaactgtccaaaggacatcgaggctaagacactggaacagcaagattccgccaatgtgacatggcaaatcccaacggccaaggataatagtggcgagaaggtctccgtgcatgtacaccccgcattcactcctccttacctgtttccaattggtgacgtggcaattgtgtatacggctaccgacttgagtggtaaccaagcttcctgtatttttcacatcaaagtgatcgatgccgagccaccagtgattgactggtgtagatcgccccctcccgtacaagtgtcagaaaaagtccatgctgcttcttgggacgaaccccagttctctgacaacagcggggcagagctggtgatcacgagatctcatactcagggcgatctctttcctcagggggaaactatcgtacagtacacggctaccgatcctagcggaaacaacagaacatgcgacatccacattgtgatcaagggctccccatgcgaaatcccgtttacaccagtgaatggggacttcatttgcactccagacaacacaggcgtcaactgtacgctgacctgcttggagggctacgatttcacagagggctccacagataagtattactgtgcttatgaggacggcgtttggaaacccacctataccactgaatggccggactgcgccaaaaagaggttcgcaaaccatgggttcaaatcttttgagatgttctacaaggctgcccgttgcgacgataccgatctgatgaagaaattttctgaggcttttgagactaccctgggcaaaatggtgccttctttttgttctgatgccgaggatatcgactgtagactggaggagaacctaaccaaaaaatactgcctggaatacaattatgattacgaaaacgggttcgctatcgggcccggcggctggggagctgctaacagactcgactattcctatgacgatttcctcgatactgtccaagagacagcaactagtatcggcaatgcaaaaagcagccgcattaagaggagtgcccccttgtctgattacaaaattaaactcatttttaatatcacagctagcgtccccctcccggacgagcgcaatgacaccctggagtgggagaatcagcagaggctgctgcagactttggagaccatcaccaacaagctcaaaaggaccttgaataaagatccaatgtatagtttccagttggcctcagagatccttatcgcggatagtaactctctcgaaaccaagaaggccagcccattttgtaggccaggatctgttctgcgcggccgaatgtgcgtcaactgcccactgggaacctactacaatcttgagcatttcacttgtgagagctgccgaataggaagttatcaagatgaagaaggacagctggaatgcaagctgtgtccatcgggaatgtatactgaatacattcattcaaggaacatcagcgactgtaaagcccagtgtaaacagggtacctactcttactccggtctggagacatgcgagtcatgccccctcggcacttaccagccaaagttcgggtccaggtcgtgccttagctgtcctgagaacacctctacggtgaagagaggcgctgttaacatatctgcgtgcggggtgccttgccccgagggcaagttttctaggagtggtttgatgccttgccatccttgccccagggattactaccagcctaacgccggcaaggcattttgcctggcatgtcccttctatgggaccacgccatttgcaggatcccggagtatcaccgaatgttctagttttagctccacattttctgcagctgaagaaagtgtggtgccacctgcaagcttgggacacatcaagaagaggcacgagatctcctcacaggtgttccatgaatgcttcttcaatccatgccacaatagcggtacgtgccagcagctgggacgtggctacgtgtgcctgtgtccattaggctatacgggccttaagtgcgaaactgacattgatgaatgtagcccgctaccctgcctcaacaatggggtgtgcaaagacctagttggtgaattcatttgtgagtgcccaagcggctatacaggtcagagatgtgaggagaacattaacgagtgctcatcgtccccctgcttgaataaaggcatatgtgtggacggcgtggcaggctaccggtgcacttgtgtcaagggctttgtgggcctgcattgtgaaaccgaagtgaatgagtgtcagtccaacccttgtttgaacaatgccgtctgtgaggatcaggtgggtggatttctgtgtaagtgcccacctgggttcctggggaccaggtgcggaaagaatgtggacgaatgcctttcccagccttgcaaaaatggcgctacctgtaaagatggcgccaattcttttcgctgcctctgtgcagccgggttcaccggctcccattgtgaactcaatattaatgaatgccaaagcaatccatgccgcaatcaagcgacctgcgtcgacgaacttaatagctattcctgcaaatgtcaacctggattctcaggcaagaggtgtgagactgaacagagtactgggttcaacttggacttcgaggtgagtggaatttatggctacgttatgctggatgggatgctgcccagtctgcatgctctgacgtgcacattttggatgaagtccagtgacgatatgaattacggaactcctatctcctacgccgtggacaacggctctgataataccctgcttcttacagactataatgggtgggtgctttacgtgaatgggagagagaaaatcaccaattgcccttcagtgaacgatggcagatggcaccacatcgccattacctggacaagcgccaatggcatttggaaggtatacatagatggaaagctgagcgatggtggagccggactgagtgtgggattgcccatcccaggcggcggggccctcgtgcttggtcaagagcaggacaagaagggcgagggtttttcccccgcagagtcctttgtgggatccatatcacagttgaacttgtgggattacgtgcttagtccccagcaggtgaagagccttgctacaagttgtcccgaagagttatctaaggggaatgttctggcatggcccgactttcttagcggaattgttggcaaagtaaaaatcgactcaaagtcgatcttttgcagtgattgtccccgcctggggggctctgtgccgcacctgcggaccgcatcagaagacctgaagccgggttccaaagtaaacctgttctgcgatcccggattccagctggtgggaaatcccgtgcagtattgtctcaaccagggacagtggacccaaccactgccccattgtgagcgcatctcctgcggcgtgcctccacccctggagaatgggttccactctgcggacgatttctacgcggggtccactgtcacgtaccagtgtaacaacggatattacctgctgggtgattctagaatgttctgcaccgacaatggcagctggaacggagtcagcccttcatgcttggacgtagatgagtgcgccgtaggcagcgactgcagcgagcacgcaagttgtctcaacgtggatggttcatacatctgttcctgtgtgcctccttacacaggtgacggcaaaaactgcgctgagcccattaaatgcaaagctcccggcaacccagaaaatgggcattcatccggcgaaatttacactgtcggcgcggaggtcacctttagctgtcaggaaggatatcaactgatgggcgtgacaaaaatcacttgtcttgagagcggtgaatggaatcaccttatcccgtattgtaaagcagtctcatgcgggaaaccagctatacctgagaatggatgcatagaagagttagccttcactttcgggtcaaaggtgacatatcggtgcaataaaggctacacgctggctggagacaaggaatcttcctgtctggcgaactctagctggtctcattcaccccctgtgtgtgagccggtgaagtgtagtagtcccgaaaatatcaataatggaaagtatatcctgagcggacttacctacttgtccacagcaagttacagttgcgatacgggctattccctgcaagggcccagcatcatcgaatgcactgccagcggcatatgggaccgggcaccaccagcctgtcatttggttttctgtggagaacccccagcaatcaaggacgccgtcattaccggcaacaatttcacgttccgtaatacagtcacttacacgtgtaaagaggggtatacactagctggcctagataccatagaatgcctggctgacgggaagtggagtaggagcgatcagcagtgcctggctgtttcttgcgatgagccacctattgtggatcatgcaagccctgaaaccgctcaccgtctgttcggggatattgcattttactactgctcagatggctacagcctggccgataattcccagctgctgtgtaacgcccagggcaaatgggtccccccagaaggacaggatatgcccaggtgcattgcgcacttctgcgaaaaacctccctctgtgtcctattcaattctggaatctgtcagcaaggctaagttcgccgcaggaagcgtggtgtctttcaaatgcatggaggggttcgtgcttaacacttcagctaagattgagtgcatgaggggtggccaatggaacccgagcccgatgagcatccagtgcatccctgtacggtgtggagagcctccaagtatcatgaatggatacgcatcagggagtaattattcctttggagccatggtggcttattcctgcaataaggggttctacatcaaaggcgagaaaaagtctacgtgcgaggccacggggcagtggtcttcacctattcccacatgtcatccagtttcatgcggagaaccacccaaagtggaaaacggcttccttgaacacaccacaggcaggattttcgagagtgaggtccggtatcagtgcaacccaggctacaagtccgtgggatctcccgtattcgtgtgtcaggctaatcgacattggcatagcgagagtcccctgatgtgtgtccccttggattgtggcaaaccccctcccatccagaatggttttatgaaaggtgagaatttcgaggtgggatctaaggtgcagtttttttgcaatgagggctacgaactggtaggcgacagctcatggacctgtcagaagagtggaaagtggaataaaaagtctaaccccaagtgcatgcccgccaagtgccctgagccgcctctattggagaaccaactagtgctaaaggaattgactaccgaggtgggcgtggtaacgttttcatgcaaagagggacacgtgctgcagggcccctccgtgcttaagtgtctacccagccaacagtggaacgactcattccccgtctgtaagattgtcctgtgtacccccccaccccttatcagcttcggagtgcccatcccaagctctgccctgcattttggctcaacggttaagtattcatgcgtgggagggtttttcctgcgtggcaactccaccactctctgccagcccgacggcacatggagctcccccttgccggagtgtgttcccgtcgaatgtcctcagcccgaggaaataccgaatgggataatagatgttcagggactcgcgtatttgtctaccgcgctctatacctgtaaacccgggtttgaactcgtcggaaataccactaccttgtgtggcgagaatggccactggcttggcggcaagcctacgtgcaaggccattgaatgcctgaaacctaaggagattttgaatggaaaatttagctacacagatttgcactatggccagaccgtgacatactcttgcaataggggctttaggctagagggaccctccgccctcacttgtctcgagacaggagattgggacgttgatgccccatcctgcaacgccattcactgcgacagtccacagccgatcgagaatgggtttgtggaaggcgctgactattcctatggagccataattatttatagttgctttcccggctttcaggtggctggacacgctatgcaaacatgcgaggagtccggctggagcagctctattccgacttgcatgccaatcgattgcggtcttcctcctcatatagacttcggcgactgtactaaactgaaagacgaccagggctactttgaacaggaggacgacatgatggaggtcccgtacgttaccccacatcctccttaccacctcggcgccgtagctaaaacatgggagaataccaaagagtcccccgctactcattctagcaatttcttgtacggtaccatggttagctatacatgtaaccccggatatgaactactcggcaaccctgtactgatttgccaggaggatggtacctggaacggctcagcccctagctgcatctctatagagtgcgacctgcccactgcccctgagaacgggttcctcagattcaccgagacgagcatggggagtgcggtgcagtactcttgtaaacccgggcacatactggcaggctcagatctgagactgtgccttgaaaatcggaaatggtcaggtgctagtccccgttgcgaggccatttcctgcaagaaaccgaatcctgtgatgaacggcagcattaaaggttctaactatacctatctttcaaccctgtattacgagtgtgacccgggttacgtactcaacggcaccgagcggagaacgtgccaggacgacaaaaattgggatgaggatgagccaatttgtattcccgtcgactgtagcagccctcccgtaagtgcaaatgggcaggtgcgcggagacgaatacactttccagaaggaaatcgaatacacctgtaacgagggtttcctgctcgagggtgccagatcaagggtgtgtcttgctaatggctcatggagcggagctaccccggattgcgtgccagtgaggtgtgcaacacccccgcagcttgcaaacggagtgactgagggactcgactacggattcatgaaggaggtgaccttccactgtcatgagggctatattctgcacggtgcaccgaagctgacgtgccaaagcgacggcaactgggacgcagaaattccattgtgcaagcctgtgaactgcggcccccctgaagacttggctcatgggttcccgaacggttttagtttcatacatggcgggcacatccagtaccagtgtttccccgggtacaagctgcatggcaactccagcaggcgctgtttatctaatggctcctggtccggctcctctccctcctgcctgccgtgccgctgtagcactccagttatcgagtacggaacagttaacggcaccgactttgactgtggaaaagctgccagaattcaatgtttcaaaggctttaagctgttagggctctcagaaataacgtgtgaagcagacgggcagtggagcagcgggttcccacactgtgaacacacatcttgtggctcgctccccatgatcccgaacgcctttattagcgagactagctcctggaaggagaacgtgattacttacagttgtaggagtggctacgtgatccagggatcctccgatttgatctgcacagagaaaggggtctggagtcagccatacccagtgtgcgagcccctctcatgcgggagcccaccctcagttgccaacgccgtggccaccggggaggcacacacctacgagtcggaggtgaaactgcgctgcctggaggggtacaccatggatactgatactgacacctttacctgtcagaaagacgggaggtggtttcccgagaggattagctgttcccctaaaaaatgtccactcccggagaatattacacacatcttggtccatggggatgatttttcagtaaatcggcaggtttcagtgtcctgtgccgaaggatatacctttgagggggtgaacatctcagtgtgccagctagacggcacctgggagcctcctttttcagatgaatcatgctctccggtgtcttgcgggaaacccgaatctccagaacacggttttgtggtagggtcaaagtacacattcgagtcaactattatttaccagtgcgaaccgggatatgaactggagggtaatagggagagggtatgtcaggagaaccgccagtggagtggtggcgtggcaatctgtaaagagacaaggtgcgagacgcccctcgaattcctgaatggtaaggccgacatagaaaatcgaaccactggccctaatgtggtttattcatgtaatcgaggctactccctcgaagggccaagcgaagcacattgcacagaaaatggaacttggagccaccctgttcccttgtgtaaacccaacccctgccccgtccccttcgtgattcccgaaaatgcccttttaagcgaaaaggagttttacgttgaccaaaatgtctcgatcaagtgtcgtgaggggtttcttttacagggacacggcattataacctgcaaccctgacgagacatggacacaaacctccgccaaatgcgaaaaaatttcctgtggcccccccgctcatgtcgagaatgccatcgccaggggggtacactaccagtacggtgatatgatcacctattcatgctactccggctacatgttggaaggttttttaaggtccgtgtgtctcgagaatggcacttggacatccccaccaatctgtcgggctgtgtgcaggtttccctgccaaaatggtggaatctgtcaacggcctaacgcttgcagctgtccggaaggttggatgggacggttatgcgaagagcccatctgcattttgccgtgcctgaacggtggaaggtgcgtggctccataccagtgtgattgtccacccgggtggaccggcagccgctgccacacagcagtgtgccaatccccatgtttaaacggtggcaaatgcgtgcggccaaatcggtgtcattgtcttagtagctggaccggccataattgtagtcgtaagaggcgaacaggattttag

SEQ ID NO: 136731 - DNA, 10716 bp, synthetic construct
  misc_feature 1..10716: note = Description of Artificial Sequence: Synthetic coding sequence
  source 1..10716: mol_type = other DNA
atgtggcccaggctggccttctgttgctggggccttgcccttgtgtcaggatgggccacttttcagcagatgagtcccagcaggaactttagtttccgtctgtttcccgaaacagcccccggagccccggggtcaatccccgctcctcccgcccccggggatgaggcagcaggatctagagtggagcgcctgggtcaagcctttaggaggcgggtacgactgctccgggagctctccgaacggctagaactagtatttctagtggacgactcctccagtgtgggagaagtaaactttaggtccgaactaatgtttgtccgaaagcttctctcagattttcccgtcgtgcctaccgccactcgagttgccattgtgaccttcagttccaagaactacgtggtgccaagagtcgattatatcagcacccgcagggcccgtcagcataaatgcgctctgcttctgcaggagattcctgctataagctaccgggggggaggaacttacactaaaggcgctttccagcaagccgcacagatcctgctccacgccagggagaacagcaccaaagtggttttcctgatcacagatggttattctaacggaggcgatcctcggccaatagccgcttccctgcgggatagcggagtggaaatcttcacgtttgggatctggcagggcaacattagggagcttaacgacatggcttccacaccaaaagaggagcactgctatctccttcactcattcgaagagtttgaggctctggcacgcagggctcttcatgaagacctaccatctggcagctttatccaggatgacatggtccactgctcatatctctgcgacgaaggcaaagactgctgtgatcggatgggcagctgcaaatgcgggacacacacggggcattttgagtgcatatgcgagaaagggtactacggaaaaggcctccagtacgaatgcaccgcatgcccatctgggacatacaagccagaaggatcgccaggcgggataagctcttgtatcccctgtcccgatgaaaatcatacctctcctcccggatccacttcaccagaagactgtgtgtgccgcgagggctacagagcatccgggcagacatgtgagctggtccattgtcctgccctgaagccacccgagaacggatatttcatccagaacacgtgtaataatcatttcaatgcggcgtgcggcgtcagatgccatcctggattcgatctggtaggctctagtattatcctttgtctgcccaacggtctgtggagtgggtctgaaagctattgccgcgtccgcacatgtccacaccttcgccagccgaagcatggccatatcagttgttccacacgcgaaatgctctacaaaacgacttgtctcgtcgcttgcgatgaaggataccgcctcgaagggagcgacaagctgacctgccaggggaatagccagtgggatggcccagagcctcggtgcgtggaaaggcactgtagcacctttcagatgccgaaagatgtaattattagtcctcacaactgcggaaaacaacctgctaagttcggcacaatttgctatgtctcatgcagacagggatttatcctgtcaggcgtcaaggagatgctaaggtgtactactagtggtaaatggaatgtgggtgtacaggccgctgtgtgcaaggacgtggaagctcctcagatcaattgtcccaaggatatcgaggccaagactctggagcagcaggattctgctaatgtaacctggcagatccctacggccaaagataatagcggggagaaggtctctgtgcatgtgcacccggcctttacgcctccatacttgttcccaataggcgatgttgcaattgtgtacacagccactgacctgtctggtaaccaggcgagttgtatctttcatattaaggtcattgacgctgagccaccagtgatagactggtgtcgaagtccccccccagttcaggtgagtgagaaggtacatgcagcctcttgggatgaaccccaattctccgataattccggggcggagctagtgattacccggagccatacacagggcgacctgtttcctcagggtgaaactattgtgcagtatactgcaaccgatccttcaggcaacaatagaacatgtgatatccacatcgtgatcaagggttccccctgtgagatcccatttactcccgttaacggtgacttcatctgtacccccgataatacgggcgtgaattgtaccctgacatgtctggaagggtatgattttactgaagggtcaaccgacaagtattactgtgcctacgaagacggagtgtggaaaccgacatatacgacagaatggcccgactgtgctaagaagcgcttcgcaaatcacggcttcaagtctttcgaaatgttttataaggccgccaggtgtgacgatactgaccttatgaagaagttttctgaggcctttgaaactactttagggaagatggtgccatcattttgcagtgacgctgaagatatcgactgccgactcgaggagaatttaacaaaaaagtactgtcttgagtacaattatgattatgagaatgggtttgcaatcggacccggggggtggggagccgcaaaccggctcgactacagctacgacgacttcttggatactgtgcaagaaacagctacttctatcggtaacgccaagtcatcccgtataaaacgctctgcacctctatccgactataagatcaagctgatcttcaatattacagctagtgtccccctgcccgacgaacgtaatgatacacttgagtgggagaaccaacagcggttgttgcagaccctggaaaccattacaaataagctgaagagaacactcaataaggaccctatgtattcattccagctggcctccgaaatcttgatcgccgattctaactctctggaaaccaagaaggcctctcccttctgtagacccggatctgttctgagggggagaatgtgcgtaaattgtccactgggcacgtactacaacctcgaacacttcacatgcgagtcctgccgaatcggctcatatcaggatgaagaggggcagttagagtgcaaactgtgtccctcaggcatgtacacggaatacattcacagccggaacatcagcgattgcaaggctcaatgtaagcagggaacttactcctattccggtctcgagacctgcgaaagctgtcccctgggaacctaccaacctaagtttggatcccgaagttgtctgtcatgccccgagaataccagtaccgtgaagcgaggagccgttaacattagcgcttgcggcgtgccctgccccgagggcaaatttagtaggagcggcttgatgccttgccacccctgcccaagggactactatcagcctaacgcaggcaaggcattctgcttagcctgccctttttatgggacaacgccttttgccgggagcaggtcgatcactgaatgcagtagcttcagtagtacgttctcagccgctgaggagagtgtcgtgccccctgcatccttggggcacattaagaaacggcacgagatctcttcacaggtgttccacgaatgtttctttaatccatgccacaacagtggcacatgccaacagttggggaggggatacgtgtgcctctgccctcttggctacaccggtctgaagtgcgagaccgacatagatgagtgcagtcccctaccttgcttgaacaacggagtttgtaaagacctggtcggcgaattcatctgtgaatgtccgtccgggtacactggacagcgatgtgaggagaatatcaacgagtgtagcagctctccgtgccttaacaagggcatctgcgtggatggagtggccggctataggtgcacgtgcgttaaaggattcgtgggcttacattgcgagactgaagtcaatgagtgtcaatctaacccatgccttaacaacgccgtctgcgaagatcaggtcggggggttcctttgtaagtgcccccccggctttctggggacaaggtgcgggaagaacgtcgacgaatgcctttcccaaccatgcaagaatggcgccacgtgcaaggacggagccaactctttccggtgtctgtgcgcagccgggttcacaggatctcattgcgaactgaatatcaatgaatgccagagcaatccctgccgtaaccaggccacttgcgtggacgaattgaatagttactcgtgtaaatgccaacccggattcagcggaaagcgatgtgagaccgaacagtccactggctttaacctggactttgaagtttctgggatttatgggtacgttatgctggatggtatgcttccgagccttcacgcactaacttgcacattttggatgaaaagctcggacgatatgaactatggaaccccgatttcatacgctgtcgataacggaagcgataatacgttgttgctaacagattacaacggatgggtcctatacgttaacggacgcgagaagatcaccaactgcccgtcagtcaacgacggacgctggcatcatatcgccatcacctggaccagcgccaatgggatttggaaggtgtatatcgacggcaaactgtccgatggcggtgccggactgtcagtaggattacctatccccggtggaggcgcgctcgtacttggacaagagcaggataaaaagggggaaggctttagtcccgcggagtcatttgtgggatccatcagccagctgaacctgtgggactacgtactgtctccacagcaggttaagtctctggcaacatcatgtcctgaggaattgtccaaggggaacgtcctcgcttggccagattttctgtcaggaatcgtaggtaaagtgaaaattgattcaaagtccattttttgttcagactgtccaagacttggcggatccgtgccccatctccgcaccgcctccgaagacctgaaacctggcagcaaggttaacctgttttgcgaccccggctttcagctggttgggaatcccgtgcagtattgtttgaaccagggacagtggactcaaccactacctcactgcgagagaataagctgtggggtacctcccccattagaaaatggcttccattccgctgatgacttttacgccggctcaaccgttacctaccagtgcaacaacggatactatttactgggtgactcaagaatgttttgcacagataatggaagttggaatggagtctccccttcctgccttgacgtcgatgagtgtgctgttgggagcgactgttctgagcacgcttcgtgtctgaatgtcgacggatcatatatctgctcatgtgtaccaccatacactggcgacgggaagaattgcgcagaacccatcaagtgtaaggcaccgggcaatccagaaaatggccatagttctggggaaatatacacagtaggtgccgaggtgacattttcatgtcaagaagggtatcagctgatgggcgtgaccaagataacttgtctagaatctggtgagtggaaccacttgataccatattgcaaagcagtgtcatgtggcaagccagctatccctgaaaacggatgtattgaagagctcgctttcaccttcggcagtaaagtgacataccgctgcaataaaggatacactttggcaggggataaagagtcgtcgtgcctcgccaactcatcctggtctcattccccacctgtctgtgaacctgtgaagtgttcaagccccgaaaacattaacaatggcaagtacatcctatccggccttacatacctttcaaccgccagttatagttgtgataccggatacagcttacaaggcccctctattatcgagtgcaccgcctccggaatctgggacagagctccacctgcctgtcatctggtgttctgtggggagccgccggccatcaaggatgccgtgatcacagggaacaattttaccttcagaaacacggtgacatatacctgcaaagaagggtacacactggccggtctggacactatcgaatgcctggctgacggcaaatggtcccgttccgatcagcagtgcttagctgtcagctgtgacgagccacctattgtggaccacgctagcccagagacagcacaccgtctgttcggtgatatcgcgttctactactgttccgacgggtattctctggccgataattcccagcttctgtgcaacgctcagggcaaatgggtgcctcctgagggacaggatatgcctcgttgtatagctcacttctgcgaaaagccaccttcagtgagctatagtatcctggagtccgtatccaaagctaagttcgccgctggcagcgtcgtctcattcaagtgtatggagggttttgtcttaaatacctccgccaagattgaatgtatgcgaggcggccaatggaacccatcacccatgtcaattcagtgcatccccgtcaggtgcggcgaacctccatccatcatgaatggttatgctagcggatcgaactatagctttggcgccatggtggcttactcctgcaataaaggattttatattaaaggcgagaagaaatctacttgtgaagcgacagggcagtggagcagtccaattcccacttgccacccagtttcttgtggcgaacctccaaaggtggaaaatggatttttagagcatactaccggtaggatatttgaaagcgaggtgcgctaccagtgcaatccgggttacaagagtgtagggagtcccgtcttcgtgtgccaggccaatcggcattggcactctgaatcccccctgatgtgtgtccccctggattgtggcaagcccccccccatccagaacggattcatgaagggcgaaaattttgaagtgggttcaaaggtacaattcttctgtaatgaggggtatgaacttgtaggcgactcctcctggacctgtcaaaaatccgggaaatggaataagaagagcaacccaaagtgcatgcccgctaagtgcccagagccacccctgttggagaaccaattagtccttaaagagcttactacagaggtgggggtggtgactttttcatgcaaggagggacacgttctgcagggcccgagtgtgctgaaatgcctgcctagccagcagtggaacgactccttcccggtatgcaaaattgtgctatgtacaccgccacctttaatttcattcggtgtgcctatcccctcctcagctcttcacttcggctcaacagtcaagtatagttgtgtgggcggatttttccttagaggcaacagcaccactttatgtcagccagatgggacttggtcttctcctctgcctgagtgcgtgccggtggaatgcccccagccggaagagatccccaatggcatcatcgacgtacagggattagcctatttgtccactgctttgtacacttgtaaacctgggtttgagctggttgggaatacgactaccctttgtggcgagaacggccattggttaggcggcaagccgacctgcaaagcaatcgaatgtctgaagcccaaggagattttgaatggcaagttctcatatacagacctgcactacggtcagacagtgacttatagctgcaaccggggtttccgtctggaggggccctctgcactcacatgtttggagaccggcgactgggacgtagacgcgccaagttgtaatgcaatacactgcgatagccctcagcctatcgagaatggcttcgtggagggggctgattatagctatggggcgatcattatctactcttgttttccaggctttcaggttgccggccacgcaatgcagacatgcgaagagtcaggttggagttcctctatccccacctgcatgcctattgactgcggactgccccctcacatcgacttcggcgattgtacaaagctcaaggacgatcagggttatttcgagcaggaggacgacatgatggaggtgccttacgttacaccacatccaccgtaccatctcggcgcagttgcaaagacatgggagaacacaaaggagtctcccgctactcattcttctaatttcctttatggcacaatggtatcttacacatgcaacccaggctatgagctattgggtaatcctgtgctgatttgtcaagaggacggcacgtggaatggatctgccccaagctgtatctcaattgagtgtgatctacctaccgctcccgaaaatggatttctgcgctttacagagaccagcatgggttctgctgtgcaatatagttgcaagcctggacacatcctggctggttctgatcttaggttgtgtttggagaaccggaagtggtccggagcttcccctcgctgcgaggccatcagctgtaaaaaaccgaaccctgtgatgaatggttccattaagggatcaaactatacttacttgtccacgctgtattatgaatgcgatcccgggtatgtattgaatggcacagaaaggcgcacctgccaggacgacaagaattgggacgaggatgagcccatatgcatcccagttgactgctccagtccccctgtgtccgccaacggacaggtccggggagacgagtatacctttcaaaaggaaattgagtacacttgcaatgaaggctttctcctggagggggccagatctagggtgtgcctggcgaatggaagttggtccggcgctacacctgattgcgtccctgtgcgctgcgcaacaccccctcagctggcaaatggcgtgactgaaggcctcgattatggatttatgaaagaggtcacattccactgccacgaggggtatattttacacggtgctccaaagctgacgtgtcagagcgacggaaattgggatgccgagatacccttgtgtaaaccagtcaactgtgggccgcctgaagatcttgcccacggatttccaaacggcttcagctttatccacggtggacatattcagtatcaatgcttccccggatataagctccacggaaatagctctcgtcgctgccttagtaacggatcatggtcgggaagctctccatcttgcctgccttgtcgatgttcaacacccgtgattgagtatgggaccgtgaacggtactgattttgattgcggtaaggcggcacgcatccagtgctttaagggcttcaagctgctgggtctctctgaaattacctgtgaagccgacggccagtggtctagtgggttcccacattgcgagcatacatcttgtggcagcctccctatgattcctaacgcgttcatttccgagacttcctcttggaaggaaaatgtgattacatatagttgcagatctgggtacgtcatccagggtagctccgatctgatctgtacggagaagggggtgtggagccagccgtacccagtatgcgagccactgtcttgcgggtctcccccttccgtcgccaatgccgtagcaactggagaggcacacacgtatgagagcgaggtcaagcttcgctgtcttgagggatacactatggacacagacacggatacattcacatgtcaaaaggatggcaggtggtttcctgagagaataagctgttcccctaagaaatgtcctctgccagaaaatattacgcatattcttgttcacggagacgactttagcgtaaaccgtcaggtgtctgtctcttgcgccgaaggttacactttcgagggcgtgaacataagcgtctgccaactggacgggacctgggagccccctttctccgacgagtcgtgttcacccgtgtcctgcggaaagcccgaaagtcccgaacacggattcgttgtaggcagtaagtatacattcgagtcaactatcatctaccagtgtgaacctggatatgagctcgaaggaaatagagagcgagtgtgccaggaaaataggcagtggtctggtggcgtagcgatttgtaaggagacccggtgcgaaactcctcttgaattcctcaacggaaaggcggatatcgaaaataggaccaccgggcccaatgtggtctatagttgcaaccgtggctacagcttggaggggccgtccgaagctcattgcaccgaaaacggaacttggtcacatccagtgcccctatgtaaacctaatccctgccctgtgccgtttgtaattccagaaaacgcactcctctccgaaaaagagttctatgtagaccagaatgtatcgattaagtgtcgcgagggattccttctgcagggtcatggcattatcacatgtaatcctgacgaaacttggacccagacctctgccaaatgcgagaaaatcagctgtgggccccctgcacatgtagaaaacgcaatcgccagaggcgtacattaccaatatggagacatgattacatattcctgctatagcggttacatgttagaagggtttctgcgcagcgtatgccttgagaatggaacgtggacgtctccaccaatttgtagggccgtctgtcgcttcccctgccaaaacggaggaatctgccaacgacctaacgcctgtagctgtccggaaggttggatgggaaggttatgtgaggagccaatttgtatcctgccatgtctcaatgggggtcgctgcgtcgcaccataccaatgcgactgtcctcctggctggaccggttccagatgccatactgctgtgtgccaaagtccatgcctaaacggaggtaagtgtgttcggcccaaccgctgccactgcttgagttcatggaccggtcacaattgcagtcggaagaggcgaaccgggttttag

SEQ ID NO: 136732 - DNA, 1356 bp, synthetic construct
  misc_feature 1..1356: note = Description of Artificial Sequence: Synthetic coding sequence
  source 1..1356: mol_type = other DNA
atggattttgatgtgggccgcaccactcatctttcctcttccccctgtagtgcttcgaatggcggtgagagtggacaggttagcaaaagaaggtgcctaatcggcgagagcggccacgacaccccttggtgttctcctataaaggttaaatatggtgatgtgtattgcagagcccctcagggaggatactacaagaccgccctcggcactcgttgcgatattcgctgccagaaaggatatgagctacatggatcatccttattaatttgccaatccaacaaaaggtggagcgacaaagttatttgtaagcagaagaggtgccctactttagcaatgcccgcgaacggagggttcaagtgtgttgatggcgcatacttcaatagcaggtgtgagtattactgctcccctggatacactctcaagggagagaggacagtgacttgtatggacaataaggcttggagcggccgcccagcgagctgcgtcgatatggagccacctaggattaaatgcccctctgttaaggagcgtattgcggaaccaaacaagctgactgtgagggtgtcttgggaaacgccggagggacgagatactgcagacggaattctgaccgatgtaattctcaagggactgcctccagggagcaatttccctgaaggagaccataagattcagtacactgtgtacgatcgggccgaaaataagggcacgtgtaaatttagagtaaaagttagagtgaagcgctgtggaaaactgaacgcccctgaaaacggctatatgaaatgctcttcggacggtgacaactacggagcaacctgtgaattttcttgcattggcggctatgagttacagggttcccccgcgcgggtgtgtcagtctaatctcgcctggtccgggaccgaacctacatgcgccgctatgaatgtgaacgtgggagtgcggactgccgcagccctgctggatcagttctatgaaaaacggagacttctgattgtctcaacacccactgcacggaacctgctgtacaggttgcaactcggaatgttgcagcaggcgcagtgcggtctagatcttcgccatatcacagttgttgagctcgtaggggtgttccccactctcatcggccgtatcggtgcaaaaattatgcctccagcactcgcactccaactgaggctgctgctgagaatacccctgtactccttcagcatggtgctcgtagataaacatgggatggataaagaacgctatgtctcactcgtgatgcccgtggccctcttcaatctcatcgatacttttcctcttcgaaaagaggaaatggtcctccaggcagagatgtcacaaacttgtaacacatag

SEQ ID NO: 136733 - DNA, 1395 bp, synthetic construct
  misc_feature 1..1395: note = Description of Artificial Sequence: Synthetic coding sequence
  source 1..1395: mol_type = other DNA
atggggtcacccgcccacagacccgccctgctgcttctgctacctccccttctgttactgcttctgctccgggtgcccccatccaggagctttccaggttcaggagactcccctctagaggatgatgaagtcggctactcacatccgcgatataaagacacaccttggtgtagccccattaaagtgaagtatggcgacgtatactgtcgcgcgccccagggggggtattataagacagcgttggggactaggtgcgacatcaggtgtcagaagggctatgagttgcatggttcttctctcctgatctgtcaatctaataaaaggtggagcgacaaggttatctgtaagcagaagaggtgtccaaccctagccatgcctgcaaacggtgggttcaagtgcgtggatggagcatatttcaatagcagatgtgagtattactgctcacctggatataccctaaaaggcgaaagaacagtcacctgcatggataacaaggcttggtctggtcgcccggcgtcctgcgtggacatggagccaccacgcataaagtgcccatccgttaaggagcgcatcgcagagccgaataagctgacagtgcgcgtttcttgggaaactccagaaggcagggataccgcggacggcattcttaccgacgttatcctgaaaggcctgcctcctgggagcaacttcccagaaggagatcataaaatccaatacaccgtgtatgacagagccgagaataagggcacatgtaagtttcgggtgaaggtgcgagtcaagagatgcggtaaattgaatgcaccggagaatgggtatatgaagtgcagttccgatggggataactacggagccacttgtgaattttcttgcattggtggatatgaactccaagggtccccagccagggtgtgtcagtccaacctggcttggagtgggacagaacccacctgcgccgctatgaacgtgaatgtcggagttcgcaccgccgccgccctgctcgaccagttttacgagaagagacgccttctcattgtaagtacccctacggctcggaacctcctttacagactgcagctggggatgctgcagcaagcccagtgcggtcttgacctgcggcatatcactgtagttgagctcgtgggtgtcttcccgaccctgattggacgaataggtgccaagattatgccccccgccttggcgctccagctgaggctgctcctgcgcatccctctgtattccttctcaatggtcctagtggataagcacggtatggataaagagcgctacgtgagcctggtgatgcccgtagccctgttcaatctcatcgacacctttccactcaggaaggaggaaatggtcttacaggctgaaatgagtcagacctgcaatacctag

SEQ ID NO: 136734 - DNA, 1218 bp, synthetic construct
  misc_feature 1..1218: note = Description of Artificial Sequence: Synthetic coding sequence
  source 1..1218: mol_type = other DNA
atggggtccccagcccacagacccgccctcctcctccttcttcccccacttctgctgcttttattgttgagggtgccgccatctcgcagctttcctgggtccggggattcaccactggaagacgatgaagtgggctactcccatcctcgatacaaagataccccctggtgttcaccaataaaggtgaaatatggtgacgtatactgccgggctccccaaggaggctactacaagaccgccctgggaaccaggtgtgatattagatgtcagaagggttacgagctacatggaagctccctgctaatctgtcagagcaacaaaagatggagcgataaagtgatttgcaagcatatggaacctccacgcattaaatgcccgagcgttaaagaaaggatcgccgaaccaaacaagctcactgtgcgtgtaagctgggagacgcccgaaggtcgcgatactgctgacgggattctaacggacgtgatcctgaaaggacttcccccgggctcaaacttcccagagggagatcataagatacaatacaccgtctacgacagggcagagaacaagggaacctgcaagtttagggttaaggtaagggtgaagcggtgcgggaagctcaacgcaccagaaaacgggtacatgaaatgctcctctgatggcgacaattacggcgccacctgcgagttcagttgcataggaggttacgagctacagggctctccagcccgcgtgtgtcagagcaacttggcgtggagcggcaccgagcctacatgtgcagctatgaatgtaaacgtgggagtccgcactgccgcagcactcctggaccagttctatgagaaacgcaggttgctgatcgtgtctacgcctaccgctagaaatttgctgtaccgactccagcttggcatgttgcaacaggcccaatgcggacttgacctgcgacacatcacggttgtcgaactcgtaggggtcttccccactctgattggccggatcggagcaaaaattatgccacccgcactggcattgcagctgaggctgctactccgaattccactttatagcttcagcatggtcctggtcgataaacatggaatggataaggagcgctatgtcagcctcgtgatgcccgtggctctttttaacctgatcgacacgtttcccctgcggaaagaagaaatggtcctccaggccgaaatgagccaaacatgtaatacctag

SEQ ID NO: 136735 - DNA, 1140 bp, synthetic construct
  misc_feature 1..1140: note = Description of Artificial Sequence: Synthetic coding sequence
  source 1..1140: mol_type = other DNA
atgggttcacctgctcacaggcctgcgctgttactgctcttaccaccgctcctgttgcttctattactgcgcgtcccaccaagccggagcttccccggcagcggggattccccccttgaagatgacgaggtggggtactcccacccaaggtacaaggacaccccgtggtgctctccaatcaaagtgaagtacggtgacgtctactgtagagctccccagggcggatactataaaactgctctgggcacgagatgtgacataaggtgtcagaaggggtacgagctgcacgggagcagcctgctaatctgccagtctaacaaacggtggtcagacaaagttatttgcaagcaaaagaggtgccccacacttgcaatgccagcaaatggcggctttaagtgtgtagacggggcatacttcaacagccgctgtgagtattattgtagtccgggatacacccttaagggagaaaggaccgtcacatgtatggacaacaaagcctggagtggaaggcctgcgtcatgcgtcgatatggagcctccgcggatcaagtgtcctagtgtgaaggagagaatcgctgaacctaacaagctgactgtgagggttagctgggagactccagaaggccgggataccgcggatggtattctaactgatgtcattctgaaaggccttccgccgggatcgaacttcccggaaggagatcataagatccagtacaccgtctatgaccgggccgaaaacaagggtacctgcaagtttcgcgtgaaggtgcgcgtgaaacgctgcggcaagctcaacgcgcccgagaatggctacatgaagtgcagctccgatggagataattatggcgccacttgcgagtttagttgtatcggcggttatgaactgcaagggagccctgcccgcgtgtgccagtcgaatcttgcgtggagcgggactgagcctacgtgtgcagccatgaatgtgaacgtcggcgtgcgcaccgcagccgcattgctcgatcaattctatgagaagcgtcgactattgatcgtgtcaacgcccaccgcacgaaacctgctgtaccgcctgcagctgggtatgttgcaagctgtagcagccaaccccacactcctgctgcagtatggcgctagtggctag

SEQ ID NO: 136736 - DNA, 1335 bp, synthetic construct
  misc_feature 1..1335: note = Description of Artificial Sequence: Synthetic coding sequence
  source 1..1335: mol_type = other DNA
atgggttctcctgctcaccgaccagctttgttgcttctgttgccccctctcctgctcctcttattgctcagggtaccgccctcccgatccttccccgacaccccatggtgttcacccattaaagtcaaatacggcgacgtgtattgccgggcaccccaaggtgggtactataagactgccctagggacccgatgcgacattcgatgtcaaaaaggatacgaattgcacggctcttcattgttaatctgtcagagcaacaagaggtggtccgacaaggtgatatgcaagcagaagcggtgcccgaccctagctatgcctgcaaacggcggtttcaagtgtgtagatggcgcttacttcaacagtcgatgtgaatattattgttcaccagggtatactttaaaaggcgaacgtaccgtgacatgcatggataataaggcctggtccggtaggcccgcatcttgcgtcgacatggagccccctcgcataaagtgtcccagcgtcaaagagagaatcgctgaaccaaataagctgactgtacgtgtgtcctgggagacacccgaaggtagggatactgccgatggtattcttactgacgtgatcctgaaggggttaccaccggggtctaatttccccgagggcgaccataagatccagtataccgtgtatgacagagctgaaaataagggcacttgcaaattcagagtaaaggtgcgcgtgaagagatgtgggaagctgaacgctccagagaacgggtatatgaagtgttcctctgatggcgacaactacggcgctacctgcgaattttcctgcattggtggctacgagctgcaggggtccccagctagggtgtgccagtcaaatctggcgtggagtgggacggaacccacgtgtgccgcaatgaatgttaacgtcggcgtacgaacagccgctgcccttcttgatcagttctatgaaaaacggagattgcttatagtttccactccaacagcccgcaatttactgtatcgactacagcttggtatgctccaacaggcccagtgtggactcgatctgcgacatattaccgtagtggaacttgtgggtgtgtttcctacactgatcggcaggataggcgcgaagattatgccaccagcattagccctgcagctgcggctgctgttacgcatccccctttattctttcagtatggttcttgtcgacaagcacggcatggataaggaacgttatgtgagcttggtgatgcccgtagcgctgttcaacctgatagatacgttccccctgagaaaggaagagatggtcctgcaggcggaaatgtcacagacatgtaatacatag

SEQ ID NO: 136737 - DNA, 1398 bp, synthetic construct
  misc_feature 1..1398: note = Description of Artificial Sequence: Synthetic coding sequence
  source 1..1398: mol_type = other DNA
atggcttctcaactgacacaaagaggggctctttttttactcttttttctcaccccagctgtcacccccacttggtatgccggtagtggctactatcccgacgagtcgtacaacgaggtgtacgctgaagaagtgccgcaagcaccagctctcgactatcgagtccctagatggtgctacaccctcaacatccaggatggcgaggcaacctgttactcgcccaagggaggtaattatcattcaagcctggggacacgttgcgagcttagttgtgaccgcgggtttaggcttatcgggaggcgatctgttcagtgcctacctagtcggcgatggtccggaactgcttattgcagacaaatgcggtgccatgctctcccgttcatcacctcggggacttatacgtgtaccaatggagtgctactggattcgcggtgcgattactcttgcagttctggatatcatctcgagggggatcggtctcggatatgtatggaggacgggcggtggtccggcggcgaacccgtttgcgttgacattgacccccccaagattagatgccctcattccagggagaagatggccgaacccgaaaaactgaccgccagggtatattgggacccccccttggtcaaggatagcgccgatggcacgataaccagggtcaccctacggggcccggagccggggagtcattttccagaaggcgagcatgttatccggtataccgcttacgacagagcttataatcgggcatcatgtaaatttattgttaaggtgcaggtgaggcgctgccctacgcttaagccccctcagcacggatacctgacctgcactagcgctggcgacaactacggggctacctgcgagtatcattgtgacggcggatatgaccgccaggggactccgagtagggtttgccagtcatcccgacaatggtctggcagtccgcccatctgtgcccctatgaaaattaatgtgaacgtgaatagcgcagcgggtctgctggatcagttctacgaaaaacagcgacttctcattatctctgcccccgatccctcaaaccggtactacaagatgcagatctcgatgctccaacaatctacttgcggactggatctgcggcacgtgacgatcatcgaactagtggggcaacctcctcaggaggtcggaaggattagggaacagcagctcagcgcaaatatcatcgaggagctcagacagttccagcgtttgacaaggtcctacttcaatatggtccttatcgataaacagggaatcgaccgtgacaggtacatggagcccgttacccctgaggagatctttacctttatcgacgattatctattgagcaaccaggagttgacacagagaagagagcaacgcgacatctgcgagtag

SEQ ID NO: 136738 - DNA, 1452 bp, synthetic construct
  misc_feature 1..1452: note = Description of Artificial Sequence: Synthetic coding sequence
  source 1..1452: mol_type = other DNA
tgaacgtttatggttgaagatgccgttgaggccattggattcggtaaatttcaatggaagcttagtgtgttgacaggcctagcatggatggctgacgcaatggagatgatgatcttgtcaattctagccccacaactgcactgtgaatggcgcctgccctcctggcaggtggcgctgctgaccagcgttgttttcgtcggcatgatgtcctcaagcactctttgggggaacatttctgatcagtatggccgcaaaaccgggctgaaaatatctgtgctgtggacgctttattatggtatcttgtccgccttcgcccctgtctattcctggatcttggtgttgagggggctggtcggattcggtattgggggcgtgccccagagtgtgacactctacgccgagttcctccccatgaaggcccgcgccaagtgtattctgttgatcgaagtgttctgggcgataggaacagtattcgaggtggtgctcgccgtgttcgttatgccttccctaggctggcgctggttgcttattctctccgcagttccattacttctctttgcggtcctttgtttctggctgcccgagtccgccaggtacgatgtgctgagcggcaaccaagagaaggcaatcgccacattaaagagaatagctactgagaatggcgctcctatgcccttaggaaagctcattatctctaggcaagaagacagaggcaagatgcgggaccttttcaccccccacttccgctggaccaccctgcttctctggtttatctggttcagtaatgcgtttagctattacggtctggtcctgctgactactgagctgtttcaagcaggagacgtgtgtggcattagctcacgtaagaaagcagtcgaagcaaaatgtagcctggcctgcgagtacctatccgaagaggattacatggacttactttggacaactctcagtgaatttcccggcgtgcttgtgactttgtggatcatcgaccgactggggagaaaaaaaacaatggctctgtgctttgtcatctttagcttttgcagtctgctgttattcatatgcgtggggaggaatgtgctcactctgttactgtttatcgcacgagccttcatctcagggggttttcaggccgcgtatgtgtatactcccgaagtgtaccccactgcaacaagggcattgggactcggaacatgttctggcatggcaagggtaggtgcattgataaccccgtttatcgcccaggtgatgctggagtcctctgtctatctgactctggctgtctactcaggctgctgcttgctggcagcccttgccagttgctttttaccaatcgaaactaaaggaagggggctgcaggaatcttcgcatagggaatggggccaagagatggtaggccgtgggatgcacggagcgggagtgacccgttcaaactccgggtcgcaagaatag

SEQ ID NO: 136739 - DNA, 39 bp, synthetic construct
  misc_feature 1..39: note = Description of Artificial Sequence: Synthetic coding sequence
  source 1..39: mol_type = other DNA
atggaggaggacctgttccagctgagacaattgccatag

SEQ ID NO: 136740 - DNA, 1023 bp, synthetic construct
  misc_feature 1..1023: note = Description of Artificial Sequence: Synthetic coding sequence
  source 1..1023: mol_type = other DNA
atggccgcgggccgacttatcattaaaactgaatttctcccaactaagtaccgaggctacatgttgcccttatctcaggtgttctggttagctggatcacttctcattatagggctcgccagtgtgattattcctactatcggctggcgctggctaattagagttgctagcatcccaggcattattcttatcgtcgccttcaaattcattccagagtccgcccgttttaatgtctctacgggaaatactagggctgctctggccaccttggaacgggtggccaaaatgaatagatcagtgatgccagaggggaaactggtggaacctgttctggagaaaagaggccgattcgctgatctcctggacgccaagtacctcaggacgactctgcagatatgggtgatctggctcggaattagcttcgcctattatggagtgattctggcgagcgcagaattgttggagcgggacctggtgtgcggtagtaagtctgactccgccgtggtggtgaccgggggtgacagcggggagtcgcagtccccatgctattgccacatgttcgcaccctctgactaccggaccatgattatttccacaatcggggagatcgccctgaatcctctgaatattttgggaatcaatttcttggggagacgactctctttgagcattacaatgggatgcaccgccctcttcttcttgctgctgaatatctgtacctcttctgccggcctgatcgggtttctgttcatgctccgcgccttggtggccgcaaacttcaataccgtgtacatatacacagccgaagtgtatccgaccaccatgcgtgctctgggcatgggcacatctggttctctatgccgcatcggcgcaatggttgcacctttcatctctcaggtcctgatgtccgcaagcatcctcggagcactatgcctgtttagcagcgtttgtgttgtgtgcgccatctccgctttcacactgcctattgagacaaaagggcgggcccttcagcaaatcaaatag

SEQ ID NO: 136741 - DNA, 1479 bp, synthetic construct
  misc_feature 1..1479: note = Description of Artificial Sequence: Synthetic coding sequence
  source 1..1479: mol_type = other DNA
atggccacaaaaccaactgagccagtaaccattttgagtctccggaaattatcgctcggcacagcagagccccaagtgaaggagccaaaaaccttcacagtggaggacgctgtcgaaacaataggattcggccgcttccacatcgccctatttctgatcatggggagtaccggggtggttgaggccatggagataatgctgatcgccgtggtctcacctgtgatccgttgcgaatggcagcttgaaaactggcaggtggccctggtcactacgatggtgttcttcggctacatggtgttctcaatcctgtttggtcttctcgccgatcgttacggtagatggaaaatcctacttattagcttcttatggggcgcctacttcagtctgctgacctcctttgcaccatcctacatctggtttgtctttcttcgcacaatggttggatgtggtgttagcggacatagccagggcttgatcatcaaaaccgagttcctccctacaaaatatagaggatacatgctgcccctgagccaagttttctggttggcagggtccttgctcattatcgggctggcttccgtgatcatcccgacaatcggctggagatggttgataagagtcgctagcatccccggaataatcttgatcgtcgctttcaagtttattccagaatccgcccggttcaatgtgtcgaccggcaacacaagagccgccctggccactctcgaacgtgtggcgaaaatgaaccggtctgttatgccagaaggtaagctggttgaaccagtgctggaaaaaaggggtcggtttgccgatctgctggacgcgaagtacctccggacaactttacagatatgggtgatttggctagggatcagtttcgcctactacggcgtgattcttgccagcgccgagctgttggagagggaccttgtatgcgggtctaaatcggacagcgctgtcgtggtgacagggggcgactcaggcgagagtcagtcgccttgttactgtcatatgttcgccccgtctgattacaggaccatgatcatctctacaattggtgaaatcgcccttaacccactgaatatccttggcataaattttctgggacgcaggctctcactaagtattacgatgggatgcaccgcacttttctttctgctgctgaacatttgcaccagttcagcggggctgatcgggtttctcttcatgctccgcgctctggtggccgctaacttcaacactgtctacatttacaccgccgaagtttatcctactacaatgagagctctgggcatgggaaccagcggtagcctctgtcggattggcgcaatggtagcccctttcatctctcaagttctgatgtccgccagcatcttaggtgccctatgcctgttttccagcgtgtgtgtggtgtgcgctatttcagcattcactctccctattgagaccaaggggcgggctctgcaacagattaagtag

SEQ ID NO: 136742 - DNA, 1023 bp, synthetic construct
  misc_feature 1..1023: note = Description of Artificial Sequence: Synthetic coding sequence
  source 1..1023: mol_type = other DNA
atggccgccggtagactcattatcaaaacggaattcctgccgactaaatatcgtggctacatgctgccattatctcaggtgttctggctggccggttcccttctcatcattggcttggcgagcgtaatcatccccactataggctggagatggctgattagagttgccagcattccgggaattatcctgattgttgcttttaagtttatcccagagagtgctagatttaacgtctccactgggaatacacgggcagctttagcaacactggaacgtgttgcgaagatgaataggagtgtgatgcccgagggcaagcttgtggaacccgtgcttgaaaagaggggccggtttgccgatctcctagacgccaaatacctccgtactactctgcagatttgggtgatttggctcggcatcagtttcgcctactatggcgtaatactggcatctgctgagctcctcgaaagagatctggtatgcgggtcaaagtctgactccgctgtagtcgttacagggggggacagtggagagtcccagtcaccctgctactgccacatgtttgcgccgagcgactatcgaactatgatcatatcgactataggcgaaattgccctgaaccctctgaatattttgggcatcaacttcctgggacggaggctttcactgagtattaccatggggtgcaccgccctgtttttcctgctgttaaatatttgcaccagttctgccggactcatcggattcctcttcatgctccgggctctcgtcgcagctaacttcaatactgtgtatatctacaccgcagaggtgtatcctaccacaatgcgcgccctgggtatgggcacctctggatccctctgcagaataggagccatggtagcccccttcatcagccaagtgctcatgagtgcttctatactaggggctctgtgcctattctcctctgtttgtgtggtgtgcgctatttccgcttttacactgcccattgaaactaaagggcgcgcgctccagcaaatcaagtag

SEQ ID NO: 136743 - DNA, 1758 bp, synthetic construct
  misc_feature 1..1758: note = Description of Artificial Sequence: Synthetic coding sequence
  source 1..1758: mol_type = other DNA
atgggtagtctcaaggaggaactgctgaaagcaatctggcacgcattcactgctctggaccaggaccacagcggaaaggtgagcaaaagtcagctgaaagtgttgtcccacaacctgtgcacagttcttaaagtaccccacgaccccgtcgcactggaagagcacttccgagacgatgacgagggacctgtgagcaatcagggatacatgccctacctgaacagatttattcttgagaaggtgcaggataatttcgacaaaatagagttcaataggatgtgctggacactctgtgtcaagaagaacctgacaaaaaatcctcttctcatcaccgaggaggatgcctttaaaatctgggtcatatttaacttcctatcagaggataagtaccctttaattatcgtttccgaggaaatcgagtatctcctaaagaagttaactgaagcaatgggtggcggctggcagcaggaacaattcgaacactataagataaacttcgatgattctaagaacgggctctccgcctgggagctgatcgaactcatcggcaatggccagttctccaaggggatggatcgccagacagtcagcatggctatcaatgaggtatttaatgagttgatactcgatgtgctgaaacaaggatatatgatgaagaagggtcatcgcaggaagaactggacagagcggtggtttgtgttaaagccgaacatcatctcttactacgtgtcagaggatctcaaggataagaaaggagacatcctgctagacgagaattgctgtgtcgagagtcttccagacaaggacggaaaaaaatgtctgtttctggtgaaatgttttgacaagacctttgagatatccgcctccgacaagaagaaaaaacaagagtggattcaagccatccatagtacaatacatctccttaaactaggttctcctccgccccataaagaggcacgccagcggcggaaagagctgcgcaaaaagcagttggctgagcaagaggaactggaacgccaaatgaaggagttacaagccgcgaatgaatctaagcaacaggagctcgaggctgtgcgtaagaaacttgaggaggccgcttcccgggcagccgaggaggagaagaaaaggctgcaaactcaggtcgaactgcaggcccgttttagcacagaactggaacgcgaaaagctgataagacagcagatggaagaacaggtcgctcaaaagtctagtgagctggagcagtatctgcagcgagtaagagagcttgaggatatgtacttgaagcttcaggaggcattggaggacgagaggcaggcaagacaggacgaggaaactgtgcgaaaactgcaggcgcgcctacttgaggaggagtcctccaagagagccgaattagaaaaatggcacttggagcaacagcaggctatccagacaaccgaggccgaaaaacaagagctcgagaaccagagagtgctaaaggaacaggctctgcaggaagccatggagcagctggaacagctcgagctcgaaagaaaacaagcactcgagcagtatgaagaagtgaagaaaaaattggagatggcgacaaataaaacaaagagctggaaggataaggtggcacatcacgaaggtctgattcgcttgatcgaaccaggaagcaagaatccacatttaattaccaattggggccccgccgcctttacggaggctgaactcgaggagcgggaaaaaaactggaaagaaaaaaaaacaacagaatag

SEQ ID NO: 136744 - DNA, 3129 bp, synthetic construct
  misc_feature 1..3129: note = Description of Artificial Sequence: Synthetic coding sequence
  source 1..3129: mol_type = other DNA
atggagcaggacactgcggctgtagctgcaactgtcgccgccgccgacgccacagccaccatcgtcgtaatcgaagacgaacaacccggaccaagcacttcacaggaggaaggcgccgccgctgccgcgaccgaagccacggctgccacagagaaaggcgaaaaaaaaaaggagaagaatgtaagcagcttccaacttaagctggccgccaaggcgccaaaaagtgagaaggagatggaccccgagtatgaggagaaaatgaaggcagatcgcgcgaaacggttcgagtttctccttaagcaaacggagctgtttgctcacttcatacagccatccgctcaaaaaagtccgacctcgcctctaaacatgaagctcgggaggcctaggattaagaaggacgaaaaacagagtcttatctctgctggggactaccgacaccgcaggactgaacaggaggaagatgaagagctgcttagcgaatcaaggaaaacaagcaacgtatgcatccggtttgaggtgtcaccctcctatgtcaagggcgggccccttcgcgattatcaaataagaggattaaattggctcatcagtctatatgagaacggcgtgaacggaatcctggctgacgagatggggttaggcaaaaccctacagactatagccctgttgggatacctcaagcactatagaaacattcctggccctcacatggtgctggtgccaaagagcacccttcataattggatgaacgagttcaaacggtgggtcccatccctcagggttatctgctttgttggggacaaggacgcccgcgccgccttcatcagggacgaaatgatgccaggagaatgggacgtctgtgtaacctcttatgagatggttattaaggagaagtcagtctttaagaagtttcactggcgatatttggttatcgacgaggctcataggattaagaacgagaaaagtaagctcagtgaaattgttcgagagttcaagtcaacaaatagactgcttctgaccggtactcctctccagaacaatctacacgagttgtgggccttgctcaatttccttctccctgatgtgttcaattccgccgatgactttgacagttggtttgacacgaagaactgtcttggggatcagaagttggtggaacggcttcatgctgtgttgaagccttttttacttagaaggataaaaacggacgtcgagaaatctttgcctcccaaaaaggagatcaagatctacctaggactcagcaagatgcaacgcgagtggtatacaaaaattcttatgaaagacattgatgtgctgaactcatccggaaagatggataagatgaggctactgaacatcttgatgcagctgcgcaagtgctgtaaccatccctatctttttgatggcgctgagccaggcccaccgtatacaacagatgagcatatagtctctaattcaggcaagatggtggttttggataagctccttgccaagttgaaggagcaaggttcccgggtgctcatcttttcccagatgacccggctcctcgacatcctggaggattactgtatgtggcggggttatgagtattgcagacttgacggtcagactcctcatgaggaaagggaagaagcgatcgaagcatttaacgcaccaaattcgagtaaatttatttttatgctgtctactcgagccggcggccttggcatcaacctggcctccgcggatgtagtgattctgtacgacagtgattggaatcctcaggtggacctgcaggccatggaccgggctcacaggatcggccagaagaaacctgtacgcgtgttcaggctgatcactgacaatactgtggaggagcggattgtggaacgggcggaaatcaaattgaggctggattccattgtgatccaacagggcaggttgatcgaccagcagtccaacaaactggctaaggaggaaatgctgcaaatgatccggcacggggctacccatgtgtttgccagtaaggagagcgagctcactgacgaggatattacaacaatactggaaaggggcgagaagaagactgctgaaatgaatgaacgtctgcagaagatgggggagtcatccctaagaaacttcagaatggatatcgaacagtccctgtataagtttgaaggagaggactacagagagaagcagaaacttggcatggttgaatggattgagcctccaaaacgcgaaaggaaggcaaattatgctgtggacgcctatttccgggaggctttacgagtgtcggagcccaaaatccccaaagctccacgcccgcctaagcagcctaatgtccaggattttcagtttttcccaccgagactttttgagctgctcgagaaggagatcctgtactatcgtaagacaattggatataaagtgccacggaatccagacatcccgaatccggcccttgcacagcgtgaggagcagaaaaagatagacggcgccgagcctctcaccccagaggaaacagaggagaaggagaaactactgactcaaggtttcacaaactggacaaaaagagacttcaatcagtttattaaggctaacgagaaatacggcagagacgatatagataacatcgctagagaagttgagggtaagagtcctgaggaggtgatggagtattccgccgttttctgggaaaggtgtaatgaactccaggacatcgaaaaaattatggctcagatcgagcgaggtgaagctagaatccagcgacggatatccattaaaaaagcgcttgacgcaaaaattgctagatataaggctcctttccaccagctgagaattcagtacgggaccagtaaaggaaagaactacaccgaagaagaggacaggttcctgatctgcatgttacataaaatgggctttgaccgggaaaatgtttacgaagagctaagacaatgtgtgcgcaatgcacctcagttccggttcgattggtttatcaagagccgcaccgcgatggagtttcagcgtcgctgcaacacacttattagcctgatagaaaaggagaacatggagatagaggagcgcgaacgtgctgagaagaaaaagcgcgcaaccaaaactcccatggtcaagttctcagccttctcctag

SEQ ID NO: 136745 - DNA, 3165 bp, synthetic construct
  misc_feature 1..3165: note = Description of Artificial Sequence: Synthetic coding sequence
  source 1..3165: mol_type = other DNA
atggaacaggacacagccgccgtggccgcaaccgtcgctgctgctgatgccactgcgaccatagtggttatcgaggatgagcagcctggcccgagtacatcccaggaagaaggtgcggctgctgcggccacagaagccacagctgctacagaaaagggggagaaaaagaaagagaaaaatgtctccagttttcagttgaagcttgccgccaaggctccaaaatctgaaaaggagatggatcccgagtatgaggagaaaatgaaggcagaccgagctaaacgcttcgagtttttgctgaaacagacagaattgttcgcacactttattcaaccaagcgcacaaaagtctcccacaagcccactcaacatgaaacttggccgtcctaggattaagaaggatgagaagcagtcactgataagcgctggcgattataggcatcgtaggaccgagcaggaggaggacgaagaactgctctcagaatccagaaagaccagcaacgtatgtatccgtttcgaggtgtcccctagctacgtgaaagggggacccctccgcgattaccagatccgtggccttaactggctaatcagcctttacgaaaatggggtgaacggcatcctggccgatgagatgggacttggaaaaaccctgcagacaattgccctgctgggctacctaaagcattaccgaaacattccaggacctcatatggtgcttgtgcctaaatccacgcttcacaattggatgaacgaattcaagcggtgggtgccaagtcttagggtgatctgtttcgtgggtgataaggacgcacgcgcggcttttatccgggacgagatgatgccaggagaatgggatgtctgcgtaactagctacgaaatggtgatcaaggagaagagtgttttcaagaaattccattggcggtaccttgtcatcgacgaggcccaccggatcaaaaatgaaaagagcaagctcagcgagatagtgagagagttcaagagcacaaatcggctgctgctgacaggcacgcccttgcagaataacctgcatgagctgtgggccctgcttaattttctcctccctgatgtcttcaattcagccgacgattttgattcctggtttgatactaagaactgtctgggggaccagaaactagtggagagactgcatgccgtgctgaagccttttttactacgccggatcaagacggatgtggagaaaagtcttcccccgaagaaagaaataaagatctaccttggcttgagtaaaatgcaaagggagtggtataccaaaatcttgatgaaagacattgatgtgttgaatagcagcggcaagatggataaaatgcgtctgttgaatattctgatgcagctgcgcaagtgctgtaaccacccatatcttttcgatggggctgaacctggaccaccctatacgacagatgaacacatcgtgagcaactccggcaaaatggtggttcttgacaaactgttggccaagctgaaagaacaagggtcccgggtgttgattttttcgcagatgacccgcttgcttgatatactggaggactactgtatgtggcggggttacgaatattgtcgactggatggacagacccctcacgaggagcgtgaagacaagtttctcgaggtggagtttctcggtcagcgcgaggcaatcgaggcattcaatgctccaaactcatctaagttcatcttcatgctctcaacacgtgccggggggctaggcatcaatctagcgtctgccgacgtagtgatcttgtatgacagtgattggaacccccaagttgatttgcaggcgatggatcgtgcacaccgcatcggccagaaaaagccagttcgggtcttccgcctgattaccgacaatactgtggaggagagaatcgtagaacgtgcagaaatcaagttaagacttgactccattgtgatacagcagggtcgcctcatcgatcagcagagtaacaaattggcgaaggaggagatgctgcagatgattcgacacggagctacacatgtattcgcctccaaggaaagcgagctaaccgacgaggatattaccaccatcttggagaggggcgaaaaaaagacagctgagatgaacgaacgtcttcagaagatgggcgaaagctctctgcgtaactttaggatggatatcgagcagtctttgtataaattcgagggagaagattatcgagagaaacagaagctgggcatggtggagtggatcgagcctccaaagagagagcgcaaggctaactatgccgtggacgcctattttagagaagcgctgcgagtcagcgagccaaagatccctaaggctccccgccctccaaagcagccgaatgtgcaggacttccagttcttcccccccagattgtttgaactgcttgagaaggagatcttatattacaggaagactattggatacaaggtgccaagaaacccagacattcccaatcccgcactggctcagcgtgaggaacagaaaaaaattgatggcgcagagcctctgacccccgaagagactgaggagaaagagaaattactgacgcagggctttacaaattggaccaaaagggacttcaatcagtttatcaaagccaacgagaaatatggcagggacgacatcgacaacatcgcccgagaggttgagggcaagtcccccgaggaagtgatggagtacagcgctgtgttctgggagagatgcaacgagttgcaggatatcgaaaagatcatggcccagattgagcggggcgaggcaagaatccaacgacgcatttctatcaagaaggctctcgacgcgaaaatcgccaggtacaaagctccctttcaccagcttagaattcagtacggcacctcaaagggaaaaaactatacggaggaagaagacaggttcttgatctgtatgctgcataagatgggcttcgaccgggagaatgtgtacgaggaactgcgtcagtgtgtacgtaatgcgcctcagtttcggtttgactggtttatcaaaagcaggaccgccatggagttccagaggaggtgtaatactctgatttctctcatcgagaaggaaaacatggagatcgaggagagagaaagagcggagaagaagaagcgggccactaagactcccatggtgaagttcagtgcattctcctag

SEQ ID NO: 136746 - DNA, 3129 bp, synthetic construct
  misc_feature 1..3129: note = Description of Artificial Sequence: Synthetic coding sequence
  source 1..3129: mol_type = other DNA
atggagcaggacactgctgctgtggccgctacagtggctgctgcagacgcgaccgcaaccatcgtcgtcatcgaggatgaacaacccgggccatccaccagtcaggaggagggcgctgcagctgctgctactgaagctaccgccgccacagaaaaaggtgaaaaaaagaaagagaagaatgtctcctcttttcagttgaagctggccgctaaggcccctaagtcagagaaagagatggaccccgaatacgaagaaaagatgaaagccgatagagcaaagcgattcgaatttctgttgaagcagacggagctgtttgcccattttatccaaccatctgcccagaagagccccacctcccccctaaacatgaagctcgggaggcccaggatcaagaaggatgaaaagcagtccctaattagcgctggggactatcgccataggcgaacggagcaggaagaggatgaggagttgctgtccgagagtagaaaaactagcaacgtatgtattagattcgaggtaagccccagttacgtaaaaggggggcctctacgcgactaccagatccgcgggctgaactggctaattagcctgtatgagaatggtgtgaacggaatcctggccgatgagatggggctgggaaaaacgctccagacaattgctctgctgggctacttaaaacattacaggaacattccgggaccccatatggtgttagtcccgaaatcaacgctacataattggatgaacgagttcaaaagatgggtcccctcactgcgggtcatatgtttcgttggggataaggatgcacgggcagcgttcattcgtgatgaaatgatgcccggagaatgggatgtgtgtgtgacctcatatgaaatggtgataaaggagaagtctgtttttaagaaattccattggcgttatttagtaattgatgaagcccacaggatcaaaaatgaaaagtccaaactctcagagatcgtccgcgagtttaagtcaactaacaggctcctgctgacgggtacacctctgcaaaataatctacacgaactgtgggctttattgaattttttgctccctgacgtcttcaactccgctgatgacttcgacagctggttcgacacaaaaaactgtcttggggatcaaaaactggtggagcgtctgcacgctgtcttaaaacccttccttcttcgccgaattaaaacagacgtcgagaagagcctacccccgaagaaagagattaagatttacctgggtctgagtaaaatgcagcgcgagtggtacactaagattctgatgaaggacatagatgtactgaacagctctggcaaaatggacaagatgagattacttaatatcctgatgcagctgagaaaatgctgcaatcacccgtacttgtttgatggtgccgagcccggaccaccttacacgacagatgagcacatcgtgtctaactcgggcaagatggtagtgctcgataagcttctggccaagttgaaggagcagggctctagagtgttaatattttcccaaatgacccgcctactcgatattttggaggattactgtatgtggaggggttacgagtactgtcgattagacggccaaacgccgcatgaggagcgcgaagaggctattgaagctttcaacgcacccaacagctcaaagttcattttcatgttgtccacgcgtgctggtgggttggggatcaacctcgccagtgctgacgtggtgatcttatatgactctgattggaacccgcaggtcgatctacaagccatggatagggcccacagaatcggacagaagaagcctgtgcgggtgttccgacttatcactgacaacaccgtcgaggaaaggatcgtggagagagccgagatcaaactccgactggatagtattgttatacagcagggtcgactcatcgaccagcaaagcaataaactcgcaaaagaggagatgctgcagatgatccgtcacggagcaactcatgtattcgctagcaaagagagtgagctgacagacgaggatattaccaccattctcgagagaggtgagaagaagacagctgaaatgaacgagagactgcaaaagatgggcgaaagtagcctgcggaattttcgaatggacatcgaacaatctctatataagttcgagggcgaggattaccgtgagaaacaaaagttaggaatggtggagtggatcgagccccctaagcgggagcgaaaagccaattacgctgtagatgcctattttcgcgaagctttgagggtctctgagcccaagatcccaaaggcgccacggccaccaaagcaaccgaatgtccaggactttcagttctttccacctcgtcttttcgaacttctggagaaggagatcctgtattatcggaagaccatcggctacaaagtaccgagaaaccctgacatcccgaatccggctctcgctcaacgcgaggaacagaaaaagattgatggggccgaaccgctcacgccagaggaaactgaggagaaggagaagctcttaacccagggtttcactaactggacaaagcgcgattttaatcagtttatcaaagctaacgagaaatatggcagagatgacatcgataatatcgcacgtgaggtcgagggaaaatcccctgaggaggtcatggaatattccgctgttttttgggaaaggtgcaacgagctgcaggacatcgagaagattatggctcagatcgagcgtggtgaggctcgtattcagcgccgcatctcgataaagaaggcgttggacgctaaaattgctcggtataaggcgcctttccaccagctgcgaatccagtacgggacttccaagggtaagaattatacagaggaagaggataggttcctaatttgtatgttacacaaaatggggttcgaccgcgagaacgtctacgaggagttaaggcagtgtgtccgtaacgcgccacagtttagatttgattggttcattaagtcccgtaccgccatggagttccagcgacgttgcaacacactaatatcacttattgagaaagaaaatatggagatcgaagaaagggaacgagccgagaagaaaaaacgcgctactaagacacccatggtgaagtttagcgcattcagttag

SEQ ID NO: 136747 - DNA, 3018 bp, synthetic construct
  misc_feature 1..3018: note = Description of Artificial Sequence: Synthetic coding sequence
  source 1..3018: mol_type = other DNA
atggagcaggacacagctgccgttgcagcaacagtggctgccgctgacgccacggccaccattgtagttatcgaggacgagcagcccggcccctcaacatcgcaagaagagaagaatgtgtcaagctttcagttgaagctcgcggctaaagctccaaagagcgaaaaagagatggaccctgagtatgaggaaaagatgaaagcggacagggccaaacgcttcgagttcctgttaaaacaaaccgagttatttgcacactttatccagccctcagcccagaagagcccgacatctccattaaacatgaaattagggcgtcccaggatcaaaaaggacgaaaaacagagcctcatttccgcaggtgattaccgtcatcgacgcactgagcaggaggaggatgaagaactgctcagcgagagcagaaaaacctccaatgtgtgcatcagatttgaggtatcaccaagttacgtgaaggggggaccgctaagggattatcagattcgggggttaaactggctgattagtctctatgagaatggcgtcaacgggatcctcgctgatgagatgggcctgggtaagactctgcagactatagcactacttggataccttaaacactataggaatattcccggacctcatatggtgctcgtgcctaagtccacacttcataactggatgaacgaatttaagcgttgggtcccgagcttgcgcgtcatttgctttgtgggcgacaaggacgcaagagctgcatttattagggacgagatgatgccaggtgaatgggacgtatgtgttacatcatacgagatggtcatcaaggagaagagcgtatttaaaaagtttcactggagatacctggtgatcgatgaggctcaccgtatcaagaatgaaaaatccaagctctccgagatcgttcgggaattcaagtccaccaataggctgctattaacaggcacacccctgcagaataacctgcacgaattatgggccttgctaaattttcttttacccgatgtctttaattctgcagacgacttcgactcctggtttgacaccaaaaattgtttgggagatcaaaaactggtggaaagattacatgcagtcttaaagcccttcctactcaggcgcattaagaccgatgtcgaaaaatcgttgccccccaagaaggagattaaaatttatttgggcttatcgaaaatgcagcgtgaatggtacactaagatcttaatgaaagacatcgacgtgctgaactcttcgggtaagatggacaagatgcgactgcttaatattctaatgcaattgagaaaatgttgtaatcacccatacctattcgatggggccgaacccggaccaccatatacaaccgacgaacacattgtgagcaacagtggcaagatggtggtgttagataaattactggctaagctgaaagagcagggctcgcgcgtgctgatcttcagccagatgacccggttactggatatcctggaagactactgcatgtggaggggatatgagtattgtagactcgacggccagactcctcatgaagagagggaggataagttccttgaggttgagttcttaggacaacgcgaagccattgaggctttcaacgccccaaattcttcaaaattcatattcatgctcagcactcgcgcagggggcctgggcattaacctagctagcgctgacgtggttatcttgtatgactccgattggaatcctcaagtagatctccaagccatggaccgcgctcaccggatcgggcagaagaaacctgtgagggtgttccgactgatcacagacaacaccgtcgaggagcgcattgttgaacgcgcagagatcaagctacgactcgatagtatagtgatccagcaggggcggcttattgatcagcagtctaacaaactagctaaagaagaaatgttgcaaatgatacgccacggcgccacccacgtcttcgccagcaaggaaagcgaactgacggatgaggacatcacaaccatactggagcggggggaaaaaaagaccgccgagatgaacgaacgcttgcagaaaatgggagaatcttcactgcgtaactttcgaatggacatagaacaatcgttatataagtttgaaggtgaggactatcgggagaaacaaaaattggggatggttgagtggatagaaccacccaagagggagcggaaagcaaattacgccgttgacgcatacttcagagaagcacttcgagtttcagagccaaaaatacctaaggcaccccggcctcctaaacagcctaatgtgcaggacttccagttctttccccctagactgtttgagctcctggagaaggaaatactttactaccgcaaaactatcgggtataaggtaccacggaatcctgacattccaaacccagctctggcacagcgagaggaacagaagaaaattgatggggcagagccattgacacctgaagagacagaggaaaaggaaaagctcctgactcaagggttcacaaactggaccaaaagggattttaatcaattcatcaaggctaatgagaagtacgggcgtgacgatatcgacaatatcgctcgagaggtggagggaaaatcacccgaagaagtcatggaatactcagcagttttttgggagcggtgtaacgaactacaggatatcgaaaaaatcatggcgcaaatcgagcgcggcgaggcccggattcagcggcggattagcattaaaaaggccctcgacgccaagatagcacgttacaaagcccccttccaccagctcagaatccagtacgggacttccaaagggaaaaactacaccgaagaagaggacaggtttctgatatgcatgctgcacaagatgggatttgatagggagaacgtgtacgaggaactgcgtcagtgcgtcaggaacgctcctcagttcaggtttgattggttcatcaaatccaggaccgccatggaatttcagcgtcggtgcaataccttaatcagcctcatcgaaaaggagtag

SEQ ID NO: 136748 - DNA, 837 bp, synthetic construct
  misc_feature 1..837: note = Description of Artificial Sequence: Synthetic coding sequence
  source 1..837: mol_type = other DNA
atgttgatgaaacgcctggctgccaggtgttttgctggactgctgattttgagtcctctgactgtaatttcagacagcagaccagccgactccggaaaggctatcgaggacggcaacttggaagagatggaggaagaggtccggttaaagaagcggaagcgacggcgcaatgtcgataaagatcctgccaaggaggacgtagagaaggccaagaagcgacgagggcgcccccctgccgaaaagttgtcacctaacccgcccaagttgacaaagcaaatgaatgccatcatagataccgtaataaattacaaagatagttctggtagacagttgagcgaggtttttattcaactccccagcagaaaggaactgccagagtactacgaactgattcggaaacctgttgattttaagaaaattaaggagcggatccgaaatcataaatacagatccttgggtgacttggaaaaggacgtcatgctcttgtgtcacaacgctcagacattcaatttggagggctcccagatatatgaggacagtatcgttcttcagagcgtcttcaagtcagccaggcagaagatcgccaaagaggaggagagtgaggatgaatcaaacgaggaggaggaggaagaagacgaggaggagtctgaatctgaagcaaagagcgtcaaagtaaaaattaaacttaataaaaaggacgataaggggcgcgataagggtaaggggaagaagcgacccaacaggggtaaggctaagcccgttgtttccgacttcgactcagatgaagagcaggacgagagggagcagtccgaaggcagcgggaccgacgatgagtag

SEQ ID NO: 136749 - DNA, 711 bp, synthetic construct
  misc_feature 1..711: note = Description of Artificial Sequence: Synthetic coding sequence
  source 1..711: mol_type = other DNA
atggaagaggaagtgcgtctcaaaaagagaaaaagacggcgaaatgttgacaaagatccagccaaggaggacgtggaaaaagctaaaaagagacggggcaggccacctgccgagaagctctctccaaaccctcccaaactgaccaagcagatgaatgccatcattgatacagttattaactataaggacagcagcggacgtcagcttagtgaggtcttcattcaactgccttctcggaaagaactgcccgagtattatgagcttatccgaaaaccggtggactttaaaaaaattaaagagcgtataaggaatcataaatatcgcagtctgggcgacctcgaaaaggatgtcatgttactttgtcacaatgcacagacctttaacctcgaggggagtcaaatatatgaggacagtattgtgctgcagtccgtgttcaaaagcgcacggcagaaaatcgcgaaagaggaggaatcggaggacgaatctaatgaggaagaggaggaggaagatgaggaagagtcagaatcagaagccaagagcgtgaaagtgaaaattaagctcaacaagaaagacgacaaggggagagataagggtaagggaaagaagaggcccaaccgcggaaaagccaaacccgtggtaagcgattttgacagcgatgaggaacaagacgaacgcgagcagagcgaagggtctggaacagatgacgagtag

SEQ ID NO: 136750 - DNA, 4773 bp, synthetic construct
  misc_feature 1..4773: note = Description of Artificial Sequence: Synthetic coding sequence
  source 1..4773: mol_type = other DNA
atgagcacacccacagaccctggagctatgccacatccaggaccctctcccggtccagggccgtcccccgggcccatcttgggaccctccccaggccccggcccctcccctggcagcgtgcattctatgatgggaccttcccccggccccccctccgtatctcaccccatgcctactatgggatctacagatttcccacaagaaggcatgcaccagatgcacaaacctattgatggcatccacgacaagggcatcgttgaggacatacattgcggttcaatgaagggcaccggcatgaggccacctcatcccgggatgggaccaccccagtccccaatggaccagcacagccagggctacatgtcgccccatccgtcccccttgggcgctcctgagcacgtgagttcaccgatgagcggcggaggaccaactcccccccagatgcccccaagccagcctggggctctgattccaggggacccacaggcgatgtctcaacccaatagaggtccgtccccattttctcccgtgcagctgcaccagctgagagcacaaatactcgcttacaagatgttagcccgtggacagcccctcccggagacacttcaactcgcggtgcaggggaagaggacactccccggacttcagcaacagcagcagcagcagcagcagcagcagcagcagcagcagcaacagcagcagcagcaacaacaaccccaacagcaaccaccccagccccagacacaacagcagcagcagcctgccctggtaaactacaatcgcccctctggccctgggcctgagctcagcggtcccagcaccccacagaaactgccagtgcccgcacccggcgggcggccctcccccgcccccccagctgcagcccagcctcctgctgcagctgtgcccggcccctctgtgccacagccggctcctggacagccaagtccggtgctgcagctgcaacagaagcagtcacggatttctccgatccagaagcctcagggtcttgaccccgtggaaatcctccaagaacgcgaatataggctgcaagccaggatagctcacaggatccaggagctcgagaaccttcccggatcacttcctccagatctcagaaccaaggctaccgtagagctgaaagctttgagacttttgaatttccagagacagctccgtcaggaggtggtcgcctgcatgagaagagacactacactcgagacggccctaaacagcaaggcttacaagcgatccaaacgccagaccctcagagaagcacgaatgaccgagaaattggagaaacagcaaaagattgagcaggagcgaaaaagacgacagaaacaccaggagtatctgaacagtatacttcagcatgcgaaagattttaaggaataccataggagtgtagccgggaagattcagaagctgagcaaggcggtggcgacttggcatgctaatacggaacgtgagcaaaagaaggagaccgaaaggatcgagaaggagagaatgaggaggttgatggccgaagacgaggaggggtataggaagcttatcgaccagaagaaagacaggcgactcgcctatttactgcaacagacagacgaatacgtggccaatctgactaacctcgtgtgggagcacaagcaggcgcaggctgcgaaggaaaagaaaaagaggagacgtcgaaaaaaaaaagcagaggagaacgccgagggtggcgagtctgctctggggccggatggcgagcccattgatgaaagcagccagatgtcagacctgcccgttaaggtgactcatacagagaccggtaaggtgctgttcggtcccgaagcccccaaggcctcacagttggacgcttggctggagatgaaccccggctacgaggtggctcccagaagcgactcagaagagtccgatagcgactacgaggaagaagatgaagaggaggagtctagccgtcaagagacagaggaaaagatcctgcttgaccccaattccgaggaggtgtcagagaaggacgctaagcaaataatagaaacagcaaagcaagacgtagacgatgagtatagtatgcagtactctgccagaggatcccagtcctactataccgtggcccatgccatttctgaacgtgtggagaaacagtccgctcttctgatcaacggaacactgaaacattatcagctccagggcctggaatggatggtgagcctatataataacaatctgaacggaattctcgctgatgagatggggttaggcaagactattcagacaattgcactgattacctatctcatggagcacaagaggctcaatggaccctatttgattatcgtcccgctctcaacgctgtctaactggacttatgagttcgataagtgggctcccagtgttgtcaagatcagctacaagggcaccccagccatgcgaagaagccttgtgcctcagctgagaagtgggaagttcaacgtgttgcttacaacttatgagtatattattaaggacaagcatatcttggccaaaatacggtggaaatacatgattgtagacgaagggcacaggatgaaaaatcatcattgtaaactgactcaggtcctcaacacccactacgtcgctccccggagaattctgcttactggtacgcccctgcagaataaactccctgaactttgggccctgctgaacttcctccttcccactatctttaagagctgctcaacatttgagcagtggttcaacgcacctttcgcgatgaccggcgagcgggttgacctgaacgaggaagaaaccattttgataatccgccggctacacaaggtgctacggccgttcctcctcaggaggctcaagaaggaggtggaaagtcagctgccagaaaaggtggaatacgtgattaagtgtgatatgtcagcactgcagaagattctgtatcggcacatgcaggcaaagggaatccttctcacagatggctccgaaaaagataagaaagggaaggggggagctaagacactgatgaataccatcatgcaattaagaaaaatctgtaaccacccctacatgttccagcacatagaggagagcttcgcggagcatctcgggtattcaaatggagttatcaatggggccgaattatatagagccagcggaaagtttgaattgttagaccgcatcctgccaaaactcagggctacaaaccaccgcgttctattgttctgtcagatgactagcctgatgactatcatggaagattatttcgcattccgaaatttcttgtacctcagactggacggcaccacgaaatctgaggatagggcagctctgctcaagaaatttaatgagccagggtctcagtacttcattttcctcctaagcactcgcgcagggggtctgggcctgaacctacaggccgctgacactgtagtaatatttgattccgattggaacccgcaccaagacctccaggcgcaggaccgcgcccaccggatcggccagcagaacgaagtacgagtgctgcgtctgtgcacagtgaatagtgtggaagagaaaattctcgccgctgccaagtataagttgaacgtcgaccaaaaggtgatccaggcggggatgttcgaccagaaaagcagctcacacgagcgtagagctttcctccaggccattcttgagcatgaggaagagaatgaagaggaagatgaagtgcccgatgatgaaacgcttaatcagatgatagcccgtagggaagaagagttcgatctgttcatgaggatggatatggatcgaaggcgggaggacgctaggaatcccaagcgaaaaccacgactgatggaggaggacgagttaccatcatggattataaaggatgatgccgaggtcgagcgcctgacctgcgaagaagaggaggagaaaatctttgggcgggggtcccgacagcgtcgagatgtagactacagcgacgcactgacagagaagcagtggctccgggcaattgaagatgggaacctggaagagatggaggaggaagtgaggttaaagaagagaaaacgcaggagaaatgtcgataaggatcctgcgaaagaggatgtggagaaggctaagaaacgccgtggtcgaccgcctgccgaaaagctttcccccaatccacccaagcttacaaagcagatgaacgccattattgacaccgtgataaattacaaagaccggtgcaatgtggagaaggttcccagtaattcgcagctggagatagagggaaacagtagtgggagacagctcagtgaagtgttcatccaacttcctagcagaaaggaactgccggaatattatgaactcatccgcaagccggtagatttcaagaagatcaaggagcggatcagaaatcataagtacaggtccctcggcgatctcgagaaagacgtgatgcttctgtgccataatgcacagacatttaatctagaagggagccagatttacgaagattccatcgttctgcagtctgttttcaaaagtgcccgtcagaagatcgctaaggaggaagaaagcgaagacgaatccaacgaagaggaagaggaggaggacgaagaagaatctgagtcggaggccaagagcgttaaggtgaaaatcaagctgaataagaaagatgacaaaggacgcgataaaggcaagggcaagaagcgccccaatcgcggcaaagccaaaccggtggtctcagactttgacagcgacgaagagcaagatgagagggagcaatctgaaggttctggaactgatgacgaatag

SEQ ID NO: 136751 - DNA, 4719 bp, synthetic construct
  misc_feature 1..4719: note = Description of Artificial Sequence: Synthetic coding sequence
  source 1..4719: mol_type = other DNA
atgtccacccccaccgaccctggagccatgcctcatcccgggcccagccctggtccagggcccagtccaggcccgattttggggccatcacccggaccaggccccagtcccggcagtgtccactctatgatgggaccatcgcccggacccccatcagtgtcccaccccatgcctacaatgggcagtaccgatttcccacaggaggggatgcaccaaatgcacaagcccatagacgggattcacgacaaggggatagttgaagatatccactgtggctcgatgaaaggcaccggcatgcggcctccacacccaggtatgggccctccacagagccccatggaccaacacagccagggttatatgagcccccatccctctcctctgggagctcccgagcacgtctctagccctatgagcggcggtgggcctacccctccacagatgcctcccagtcaacccggcgccctgatcccaggggacccccaggcaatgtcccaacctaaccgggggccatctcccttctctcccgtgcagctgcatcaactccgcgctcagatcctggcctacaaaatgcttgctcgggggcagccgctcccggagacccttcagctcgctgtgcagggcaagcgcacgctgccgggcctgcagcagcagcagcagcaacagcagcaacagcagcagcagcagcaacaacagcaacagcagcagcagcaaccacaacaacagccacctcagccgcagacccagcagcagcagcaacctgccctggttaactataacagacccagtggcccggggccagagctgtcagggcccagcacgcctcaaaagctcccagtccctgctcccggcggtcgtcccagccctgcccctccggctgctgcccagccaccagcggctgccgtacctggcccatcagtgccccaacctgcaccagggcaacctagccctgttctgcagctgcagcaaaagcaatcccggatcagcccaattcagaaacctcaagggctggaccccgtggagatcttacaggagagagagtataggctccaggcccggatcgcccatcggattcaggagctcgagaatcttcccgggagtctgcctccggatttgaggaccaaagcaacggttgagctgaaggccctgaggctgttaaactttcaacgacaattgcggcaggaggttgttgcgtgtatgagaagagacacaactctagaaacggccctgaacagtaaggcgtataagcggtccaaacgacaaacgttaagggaagcaaggatgaccgaaaagctggagaagcaacagaaaatcgaacaggaacgcaagcgaaggcaaaaacatcaagaatatctgaacagtattttacagcatgcaaaagacttcaaggaataccatcggtccgttgctggcaaaatccaaaagctgtctaaggccgttgccacctggcacgccaataccgaaagggaacagaagaaagagaccgaacggatcgagaaagagcgcatgaggcgattgatggcagaagacgaggaggggtaccgcaagctgattgatcagaagaaagaccggaggctggcctatctgctgcagcagactgatgaatatgtagcgaacttaacgaacctcgtgtgggaacacaagcaggcccaggctgccaaagagaagaagaagcggcgccgcagaaagaaaaaagctgaagagaacgctgagggcggcgagtccgccctcgggcccgacggggaacctattgacgaaagtagtcagatgtcagacctccccgttaaagttacacacacagaaacaggcaaggtgctgttcggccccgaagcccctaaagcgtcacagctggacgcatggctggaaatgaaccccggctatgaggtcgccccgagaagcgactctgaagagagcgacagcgattatgaggaggaggatgaagaagaggagtcttccaggcaggaaaccgaggagaagattcttctcgatcctaattctgaggaggtcagcgagaaggacgcaaagcagataattgagacagcgaaacaggatgtagatgacgagtacagtatgcaatatagtgcacggggatcccagtcatactacaccgtagctcatgccatcagcgaacgggtggaaaagcagagtgccctcctgattaacggcactctcaagcactatcagcttcagggccttgagtggatggtgagcttgtacaataacaatcttaatggaatcctggcggacgaaatggggctggggaagacaatacagactatcgccctgatcacctatttgatggagcacaagcgccttaatgggccctatctcatcatcgtcccactgtctaccctgtctaattggacatacgagttcgacaagtgggccccaagcgtggtgaagatctcttataaaggcacgccagctatgcgccgttctctggttcctcaacttaggagcggtaaattcaacgtgctgttgaccacctacgaatatattatcaaagataaacacatcctcgcaaaaatccggtggaagtacatgatagttgacgaggggcacaggatgaagaatcaccactgcaagttaacacaggtcttgaacacacactacgtcgcccccagacgaatcttgctgaccggtacaccacttcagaataagcttcctgaactgtgggccctgctgaatttcctgctgccaacaatttttaagtcttgttctactttcgaacaatggttcaatgcccctttcgctatgaccggggagcgagttgacctgaacgaagaagagactatcttaatcataagacggcttcacaaggtattgcgacccttcctgctgaggaggctaaaaaaagaagtcgagtctcagctaccagaaaaagttgagtatgttatcaagtgtgacatgtcagctctgcaaaagattctgtaccgacacatgcaagccaaaggaatcttgcttacagacggcagcgaaaaggacaaaaaagggaaaggcggcgcaaaaaccttgatgaacacaattatgcagctgaggaagatatgtaaccatccatacatgttccaacatattgaggagagctttgccgagcatcttggctactccaatggcgtgattaacggcgccgagctgtaccgcgctagtggaaaattcgagctgcttgatcgcattctgcccaagctgcgcgctaccaaccatcgcgttctcttgttctgccagatgacttctcttatgactatcatggaggattatttcgcgttccggaactttctgtacctgagactggatgggaccaccaagagcgaagatagggccgctctgctgaagaaattcaatgaacccggctcacagtatttcatatttcttttatcaaccagagcgggtggtttgggtctcaatctgcaggccgctgataccgttgttatattcgactcagactggaacccgcaccaggatctccaagcccaagatcgtgcccaccggattggtcagcagaatgaagtccgggtattgaggctgtgtacggtgaattctgttgaagaaaagatcttagctgctgccaagtataaacttaacgtggaccagaaagtgattcaagccgggatgttcgatcaaaagtctagtagccatgagcggcgggccttcctgcaagcaatcttagagcacgaggaagagaatgaggaagaagacgaggtgcctgacgacgaaacactcaatcaaatgatagcccgtcgagaggaggaatttgatttgttcatgcgtatggacatggaccgcagacgagaggatgctcggaatccaaaacgcaagccccgtctgatggaagaagatgagttgccatcctggattattaaggatgacgcagaagtggaaaggttgacttgtgaggaagaggaggagaagatctttgggaggggttcgcggcagagacgggacgttgactattccgatgctctgaccgaaaagcaatggctgcgcgctatcgaagatggtaacctggaagaaatggaggaagaagtgcgactgaagaagcggaaacgccggcggaatgtcgacaaggacccggccaaagaggacgtcgaaaaggccaagaaacggcgggggcggcctccagccgagaaactgagcccaaaccctccaaagctgaccaaacagatgaacgctatcatagatactgtgatcaattacaaggatagctcgggtcggcagctttctgaggtctttatccaacttccatccagaaaggaactccctgaatactacgaattgattcgcaaacctgtggacttcaaaaaaatcaaggagagaatacggaatcataagtatagaagccttggagacttggagaaagacgttatgctgctgtgccacaacgcacaaacttttaacctggaggggagtcagatttacgaagattctatcgtcttgcagtcggttttcaaatccgcgagacagaaaatcgccaaggaggaagaatccgaagacgagtccaacgaggaagaggaagaagaagatgaagaggaatcagaatcagaggctaagtcggtcaaggttaagattaaactgaacaaaaaggacgacaagggaagagataagggcaaggggaaaaaaagacctaacagagggaaggcaaagcctgtagtgtccgatttcgactcggacgaggagcaagatgaacgcgagcagtccgaggggtcggggacagacgacgagtag

SEQ ID NO: 136752 - DNA, 360 bp, synthetic construct
  misc_feature 1..360: note = Description of Artificial Sequence: Synthetic coding sequence
  source 1..360: mol_type = other DNA
atgctcttgtgccataatgctcaaacgtttaatctggagggctctcagatttatgaagactccatagtgcttcagtccgtctttaagtctgcacgccaaaagattgccaaggaggaggaatctgaggatgagagtaacgaagaggaggaagaggaagacgaggaggagagtgaaagcgaggccaagtccgtgaaagtgaagatcaagctgaacaaaaaagatgataaaggcagggataaaggcaaggggaagaaacgaccgaaccgggggaaggccaaacccgtggtaagcgacttcgatagcgatgaggaacaagatgagcgcgagcagagcgaaggttctgggacagatgacgaatag

SEQ ID NO: 136753 - DNA, 711 bp, synthetic construct
  misc_feature 1..711: note = Description of Artificial Sequence: Synthetic coding sequence
  source 1..711: mol_type = other DNA
atggaggaggaggtgcgccttaagaaacgtaagaggcgacgaaacgtcgataaggatcctgccaaagaagatgtggaaaaagccaagaaacgcagaggtcgccctccggcagagaagctgtcccccaacccacccaagctgaccaagcagatgaacgccatcatcgacaccgtgatcaactataaagacagcagcggccgtcagctcagtgaggtctttattcagctgccaagtcgcaaagaactccccgagtactatgagctgattcggaagccagtggatttcaaaaaaatcaaggagaggatcaggaaccacaaatataggtccctgggggacctggagaaagatgtgatgctgctctgccataacgcacaaaccttcaacctggagggttcccagatctatgaggactctatagtgctccagtccgtgttcaagagtgctcgtcagaaaattgcaaaggaagaagaatcagaagatgaatcaaatgaagaagaggaggaggaagatgaagaggagtccgagtccgaggccaagtccgtgaaagtgaaaataaagttgaacaaaaaagatgataagggccgcgacaagggaaaaggcaagaaaagacctaatcggggcaaggcaaagcctgtcgtatcggatttcgactcagacgaggagcaagatgaaagagagcaatcagaggggagtggtacagatgacgagtag

SEQ ID NO: 136754 - DNA, 711 bp, synthetic construct
  misc_feature 1..711: note = Description of Artificial Sequence: Synthetic coding sequence
  source 1..711: mol_type = other DNA
atggaggaggaagtgcggctgaaaaagagaaaacggcggcgaaatgtcgacaaggaccctgccaaggaagacgtcgaaaaagccaagaagcgccgtggtcgaccacccgcagagaaactttcccctaacccgccgaaactcactaagcagatgaatgccatcattgatacggtaataaactacaaggactcttcggggaggcagctgagtgaagtatttatccaactgccctctaggaaagagctgcccgaatactatgagctaatccgtaagccagtcgatttcaaaaaaattaaagaacgcattcggaaccataagtatcggtcccttggggaccttgagaaagatgttatgctgctctgccataacgcccagactttcaacctggaggggtctcagatctatgaggattctattgtcctgcagagcgtgtttaagtccgcacggcagaagatcgccaaagaagaggagagcgaggatgagtctaatgaggaggaagaggaagaggacgaggaggagtcagagagtgaggcaaagagcgttaaagtgaagatcaaactgaataaaaaggacgacaaaggtagggataagggcaaaggcaagaaaaggcctaataggggcaaggccaaacccgttgtgagcgactttgattctgacgaggaacaggatgaaagagagcagagcgagggcagcggcaccgacgatgagtag

SEQ ID NO: 136755 - DNA, 765 bp, synthetic construct
  misc_feature 1..765: note = Description of Artificial Sequence: Synthetic coding sequence
  source 1..765: mol_type = other DNA
atggaggaagaagtcaggctgaagaagagaaagcgcagacgtaacgtggacaaggacccggctaaagaggacgtggaaaaagccaaaaagcggcgcggacggccacctgctgagaagctcagccccaaccctcccaagctgacaaagcagatgaacgcgatcattgacactgtgataaactacaaagaccgatgtaatgtggagaaggtaccgtccaatagtcagctggagattgagggtaactcatccgggcgacaactgagcgaggtttttatccaattaccttccagaaaggagctgcccgagtactacgaactgatcagaaagccggtcgacttcaagaagatcaaggaaaggatccgaaaccataagtaccgctccttgggcgaccttgaaaaggacgtaatgctcttgtgtcataatgcacagaccttcaacctcgaaggatcacaaatttacgaggattcgatagttctacagagtgtcttcaaatctgcacgccagaaaattgctaaagaggaagagagtgaagatgaatccaatgaagaagaagaagaggaggacgaggaggagagtgagtccgaggcaaagagtgttaaggtgaagatcaaactgaataaaaaggatgacaaagggcgagataagggaaagggaaagaaaaggccaaacaggggcaaagcaaagccagtcgtgagtgactttgattccgatgaagagcaggatgagagagagcaaagtgaaggctccgggaccgacgatgaatag

SEQ ID NO: 136756 - DNA, 4719 bp, synthetic construct
  misc_feature 1..4719: note = Description of Artificial Sequence: Synthetic coding sequence
  source 1..4719: mol_type = other DNA
atgagtactcccacagaccccggggcgatgccccacccggggccttcccccgggcccggtccttctcctggcccaattcttggaccctccccaggccccggcccgtcccctggttccgtccattccatgatgggcccttcacccggtccaccgtccgtttctcaccccatgcctacaatggggtccactgattttccacaggaaggcatgcaccagatgcataagccaattgatggcatccacgataaaggcattgtggaggatatccactgcggctccatgaagggcaccggcatgaggcccccccatcctgggatggggccaccacagagtccaatggatcagcactctcaaggctatatgagtccccatccatctccattgggggccccagagcacgtatctagtccaatgtccggggggggacctacacctcctcaaatgccaccatctcaaccaggcgctctaattcctggggacccccaagccatgtctcaacccaaccggggaccctcacccttctccccggttcagctgcaccaattgagggctcaaatcctggcttataaaatgctggctcgtggccaaccactgccagagacactccagctggctgttcaagggaaaaggaccttgccaggcctgcagcagcaacagcagcaacagcagcaacaacaacagcaacagcagcagcagcagcagcaacagcagcagccccagcagcagcctcctcagccacaaacccagcagcagcaacagccagccttggtgaattataatagaccctccggccccgggcccgaactgagtggcccatcaactcctcagaagctccctgtcccagctccaggaggaagaccttcccctgcgccccccgctgccgcgcagccccctgcagccgccgtccccggcccaagtgtcccacagcccgcccctgggcagccctctcctgtgctgcaactgcagcaaaagcagtcacgaatctccccgattcaaaaaccacaggggctcgatcctgtggagatactgcaagaacgagagtatcggctgcaggctagaatcgcccatcgtatacaggaactcgagaacttgcccggctcactcccaccggatcttcgaacaaaagccacagtggaactgaaagccctcagactgcttaattttcaacgccagttacggcaagaggtcgttgcatgcatgaggagagacacgacactagaaaccgcccttaattctaaggcctataagagaagcaagcgacaaacactgagggaggcacgaatgacagagaaactcgagaaacaacagaaaattgagcaagaaagaaagcggagacagaagcaccaagagtacttgaactcgatactgcagcacgcaaaagactttaaggaataccaccggtctgtggccggaaaaatccagaaactgagcaaggcggtcgcgacttggcacgccaacactgaaagagagcagaaaaaggaaacggaacggatagagaaagaacgtatgagacgcttaatggccgaagatgaagaggggtaccgcaagttgattgaccagaagaaggatcgtcggctagcttacctgttgcagcaaacagatgaatatgttgctaacctgactaacttagtctgggagcacaaacaagcgcaggcagcaaaagagaaaaagaagcggcggcggagaaagaagaaggccgaagaaaacgccgaagggggtgaatcagccctggggccagatggagagccaatcgacgaatcttcacagatgagtgacttaccagtcaaggtgacgcacaccgaaactggcaaagtcctcttcgggcccgaagcgcctaaggcaagccagctggatgcttggctggagatgaaccccggatacgaagtggccccaaggagtgactccgaggagtctgactccgactacgaggaagaggacgaggaggaggaatcatctaggcaagagacagaagagaaaatcttattggacccaaattctgaggaggtctcggagaaagacgcaaagcaaatcatagaaaccgctaagcaagatgtggatgatgagtatagcatgcaatactcggcgcgcggtagccaatcgtattacaccgtcgctcatgctatcagcgaacgtgtcgagaagcagtccgcgctcctgataaacgggacgctcaaacattatcagttacaaggactggaatggatggtctcactctataacaataatctcaacggaatcctagcagacgagatgggactgggaaaaacgattcaaacgatcgcacttatcacatacctcatggagcacaagcgattaaacggaccgtatttgatcatcgttcccctgagtaccctgtccaactggacatatgaatttgacaagtgggccccatcggtagtgaaaatctcatacaaggggacaccagcaatgaggcgctccttagttccacaactgagaagtggaaaatttaacgtcctgctgaccacttatgaatatattattaaagacaagcacatcttggccaaaattagatggaagtatatgatagtggacgagggccatcggatgaaaaatcatcattgtaaactgacccaggtgctcaatactcactatgtcgctccacggcgcatcttgctgacaggcaccccactacaaaacaagctgcccgagctttgggcactcctcaacttcctattaccgacgatttttaagtcttgttctacatttgaacagtggtttaacgccccattcgcaatgacaggcgaaagggtggatttgaacgaggaggaaactattctgataattaggcggctgcataaggtcctaagaccgtttctactccgaaggctaaaaaaggaggtcgaatcccagctacctgagaaggtcgaatatgtcataaaatgtgacatgtccgcactgcaaaagatcttataccgccacatgcaggcaaaaggcattctactcaccgacggctctgagaaagacaagaaggggaagggcggtgccaaaaccttgatgaacaccatcatgcagttgagaaagatctgtaaccacccctatatgtttcagcacattgaggagagcttcgccgaacacttggggtattctaacggtgtgatcaacggcgccgagctttatcgcgctagcggaaagttcgaactgctagaccggatcctgcccaaactgcgggcaaccaatcaccgtgtgcttctcttctgtcaaatgacctctctcatgactatcatggaagactattttgccttccgaaactttctgtatttgcggctggatggaaccaccaaaagcgaagaccgggctgcactgctgaaaaaattcaatgagcccggctcccagtatttcatcttcctcttgtctactcgagcgggcggactaggcttgaacttgcaggccgcagacacagtggtcatcttcgactccgactggaatccacaccaggatctccaggcgcaggatagagcgcacagaattggccagcaaaatgaggtccgggtcctgcgtctgtgcacagtgaatagtgttgaggaaaaaatcctcgctgctgcgaagtataaactgaatgtggaccagaaagtgatccaggcaggtatgttcgaccagaagagctcctcccacgaacgtcgcgcctttttacaggcaattctggaacatgaagaagagaacgaggaagaggatgaagtccccgacgatgaaaccctgaatcagatgattgcccggagggaggaggagttcgacctgttcatgcgcatggatatggacagacgaagagaggacgcgcgtaatccaaagcggaaacctagacttatggaggaggatgagctcccttcttggatcattaaggatgatgctgaggttgagagactgacctgtgaagaggaagaggaaaagatcttcggtcgcggcagccgccagagacgagatgtagactactccgatgccctgaccgagaagcagtggctgcgggccatcgaggacggcaatctggaggagatggaagaagaagtcagactgaaaaagcggaagcggcggcgcaacgttgacaaggaccctgcgaaggaggatgtcgaaaaagccaagaagaggcgaggcagaccccctgctgaaaaacttagccccaatcctcctaaactcacgaagcagatgaatgcaatcatagataccgttataaattataaagattctagtgggaggcagctgagcgaggtgtttatccagctgccaagccgcaaggagctgcccgaatattacgagttaattaggaagccagtggacttcaagaaaattaaagaaagaatccgaaaccataagtatcggagccttggagatcttgaaaaagatgtgatgcttctttgccataacgcacaaacgttcaatcttgaaggcagccagatatatgaagacagcattgtcttacagtctgtgtttaagagtgcccgccagaagattgcaaaagaagaggagtcagaggacgagagtaatgaagaagaggaggaggaagacgaagaagagtccgaatctgaggctaagtcagtgaaagttaaaataaaattaaataaaaaggacgataaggggcgggacaaaggaaaggggaagaagagacctaatcgaggaaaagctaagcctgtcgtgtctgactttgactcagatgaggaacaggatgaacgcgagcaatccgagggatcagggaccgatgatgagtag

SEQ ID NO: 136757 - DNA, 4773 bp, synthetic construct
  misc_feature 1..4773: note = Description of Artificial Sequence: Synthetic coding sequence
  source 1..4773: mol_type = other DNA
atgagtacccccactgacccgggcgcgatgcctcaccctggaccttccccaggccccggcccgtcacccgggccaattctgggcccttcaccaggacctggaccgagcccaggctcagtacactccatgatgggaccatccccaggtccaccttctgtcagtcatccgatgcctacaatgggtagcacggactttccccaggaagggatgcatcaaatgcacaagccgatagatggtattcatgacaagggaatagtggaagatattcactgtggctccatgaaaggcactgggatgcgcccccctcacccgggtatgggcccccctcagtcacccatggatcaacacagtcaaggttacatgtccccccacccttcaccactgggcgcccccgagcacgtgtcgtctccaatgtctggtggaggccctacaccccctcaaatgccgccctcacaacctggcgcactgatccctggcgaccctcaggccatgagccaaccgaaccgcgggccatctcctttcagtcccgttcagctccaccaactgagagcccaaatcctggcttataaaatgcttgctcgtggccagccactccctgaaactttacaactggccgttcagggcaagagaaccttgcccggacttcaacagcaacagcaacagcaacagcagcagcagcagcagcagcaacagcaacagcaacagcagcagcaaccccagcagcaaccgccccaacctcagacccagcagcagcagcaacccgctctggtgaactacaatcgaccatcaggtcctggtcctgagctctccggaccatctactcctcagaagttaccggttccagcccccgggggaaggcctagccctgccccccccgccgctgcgcaaccccccgcagctgccgttccaggaccctcagtaccacagcccgccccgggtcagcccagcccggtgctccagctgcaacagaaacagtcaaggataagtcccattcaaaaaccccagggcttagatcccgttgagattctccaagaaagagaatatagactgcaagcccgaatcgcccaccggattcaagagcttgagaacttgcccggcagtctccccccggacctgcggacaaaagcgacagtggaactgaaggcacttcggctgctcaactttcagaggcagctcaggcaggaggtggtggcttgcatgagaagagatacaaccctagagaccgctcttaacagcaaagcatacaaacgctctaagcggcagacactgagggaggcaagaatgactgagaaactggaaaaacagcagaagattgaacaagaaaggaaaagaagacagaagcaccaggagtacttaaacagcattctgcagcatgccaaggatttcaaagaatatcataggtctgtggcgggaaagattcagaagcttagcaaagcagtcgctacatggcacgctaacactgagcgagagcagaaaaaggaaacagagcgaatcgagaaagaacgaatgcgacggttgatggctgaagacgaagaggggtaccgcaaactgatagaccaaaaaaaggatagacgcttagcatatctcctgcagcagaccgatgagtacgtggcaaatctcacaaatttggtgtgggaacacaagcaagcgcaggccgccaaggaaaagaagaagagacggcggcggaaaaaaaaagctgaggaaaacgccgagggaggagagtctgccctgggacctgatggcgagcccattgatgaaagtagccagatgtctgatctcccagtcaaagtcacacataccgagacggggaaggtgctgttcgggccagaagccccaaaggcctcacagctggacgcttggttagagatgaaccccggttatgaggtggcacctagatcggattcggaagaaagtgattccgattacgaggaggaggatgaggaggaggagtcatccagacaagaaactgaagagaaaattctgctggatcctaatagcgaggaagtgtccgaaaaggacgccaaacagatcattgagaccgctaaacaggacgtcgacgacgaatacagcatgcaatacagcgcccggggttctcaatcttactacaccgttgcccacgctatctctgaaagagtggagaaacagagtgctctgctcattaacggcaccctgaagcactaccaactccaaggactggaatggatggtttcactctacaacaacaatctgaacgggatcctggctgacgaaatggggctcggaaaaaccattcaaactattgccttgattacctacctgatggaacataagaggctcaatggcccatatctgatcatcgttccattgtctaccctgagcaactggacgtatgagttcgacaagtgggccccatctgtcgtgaagatttcatacaagggcacccctgccatgcggcggagtcttgtaccgcagctgagatccggcaagttcaatgtcctgctgaccacctacgagtatatcatcaaagacaaacacatattagctaaaataagatggaagtacatgatcgttgatgaaggacatcgcatgaagaaccaccattgtaagctcacgcaggtcctcaatacacactacgtagccccgagacggattttactcacgggcacccccctgcagaacaaactgccagaactgtgggctctgctgaatttcctgttgcccaccatctttaagtcatgcagtacattcgagcagtggttcaatgctccattcgctatgaccggggaacgggttgacttaaatgaggaagaaacaattcttattattcgaaggctccacaaggtgctccggccttttctgcttagacgactcaagaaagaggtggagtcgcagctgcctgagaaagtggagtatgtaatcaaatgcgatatgtctgcgctgcagaagatcctttatcgtcatatgcaggctaaggggatcctgttaacagatggtagcgagaaggacaagaaaggcaaaggaggggcaaagactcttatgaacactatcatgcagctgcgtaaaatctgcaaccacccgtatatgttccagcacatagaagagtcattcgccgaacacctgggctactctaacggggtaattaacggcgcagagctatatcgcgcatcaggtaaattcgaattgctggaccggattttgccaaaattgagggccaccaatcacagggtactgctcttttgtcagatgacctccctgatgaccatcatggaggattactttgcgttccgaaattttctttatctccggctcgatggtacaacaaagtccgaagatagagcagccttgctcaagaagtttaatgaaccaggctcccagtatttcatattccttctgtctaccagggcaggcggactaggattaaatctgcaggctgcggataccgtcgttatattcgactctgactggaaccctcatcaggatctgcaggcacaagatagagcccatcgcattggacagcagaacgaggtgagggtgcttcgattgtgtacagtgaattccgtagaggagaagatccttgctgccgcaaaatacaagttgaacgtagaccaaaaagtgatacaggccggcatgtttgatcagaagtctagctcccacgaaagaagagcgttcctgcaggctatcttggagcatgaagaagagaacgaggaggaggatgaggtaccagacgacgaaacactgaatcaaatgatcgcccgcagagaggaggagtttgatctgttcatgcggatggacatggaccgccgcagagaagacgctcgcaaccccaaacggaagccccgactgatggaggaagatgaattaccttcctggattattaaggacgatgcagaggtggaacgcctgacatgcgaggaagaggaagaaaaaatctttggccgagggtccagacagaggcgagatgtggactattccgatgcccttacggaaaaacagtggcttcgggcgattgaagacggaaacctggaagagatggaagaggaagttcgccttaaaaagcgtaaacgcaggagaaacgtcgataaagatccagccaaggaagatgttgagaaggctaagaagaggcggggacgccctcccgccgagaaactgtcacctaacccccctaaattgacaaaacagatgaatgcgattatcgacacagttatcaattacaaggaccgatgcaatgttgagaaggtgcctagtaatagtcagctggaaatagaaggaaattctagcgggaggcagctgagtgaggtgtttatccagttgccgtccagaaaggagctgcccgaatactacgagctcatcagaaagccagttgattttaagaagatcaaggaacgtatcaggaaccacaagtaccgttctctcggagaccttgaaaaagatgtcatgctgctgtgccataatgctcagacctttaaccttgaggggagccagatatacgaagacagtatcgtgctgcagagcgtattcaagagcgccagacaaaagatcgccaaggaggaggaatccgaggacgaatcgaatgaagaagaagaggaagaagacgaagaagagagcgagtctgaagctaaatccgtgaaggttaagattaagctgaacaaaaaggatgacaagggacgcgataaaggaaaggggaagaagcgcccaaatagggggaaggcaaagcctgtggtgtccgattttgacagtgatgaggagcaggacgaacgggagcagtcggaggggagcggtaccgatgacgaatag

SEQ ID NO: 136758 - DNA, 534 bp, synthetic construct
  misc_feature 1..534: note = Description of Artificial Sequence: Synthetic coding sequence
  source 1..534: mol_type = other DNA
atggaggaggaggtgcggctgaagaagagaaagcgccgcagaaacgtcgataaggatcccgctaaagaggacgtcgagaaagctaaaaagcggcgaggacgcccccctgccgaaaaactctcgccaaatcctcctaaactgaccaagcaaatgaatgccattatcgatacagtcatcaactacaaagactcttctggccgccagttaagcgaggtatttatccagctgcccagtagaaaagaactgcccgagtactacgaacttatcagaaaaccagtcgatttcaagaaaattaaggaacggatccgtaaccataagtacaggtcgttgggagacctggaaaaggatgtgatgctgctttgtcacaacgcccagacattcaatcttgagggttctcagatttacgaagattccatcgtgctccagagcgtgttcaagtcagcgcgccaaaaaattgcgaaagaagaagagtccgaagacgagagtaacgaagaagaagaggaggaggatgaggaggagagcgaatccgaatag

SEQ ID NO: 136759 - DNA, 816 bp, synthetic construct
  misc_feature 1..816: note = Description of Artificial Sequence: Synthetic coding sequence
  source 1..816: mol_type = other DNA
atgaaacgactggcagcacggtgcttcgcgggactgctcatcttgtctccccttaccgtgatctccgactcgagacccgccgattctggcaaagccattgaggatggaaacttggaggagatggaggaagaagtgcggctgaagaagcggaaaagacgccggaacgttgataaggatccagccaaggaagacgtagaaaaggcaaagaaacgcaggggtaggccgcccgcggaaaagctcagccccaaccctccgaagctgacgaaacagatgaatgccataatcgatacagttataaattataaggacagttctggacgacagcttagcgaagtattcatccagttacccagccgaaaggagctccccgagtattatgagctaatcagaaaacccgttgacttcaaaaagatcaaagagagaatacgtaaccataagtacagaagcctcggggatttggagaaggatgttatgctgctgtgtcataacgcgcagacatttaacctggagggcagccagatctacgaagatagtatcgtcctccagagcgtgtttaagagtgctcgacaaaaaattgcaaaggaagaggagtcagaagacgaatcgaatgaggaggaggaggaagaggacgaggaggagtccgagtccgaagctaagtcagtgaaagtgaaaatcaagcttaacaaaaaagacgacaagggtcgggacaaaggcaagggaaagaagagaccaaatcgcggcaaagcgaagccggtcgtcagcgattttgactcggacgaagaacaggacgaaagggtgtctgtcgctgattggtag

SEQ ID NO: 136760 - DNA, 462 bp, synthetic construct
  misc_feature 1..462: note = Description of Artificial Sequence: Synthetic coding sequence
  source 1..462: mol_type = other DNA
atgaaacggctcgccgcacggtgctttgctggcctgcttatcctgtcccctctgacagtcatcagtgactccaggcctgcagattctgggaaagcaattgaggatgggaatttggaggagatggaggaggaggttcgcttgaaaaagcgtaagcgaaggcgtaacgtcgacaaagatcccgccaaggaagatgtggagaaggccaagaaacgaagagggaggccaccagcagagaagctctcaccaaacccacccaaactaactaaacagatgaatgctatcattgataccgtcattaattacaaggactctagcggaagacagttgtcagaggtgttcatccagttaccctcacgcaaagagcttccagaatactatgaattgattcgcaagccagtggacttcaaaaaaattaaggagcgcatacgtaatcataagtatcgctccctgggcgacctctag

SEQ ID NO: 136761 - DNA, 468 bp, synthetic construct
  misc_feature 1..468: note = Description of Artificial Sequence: Synthetic coding sequence
  source 1..468: mol_type = other DNA
atgtctaccccaaccgacccaggggcgatgccacaccccggaccttctcccggcccaggtccctccccagggccgatcctgggccctagcccgggacccggcccatctccaggaagcgtgcattcaatgatgggcccgtcacctgggcctccgtcagtgtctcaccctatgcccacaatgggatccaccgactttccacaagaaggtatgcaccagatgcataaacccatcgatggcatccacgataagggaatagttgaagacatccattgcggttcgatgaaggggactggcatgaggcccccccaccccggtatggggcctcctcaatcccccatggatcaacacagccaggggtacatgtcgccgcatccttctcccctgggtgcccccgagcatgtttctagtccaatgagtggaggtggaccgacccctccgcagatgccaccatcgcaacccggtgcttag

SEQ ID NO: 136762 - DNA, 1680 bp, synthetic construct
  misc_feature 1..1680: note = Description of Artificial Sequence: Synthetic coding sequence
  source 1..1680: mol_type = other DNA
atgagcacccccaccgacccaggcgccatgccgcacccgggcccatccccagggcctggcccgtcccccggccccatcctgggaccgagtcccggaccggggccatctcctggctcagtgcattcaatgatggggcccagcccgggacctcctagcgtttctcaccccatgccaaccatggggagcaccgactttccccaggagggcatgcaccagatgcacaagccgatcgacggaatccacgataagggaattgtggaggacattcattgtggttctatgaaaggcaccggaatgaggccgcctcaccctggcatgggaccaccccagtccccaatggaccagcatagtcagggctacatgagccctcatccatcccctctcggagcccccgagcacgtgtccagccccatgtccgggggcggacccacaccaccacagatgcctccttcacaacctggcgcccttattcccggagatccgcaggctatgagtcagccaaacagaggtccgagcccttttagcccggtgcaattgcatcagctccgggctcaaatcctagcctacaaaatgctcgcgcgcgggcagccactgccagagactctgcagctcgcggtccagggaaaaaggactctgcctggactgcagcagcagcagcagcaacagcagcaacagcagcaacagcagcagcagcagcagcagcagcagcaacagccccaacaacagccccctcagccccagacccagcagcagcaacaacccgcactagtcaactacaatcgaccttccggccccggacccgaactctccggcccctccacacctcaaaaacttccagttccagctcctggcggccgccccagtcctgcaccacctgcagccgctcaaccacccgctgccgcagttcctggaccatctgtgcctcagcctgcgcctggacaaccctctcctgtgctgcaactccaacagaagcaatccaggatttcacctatccagaaaccgcaagggctggaccccgtggagatcctgcaggagcgggagtatcgtcttcaggcccggatcgcacacagaatacaggaactggaaaatctcccaggttctctcccaccagacctgaggaccaaggctactgtggagctcaaggccctgcggctcttgaactttcaacgccagctgcggcaggaggtagtggcttgtatgcggagggacactaccctggagaccgccctgaacagtaaggcatacaagcgtagcaagagacaaacactgagggaggcaaggatgaccgagaaacttgagaagcagcagaagattgagcaagagcggaaacgccggcagaaacaccaggagtatctcaattcaatcctgcagcatgccaaagattttaaagagtaccacaggtctgttgcgggtaagatccagaaactgtctaaagctgtggcaacctggcacgctaacactgaaagagagcaaaaaaaagagacagagaggatcgaaaaggagcggatgagacgattgatggcagaagatgaggagggttatcggaaattgatcgaccaaaagaaggaccggcgcctggcctatctactgcagcagaccgacgagtacgtggcgaatctgactaacctggtctgggagcataagcaggcccaagccgctaaggaaaaaaagaaaaggtag

SEQ ID NO: 136763 - DNA, 516 bp, synthetic construct
  misc_feature 1..516: note = Description of Artificial Sequence: Synthetic coding sequence
  source 1..516: mol_type = other DNA
atggaggaagaagttcgacttaagaaaaggaaaagaaggagaaacgtcgataaagaccctgctaaagaagacgtggaaaaagccaaaaagcggcggggccgcccaccagctgagaaactcagcccaaatccacctaagctcactaaacagatgaacgccatcatagatacagtaataaactacaaggatcggtgtaatgtcgagaaagtcccttctaactctcaactcgaaattgaggggaactcgagcgggagacagttgagcgaggtgttcatacagcttccaagtcgaaaggagcttcctgagtactatgaacttattagaaagcccgtggatttcaagaaaatcaaggaacggattagaaatcataaatatcggtccttgggcgacctggagaaggacgtcatgctgctgtgtcataacgctcagactttcaatctggaaggcagccaaatctacgaggacagcattgtgctgcagtccgtctttaagtccgcccggcaaaaaattgcatag

SEQ ID NO: 136764 - DNA, 201 bp, synthetic construct
  misc_feature 1..201: note = Description of Artificial Sequence: Synthetic coding sequence
  source 1..201: mol_type = other DNA
atgtcgacgccaacagaccccggcgccatgcctcatcccgggcctagccccggtcctggcccctccccagggcctatactagggccatcaccagggcctgggccaagccccgggagtgtgcattctatgatggggccgtctcctggccccccaagtgtgagccacccaatgcccactatgggctcaaccgatttcccatag

SEQ ID NO: 136765 - DNA, 4944 bp, synthetic construct
  misc_feature 1..4944: note = Description of Artificial Sequence: Synthetic coding sequence
  source 1..4944: mol_type = other DNA
atgagtacacctgatcccccactgggagggacccccaggccaggtccatctccggggccgggcccctctcccggcgctatgctgggacctagccccggcccatctcctggaagcgcccatagcatgatggggcccagcccggggcctccaagcgctggtcaccctatccctactcaggggcccgggggctacccacaggataacatgcatcaaatgcataaacccatggaaagtatgcatgaaaagggtatgagcgacgatcctcgctacaatcagatgaagggcatgggcatgcggagcggtggccacgcaggaatggggccccctcccagcccaatggatcaacattcccaagggtacccatcccccctgggcggtagcgagcacgctagcagtccagttcccgctagtggacctagctccggacctcagatgagttccggcccggggggagcccctctggatggagcggacccccaggccttgggacagcagaaccgcggcccaacaccatttaatcagaatcagcttcaccagctgagggcccagataatggcctataaaatgctggcacgggggcaaccgctccccgatcatctgcagatggccgtccagggcaaacgccccatgccaggaatgcagcagcagatgccaactcttccacccccgagtgtctccgctaccggcccaggtcccggaccggggccgggacctggacccggacctggccccgcaccccccaactattcaagaccacacggcatgggggggcctaatatgccccccccggggccttctggggtgccccccgggatgccggggcaaccaccaggtggcccgccaaagccgtggccagaggggcccatggctaatgcagcagcccccaccagcacaccccagaagcttatccctccccagccaacaggcaggccctcaccagccccgccagctgtccctccagcggcctccccagtcatgccaccccaaacccagtccccagggcagccagctcagccagcgcctatggtccccctgcaccagaagcagagtagaattacgcccatccagaagccacggggattggaccccgttgagatcctgcaggagcgcgaatacagacttcaagccagaatcgcacaccgtatccaggaactggaaaacctcccaggatcattggcaggtgacttaagaactaaggccacaatagagttgaaagccctgagactcctgaactttcaaaggcagttgcgacaggaagtggtcgtctgcatgcggcgagatactgccctcgaaacagctctgaacgccaaagcatataaaagatcgaaaaggcagagtctgagagaggctcgcataaccgagaagctggaaaagcagcagaaaattgagcaggaacggaaacgtagacagaagcatcaggaatatctgaatagcatcctgcaacatgctaaagactttaaggagtatcacaggagtgtcacgggaaaaatacagaaacttacaaaggcagttgccacctatcatgcaaacaccgagagggagcagaaaaaggagaatgagagaatcgagaaagaacgcatgagacgactgatggcggaagatgaggaagggtaccggaagctgatagaccagaaaaaggacaagaggcttgcctacctgttgcagcaaacagacgagtacgtcgccaacctgacagaactcgtgcgccagcataaggcagcccaggtagctaaggaaaagaagaaaaagaagaaaaagaagaaagcagaaaatgccgaagggcagaccccagccatcggtcccgatggggaacccctggacgagacaagccaaatgtctgacctgcccgtgaaagttattcacgttgagtccggcaaaattctcaccgggaccgatgctcctaaggccggacagttggaggcatggctcgagatgaacccgggttatgaggttgccccaaggtctgactccgaggagtcagggtccgaggaggaggaggaggaagaagaggaggagcagccccaagccgcccagccccccacattgcctgtggaagagaagaagaagataccggatcctgactcagatgatgtgtctgaggtggatgcccgtcacataatagagaatgcgaagcaggatgtggacgacgagtatggcgtttcccaggccctcgccaggggactacagagttattacgccgtggcacacgcagtgacagagcgagttgataaacaatccgctctgatggttaacggagtattgaaacagtatcagatcaaggggctagagtggctagtgtcattgtataacaataacctgaatggcatactggccgatgaaatgggactgggcaaaaccatccagactattgccttgatcacctacttgatggagcacaagaggatcaacggaccatttctcattattgtgcctctcagcactctgagtaattgggcatatgaattcgataaatgggccccatcagtggttaaagtaagctacaaaggttctcccgccgccaggagagcctttgtcccacagcttaggagtggaaagttcaacgtgctgctcactacatacgagtatatcattaaagacaaacacattctggctaagataagatggaagtacatgatcgttgacgaagggcaccggatgaagaatcaccactgcaagctgacccaggtcctgaacacccactacgtcgctcccagacgtctactactcaccggcactccccttcagaataagctgcctgagctgtgggccctacttaactttctccttccgaccatcttcaagtcttgctcgaccttcgagcagtggtttaacgcgcctttcgcaatgaccggagagaaggtggatctcaacgaggaggaaactattctgataattaggcgactgcacaaagtgctgcggccatttttattacgacgactgaaaaaggaagtcgaggcccagcttccggaaaaggtggaatatgtaataaagtgtgatatgtctgcactgcagcgggtactttaccgtcacatgcaggcgaagggggttctacttacagatggatctgaaaaagacaagaagggcaaaggggggacgaaaactttgatgaacaccatcatgcagctcagaaagatctgtaaccatccttacatgttccagcacattgaggaatcattttccgagcaccttgggttcaccgggggcatagtacaggggctggacctctacagagcctcagggaagttcgaattgttggatcgcatcctgcccaagctgcgcgctaccaatcataaagttctgctgttctgtcaaatgacctccctgatgaccatcatggaagattacttcgcatatcggggcttcaagtacttgcggttggacggcaccactaaggccgaggataggggaatgctgctcaagacctttaatgagcctgggtccgagtacttcatcttcttgctctccacacgcgcgggaggccttggactgaacttgcaatcagccgatacagtcatcatttttgacagtgattggaacccccatcaggacctgcaggcacaagacagggcacaccggatcggccagcagaatgaagtgcgtgtgctcagactttgtacagtgaattctgtggaagagaaaattctggcagccgctaagtataagctgaacgtggatcagaaggtgatccaggcaggcatgtttgaccagaaaagtagtagtcatgagcggagagccttcttacaggccatactcgagcacgaggagcaagacgagtcacgccattgcagtactggctccggctcagcgagttttgcccacacagctcccccacctgccggcgttaatcccgacctcgaagagccccccctgaaggaggaggatgaggtgcccgacgatgaaactgtgaaccagatgatagcgaggcatgaggaagaatttgatttatttatgagaatggacctggaccgacggagagaagaagcgagaaaccccaaacggaaacccagactcatggaggaagacgagctgccatcctggatcatcaaggatgatgccgaggtggagcgcctaacatgcgaggaggaagaagaaaagatgttcggtcgaggctcacgacataggaaggaagttgactactctgattcactcactgagaaacagtggctgaaggccatcgaagaaggtactctggaagagattgaggaggaagttaggcagaagaaatcatctcggaagaggaaaagagactcagacgcaggaagctcaacaccgaccactagcacacgctccagagacaaggatgacgagagcaagaagcagaagaagcgggggcgacctccagcagagaagctctccccgaatcccccgaatttgactaaaaagatgaaaaaaatagttgacgcagtgatcaaatacaaggactcctctagcggcagacagttgagtgaggtatttatccaactgccaagtcgcaaggagttgcccgaatactatgagctgatccggaagccagtcgatttcaaaaagatcaaggagcgcattaggaatcataaataccgatcattgaatgatctggagaaggatgtaatgcttctgtgtcagaatgcccagacatttaacctggaaggatctctaatatatgaggacagcattgtcctccaaagcgtattcacgtccgtaagacagaagatcgaaaaggaagacgactccgaaggagaagaatccgaagaagaggaagagggggaggaggagggcagcgagtccgagtccaggtcagtcaaggttaagatcaagctcgggcgtaaagaaaaagcccaggatcgccttaagggtggcagaagaaggccttctcgcgggagtagggcaaagcctgtcgtttccgacgatgatagcgaagaagaacaggaggaggacagatccggatcaggctccgaggaagactag

SEQ ID NO: 136766 - DNA, 5040 bp, synthetic construct
  misc_feature 1..5040: note = Description of Artificial Sequence: Synthetic coding sequence
  source 1..5040: mol_type = other DNA
atgtccacccccgaccctcccctggggggtacgcctcgccctggtcctagccccggccccggacctagtcccggggcgatgctgggccctagccctggcccctcacccggatccgcccatagtatgatgggaccatcccctggaccccctagcgctgggcaccctatccctacgcagggccccggcgggtacccgcaggataatatgcaccagatgcacaagcccatggagtctatgcacgaaaaggggatgtccgatgatccccgttacaatcaaatgaagggcatgggcatgcgatccggcggccacgctgggatgggccctcctcctagtccgatggatcaacactctcagggataccccagtccgctgggaggatctgagcatgccagttctcctgttccagccagcggaccatcctccggccctcagatgtcttcaggaccaggaggtgcccctctggacggggccgatccacaggcacttgggcaacaaaatagggggcctacgccctttaatcaaaatcagctgcaccaactgcgggctcagatcatggcttataagatgttggcacgcggtcaaccgctgcctgatcatctgcagatggccgtgcagggtaagcgccccatgcccggaatgcagcagcagatgcccaccctcccgccgccttcggtgtcggcaactgggccaggaccgggacctggtccgggccccgggcccggcccgggaccggcacctccgaactatagcagaccccatgggatgggaggtcccaatatgcctccccctggccctagcggcgtgccacctggcatgcccggtcagccccccggcgggcctccgaagccttggcctgaggggccaatggctaacgccgcagcacctacatctacgcctcaaaagctgatccctccccagcctacaggaagaccatcacccgctccacccgcagtgcccccagcagccagccctgtgatgccccctcaaacgcagagtcccggccagcctgcacagccagctcctatggttccgcttcatcagaagcagagccgtattacacccatccagaagcctaggggcctagaccccgtagaaatcctgcaggaaagagagtataggttacaggctcggatcgcacatcggatccaggaactcgaaaatttgcccggctccctcgcgggtgacctccggacaaaggccaccattgaattgaaggccctgcgcctgctgaactttcagcgccagttgcggcaggaggtggtggtttgcatgagacgagacaccgcactggagactgctctcaacgccaaggcatataagcggtccaaaagacagtcattgagggaagcccgcattaccgagaaactggagaaacagcagaaaattgagcaggagaggaagcgtcgccagaagcatcaggagtatttgaatagcatcctgcagcacgctaaggactttaaggagtaccaccgtagcgttaccgggaaaatacagaaattaacaaaggctgtggcgacttatcacgccaataccgagagagaacaaaaaaaagagaacgagcggatagagaaggaaagaatgcggcgcctgatggctgaagatgaggagggatacagaaaactgatagatcagaagaaggacaagaggctggcttacctattgcagcagaccgatgaatacgtagctaatttaacggagttagtgaggcaacacaaggccgcgcaagtcgcaaaagaaaagaaaaaaaagaaaaagaagaagaaggccgagaatgccgagggacagacaccagccataggtccagacggtgagccccttgatgagacctcccagatgtccgatttgcctgtgaaggtaattcatgtcgaatccggtaagatattaacgggtactgatgcaccaaaggccggccagctcgaggcatggttggagatgaaccctggatacgaggttgcccccaggtcggactcagaggagtcgggatccgaagaggaggaagaagaggaagaggaggaacagccccaggccgcccagccaccgaccctccctgtggaggagaagaagaagatacctgacccggactcagacgacgtcagtgaggtggatgctagacacattattgagaacgcgaagcaggatgtggatgacgaatatggtgtctctcaggccctcgcgagagggctccagagctactatgcagtggctcatgctgttacagagagggtggacaagcagtcagccctcatggttaatggcgtgctgaagcagtaccagatcaaagggctcgaatggctagttagtctgtataataacaatctaaacggaatactggccgacgaaatgggtctgggaaaaaccatccagaccatagccctcataacctacctcatggaacataagaggatcaatggtcctttcctgataatcgttcctctgagtaccctctctaactgggcttacgaattcgacaagtgggctccttcggtggtgaaggtctcttacaaaggctcccctgcagctagacgggcatttgtgcctcagctgcgtagcggaaaatttaatgtgctcctcacgacctatgaatatattatcaaggataagcatatcctggctaaaattaggtggaagtatatgattgtggatgagggtcataggatgaaaaatcatcattgcaaactgacccaggtcttgaatacacactacgtggccccccgacgcctcctcctaacgggaacccctctgcagaacaagttgcctgaattatgggccctgttaaacttcctattacccacaatctttaagtcttgctcaacctttgagcagtggtttaatgcaccttttgccatgacaggagagaaggttgacctcaatgaagaagagaccatcctcataatcaggagattgcacaaggtccttcggccattcctgcttcgccgcctgaaaaaggaggtggaggcccagctgccagagaaagtggagtacgtcatcaagtgcgatatgtcggctctgcaacgcgtgttgtaccgccatatgcaagccaaaggtgtccttctgaccgatggctccgagaaagataagaaaggtaaagggggcacaaaaaccctgatgaatacaataatgcagcttcgtaaaatttgtaatcatccctatatgttccaacacattgaagagtccttcagcgaacacttggggtttactggtgggattgttcagggcctggatctctatcgcgcctctggcaagttcgagctcctcgatcggattctgcccaaactccgggccacgaaccataaggtcctgctgttttgtcagatgacaagcttgatgacaattatggaagactatttcgcttatcgtggcttcaagtaccttaggctggacggcaccactaaagcggaagatagaggaatgctactgaagacctttaacgaaccaggatctgagtatttcatctttctgctatccacacgagccggcggattggggcttaacttgcagagcgccgataccgtgatcatattcgactccgactggaatccgcaccaagaccttcaggcccaagatagggcccaccgcataggacagcagaacgaggtgcgcgttctaaggttgtgcactgtgaattctgtagaagagaagattcttgccgcagcgaaatacaagctcaatgtagaccagaaggtgattcaggctggtatgtttgatcaaaagtctagcagtcatgaacgcagagcatttctacaggctatacttgagcacgaggaacaggacgagagtagacactgttccactggctccgggtcagcttcattcgcccatacagctcctccccccgccggcgttaaccccgacctagaagagccacccctgaaggaggaggatgaggtgcccgacgatgagacggtcaaccaaatgatcgctaggcatgaagaagagttcgacttgttcatgcggatggacctcgatcggcggagagaggaggccaggaatccgaagaggaagcctcgccttatggaggaggacgaactcccttcctggatcatcaaagatgacgcagaggtcgagcgcttgacgtgcgaagaagaggaggagaaaatgtttggaagaggttccaggcaccgaaaagaagttgactactctgacagcctgactgaaaaacagtggctgaaaaagatcaccggcaaagatattcatgacacagccagcagcgtagcacgagggctgcagttccagaggggcctgcagttttgtacaagagcgagcaaagcaatcgaagagggtacgctggaggagatagaggaggaggtgaggcaaaaaaagtcatccagaaagcgcaaaagggactccgatgcaggatcttccactccaaccacctcgacgaggtcaagagacaaggacgacgaaagcaagaagcagaaaaagaggggaaggccgcctgcagaaaaactctctcctaatccccccaacctgaccaaaaaaatgaaaaaaatagtggacgccgtaattaaatacaaagactcctcttctgggcgtcagcttagcgaagtattcatccaactgccatcccggaaggagttgcccgagtattacgagttgatccgcaagcctgtcgatttcaaaaaaattaaggaacggatacgtaatcataaatacagaagtttaaatgacttagaaaaggacgttatgcttctgtgtcaaaacgcccaaacctttaacctcgagggtagtctcatttatgaggatagcattgtgctgcagtctgtgttcacatccgtgcgacaaaagatagagaaggaggacgacagcgagggggaagagtccgaggaggaagaggagggggaagaagaagggtctgagagcgaaagccgcagcgtcaaagtaaagattaaactcggccgtaaggaaaaggcccaggacagactcaagggtgggcggaggcgcccttcacggggtagccgggcaaagccagtcgtttcggacgacgactccgaggaggagcaagaggaagaccgcagcggctcaggatctgaagaggattag

SEQ ID NO: 136767 - DNA, 4854 bp, synthetic construct
  misc_feature 1..4854: note = Description of Artificial Sequence: Synthetic coding sequence
  source 1..4854: mol_type = other DNA
atgagtacccctgatccaccactgggtggtaccccccggcctggtcctagccccggcccgggcccaagccccggggccatgctgggtccctctcccgggcctagtcctgggtccgcacatagcatgatgggaccttctcctggaccaccatcagcaggccacccaattcctacccagggtcccggaggctatccccaggacaacatgcaccagatgcataagcctatggagagcatgcatgagaagggaatgagtgacgacccccgctataaccagatgaaggggatgggaatgaggagcggtgggcatgctggtatgggcccccctcccagtcccatggatcagcattcccagggatatcctagtcctctgggggggagcgagcacgcctcttctcctgtccctgcgagcggtccaagctctgggccccagatgagcagtggcccgggtggggccccgctggacggagcagacccccaggcactgggacagcagaatcgaggtccgacaccatttaatcaaaatcagctccaccagctcagggcccagatcatggcatacaaaatgcttgcccgtggccagccattgccggatcatctgcaaatggcagtgcaggggaagagacccatgcccggcatgcagcagcagatgccaacgcttcctccaccaagcgtaagtgccacaggccccgggcccgggcctgggccaggccccggtcctgggcctggtccggctcctcctaactactccagacctcatgggatgggggggccaaatatgccgcctcccggtcctagcggggttcctccaggtatgccaggacagcccccgggaggccccccgaaaccttggcccgaaggtccaatggcaaatgcagcggcccctactagcacccctcagaagcttatccctccacagccgacagggcgaccaagcccggccccccccgcagttcctccagctgcctccccggtgatgccaccacagacacagtcaccagggcagccggctcagcctgcacccatggtcccgcttcaccagaagcagagtagaataactccaatccaaaagccacggggccttgatcccgttgagatcctgcaggagagggagtaccgactccaggcgcggatcgcacatcggatccaggagctggagaatctaccaggtagtctcgcaggagacctgagaaccaaggccacaatagagcttaaggcccttagacttctgaacttccagcgtcaactgagacaagaggttgtggtgtgtatgagaagagacacggctcttgagaccgctttaaatgctaaggcctataaacggagtaagcgacaaagcttaagagaggctaggattaccgagaaactggaaaaacagcagaagatagagcaggaacggaagagacggcagaaacaccaggagtatcttaactctatattgcagcatgctaaggactttaaggagtaccaccggtctgtgaccggcaagatacagaaattaaccaaggccgttgccacttaccacgccaacaccgagcgtgaacagaagaaagagaatgaaagaatcgaaaaggagaggatgagacgacttatggctgaggatgaggaggggtacaggaagcttatagaccaaaaaaaggataagcgcctggcttacctgctccagcagactgacgagtacgtggcaaatctgaccgaattggttcggcagcacaaagctgcgcaggttgctaaagagaaaaaaaagaagaagaagaagaaaaaagctgaaaacgccgagggtcagacaccggcgatcggccctgatggcgaaccgctcgacgagacttcccaaatgtcagatctgcccgtgaaggttatacacgtagagagcggcaagatcctgacagggaccgatgcacccaaggcaggacagttagaggcctggctcgaaatgaatcctgggtacgaggtggccccccgcagcgacagcgaagagagcgggtcggaggaggaagaggaggaagaggaggaagaacagccgcaggctgctcagcctcctactctccccgtggaggagaagaagaagattcctgatccggactccgatgacgtgagtgaggtggatgcaagacacatcatcgagaatgccaagcaggacgtcgacgacgaatatggcgtttctcaggcactagcaaggggccttcagagctactacgctgtggctcacgcagtgaccgaacgggtggacaaacagagtgcactcatggtcaatggcgtactgaaacagtaccaaataaagggcctggagtggctggtgagtctctacaacaataacctcaacgggatactcgcagatgagatgggcctcggcaaaactattcaaaccatcgcattgatcacgtatcttatggaacataagaggatcaacggacctttcctaattatagtaccattatccactttgtctaactgggcatacgaatttgacaaatgggctccgagcgttgttaaggtgtcatataagggaagccccgcggcccggcgtgcgtttgtcccacagctccggtctggtaagtttaacgtgctgttgacaacttacgaatacatcatcaaagacaaacacatcctcgccaagatacggtggaaatatatgatcgtcgacgaggggcaccgcatgaagaaccaccattgcaaactgacacaagtgctgaacacacattacgtggcacccagacgtctgctcttaacaggaacccccttgcagaataaactcccggagctgtgggctcttctgaacttcctactgcccacgatatttaagtcctgctctacattcgagcagtggttcaatgcacctttcgccatgaccggagaaaaagtggatttgaacgaggaggaaacaatcctgattattaggagactgcacaaggtgttgcgtccattccttttaaggagactcaagaaggaggttgaggcccaactccctgagaaagtcgagtatgtcattaagtgcgatatgtccgctttgcagagggtactgtacaggcatatgcaggcaaaaggtgtgctgctcacagatgggagcgagaaagataaaaaaggcaaaggaggtacaaagaccctgatgaacacaatcatgcaactccgcaagatctgcaaccatccatatatgttccagcatatcgaggaatccttctccgagcacctcggcttcaccggggggattgtgcagggtctcgacctgtatagagctagtgggaagttcgaacttttggataggattttaccaaaacttagggcaaccaatcataaagtactgttattctgccagatgacctctttgatgaccatcatggaagattatttcgcttaccggggttttaagtacttgagactcgatgggaccacaaaagctgaggatcggggcatgctcctgaagactttcaacgagccaggatctgagtattttattttcctgctatcaacaagggcaggaggactgggactgaatctgcagtcagctgataccgtgataatctttgacagcgactggaatccccatcaagacctgcaagcgcaggatcgcgcccataggatcgggcagcaaaatgaagtccgcgtgctgagactgtgcacagtgaacagcgtcgaagagaaaatcctcgctgccgccaagtataaactgaacgttgaccagaaggtgattcaggctggcatgttcgaccagaaatcaagctctcatgagaggagggccttcctgcaggctattctcgagcatgaagagcaagatgaggaggaagatgaagtccctgatgatgagaccgtgaaccaaatgattgctaggcacgaagaagaattcgacctattcatgcgaatggatttggaccggcgtcgcgaagaagctcgaaatcccaaaaggaaaccacgcctcatggaggaggatgagcttccgtcctggatcatcaaggatgatgccgaagttgagagactcacctgcgaggaggaagaggagaaaatgttcgggcggggaagtaggcacagaaaagaagtggactacagtgactccctgaccgaaaaacagtggcttaagaccctcaaagcaattgaagaaggaaccctcgaggagattgaagaagaggtgcgccaaaagaagagctctcgcaaaaggaagcgggacagcgatgctgggtcgtctaccccaaccacaagcacacgctcacgcgataaagacgacgaatcaaagaagcagaagaaacggggacgcccccccgccgaaaaattgtctcccaaccctcctaacttgaccaagaaaatgaagaagattgtcgacgccgtgatcaaatacaaagacagttcctcaggcaggcagctgagtgaggtcttcatccagctgccctcccgcaaggaattgccagagtattacgagctgattcgcaaacctgtcgacttcaagaagatcaaagaacgcatccgtaaccacaaataccggagcctaaacgaccttgagaaggacgtgatgcttctgtgtcagaatgcacagaccttcaacttggaaggatcactgatttatgaagacagtattgtgctccagtccgttttcacatccgttagacaaaagattgagaaggaagacgactctgaaggagaggaatccgaggaggaggaagagggagaggaagaaggctcagaatctgagtcccgaagtgtcaaagttaagattaagttaggacgcaaagaaaaggcccaggataggttaaaagggggacgccggcgtccctcccgagggagtcgcgcgaaacccgtcgtgagtgacgatgatagtgaagaagagcaagaagaggatcgaagcggctctggctcagaagaagactag

SEQ ID NO: 136768 - DNA, 5046 bp, synthetic construct
  misc_feature 1..5046: note = Description of Artificial Sequence: Synthetic coding sequence
  source 1..5046: mol_type = other DNA
atgagcacccctgatcctccactgggagggacaccccggcccggaccctccccaggcccaggcccttcaccaggggcgatgttgggccccagccccgggccctccccagggagtgcccatagcatgatgggcccttcacctggtccaccttctgcgggccaccccatcccaacacagggcccaggcggatacccacaggacaacatgcatcagatgcataaaccaatggagtccatgcatgaaaaaggaatgtccgatgatcctcgctacaatcagatgaagggcatgggcatgcgtagcggcggacacgcagggatgggtccaccaccaagccccatggaccagcatagccagggctacccgtccccgctgggaggcagcgaacacgcatcctcccctgtgcccgcctcgggcccaagttctggtcctcagatgtcctccggccctggaggtgcaccgctcgatggggctgatcctcaagctcttgggcagcagaacagaggcccaactccatttaaccaaaatcagctacatcagttgcgggcacagataatggcgtataagatgctggcgcgagggcaacctctccccgatcacctccaaatggctgtgcaagggaaacgacccatgccgggaatgcaacagcagatgcccaccctaccacccccttctgtatctgctacaggtcccggacccggacctggccccggaccagggcccggacccggacccgctccccccaattattcgagaccccacggtatgggaggaccaaatatgccaccaccaggcccctcaggagtgccacccggcatgcccggccagccccctggcgggcccccaaaaccctggcctgagggacccatggcaaacgccgccgcccccactagtactccccagaagttgatccccccacaacctacgggcagacccagcccagctccacctgctgttcctccagcagccagtcccgtcatgcctcctcagactcagagtcccggccagcccgcccagcccgctccaatggtgcccctccatcagaagcagtctcgtattacccccatccagaaaccccggggcctcgatccagtagagatactccaagagcgagagtacagactgcaggctcggatcgctcatagaatccaggagttggagaatttgccaggcagtctcgcgggggacctgagaacaaaagctactatcgagttaaaggccttgaggctgctgaattttcaaagacagctgcggcaggaagttgtcgtgtgcatgcgccgggacaccgcactggagacagcactcaacgcgaaagcctataaacggtccaaacgccagtccctccgagaggcgcggattactgagaagctcgaaaagcagcagaaaatcgagcaggagcggaaacgaaggcaaaagcatcaggaatacctgaactcaattctccaacacgctaaagactttaaggaataccatcggtctgttacaggaaagatccagaagctgacaaaagcagtggcgacttaccatgccaatactgagagagaacaaaaaaaagagaatgagcggatagagaaggaaagaatgaggagacttatgggccagcgagaaaagtcacgccggggactggggtctcagtcatgggccaggatattcgccgacctttcagaccatcagaatgattgcgtcacttcagtcacggagtcccttgttgggcagatcctggccgcttgttctggagaggagggtgaggtggagtggaaaggtcgggatcgcgtccgcagattgcgggctgaggatgaagagggataccgaaagctcatcgatcagaaaaaagacaagcgtctggcatacttactccaacagaccgacgagtatgtcgcaaacttgacggaactggtgcgacagcataaagctgcccaggtcgctaaagaaaagaaaaagaagaagaaaaaaaagaaagcagagaacgcagagggccaaacaccagccatcggccctgacggagaaccgttggacgaaacctcccagatgtctgacctacccgttaaggttattcacgtggagtcaggcaaaatcctcactggaactgacgcacctaaggcaggacagctggaggcatggttagagatgaacccgggttatgaagttgcacccagatccgactcggaggagagcggtagcgaggaggaagaggaagaagaggaggaggaacaaccacaggcggcccagcccccaaccctgccagtggaggagaagaaaaagattcccgaccccgacagtgacgacgtgtccgaggtggatgcccgccacattattgaaaacgctaaacaggacgtggacgacgaatacggcgtttcgcaggccctggcaagaggacttcaatcctattatgccgttgcccatgccgtgactgagagggttgacaagcagtccgctctgatggtgaatggcgtgcttaagcagtatcagatcaaagggctcgaatggctagtcagcttatataataacaatctgaatggcatcctggccgatgagatgggcctcggcaagaccattcagaccatcgccctgattacgtatcttatggagcataaacgtatcaacggccctttcctgataattgtaccattatccaccctgagcaattgggcatacgaattcgataaatgggcgccaagtgttgtaaaagtttcttacaaaggcagcccagctgccaggcgagccttcgttccacagctcaggtctggtaaatttaacgtgctcctgacaacctatgaatatatcattaaggacaaacatatccttgcaaagattaggtggaaatacatgatcgtggacgagggacacaggatgaagaaccatcattgcaagctgacgcaagttttgaacactcactacgtggccccgcgtcggctgctgcttaccggaactcctctgcagaataagttgccagaactgtgggctttactcaatttcctcctgccaactatcttcaagtcatgctcgacttttgaacagtggttcaacgcacccttcgccatgacaggtgaaaaggtcgacctgaatgaggaggagacaattctaatcatccgacgcctgcacaaggtcctgcggccattcctgctgagaagactcaaaaaagaagtggaagcccaattgcctgagaaggtcgagtatgtcataaagtgtgacatgagcgctttgcagagggtgctgtatcggcatatgcaggctaagggcgtgttgctgacagacgggtcagagaaggataaaaaaggtaagggtggtactaaaaccctaatgaacacaatcatgcagctccggaaaatatgcaatcatccatacatgtttcaacacatcgaggaatccttttccgaacacttgggctttactggagggatcgtccaggggcttgacctctacagagccagcggtaagttcgagttgttagaccggattctccccaagttacgcgccacaaatcacaaagtccttctattttgccagatgaccagtctgatgactataatggaagactactttgcctatagaggcttcaagtacctgaggctggacggtaccaccaaggcagaggatcgcggaatgctattaaaaacatttaacgaacccggcagcgaatactttatctttcttttatccacacgggcaggagggctcggtctcaacttacaatccgctgataccgtgatcatcttcgatagcgactggaacccgcatcaggacctgcaggcgcaggatagggctcaccgtattggccagcagaatgaagtgcgcgttctgaggctttgtacagtgaatagcgtagaggagaagatcctggccgctgccaagtacaagttgaatgtggaccagaaagtgattcaggccggaatgttcgaccagaagtcgtcaagccatgaaaggcgagctttccttcaggccatccttgagcacgaggagcaggatgaggaagaggacgaggttccagacgatgagaccgtgaaccaaatgatcgcacgtcacgaggaggaatttgacttgttcatgcgcatggatctcgataggcggcgagaggaggcccgtaatcccaaaaggaagcctaggctgatggaagaggacgaactgcctagttggatcatcaaggatgacgccgaggtcgagagactcacatgtgaggaagaggaagaaaaaatgttcgggcggggatcacggcatcgcaaagaagtagattacagcgactccctgactgaaaagcagtggcttaaaactttaaaagcaattgaagaaggaaccctcgaagagatagaggaagaggttaggcaaaagaaatcaagccgtaaaaggaaacgcgacagcgatgcaggctccagtactccaaccacttcgacccgaagcagggataaggacgacgagagcaagaagcagaaaaagagaggcagacctcccgctgaaaagctgagcccaaaccctcccaacctgacaaaaaagatgaaaaaaatcgtcgacgcggtaataaaatacaaagatagtagttccggacggcagttatcagaagtgttcattcagttgccaagtcgaaaggagctgcccgaatactatgagctgattcggaagcctgtagactttaagaaaattaaagaaagaatacggaatcataagtatcggtcactgaacgatttagagaaggatgtgatgttactctgtcaaaacgcccagactttcaatctggaaggctctctcatttacgaagattcaatcgtgctccaaagcgtattcacttctgtaagacagaagatagaaaaggaggatgactccgagggagaggaaagcgaagaggaagaggagggcgaggaagaaggatcagagtccgaatcccgctccgtgaaagttaagattaaattagggagaaaagaaaaagcccaggatcgccttaaaggaggtagacggagaccaagcagagggagccgggctaaacccgtggtttctgatgatgactcagaggaagaacaagaagaggaccgcagcgggtctggctccgaagaggattag

SEQ ID NO: 136769 - DNA, 4944 bp, synthetic construct
  misc_feature 1..4944: note = Description of Artificial Sequence: Synthetic coding sequence
  source 1..4944: mol_type = other DNA
atgtcgacccccgatccccccttgggcgggactcctcggccaggtccgtctcctggccccggtccttcccctggagcaatgttggggccgtcacctggaccctcccctggaagcgcgcattcaatgatggggcccagtcccgggccacctagtgctggccaccctatccccactcagggtccaggcggatatccgcaagacaatatgcaccaaatgcataagccaatggaatccatgcatgagaaagggatgtctgacgatccccgttacaatcagatgaaggggatgggtatgaggtcgggcgggcacgcaggcatggggccacctccgtctcccatggaccagcactctcagggttacccatcccccctaggaggatctgaacatgcctccagtcctgtgccagcttctggacccagcagtgggccacaaatgtctagtggccccggaggagcaccgttggatggtgctgacccacaggctctcgggcagcagaataggggccctacaccttttaatcagaaccagctccaccagctacgcgctcagataatggcctataaaatgctggcaagaggacagcccttgccggatcacctacagatggccgtgcagggcaagagaccaatgcccggcatgcagcagcagatgccaaccctaccaccaccgtctgtctcggcaactggacctggtcccggccccgggccagggcccgggcctggtccaggccccgccccccctaactattctcggccccacggcatgggaggacctaacatgcctccccccggacccagcggcgtgccgccaggtatgcctggacagccaccaggcggcccacccaagccttggcccgagggccctatggctaacgccgccgccccaacgtcaaccccccaaaagttaatccccccacagccaactggaaggccgtctccagcaccacctgctgtcccaccggcagcctctcccgtcatgcctccccagactcaaagccctggtcaacccgctcagccggccccaatggtgcctcttcaccagaaacagagcaggatcacgcctatacagaagcccaggggtttagaccctgttgagatcctgcaggagcgggaatatcgcctgcaggccagaatcgctcacaggattcaggagcttgagaaccttccagggagtttggcgggcgatcttcggacaaaggcgaccatcgaactaaaagctctgagactcttaaatttccagagacagctgcggcaggaagtagtggtttgcatgcgcagggacactgcactggagacggccctgaatgccaaggcctataagcgctctaagagacagagcctccgggaggcccgtattactgagaaattggaaaagcaacagaaaatcgaacaggagcggaaacgtaggcagaaacaccaggagtatctgaacagcattttgcaacatgcaaaagacttcaaggaataccatcgatcggttactggcaaaatccaaaagctgaccaaggccgtggccacctaccatgcgaacactgagcgagagcaaaagaaagagaacgaacgcattgagaaggaacgtatgaggcgtctgatggctgaggacgaagaggggtacaggaagctaatagaccagaaaaaagacaagcgcttggcatacctgcttcagcaaacagacgagtacgttgccaacttaaccgaacttgtccgacagcataaagctgcacaggtcgcgaaagagaaaaaaaagaaaaaaaagaagaagaaggcagagaacgccgagggtcaaacaccagccatcggacctgacggagaaccgctggatgaaacatcacagatgtccgatctgccagtgaaggtcatccacgtcgagtccggtaagatcctgacggggacggatgcccccaaggcaggtcagctcgaggcctggctcgagatgaacccaggttacgaggtcgctccccgcagtgactctgaagaatcaggatccgaggaggaggaagaagaggaagaagaggaacagccacaggcagctcagccgcctacactgcctgtagaagagaaaaagaaaatcccagaccccgacagcgatgatgtgtcggaggtcgatgccaggcacatcattgagaatgctaagcaggacgtggatgatgagtatggcgtgagccaagccctcgcccgaggcctccagagttattacgccgttgcacacgccgtaacagagagggtggataagcaaagcgctctaatggtgaacggggtgctaaagcaataccagattaaaggattggagtggctggtatccctttataacaacaaccttaatggaattttagcggatgagatgggcctagggaagactatacagacaatcgctcttataacttacttaatggagcataaaaggattaatggccctttcctgattatcgttccacttagtacattgagtaattgggcttatgagttcgataagtgggcacccagcgtggtgaaagtcagctacaaagggtcacctgcggcccgacgagccttcgttccccaactgaggtccggcaaatttaatgtgctgctgaccacttacgagtacatcatcaaagataagcacattcttgctaaaatccgatggaagtatatgatcgtggacgagggtcaccgaatgaaaaatcatcactgcaaactcacccaggtgttaaatacacattatgtcgcgcctcggcgattgttgttgaccgggaccccactgcagaacaaacttccagaactgtgggcattactgaactttcttcttcctaccatctttaagtcgtgttctacgttcgaacagtggttcaatgcccctttcgctatgacaggggagaaagtggatctaaacgaggaagagactatcctgatcattagacgcttgcacaaggtgctcagaccgtttcttctccgaaggctgaagaaagaggttgaagcacagctccccgagaaagtagagtacgtgataaagtgcgacatgagtgcactgcaaagggttttgtatagacacatgcaggctaagggcgtgctgctgacggacggtagtgaaaaagacaagaaaggcaaagggggcaccaaaactttgatgaatacaattatgcagctgcgaaaaatctgtaatcacccgtacatgttccagcacattgaagaatctttctctgagcacctcggtttcacaggtggaatagtccagggccttgacctctaccgtgcttcgggcaagttcgagttactggacaggatattgcctaaattgagggccaccaaccacaaagtgctcctcttttgccagatgacgagcctcatgactataatggaagactattttgcatatcgagggtttaagtaccttagattggacggcacgacaaaggcagaagaccggggcatgctcctcaaaacctttaacgagcccgggtctgaatactttatctttttgctgagcacacgcgcaggcgggcttggcttgaaccttcagagcgccgacacagtgattatctttgacagtgactggaacccacatcaagatctccaagctcaggatcgcgcccaccgaatcggacaacagaacgaggtgagagttctgcggttgtgcaccgtaaattccgtcgaagagaaaattctagcagccgctaaatataaactcaacgtcgatcagaaggttatacaggcagggatgttcgaccaaaagtctagtagtcacgagcgacgcgcctttctgcaagcgatattggaacatgaagaacaagatgaaagccgtcactgtagcaccggctcagggagcgctagctttgcccatactgcccctccacctgctggtgtaaatccagatctcgaagaacccccactcaaggaagaggacgaagtgcctgacgatgagactgttaaccaaatgattgcccgtcacgaggaagagtttgacttatttatgcgcatggacctggataggagacgcgaagaggcccgtaaccctaaacggaagccccgcttaatggaagaagacgagctgccttcatggatcattaaagacgacgccgaagtcgaaaggctgacctgcgaggaggaagaggaaaaaatgtttggtagggggagtcggcatcggaaggaagtcgactattccgactcactcacggagaaacaatggctaaaagctatcgaagaagggacactagaggaaatcgaagaggaagtccggcagaagaaatccagccggaagaggaagcgagattccgatgcgggtagctcaacccccaccacaagcacgaggagccgtgacaaggacgacgaatccaagaagcagaaaaagaggggtagacctccagccgagaagctgtccccgaaccccccaaacttaactaaaaaaatgaagaaaatcgttgacgccgttataaaatataaggattcatccagcggtagacagctgagcgaggtttttattcagctgccctcgcgcaaggaattgcctgagtactacgaattgatacggaaacctgtggatttcaagaagataaaggagcgcataagaaaccataaatatcgctctctcaacgacctggaaaaagatgtgatgttgctttgccagaatgcgcaaacttttaacctcgagggctctctcatttacgaagacagcatcgttctccagtccgttttcactagcgtgcggcaaaagattgaaaaagaggatgactccgaaggagaggagtcagaggaggaagaagagggggaggaggaaggtagcgaatctgagtccagatcggtaaaagtaaaaatcaaattgggaaggaaagaaaaggcccaggaccggctcaagggcgggaggcgccgacctagccgcggctctagagcaaagccagtagtctcagacgatgattcagaagaagagcaggaagaggatagaagcgggtccggtagcgaagaagactag

SEQ ID NO: 136770 - DNA, 4842 bp, synthetic construct
  misc_feature 1..4842: note = Description of Artificial Sequence: Synthetic coding sequence
  source 1..4842: mol_type = other DNA
atgtcgacccctgatcccccactgggagggaccccgaggcccggaccctctccaggccccggaccttcgcccggcgctatgctgggaccgtcccccggaccatcgcctggatctgcgcactctatgatggggccaagccccggacctccgagtgccggtcaccctatccccactcaagggcctggcggctacccccaggataatatgcaccagatgcacaagcctatggaatctatgcacgagaaaggtatgagtgatgaccctcgatacaaccagatgaaggggatgggcatgaggagcggtggacatgcaggtatgggtcctccgccctctcccatggaccagcacagtcaagggtatccctcacccctcggtgggagtgagcatgcgagctcccctgtgccagcctcaggccccagcagcggcccacagatgtctagcggtccaggaggcgccccgcttgatggagctgatccccaggcactaggccaacagaaccgaggacccacccctttcaatcagaaccaactgcaccagctccgagcacagattatggcctataagatgctggcgaggggacagccactgccggatcatctacagatggccgtgcagggcaagcggcccatgcctggcatgcagcagcagatgcccaccttgccgcctccaagcgtgtccgcgaccggacccggtcctggcccaggacccgggcctggaccgggacccggtccagccccgccgaattactctagaccccatgggatgggtggccctaacatgccgccgcctggcccatccggagtgcctccagggatgcctggccagccccccggcggaccccctaagccctggccagagggaccaatggcaaatgcagcagcccccacatcgaccccacaaaagctcatcccaccccagccgacgggaaggccctcacccgccccgccagcagttccacccgccgcatcccccgtcatgcctcctcagacacagtccccgggacaaccagcacaacccgctcctatggtccctctccatcagaaacagtcaagaattacacccattcagaagccaagagggctcgatcctgtggagatcttacaagaacgagaataccgccttcaggccagaatcgcccacaggatccaagaattagagaacttgcctggctcactggcaggcgatctccgaacaaaggcaacaatcgaacttaaggccctgcgacttctgaatttccagcgacaactgcgacaggaggttgtcgtttgcatgcgcagagacaccgccctcgagacagcattaaacgccaaagcctataagcggtccaaacggcagtctctccgtgaggcgagaattacagagaaactagagaagcagcagaaaatagagcaagagagaaaaaggcgccagaagcaccaggaataccttaattcaatcctccagcatgcaaaggacttcaaggaatatcataggtccgtgactggaaagattcagaagctgactaaagcagttgcaacctaccatgccaataccgagagggagcagaagaaagagaatgaacggattgagaaggagcgaatgcggcgcctcatggccgaggacgaagaaggatatcgtaagcttatcgatcagaagaaggacaagagactggcttacttactacagcagacagatgagtacgtggccaatctgacagagcttgtgcgccagcataaagccgcgcaggttgcaaaggagaaaaagaaaaaaaagaagaaaaaaaaggctgagaacgctgagggtcagacgcctgctatcgggccagatggggagcctctcgatgagacatcgcagatgtcagacctccccgttaaagtgatccacgttgagagcgggaagatcctcacagggactgatgcgcccaaggcgggccaactggaagcctggctggagatgaacccagggtatgaagtagctcccaggtccgactccgaagagagcggatcagaggaagaggaggaggaagaggaagaagaacagcctcaagcggcccagcctccgacactgcctgtcgaggagaaaaaaaagattcccgatcctgactcagatgatgtgagcgaagtagatgcccgccatattatcgagaacgcgaagcaggacgtggatgacgaatacggagtgtcacaggcgctcgcccgaggcctgcagtcctattatgccgtggctcacgcagtgacagagcgagtagataaacagtcggcactgatggtgaatggagtgctgaaacagtaccagattaagggcctcgagtggctggtaagcttatacaataacaatctgaacggcatcctggcggacgagatgggattggggaagacaatccagacaatcgccctgataacatatttaatggagcacaagaggatcaatggcccctttctcatcatcgtgcccttaagcacactatctaactgggcatacgagttcgataagtgggcaccctccgtggtaaaggtgtcatataagggatcacctgcagcacgacgtgctttcgtccctcaactgcggtccggtaagttcaacgtgcttcttactacctatgaatacatcataaaggacaagcacatcctcgcaaagattcgttggaagtacatgatcgtggatgaaggacatcgaatgaaaaatcatcattgtaagctgacccaggtgctcaatacccactacgtagcaccacgccggctgttgctgaccgggactcctctgcagaataagctccccgaattgtgggccttgctgaatttcttactacctacaatcttcaaatcctgtagtaccttcgaacagtggtttaatgctccgtttgctatgacaggggaaaaggtagacctgaacgaagaggagacaatcctaatcattagaagactccataaggtgctgcgcccctttctgcttcggcggcttaagaaagaggttgaggcccaattgcccgaaaaagtcgagtatgtcatcaaatgcgacatgtccgcactgcaacgagtgctttatcggcacatgcaagctaagggcgtactgttaaccgacggctcggaaaaggataaaaaggggaagggcggcacaaagactctcatgaacacaattatgcagctaagaaagatatgtaaccatccctacatgtttcagcatattgaggaatccttcagtgagcatttaggttttaccggcggcatagtgcagggcctcgatttgtatcgggcgtcaggtaaatttgaactcctggatagaatcctccctaagttgcgggctacaaatcacaaagtcttgttattctgtcaaatgacctcccttatgactatcatggaggattattttgcctaccgaggcttcaagtatttacggctcgatgggaccaccaaagctgaagacaggggcatgctcctaaagactttcaacgagcccgggtccgagtattttattttcctactttcgacacgagcaggcgggctgggcctcaatcttcagtctgccgacacagtgatcatattcgactctgactggaacccacaccaggacctgcaggcacaagatcgcgcacacagaatcgggcagcagaacgaagtgcgcgtcttgaggctttgtacagttaactctgtggaggaaaagattctggcagcggctaaatataaattgaatgttgatcagaaggtgattcaagcaggtatgtttgaccagaaatccagctcccacgagcgacgcgctttcctgcaagcaattctggaacacgaggagcaagacgaggaagaggacgaggtaccagacgatgagacggtcaatcagatgattgctagacacgaggaagaatttgacttgttcatgagaatggatctggatcgaaggcgcgaagaggcaagaaaccccaagagaaagccccgcttaatggaagaggacgaacttcctagttggattatcaaggacgacgccgaagtggagcggttaacctgtgaggaggaggaggagaagatgttcggcagaggctcaaggcacagaaaagaagtagactattctgactctctgacagagaaacagtggctcaaagctatcgaggagggaacgctcgaagaaatagaagaggaagtgcgccagaagaaatcatcccgcaaacgtaagagagactccgatgctggatcctcaacgcccacaacttccacgagatccagggataaggacgacgaaagcaagaagcagaagaagcgcggtaggccccccgcagagaaactcagccctaaccctccgaacctcaccaaaaaaatgaaaaagattgttgatgcagtgatcaagtacaaagatagttctggccgtcagctgtctgaggtgtttatacagctcccgtcccggaaggagctgccagaatattacgagttgatccggaagccagtagacttcaagaaaattaaggagcgcatccgaaatcacaaataccgtagcctcaatgatctagagaaagatgtgatgttactgtgtcagaacgctcagacctttaacctggaaggctcattgatctatgaagattcaatcgtgctccagtccgtttttaccagcgtccgacaaaaaatcgagaaagaggatgatagcgaaggcgaggaatccgaagaagaggaagaaggcgaggaggaaggctccgagtcagagtcccgttctgttaaagtcaaaatcaagctaggcagaaaggaaaaggcccaggaccgacttaaagggggccgcaggcgtcccagccgcgggtcacgggcaaagcccgtagtatccgacgacgatagtgaggaggagcaggaggaggacaggtcgggaagcggttcggaggaggactag

SEQ ID NO: 136771 - DNA, 4851 bp, synthetic construct
  misc_feature 1..4851: note = Description of Artificial Sequence: Synthetic coding sequence
  source 1..4851: mol_type = other DNA
atgagtactcctgacccaccgctgggagggacgcctagacctggcccaagcccaggacccgggccctctcccggagctatgcttgggcccagcccgggtccctcccccggttccgcccatagtatgatgggaccatcccccggcccacccagcgcaggccacccgatccctacacaaggacccgggggctatccccaggacaacatgcaccaaatgcataaacccatggaatcgatgcatgaaaagggcatgtccgatgaccctagatacaatcagatgaaaggtatggggatgcggtccggtggtcatgctggtatgggcccccctccctctcccatggatcaacactcacaaggctatccctcccccctgggcggtagcgaacacgcgagttccccggtgccagcgagtggaccttcctctggcccacaaatgtctagcggcccagggggagccccactagatggagccgatccacaggcgctcggacagcagaatagggggccaaccccgttcaaccagaaccaactacatcagctgagagcccaaataatggcatacaagatgctggcacgcggtcagccattacctgaccacttacagatggccgtccagggtaaacggcctatgcccggaatgcagcagcaaatgccgacgttacccccacctagtgtcagcgctacaggcccgggtcctggaccaggtccagggccgggccctggcccgggacctgcgccacccaactacagtcgcccccacggaatgggaggccctaatatgccaccgcccggcccaagtggggttccacccggcatgccaggacagccgcccggcggcccccccaaaccttggcccgagggacctatggccaacgctgcagcaccaactagcacaccacagaaactgatcccccctcagccaactggacgtcccagtcctgctccacctgccgtccctccagctgcttctcccgtaatgcctcctcagactcagagcccaggccagccagcacagcctgccccaatggtaccacttcatcagaagcaatccagaatcactcccatacaaaagccaagaggcctggatccggtcgagatccttcaggaaagggagtacaggctgcaggcaagaatcgcacatcggatacaggagctcgagaatctccccggatctctcgccggcgatctcagaaccaaagccacgattgagctgaaagccctacggctcttgaattttcaacggcagctcagacaagaagtggtggtatgcatgcgcagggacaccgcgctcgaaacagcccttaatgcaaaagcttataagagatccaagagacagtctctgcgggaggcacgcatcacagagaaactggagaagcagcagaaaatagagcaagagcggaaaaggagacagaaacaccaggaatatctgaactcaatattgcagcacgcaaaggacttcaaggagtatcaccgatccgtgacaggcaagattcagaagctgacgaaggccgttgccacatatcatgccaacacggaacgggaacagaagaaggagaatgaacggattgaaaaagagagaatgaggcggctcatggccgaggacgaagagggctaccggaaactcattgaccagaaaaaggataaaagactggcctatcttctgcagcagacagacgaatacgttgcaaacctcaccgaactggtcaggcagcacaaagccgcccaagttgctaaggaaaagaaaaagaagaagaagaagaagaaagcagagaacgcagaggggcaaacaccggccataggcccggatggggaacccttggatgagaccagccagatgagcgatctccctgttaaggttatacacgtggagtcggggaaaattctgaccggaacagacgccccaaaagccggacagttggaagcttggcttgagatgaatccaggctatgaggtcgcccctcgcagcgactctgaggagagcggatccgaagaagaggaagaggaagaggaagaggagcagccacaggctgcacagccacccaccctacctgtcgaagagaaaaaaaagatccccgaccctgattctgacgatgtgagcgaggtcgacgctagacatatcatagaaaatgctaaacaggatgtggacgacgagtacggagtgtcgcaagctctggctcgcggcctgcagtcatattatgcggtggcacatgctgtcactgagcgggtagataagcagagtgccctgatggtgaacggagtcctgaaacagtaccagattaagggcctggagtggctggtgagcctctacaataacaacttgaatggcattttggctgacgagatgggcctaggaaaaacaatccagaccatcgcactgatcacctatcttatggagcataagcgaataaacgggccctttttgatcattgtccccctgtccactctatccaattgggcctatgagttcgataaatgggccccttctgttgtgaaagtgtcttacaaagggagtccggccgctaggcgcgcttttgtgccacagctgcggagcgggaaatttaatgtgcttttgacaacctatgagtatatcatcaaagataaacacattctcgcaaagatccgctggaagtatatgattgtggatgagggccatcgaatgaagaatcatcattgtaagctgacacaggtgttgaatacccattacgtcgcgcctagacgcctgctcctcacaggcacaccacttcagaacaaattgccagaactttgggccctcctcaattttctgctgcccaccattttcaaatcttgctccactttcgagcagtggtttaacgctcctttcgctatgactggcgagaaagtagaccttaatgaggaagagactattctcatcatccggaggctccataaggtactccgaccgttcctgttgcgtaggctcaagaaagaggtggaagcacagctcccagagaaggtggagtatgtgattaagtgtgatatgtctgccctacagagagtcctgtaccgtcatatgcaagccaaaggtgtcctgctgacagacggctctgaaaaggacaaaaagggcaaaggcggaacaaaaaccttaatgaacactattatgcagctgcgcaagatctgcaaccacccctacatgttccaacatatagaggagagtttcagcgagcatttagggtttaccggtggcattgtgcagggcctcgacttgtatagggccagtgggaagttcgaactgctggatcgcattctgcccaagcttcgcgcgaccaaccataaggtgcttttgttctgccaaatgaccagcctaatgacgattatggaagactactttgcttaccgcggatttaagtatttaaggctggacgggacaaccaaggcggaggataggggcatgctgctaaaaacattcaacgagccggggagcgaatactttatctttttgctgagcaccagagctggaggtctgggtctgaatttgcagtcagctgataccgtaatcatatttgactctgactggaacccacaccaggatttgcaggctcaggacagagcccaccgtattggccagcagaacgaagtccgggttttgcgactgtgcactgtcaatagcgtggaagaaaagatcctcgccgctgcgaaatataagctgaacgtggaccaaaaagttatccaggccggcatgttcgaccagaagagttcgagccatgagagacgtgcctttctgcaggccattctcgaacatgaagagcaggatgaggaggaagacgaagtgcctgatgatgagacagtcaaccagatgattgcacgccatgaggaggaatttgatctgttcatgaggatggatctggaccgcagaagagaagaagcccgcaatccaaagagaaaacccagactgatggaagaggatgaacttccatcttggattatcaaagacgacgctgaagtggagcgcctcacttgtgaggaggaagaggagaaaatgttcgggagagggagccgacaccgcaaggaagtggactacagcgacagtttgaccgagaagcagtggctcaagacactaaaagcaatagaggagggcacacttgaagaaatcgaggaggaggtgaggcagaaaaaaagttcacgtaagcgtaagcgggacagtgatgctggcagtagcacgccaaccacctccacaaggagtagggataaagatgatgaaagtaaaaagcaaaagaagcgcgggcggcccccagcggaaaaactgtctccgaatccgccgaacctgaccaagaaaatgaaaaagattgtggatgccgtcatcaaatacaaggacagcagtggccgccaactcagcgaagtgttcatccagctcccaagtcgaaaggagctgcctgaatattacgaactcatcaggaaacctgtcgattttaagaaaatcaaggagcggattaggaaccataagtataggagccttaatgaccttgaaaaggacgtcatgctgttatgccagaacgcacaaacctttaacctcgaagggagcctgatctacgaagactccattgtgcttcagtctgtgttcacgagtgtcaggcagaagatcgaaaaagaggacgacagtgaaggcgaggaaagcgaggaggaggaggaaggggaagaagagggcagcgagagtgaatctcggtccgtgaaagtgaagataaaactgggtaggaaggaaaaggcccaggacagactcaagggaggacgtcgccgacctagcaggggctctagagcaaaacctgtggttagcgacgatgactccgaggaggaacaggaagaggatcggtcaggatccggttctgaagaggattag

SEQ ID NO: 136772 - DNA, 4845 bp, synthetic construct
  misc_feature 1..4845: note = Description of Artificial Sequence: Synthetic coding sequence
  source 1..4845: mol_type = other DNA
atgagtacacctgaccctcccctcggaggaacaccgcggccgggcccttcccctggccctggaccaagcccgggggctatgctcgggccatcacccggaccatcccctgggtctgcacactctatgatgggtccttcgcctggacccccttcggctggacacccaatcccaacacaggggcctgggggctaccctcaggacaacatgcatcaaatgcacaagccaatggagagcatgcacgagaagggcatgtcagatgatccccgctacaatcagatgaagggaatgggcatgcgaagcggtggccacgccgggatgggacctcctccatctcccatggatcagcatagccagggatatccttctccattgggggggtctgagcatgcaagctcgcccgtacccgcttcaggcccatcctcaggcccacagatgtctagtggtcccgggggcgccccccttgatggtgcggatccccaggcactgggacaacagaataggggccccaccccttttaaccagaaccagctacatcagcttcgggctcagatcatggcgtataagatgcttgcaaggggacagccccttcccgatcacctacagatggcagttcagggcaaacgtccaatgcccggaatgcaacaacagatgcccacactccctcctccaagcgtctctgccacaggccccggacctggaccaggccctggaccaggccctggccctggtccagccccccccaattattcccgcccccacggcatgggcggccccaacatgcccccacctggtcctagcggggtgcctcccggtatgcccgggcaaccaccaggcgggccccccaaaccatggcctgaaggacctatggccaatgcagctgcacccaccagcaccccccaaaaacttattccaccacagcccaccgggcggccgagtcctgctccccctgccgttccacctgctgcctctcctgtcatgcctccccagacccagtctcctggccagccagcgcagcccgcaccaatggtgccattgcatcaaaaacagagcaggattaccccaatacagaaaccccgaggcctcgacccagttgagatcctgcaagaaagggaatacagacttcaggcaaggattgctcaccgaattcaggaactggagaacctccccggaagcctagccggcgacttacgaaccaaagcaacaatagagctgaaagcattgagactgctcaatttccagaggcaactgcggcaggaggttgtggtctgcatgcggagggatacagctctcgaaactgccttgaacgcaaaggcatataaaagaagcaagcggcagagcctcagagaagccaggatcaccgagaagttagagaaacagcagaaaattgagcaggagcgcaagagacggcagaaacatcaggaatatttaaattccattctgcagcacgccaaggactttaaagaataccatagaagcgtcacagggaagattcaaaaattgacgaaagccgtggccacctaccacgccaatacagaacgggagcaaaagaaggaaaacgaaaggatcgagaaagagaggatgcggcgcctgatggccgaagacgaggaagggtacaggaagctcattgaccaaaagaaggataagagattagcctacttgctgcagcagaccgatgaatacgtcgccaacctgaccgaactagtgagacagcacaaagctgcccaagtggctaaggagaaaaaaaagaaaaaaaagaagaagaaggccgaaaacgcggagggccagactccagcaatcggaccagacggcgagcctctcgatgaaacgtctcaaatgtcggatttgcctgtgaaagtcatacatgtggagtccggaaagatattgaccggaaccgatgccccaaaagcgggccaactagaggcctggttggagatgaaccccggctatgaagtcgcgccacggtcagattctgaagagtcaggttcagaggaggaggaggaggaagaggaggaagaacaacctcaggccgcccaaccccccacactgcccgtagaggaaaaaaagaaaattccagaccctgacagcgacgatgtttccgaagtcgacgcccgacatatcattgaaaacgcgaaacaagacgtcgacgatgaatacggggtctctcaggccctcgctagagggctacagtcttattatgccgttgcccacgccgtcaccgagcgcgtcgataagcagagtgctttaatggtgaacggggttttgaagcagtaccagataaaaggtctcgagtggttagtgtcactctacaataacaatcttaacggcatcctggcggatgaaatgggcctcggtaagactattcagaccatcgccctgatcacctatctgatggagcataaaaggatcaatggcccctttctgataattgtcccactttcaacactgtccaactgggcatatgagttcgacaaatgggccccaagcgtggttaaggtgagctacaaaggctctccagccgcccgaagggccttcgtcccccagttacggtctggcaaattcaacgtccttttgaccacctatgagtacattatcaaagataaacacattcttgccaaaattcggtggaagtacatgatcgtggacgagggacaccgcatgaagaatcatcattgcaaactgacacaggtccttaatacccactacgtcgcccctcgcagattgctgcttacaggcactcctcttcaaaacaaattgcccgaactctgggccctcctcaattttctgctgcccactatcttcaagtcttgctcaaccttcgagcagtggtttaacgcccccttcgcaatgaccggtgagaaggtcgacctgaatgaagaagaaaccattctgataataaggagactgcacaaagtgttgagaccttttttactgaggagattaaagaaagaagtggaagcccagcttcccgagaaagtcgagtacgttatcaagtgtgatatgtccgccttacaaagggtcctctaccgacacatgcaggccaagggagttctgctgaccgacggttcagaaaaagacaagaagggcaagggtggaaccaagaccctgatgaatactataatgcagctgcggaagatttgcaaccatccatatatgtttcagcatatagaggaatcctttagtgaacacttagggttcactggtggtatcgttcagggcctggatctttatcgtgcttccgggaaattcgagctcctagatcggatcctccccaaacttcgtgccaccaaccataaagtgctgctgttctgtcaaatgacttctttgatgactattatggaggattatttcgcctacagggggtttaaatacctacgcctggatggaacaaccaaagccgaggatcggggtatgctgttgaaaacatttaacgagcccgggtctgaatacttcatattcttgttaagcaccagggccggaggactgggtctgaaccttcagagcgccgatacagtcatcatcttcgattcagactggaatccacatcaggacctccaagcccaagaccgagcccataggattggtcaacagaatgaagttcgagttctcaggctgtgcactgtgaacagcgtagaggagaagatcctggccgccgcgaagtacaagttaaatgtggaccagaaagtgatacaggcaggaatgttcgatcagaagtcttcttcccacgagcgccgcgcatttctccaggccatactcgaacacgaagagcaggatgaagaggaagatgaagtacctgacgacgagaccgttaatcaaatgatcgcaagacacgaagaagaattcgatctcttcatgcggatggatctggaccggaggagggaagaggcacggaatccaaagcggaagcccagattaatggaggaggacgagctcccttcttggatcattaaggatgacgccgaggtggaaaggctgacctgtgaagaagaggaagagaagatgtttgggagaggtagtcggcaccgcaaagaggttgactactccgacagcttgacggaaaagcagtggcttaaggccattgaggagggaacactcgaggaaatcgaggaggaggtgcggcagaaaaaatcttccaggaaaagaaagagagacagtgacgccgggtccagcacccctactacaagcacacgctccagagataaagatgatgagtccaagaagcagaaaaaacgtggccgtcctcccgccgagaaactctcacctaatccgcctaaccttaccaagaagatgaagaagattgttgacgcagtgatcaagtataaggattcatcctccgggaggcagctgtcagaagtattcatccagctgcccagtaggaaggagctgccagaatattatgagctaattcggaagcctgtcgacttcaagaaaattaaagagcgaatacgcaaccataaatatagatctttgaatgatctggaaaaggatgtgatgctgctatgccaaaatgcacagacattcaacctcgaaggctctcttatatatgaagactcaatagtgcttcagtcggtcttcactagcgttcggcagaaaatcgaaaaagaggacgatagtgaaggggaggagtcagaggaggaggaggagggcgaggaagagggctctgagtcagaatccaggtcggtgaaagtcaaaattaaattgggacgaaaagagaaagctcaggaccggctgaagggcgggaggaggcgacctagcagaggtagccgcgctaagcccgtggtgtccgatgatgattctgaggaggagcaggaagaggaccggagtggctccggcagtgaggaagactag

SEQ ID NO: 136773 - DNA, 3159 bp, synthetic construct
  misc_feature 1..3159: note = Description of Artificial Sequence: Synthetic coding sequence
  source 1..3159: mol_type = other DNA
atgagctccgccgctgaacctcccccgccacctccccctgagagtgccccctccaaaccagcagcctcaatcgcctctggagggagcaattcatctaacaaggggggaccggaaggcgtggctgcccaagctgtagccagtgcagcaagtgctgggcccgcggatgccgagatggaggaaatcttcgatgacgctagtcctggaaagcagaaggaaatccaagaacctgaccccacatacgaggaaaagatgcagacggatcgcgctaatcggttcgagtatcttcttaagcaaaccgagctgtttgcgcacttcatccaacccgccgcccaaaagacccccacgtccccactcaaaatgaagcccggaagaccacgaatcaaaaaggatgaaaagcagaatcttctttcagttggagattaccgccaccgacggaccgaacaagaagaggatgaagagcttctcacggaatccagcaaagcaacaaacgtatgcaccaggttcgaggatagtcccagttacgtaaagtggggcaagctgcgtgactaccaggtgaggggactgaactggctgatttccctgtacgaaaacggtataaacgggattctagcggatgaaatgggcctggggaaaaccctacagactatttccctgttgggatacatgaaacactataggaacatcccaggtccacatatggttctggttcccaagagcactcttcacaactggatgtccgagttcaaaagatgggttcctactctcaggtctgtttgtctgatcggtgacaaggaacagagagctgccttcgtgcgggacgtgctgttgcctggggagtgggatgtttgcgtgaccagctacgagatgctgattaaagaaaagtccgtgtttaaaaagttcaattggaggtaccttgtaatcgacgaagctcaccggattaagaatgagaagtctaaacttagtgagattgttagagaattcaagaccactaataggctcctcctcaccgggacacccttacagaataatttacatgaattgtggagtctgctgaacttcctcttacccgatgtttttaactctgcggacgacttcgacagctggttcgacaccaacaattgtctcggggatcagaagttagtagagaggctgcatatggtgctcaggccattcttactcagacgaattaaggccgatgtagagaagtccctgccaccaaagaaggaagttaagatctatgtcggcctttctaagatgcagagagagtggtatacacgaattctaatgaaagacattgacatcttgaatagcgccggcaagatggataaaatgcgacttctgaatattctgatgcaattgagaaagtgttgcaatcatccttacttatttgacggagctgagccaggaccaccttacaccacagatatgcacctggtgaccaatagtgggaaaatggtcgttttagacaaactgttgcccaagctaaaggaacagggcagtcgagtgctaattttctcacaaatgactcgggtcctcgacattctcgaagactactgtatgtggaggaactacgaatattgcaggcttgacggacaaactccgcacgacgaacggcaggattcaattaatgcatacaatgaacctaatagtactaaattcgtcttcatgctgtccactagagccgggggacttggcattaacctggctacagcagacgtcgtcatcttatatgatagcgactggaatccgcaggtggatctgcaagctatggatagagcgcaccggattggccagacaaagactgtccgggtctttaggtttattaccgataacaccgtggaagaacgcatcgtcgaacgcgccgagatgaaactccgcctggactctatagtgatccagcagggccgactggtggatcaaaacctgaacaaaataggaaaagacgagatgctccaaatgatacgccacggagctacccatgtgttcgctagcaaggagtcagagatcacagacgaagacattgacggtatcttagaacgaggggcaaaaaagacagctgagatgaacgagaaattgagcaaaatgggagaatcatcactgagaaacttcaccatggacacagaatctagtgtatacaactttgaaggcgaagactaccgagaaaaacagaagatagcgttcaccgagtggatagaacctccaaagagagagagaaaagctaattacgccgtcgacgcatatttcagggaggcactccgggtttcggaaccgaaagcccctaaggctccacgcccccccaaacagcctaacgtgcaggattttcagttttttcctccccggctctttgagttacttgagaaagaaattctgttctacagaaagaccatcggctataaggtgcccaggaaccccgagctccccaacgccgcacaggcccagaaagaagaacaacttaaaattgatgaggcggagtccttgaacgatgaggagttagaggagaaggaaaagctgctgacacaagggttcaccaactggaataagcgggatttcaatcagttcatcaaagcaaacgaaaaatggggccgcgacgatattgagaacatcgctcgcgaagtggaaggcaaaacccccgaggaagtgatcgaatacagtgctgtgttctgggaacggtgcaatgaactccaggacatagaaaagatcatggcccagatcgagagaggtgaggctaggatccaacgccgaatttccatcaagaaggcactggacaccaagattggtcgatacaaggcgccatttcaccagctgagaatatcatacgggactaacaaaggcaaaaactatacggaagaagaagaccgcttcctgatctgcatgctgcacaaactcggtttcgataaggagaatgtgtatgatgaactgagacagtgcatacggaactctccgcagttccggttcgactggtttctcaagagtcggacagctatggagctgcaaaggcggtgcaacacattaataaccctgatcgagagggagaatatggagctggaagagaaggagaaagccgagaagaagaaacgcggtcctaaaccaagcactcagaaacgaaagatggatggggctccggacggtaggggccggaaaaaaaagttaaaactttag

SEQ ID NO: 136774 - DNA, 2988 bp, synthetic construct
  misc_feature 1..2988: note = Description of Artificial Sequence: Synthetic coding sequence
  source 1..2988: mol_type = other DNA
atggaggaaattttcgatgacgcatctccgggtaaacagaaggaaattcaagaaccggaccccacatatgaggagaaaatgcagaccgaccgggccaacaggtttgaatatttgctaaagcagacggaactcttcgcccactttatccaacccgccgcacagaaaacccccacatctccattgaagatgaagccaggccgtcctagaatcaaaaaggacgaaaaacaaaatctacttagtgtgggagattatagacatcgacgaaccgagcaggaagaggacgaggaactgcttacagagtccagtaaggcaaccaatgtctgcactcgctttgaggattctcccagctatgtgaagtgggggaagctacgtgactaccaagtccgggggctgaattggctaataagtctttacgagaatggtataaacgggatcctggccgatgaaatgggcttgggaaaaactcttcagacaatctcgctcctgggctatatgaagcactaccgcaatatccccggcccgcacatggtcttggtgcctaaatcgaccctgcataactggatgagcgagtttaaacgttgggttccaactctcaggagcgtatgtcttatcggggacaaagagcagcgggcagcttttgtaagggatgttctcctgcccggcgaatgggacgtttgtgtgacatcatacgaaatgctgatcaaggagaaatccgtctttaagaagtttaattggagatacctggtgatcgatgaagcccaccggattaagaatgagaagagcaagctgtccgagatcgtacgggagttcaagacgaccaaccggctgctcctgaccggcaccccactgcagaacaacctgcacgaactttggtccttgctgaactttctcctgcccgacgtctttaattcagcagatgactttgattcatggttcgacacaaacaattgcctgggagatcagaagctcgtcgagcggctgcatatggtgttgagaccgttcctcctgaggagaatcaaagccgatgtggagaagtcactaccaccaaaaaaggaggtaaagatctacgttggtctgtctaaaatgcagagggaatggtacactcggattctcatgaaagacatcgatatcctcaacagcgccgggaaaatggacaagatgcgcctcctgaacatcttgatgcagttgaggaagtgttgcaaccatccctatctgtttgacggcgcagagccaggccctccctacacaactgacatgcacctcgttaccaattctggcaaaatggtggtgctggataaactgttacccaagttgaaggagcagggatcacgtgtcttaatttttagccagatgactagagtgctggacatcctggaagactactgtatgtggagaaattacgagtactgccgacttgacggtcaaacgccccacgatgagcgccaggactccattaatgcctacaacgaaccaaattctacgaaatttgtgtttatgttgagcactcgggccggcggcctgggcatcaacctggctacagctgacgtcgtcattctgtacgattccgactggaacccccaagtggacctacaagcaatggaccgcgcgcatcggattgggcagactaaaaccgttcgggtgtttaggtttatcactgacaataccgttgaggagcgaatagttgagagagcagagatgaaacttcggctggactcaatagtgatccaacaaggtaggctggtggatcagaatttaaataagattggcaaagatgagatgttgcagatgattagacacggggctactcatgtgtttgcaagcaaggagtccgagataactgatgaggatattgatggcattttggagaggggagctaaaaaaacagcagagatgaacgagaaactgagcaagatgggcgagagctcccttaggaatttcaccatggataccgagtccagtgtttataacttcgagggtgaagattacagggagaagcagaaaattgcttttaccgagtggatcgagccccccaaaagagagagaaaggcaaactacgcagttgacgcctactttagagaggcattaagggtctcggaaccaaaagcgccaaaagcgccccggcctccaaaacaacctaatgtccaggacttccagttcttccctccccgattgtttgaactcctggagaaagagatacttttttaccggaagaccatagggtataaggtacctcgcaatcccgaactgccaaatgctgcccaggcccagaaggaagaacagctcaagatcgatgaagctgaatccttgaatgatgaggagctcgaggagaaagaaaaattgcttacgcaaggttttactaattggaataagagggatttcaatcagttcattaaggccaacgagaaatggggcagagacgatattgagaatatcgctcgggaagtcgagggcaaaacacccgaggaggtgattgagtactccgccgtcttctgggaaagatgtaacgagttacaagacatcgaaaagattatggctcagatcgagcgcggagaggctcggatccagcggcgaatctctataaaaaaggcgttggacactaaaattggaaggtataaagctccttttcaccaattgcggatcagttatggcacaaacaaaggtaagaattacaccgaagaggaggatagattcctgatatgcatgctgcacaaattgggctttgataaagagaatgtttatgatgagctcagacagtgtatcagaaacagccctcaatttagattcgactggttcctcaaatcacggaccgccatggagctccagagacgctgcaatacattgataacactaatagagcgcgagaacatggaactggaggaaaaggagaaggcagagaagaagaaaagaggtccaaagccgtcaactcagaaaaggaagatggacggtgcccccgacgggcgtggacggaaaaagaaacttaagctgtag

SEQ ID NO: 136775 - DNA, 2988 bp, synthetic construct
  misc_feature 1..2988: note = Description of Artificial Sequence: Synthetic coding sequence
  source 1..2988: mol_type = other DNA
atggaagagattttcgacgatgcaagccccgggaagcagaaagagattcaggaaccggacccaacttatgaggagaagatgcagactgacagagccaaccgcttcgagtatctgctgaaacagacagagttattcgcccacttcattcagcctgcagctcagaagactcctacctcgcccctcaagatgaagcctgggagacctcgtatcaaaaaagatgagaagcaaaacctgcttagtgtcggggactataggcaccggcgaactgagcaggaagaagatgaggaactgcttaccgaatcctctaaggccaccaacgtgtgcacaaggttcgaggactctccctcatacgttaagtgggggaagctacgagactatcaggtacgtggcctcaattggctgatctcactctatgagaacggcatcaatggcatcctggctgatgaaatgggattaggcaaaacgttgcagaccatctcattactgggatacatgaagcactaccgcaacattcccgggccccacatggtcttggtccctaagtcaactctgcacaactggatgtctgaatttaagcgctgggtgccgaccctgaggtcggtctgtctcatcggggacaaggagcaacgcgccgcttttgttagagacgtgctgctcccaggcgaatgggacgtgtgcgttactagttacgagatgctcataaaggagaagtctgtctttaaaaaattcaactggagatatcttgtcatcgacgaggcacaccggattaagaatgagaaatctaagttgtcggaaatcgttcgtgagttcaagacaacaaatcggctgctgctgacaggaacccccctgcagaacaatcttcatgaactgtggtcgctactcaatttcctcctccctgatgtattcaactcggccgatgatttcgactcctggtttgacaccaacaactgtctcggcgaccagaaactggtcgagcgcctgcacatggttctgcgtcctttcctgcttcgacggattaaagccgatgtcgagaaatccctccctcctaaaaaagaggttaagatttatgtaggcctatctaaaatgcagcgtgagtggtacacccggatcctaatgaaggatatcgatattctcaactcggccggcaaaatggacaagatgcgactcctcaatatcctcatgcaactcagaaagtgttgcaatcacccttatttgtttgacggggctgaacccggaccaccttacactacagatatgcacctggttacgaactccgggaagatggtggttctggacaagctgctccctaagttaaaggagcagggctcaagggtcctaatctttagccaaatgaccagggttctggacatcctggaagactattgtatgtggcgaaactatgaatactgccggcttgatggacagacaccacacgacgaaaggcaggatagcattaacgcatacaatgagccgaactcaactaagttcgtgtttatgctgagcacccgggcggggggacttggcatcaatctggctacagctgatgtcgtgattctctatgactctgattggaaccctcaagtggacctgcaggccatggatagggcacatcgtattgggcagacaaagacagtccgggtttttcgatttataactgacaataccgtggaagagagaattgtggagcgcgcagaaatgaaactgagattggactccattgtaatccaacagggcagactggttgatcagaatcttaataaaataggaaaggacgagatgctccagatgattcgtcacggtgctacccatgtgttcgcctctaaagagtccgagattactgacgaggacattgacggtattcttgagcgaggggcaaagaagaccgcggagatgaatgagaagctgagtaaaatgggcgaaagctctctgcgcaactttacaatggacactgagtctagcgtgtataactttgagggggaggactaccgggagaagcagaagatagctttcactgagtggattgagcccccaaaacgggaacgaaaggccaactacgcagtcgacgcctattttagagaggccctgagggtaagcgagccaaaggcgcccaaggctccacgaccccccaagcaaccaaatgtccaagactttcagttcttcccaccaagactgttcgaactactggagaaggagatattgttctaccggaaaaccatcggatacaaagtgccgcgaaacccagagctgcctaacgccgctcaggcacaaaaggaggagcagcttaaaatcgatgaggctgaaagcctgaacgacgaagagctggaggaaaaggagaagttgttgacccaaggctttacaaattggaataaaagggacttcaaccaatttatcaaagccaatgaaaagtggggtcgtgacgatatcgagaacatagcacgggaggtggaagggaaaactcccgaagaggtgatagagtactcagcggtgttctgggaacgatgcaacgagttacaggatatagaaaagataatggcccaaatagaacggggtgaagctcgaatacagcgtcgaatatctatcaagaaggcgttggacacgaagatcggacggtataaggccccttttcaccagctacgaatctcctacggcactaataaggggaaaaactatacagaagaggaggatcggttcctcatatgcatgctgcataaactcggcttcgacaaggagaacgtgtacgacgaactccgccagtgtattcgcaatagtccgcagttcagatttgattggtttctgaaaagccggactgccatggagcttcagaggagatgtaataccctgattacactaattgagcgggagaacatggagttagaggagaaagaaaaggcggaaaaaaaaaagcgtgggccgaagccttccacgcagaagcggaagatggacggcgccccagatgggcgcggacggaagaagaagctgaagctatag

SEQ ID NO: 136776 - DNA, 2865 bp, synthetic construct
  misc_feature 1..2865: note = Description of Artificial Sequence: Synthetic coding sequence
  source 1..2865: mol_type = other DNA
atgagcctccccttgaccgaggagcagcgcaaaaagatcgaagaaaatcggcagaaggccttagcgagacgcgcagagaagcttcttgctgagcagcatcagcgcacgagctctgggactagcatcgcaggtaatccttttcaagctaaacagggccctagccaaaattttcccagggagagttgcaagcctgtgagccatggcgtgatctttaaacagcagaatttatctagttcatctaatgcagatcagcggcctcacgatagccacagtttccaggctaaaggcatctggaaaaagcccgaggaaatgccaaccgcttgccccggccacagtcccaggagccagatggctttaaccggtatctcaccccccctggcacaatcaccgcccgaagtcccaaaacaacagctgctgagttatgagctgggacagggccatgctcaggccagccccgagatccgcttcactcccttcgcaaaccctacccataaacccctcgcgaagccgaaatctagccaggaaactccggctcactcctctgggcaaccaccccgcgacgccaagctggaggctaaaacagccaaggcctctccttccggccagaatatatcatacatacatagtagctcggaatcagtgaccccgaggactgaaggacgattgcagcaaaagagtgggagttcagttcagaagggagttaacagccagaagggcaagtgtgtccggaatggggacagattccaggtgctcatcggttataacgccgaactaatcgcggtgttcaagactctgcctagtaagaattacgatcccgacaccaaaacttggaacttttcaatgaatgattactctgccctcatgaaagccgctcagtccctacctacggtgaacctgcaaccactcgagtgggcatacgggtcatccgaatctccttcaacaagttccgaggggcaagcaggcctgcctagtgctcccagcctcagcttcgttaaggggcgctgcatgctgatcagtagggcctatttcgaagccgacatcagctattcgcaggacctcatcgccctgtttaaacaaatggactctagacgatacgatgtcaaaacaagaaagtggtcctttctcctggaggagcactcaaagttgattgccaaggtgaggtgtctcccccaggtccaattagaccctctgcccaccacattgacactggcctttgcatcacagctgaaaaagacaagcctctccctgactcccgatgtccccgaggctgatctaagcgaagtggaccctaaactggtctctaatctgatgccgttccagagagcaggcgtgaatttcgctatcgccaaaggcggacggctcttgctggccgatgacatggggttaggtaaaaccattcaggcaatttgtatcgcagcgttctaccgcaaagaatggccactcctggttgtggtcccttcctcagtaagattcacatgggaacaggcatttctccgctggttaccatcattgtcccccgactgcattaatgtcgtggtcacgggaaaagaccggttaacagcaggcctgattaacatcgtatcttttgatttgttgagcaagctggaaaaacagctgaaaactccttttaaagtcgtcatcatcgacgagagccactttcttaaaaatagcaggacagctaggtgtcgcgcggcaatgcctgttctcaaggtcgcgaaacgcgtgatcttgctctcgggcacacccgctatgagccgccctgcagaattgtatacacagatcattgccgtgaagccgacgttcttcccccaatttcatgcctttggtctgagatattgcgacgccaagcgcatgccctggggctgggattactcgggctcatctaacctgggcgagctcaaactcctccttgaggaagccgtgatgttgaggagacttaagagtgacgtgctatctcaactgccagccaaacagaggaaaattgtagtgatcgcgcctgggcgtattaacgctagaaccagggcagccctcgatgccgcggcgaaggagatgaccaccaaggataagaccaagcaacagcagaaggacgctctgattttgttttttaaccggaccgccgaggccaagattcctagcgtgattgagtacatccttgatctgctggagtctgggagagaaaaattcttagtatttgcccatcacaaggttgtgctcgacgcgatcacccaagagctcgaaaggaagcatgtgcagcacatacgcattgatggctccacaagttccgccgagcgtgaagatctttgccagcagttccaactctccgaaaggcatgctgtggccgtattatccataaccgcagccaatatggggttaacctttagcagtgccgacctggtagtcttcgcagagttattttggaatcctggtgtgttgatccaggctgaggatcgcgtccatcgcattggtcagacgtcctcggtggggatccattatctggtggctaaaggaactgcagacgattacttgtggccgctaatccaggaaaagattaaggtgctggctgaagccgggctctctgagactaacttctcagaaatgaccgaatccaccgactacctgtacaaggaccccaaacaacagaaaatatacgatctgtttcagaaaagctttgagaaggaaggatccgacatggagttgctcgaagccgctgagagctttgatccaggctcagccagcggcaccagtggtagcagctctcagaatatgggcgacactttggacgaatcttccttgactgcaagcccccagaagaaacgcaggttcgagttctttgacaactgggattccttcacgtcacctctttag

SEQ ID NO: 136777 - DNA, 2865 bp, synthetic construct
  misc_feature 1..2865: note = Description of Artificial Sequence: Synthetic coding sequence
  source 1..2865: mol_type = other DNA
atgtcccttcccctcactgaagaacaacggaaaaagatagaggagaataggcaaaaggctctcgcccggagggcagagaaattgctggcggagcagcaccaaagaactagttccggcacctccatcgctggcaacccctttcaggctaaacaaggcccttcacaaaattttccaagagaatcctgtaagcccgtctcccatggcgtgattttcaagcagcagaacctgagcagctcaagcaatgcggaccaacgcccacacgattcgcactcctttcaggctaaagggatctggaaaaagcctgaagagatgcctactgcgtgccctggtcacagtccacgctcgcagatggccctaaccggaatatcccctccactggctcagagtccacccgaggtgcccaaacagcagctcctatcttacgagttagggcagggccatgctcaggcctcccctgagatcagatttacgccctttgcaaatccgacacacaaaccactcgctaaaccaaagagttcccaagagacgcctgcacacagttcgggccagcccccaagggacgcaaaattggaggctaaaacagccaaggcctccccttctggtcagaatatatcatacatccacagttccagtgaaagtgtgactcccaggactgaggggcggttgcagcaaaagtccggaagcagcgtacagaagggagttaactcacagaaggggaagtgcgtgcggaacggcgataggtttcaggttttgattggatacaatgccgagctcatcgcggtgttcaaaaccctcccttcgaaaaattatgatccggatactaagacctggaatttctctatgaatgattattctgccttgatgaaagcagcccagagtcttcccaccgtgaacctccaacccctggaatgggcgtatggctctagcgagtctccatcaacctcgagcgaaggacaggccggactgccaagcgcaccatcattatctttcgtcaagggccgctgtatgctcatctctcgcgcgtactttgaggccgacatctcatactcacaggaccttatcgccctcttcaagcagatggattcccgcagatatgacgttaagacaagaaaatggtctttcctgctggaagagcactccaagcttatcgccaaggttcggtgtctcccccaggttcagttggatcccctgcctacgacactgaccctcgctttcgcctctcagctgaaaaagacttccctaagcctcactccggacgtgccagaagcagatctgagtgaagtggatccgaagcttgtctctaatttgatgccgttccagagagctggcgtaaattttgctatcgctaaagggggacgtcttctgttagcagacgatatgggcctcggcaaaacaattcaggctatctgcatagctgcattttatagaaaagagtggccactgcttgtggttgtgccatcgtctgtccgatttacttgggaacaggcgtttctccgatggctgccctcactgtcccccgattgtatcaacgtggtggtcaccggaaaggatcggctgacggcaggcttgataaacatcgtgtctttcgatctgttgtccaagctggagaagcagctaaaaacgccctttaaagtagttatcatagacgaaagtcactttctgaaaaattcacgaaccgccagatgcagggccgccatgccagtccttaaggtagctaaacgagtaatattgctctccgggacgccggccatgagcaggcccgcagaactttacacacagattatagccgtgaagcctaccttcttcccccagttccatgcattcggtctccgctactgcgatgccaaaagaatgccttggggatgggactattcaggatcgtctaatctcggcgaactaaaattactcctagaagaggctgttatgcttcgtcgactcaaatcagacgtgctgtcacagctcccagccaaacaaagaaagatcgtagtaatcgcccctggaagaatcaacgcccggaccagagccgctctggacgccgcagcaaaagaaatgactacgaaggataagaccaagcagcaacagaaggatgcgctaattctattttttaaccgaaccgcggaagctaaaatacctagtgtcatcgaatacatcctggacttattggagagcggacgcgagaagtttctggtgtttgcccaccacaaggtcgtgttggacgccattactcaggaattggagaggaagcatgtgcagcacatccggatcgatgggtccacttctagcgcggagcgggaggatctgtgccagcagttccagctgtcagaacgccacgctgtcgcggtactgtcaattacggcagccaacatgggactcacgttttcttccgccgacttggtggtctttgcggagctgttttggaatcctggagtgttgattcaggctgaagatcgggttcatagaattggacagactagctcagtgggcatacactacctggtcgctaagggaacggcagacgattacctatggccactgatacaagagaaaatcaaggtgcttgctgaggctggactgagtgaaaccaatttctcagaaatgacggaatccacggattatctctacaaagatcccaaacaacaaaagatttatgatctgtttcagaagagttttgagaaggaaggttccgacatggagctgctagaggcagcggagagctttgatcctggatcagccagcggaacctccgggtcctcttcccagaatatgggagatacgttggatgaatcctccctgacggcatcgccccagaaaaaaagacgcttcgagttttttgacaattgggattcatttacatcccccctctag

SEQ ID NO: 136778 - DNA, 60 bp, synthetic construct
  misc_feature 1..60: note = Description of Artificial Sequence: Synthetic coding sequence
  source 1..60: mol_type = other DNA
atgtcactacctttgactgaggagcagcgcaaaaagatcgaggagaataggcagaaatag

SEQ ID NO: 136779 - DNA, 441 bp, synthetic construct
  misc_feature 1..441: note = Description of Artificial Sequence: Synthetic coding sequence
  source 1..441: mol_type = other DNA
atgtcattgcccttgaccgaggaacaacggaaaaaaattgaagagaacaggcaaaaggccctggcgaggcgcgccgaaaagttgctggcggaacagcaccagaggacttcttctgggacgtctatagcgggtaatcccttccaagctaagcaggggccaagtcagaatttccccagagagagttgcaagcccgtctcccatggagttattttcaaacaacaaaatctatcgagctcatccaacgcggatcagcgtccgcatgacagtcacagcttccaagcgaaaggaatctggaagaagcccgaagagatgcccacagcttgcccaggacactcccctcgctcacagatggccctgacgggaatttcacctcccttagcccagtctcccccggaagtacccaagcagcagttgctttcctatgagctgggccagggctag

SEQ ID NO: 136780 - DNA, 279 bp, synthetic construct
  misc_feature 1..279: note = Description of Artificial Sequence: Synthetic coding sequence
  source 1..279: mol_type = other DNA
atgtcactccctctgaccgaagagcaaagaaagaagatcgaggagaatcgccagaaggccctggcccggagagcggagaagttgctggcagagcagcaccagcgcacgagttcaggtactagcatagccgggaatccattccaggccaagcaggggccttcacaaaacttccctagagagtcctgcaagcctgtgtcccatggagtgattttcaagcagcaaaatctttcttcatcatctaacgctgaccagcgcccgcacgactctcactctttctag

SEQ ID NO: 136781 - DNA, 393 bp, synthetic construct
  misc_feature 1..393: note = Description of Artificial Sequence: Synthetic coding sequence
  source 1..393: mol_type = other DNA
atgtcgcttccgttgactgaggaacagagaaagaagattgaggaaaataggcagaaagccctggcccgcagagccgagaagctattagccgaacagcaccagagaactagcagtggtacaagtattgctgggaacccctttcaagccaaacagggcccttcacagaattttccccgtgagtcctgtaagccggtcagtcatggtgtcatattcaagcaacagaacctgagttcctcctccaatgccgaccagcgacctcatgactcacactcattccaggcaaagggcatctggaagaagcccgaagagatgccaaccgcttgtcctggccactcgccaagaagtcagatggctttgacaggaattagtcctcctctcgcacagagcccgtag

SEQ ID NO: 136782 - DNA, 3318 bp, synthetic construct
  misc_feature 1..3318: note = Description of Artificial Sequence: Synthetic coding sequence
  source 1..3318: mol_type = other DNA
atggctgccgccgccggtggtgggggcccggggaccgccgtgggcgcaacagggtccgggatcgcagccgccgccgctggcctcgccgtttacagacggaaggacggaggccctgctactaagttttgggagagcccagagactgtgagccagctcgattctgtccgggtatggctcggtaagcactataagaagtatgttcacgctgacgctccaactaacaaaacactcgcggggctggtcgtgcagttgctgcaatttcaggaggatgccttcgggaaacacgtgactaatcctgcctttaccaagttgcctgcgaaatgcttcatggactttaaagccggtggtgccctgtgccacattttgggggcagcctacaagtataagaacgagcagggttggcgcaggttcgacctgcagaatccctcaaggatggatcgcaatgtcgagatgttcatgaatatagaaaagacacttgtccagaacaactgtctcacacgccctaacatctaccttattccagatatcgatctgaagctcgccaataaattgaaggacattataaaaagacaccaaggtacattcaccgatgaaaagagtaaagcctcacaccacatatacccatactctagttcccaagacgatgaggaatggctccgccccgtgatgaggaaggaaaagcaggtgctggtgcattggggcttttaccccgacagttatgatacctgggtgcatagcaacgacgttgatgctgaaatcgaggatccccctattccagagaaaccctggaaggtgcacgttaaatggatcctggatactgacattttcaacgaatggatgaacgaagaggattatgaggtggacgagaatagaaagccggttagttttcggcagagaatctccaccaaaaacgaggagcccgtcagaagtccagaaaggcgtgaccggaaagccagcgccaacgcccggaagcgaaaacattcgccttctccccccccgcccactccaaccgagtcacgtaagaaaagtggaaaaaaaggtcaggccagcctgtatggcaaaagaaggtcccagaaagaagaggacgagcaagaagacctgacgaaagatatggaggacccaacacccgtgcctaatatagaagaggtggtgctaccaaagaacgtgaacttgaaaaaagattccgaaaacaccccggtgaaaggaggcacggtcgctgatctggacgagcaagatgaggaaacagtgaccgccggcggtaaggaagatgaggatcccgccaagggtgaccaatctcggagtgtggatctgggcgaggataacgttacagagcagacaaatcatatcatcattccatcttacgcaagttggttcgattataactgtatccatgtaattgaacggagggcactgcccgaattcttcaacgggaaaaacaagtccaagaccccagaaatctacctagcatataggaactttatgatagacacatacaggttaaatccccaggaatatctcacctcgaccgcgtgcaggcggaacttgactggcgacgtatgcgcagtcatgcgcgtgcatgccttcttggagcagtgggggttggttaactatcaggtggaccccgagagtcgccccatggctatggggcctccgcccactccacatttcaacgtcctagcagacactccaagtgggcttgtgcccctccaccttaggtctccccaggtgccagcagcgcagcagatgctgaacttcccagagaagaacaaagagaagcctgtggatctgcagaactttggacttagaactgacatttacagtaaaaaaactctcgccaagtctaagggcgctagtgccggccgtgaatggactgaacaggagactctcttattattagaagctctggaaatgtataaagatgattggaataaggtgagtgaacacgttgggtcacggactcaagatgagtgcatcttgcactttctgcggctaccaatcgaggacccatacctcgagaacagcgacgcctcattgggaccattggcatatcagcctgtcccctttagtcagagcggtaatcctgtaatgtctacggtggcctttctggcctctgttgtggacccaagggtggcttctgccgcagcgaaagctgcgctggaagagttctcacgcgtgagagaagaagtgcctctggagcttgtagaggcccacgtgaagaaggtccaagaagcggctcgagctagtgggaaggtggaccctacttatggcctggagtctagctgtatcgccggcactgggcccgatgagcctgaaaagctggagggcgccgaagaggagaaaatggaagctgacccagacggccaacagccagagaaggccgaaaacaaggtagaaaatgagacagatgaaggcgataaggcacaggacggagagaacgagaaaaactctgagaaagagcaggatagcgaggtctcagaggatacgaaaagcgaagagaaggagacagaggaaaataaggagttgacagacacgtgcaaagaaagggagtctgacaccgggaagaagaaagttgagcatgaaatttccgaagggaacgtggcaaccgccgctgctgccgctctcgcttcagctgccacaaaggctaagcacctcgccgctgtcgaagagcgtaaaattaaaagcttagtggccctcctggtcgagacccaaatgaaaaaactggagatcaagctgcggcacttcgaagagctggaaactatcatggatagagagaaggaggccttagaacaacaacgccaacagctgctcactgaaagacagaacttccacatggagcaattaaagtacgctgagttgcgggccagacagcagatggagcagcagcaacacggccagaacccacaacaagcccaccagcattcaggcggtcctggattggcccctcttggtgccgccggacatccgggcatgatgcctcaccagcaaccccccccctacccactgatgcatcatcagatgccaccaccccaccccccacagccaggccagatccctggtcctggctcgatgatgcccggccagcacatgcccggacgaatgatccctacagttgcagctaacatccatccatctggctccgggcctaccccgccagggatgcctcctatgccaggaaacatcctggggcctagagttcctctgacggccccaaacggaatgtacccaccacccccacaacaacagcccccacctccacctccggccgatggggttcctccgccgcctgctcccggaccccctgcctcagcagctccatag

SEQ ID NO: 136783 - DNA, 3645 bp, synthetic construct
  misc_feature 1..3645: note = Description of Artificial Sequence: Synthetic coding sequence
  source 1..3645: mol_type = other DNA
atggccgttcgcaaaaaagacggcgggccgaacgtaaaatattatgaagccgccgacaccgtgacacagttcgataatgtcaggctgtggttagggaagaactataagaaatatatccaagcagagccccccacaaacaagtctttgtcctccctagttgtacagctgctccaattccaggaggaggtattcggtaagcatgtgtccaacgcacctctgacaaagctccccatcaagtgcttcctggattttaaggcaggcggatctctgtgccacatcctggccgccgcttacaagtttaagtctgatcagggatggcgcaggtatgatttccagaacccatcacggatggaccggaacgtcgaaatgttcatgaccatagagaaatcgttggttcagaataattgcctctcacgccccaatatttttctctgccccgagatcgaaccaaagctgctcggaaagctcaaggacatcatcaagaggcaccagggcacagtcacagaagataagaacaatgcgtcacatgttgtctaccccgttccaggcaatctggaagaagaggaatgggtgcgccccgtaatgaagcgagacaaacaggtgctcctgcactggggttactatccagacagctacgacacttggatacccgcaagcgaaatcgaagccagtgtggaagatgcacctaccccggagaagccccggaaggtccatgccaaatggattctcgacacagatacctttaacgagtggatgaacgaggaggactacgaagtgaacgacgataaaaatcccgtctcccgccgtaaaaagatttcagctaagactctcacagatgaagtcaactccccagacagtgacagaagagataagaagggagggaactacaagaagcgaaagcggtcccccagcccgagtcccacaccggaagccaagaagaaaaacgctaaaaaagggccaagcactccgtacacaaagtccaagaggggccacagagaagaagaacaggaagacctcacaaaggatatggatgaaccttcacccgtgcctaacgttgaagaggtaactctgccgaaaaccgtgaatactaaaaaggattctgagtccgcacccgtgaaaggaggcactatgaccgaccttgacgaacaggaggacgagtctatggaaactacaggcaaagacgaagatgagaatagcacggggaacaaaggcgagcagaccaagaaccctgaccttcacgaggataacgtgaccgagcagacccaccacatcatcattccttcttacgctgcctggttcgactataattctgtgcacgccatcgagaggagggctctccctgagtttttcaacgggaagaataaatccaagacccccgagatctatctagcctacagaaacttcatgattgatacttaccggcttaatcctcaggagtatctcacatcgacagcttgccgcagaaatctcgcaggggatgtgtgtgccattatgcgcgtacatgccttcctcgagcagtggggccttataaattatcaggtcgatgctgaatcccgccctactccaatgggtcccccaccgaccagccacttccacgtcctcgccgacaccccgagtggcctggttcccctgcagccgaagacgccccagcagactagcgctagccagcaaatgctgaactttcctgataaagggaaagagaaaccaactgatatgcagaattttggcctccggacagacatgtatactaagaaaaacgttccctccaagtccaaggccgcagcatccgccacaagggagtggactgaacaggaaaccttgctcctgttggaagcactggagatgtataaggacgactggaacaaggtgagcgaacacgtgggatctcgcacacaggacgagtgcatcctccatttcctcagattgcctatcgaggacccatacctggaggactcagaagccagcttaggacctttggcataccagcccatccccttctcacaatctggtaacccggtcatgagcacagtcgccttcctcgccagtgttgtggatccccgggtggcgtccgcagccgcgaagtcagcgctggaagaatttagcaagatgaaggaagaagtccccaccgccctggtcgaggcgcatgtaaggaaagtcgaagaggccgccaaggtaactggcaaagccgacccagctttcggactcgagtcctccggaatcgcgggcactacgtctgatgaacccgagcgaatagaggagagcggaaacgatgaagcacgggtagagggacaggctaccgacgaaaaaaaggaacctaaagaaccgcgggagggcggcggcgccatcgaggaagaagccaaggagaagacctctgaggctccgaagaaggatgaagaaaagggtaaggaaggggattctgagaaggagtctgagaagtctgacggcgaccccatagtggaccccgagaaggagaaagagcccaaagaggggcaggaggaggttttgaaagaggtagtcgagtctgagggcgagcgtaaaactaaagtggagagggatatcggcgaaggcaatctctcaaccgcagccgcagccgctctagccgccgctgctgtcaaggctaagcatcttgcggctgtcgaggagaggaagattaaatccctcgtagccctcctagttgagactcagatgaagaagctcgagattaagcttcggcattttgaagaactcgaaacaattatggatcgcgaacgggaagccttagaatatcagagacaacaactcctggctgataggcaggcgttccatatggagcagctcaagtacgctgaaatgcgagctcgccagcaacactttcagcagatgcaccagcaacagcaacagcccccccccgccctgccaccgggctctcaacccatccccccgacaggagccgcgggcccgccagctgtgcacggcctcgccgtggccccggcctccgtggtgcccgcccctgctggaagtggcgccccgccagggagcctggggccctccgaacagataggtcaggccggatcaactgctggcccccaacagcagcagcccgcgggggcaccccagcccggcgccgtgccacctggggtacctccgcccgggccacatggaccctccccatttcccaatcaacagactcccccaagcatgatgcctggcgctgtacccgggagcggacaccctggagtggcggggaatgctcccctgggactgccgttcggaatgccaccaccacctccgcccccggcaccttctataatcccctttgggagcctcgctgattcaatcagcataaacctgccagcacctccgaacctccacggccaccatcatcacctgccatttgcaccaggtaccctgccgccccctaacctcccagttagtatggccaatcccttacacccgaacctgcctgccacaacaacgatgccctcctcattaccgctcgggcctggattgggcagcgctgcagcccagtctccagctattgtagcagctgtacagggcaacctgctgccgtcagcatcacccctccccgacccgggaactcccttgccccctgaccccaccgccccttctcccgggaccgttacgcccgtgcccccgccccagtag

SEQ ID NO: 136784 - DNA, 3393 bp, synthetic construct
  misc_feature 1..3393: note = Description of Artificial Sequence: Synthetic coding sequence
  source 1..3393: mol_type = other DNA
atggctgtgcggaaaaaggatggcggcccaaatgtgaagtactacgaggcagcggacacggttacacaatttgacaacgtaagattatggctgggcaagaattacaagaaatacatacaggcagagcccccaaccaataaatctctgtcaagtttggtcgtacaactgctgcaatttcaggaggaagtgttcggcaagcatgttagcaatgccccactgactaagctccccattaagtgtttcctggacttcaaagccgggggctccttgtgccatattcttgccgctgcgtacaagtttaagagtgaccaaggctggcgcaggtacgattttcagaacccttcacgcatggaccgaaacgtagaaatgtttatgaccattgagaagtcgctggtccaaaataactgtctatctaggccgaacatttttctttgcccagagattgagccaaagttgctcggcaagctcaaggacattatcaagcggcatcagggcacggtaacggaggataagaacaatgcaagtcacgttgtgtacccagtgccaggcaatttggaagaagaagagtgggtacggccagtcatgaaaagggataagcaggtgctcctgcattggggctactatccagatagttacgacacttggatccctgcatccgagatcgaagcgtcggtcgaggatgcgcccacccccgaaaaacctaggaaggtgcacgctaagtggattctggacactgacacgttcaacgagtggatgaatgaggaggactatgaggtgaacgacgataagaaccccgtgtctcggcgcaaaaaaatatctgccaagactctgactgatgaagtgaactcaccggattctgacagaagagacaaaaaaggaggcaattacaagaagcgaaaacggtccccttctcctagcccaacccccgaggccaagaagaagaatgccaagaagggaccgtcgacaccttataccaagagcaagcgcggccacagagaggaagaacaggaggatctgacaaaggacatggacgagcctagcccagtgccaaacgtggaggaggtcaccctccctaagacagttaatactaagaaagacagcgaatctgctcccgtcaaggggggcacaatgaccgacctggacgagcaggaggatgaatctatggaaactactggtaaggacgaagacgagaattctacagggaataagggagaacagactaaaaacccggatctacacgaagataacgtcacagagcagactcaccatatcatcatccccagctacgccgcctggtttgattataactcggtccatgcaatcgagaggcgtgcccttcccgagttcttcaatgggaagaataaatcaaaaacccctgagatttatttagcatatcggaactttatgattgacacataccggctaaatcctcaggagtacctcaccagcaccgcctgtcgaaggaaccttgctggggacgtttgcgcaataatgagggttcatgccttccttgaacagtggggcctaattaactaccaggttgatgcagaatctcgccccacacctatgggaccaccccccacgtcccacttccatgtgttggcagatacaccttctggcctcgttccacttcagcctaaaacaccccagggacggcaggtagacgccgataccaaggctggccgcaaaggtaaagagttagacgacttggttccagaaactgctaaagggaagccggagctgcagaccagcgcatctcaacagatgctgaacttccctgacaaaggcaaggaaaaaccgaccgatatgcaaaattttgggttaaggacagacatgtacacaaagaagaacgtgccctcaaaatctaaggcagcagcatctgctacaagagagtggactgagcaggagaccctccttctgttggaggccctagaaatgtacaaggacgactggaacaaggtttccgagcatgttggaagtcggacgcaggacgagtgcattctgcatttcctgcgcctccctatcgaggacccatatctggaggatagcgaggctagcctcggccccttagcataccaacctatcccattctctcagagcggcaatccagtgatgtcgactgtggcattcctggcctctgtggtggatccaagagttgcctcagctgcagccaaatcagctcttgaagagttttccaaaatgaaggaagaggtacccaccgcattagtggaggcccatgtcaggaaagtcgaggaggcagcaaaggtgactggcaaagccgatccagcattcggcctggagtcttccggaattgctggcactacctccgacgaacccgagcgaattgaagagtctgggaatgacgaggcccgcgttgagggccaagcgacagatgaaaagaaagagcctaaagagccccgcgagggtggcggggctattgaagaagaggccaaggaaaagaccagtgaggcgcccaaaaaggacgaggagaagggaaaagaaggcgattcagaaaaggagagcgaaaagagtgacggtgaccccattgtggatccagagaaggagaaggagcctaaagaaggccaggaagaagtacttaaagaggtggtcgagagcgagggcgaacgcaagactaaggttgaaagagacataggggagggcaatttgagcactgcagccgcagccgcccttgctgcagccgctgtcaaagccaaacaccttgcggcagtggaggagcgaaagataaaatcactggtggctttgctcgtggagacccagatgaagaagttggagataaagctcagacatttcgaggaacttgagactataatggacagagaacgggaggctttggaataccaaaggcaacagctgctggccgatcgccaggcctttcacatggagcagctgaaatacgccgagatgcgagcaagacaacagcactttcaacagatgcaccagcaacagcagcaacctcctcctgcactgcccccaggaagccagcccatcccacctactggggcagctggtcctcctgccgttcatggactagcagtagctccagctagtgtcgtaccagctcctgcaggctctggtgcccctcccggatcactgggcccctctgaacagattgggcaggccgggagcaccgccggaccacagcagcagcagccagctggagccccgcagcctggggcagtccctccaggcgtgccgccaccagggcctcatgggcccagcccatttcctaaccagcagacacccccaagtatgatgcctggagctgtccccggctctggccatccaggagttgcagatcctgggacccctttaccaccagacccaaccgctccctcacccgggacagtaaccccggtgccacctccccagtag

SEQ ID NO: 136785 - DNA, 3459 bp, synthetic construct
  misc_feature 1..3459: note = Description of Artificial Sequence: Synthetic coding sequence
  source 1..3459: mol_type = other DNA
atggctgtgagaaagaaggatggaggtccaaatgtcaaatactacgaagccgcagacactgtgacgcagtttgataatgtgcgtttgtggcttgggaagaactataagaaatatatccaggccgagcccccaaccaacaagtcactgtcctctcttgtggtgcaacttctgcagtttcaagaggaggtctttggaaagcacgtatcaaatgctccactcaccaaactgccgatcaaatgtttcctggattttaaagctgggggaagtctatgtcatatactggctgccgcctataaattcaagtcagatcagggctggagaaggtacgatttccagaatccttctcggatggaccgtaacgtcgaaatgtttatgacgatcgagaagagtcttgtccaaaataactgtctcagccgaccaaacatatttctgtgccccgagattgaacctaaattattaggcaaattaaaagacatcataaaacggcatcaggggacagtgacagaggacaagaacaacgcgtcccatgttgtttaccctgtccctgggaacctggaagaggaggaatgggtgagacctgttatgaagcgagacaaacaagtgcttcttcattgggggtactatcctgactcatacgatacttggatccccgcttcagagatcgaagccagcgtcgaggatgcccccacccccgaaaagcctcgcaaggtccatgctaaatggattctcgacacagatacctttaacgaatggatgaacgaggaggattacgaagtgaatgacgataagaacccagtgtccagacggaaaaagatctcagccaagacactcacagacgaggtgaatagcccagactcagatcgacgagataaaaagggcgggaattataagaaacggaaacgatccccctccccttcccccacacctgaggccaaaaagaagaacgctaaaaagggcccttctacaccctatactaaatccaaacgagggcaccgggaagaagagcaagaagatctcaccaaggacatggacgagcctagccctgtgcccaacgtggaagaagtgacacttcccaaaacagtgaatacaaagaaagatagtgagtccgcaccagtgaaagggggaaccatgacagatttggacgagcaagaggatgaatccatggagaccaccggtaaagatgaggatgagaactcaacagggaataagggagagcagacgaagaaccccgatttacatgaggataacgtgacggaacaaacccatcacatcattattccttcctacgccgcctggtttgactacaatagtgtgcatgcaatcgaacgcagagcactccctgaattttttaatggcaagaataaatctaaaacacctgagatctacctggcttatcgaaactttatgattgatacctatcgactgaacccgcaggaatacctcacgtccactgcctgtaggcggaaccttgccggtgacgtctgtgctataatgagagtccacgcctttctagagcagtggggcttgatcaattaccaggtggatgcagagagtaggccaacccctatggggcctccgcccacaagccatttccatgtcctggcggatactccttctggcctcgtccccctgcagcccaagaccccccaggggcgccaggtggatgcagacaccaaagctggaagaaaagggaaagaactagatgacctagtacccgaaactgccaagggtaagcctgagctacaaacaagtgccagccaacagatgttaaatttccctgacaaaggtaaggaaaaaccaaccgatatgcagaatttcggcctgagaacggatatgtacaccaagaagaatgtcccgtcaaagagcaaggccgccgcatccgcaactcgggagtggacggaacaggagacacttcttctgctggaagcgcttgaaatgtataaagacgattggaacaaggtgtcagagcacgttggcagcaggacccaagacgagtgcatccttcactttctacgactacccatcgaagatccctatcttgaagatagcgaagcctctttaggcccattggcgtatcaaccaattcccttctcccaatcaggcaatccagtgatgagtacggtggccttccttgcaagcgtggtggacccgagggtggcatctgcggccgcgaaatccgctctggaggagttctcaaaaatgaaggaagaggttccaacagctcttgtggaagctcatgttaggaaggtggaggaggcagccaaagttacggggaaagccgatcctgcatttggtttggagtcgagtgggatagccggtactaccagcgatgagcccgagagaattgaagaatcaggaaatgacgaggcacgggtggaagggcaggcaacggatgagaaaaaggaacctaaagagccgcgcgagggcggtggggccattgaagaggaagcaaaggagaagacaagcgaggcacccaagaaagacgaggaaaagggcaaagagggagacagcgagaaggagagtgaaaaatccgatggagatcccatcgtagaccccgagaaggaaaaagaacctaaggaaggacaggaggaggtgctcaaggaggtcgttgagtcagagggagagcgcaagactaaggttgaaagggatatcggggaggggaacttatccacagccgctgcggcagctctcgctgcagctgccgtgaaagcaaaacatctggcagccgtggaggaacggaaaattaaatcgttagtggccctgttggtagagacacagatgaaaaagcttgagataaaacttcggcactttgaggagttagagacgattatggatagagaaagagaggctctagaataccagcgtcagcagctgctagccgatcgccaggctttccacatggagcagcttaaatacgccgagatgagggcccgccaacagcactttcagcaaatgcatcagcagcaacagcagcctcctcccgcgctcccaccaggctcccaaccaattccacctactggcgctgccgggcctcctgctgtgcatggcctggcagtagctcccgcaagcgtcgtacctgctccggccggtagcggagcacctcctgggtccctgggcccttccgaacagatcggacaggccggtagcaccgcaggaccacaacaacagcagcccgccggcgcaccacagcccggggctgtgcctcccggggtgcccccccctgggccacatggccccagcccctttcctaaccagcagaccccaccaagcatgatgcccggcgcagtgcctggtagcggtcacccaggagtggccgcacagtcccccgcaattgtcgccgctgtgcaaggaaatcttttgccctctgcttccccactgcccgacccgggtacacctcttccccccgaccccacagcgccatcccctggcaccgtgacccctgtcccacccccccagtag

SEQ ID NO: 136786 - DNA, 1425 bp, synthetic construct
  misc_feature 1..1425: note = Description of Artificial Sequence: Synthetic coding sequence
  source 1..1425: mol_type = other DNA
atggcagccagagccggctttcagtcggtcgcacccagtggcggcgctggtgcgagcgggggtgccggcgcagctgcagcccttggaccaggtggaacaccagggccccctgttaggatggggcctgcacccggccagggcctgtacaggtccccaatgccaggtgccgcttatcctcgtcccggcatgctgcctggcagccgcatgacgccccaaggcccatctatgggcccccccggatatggtggaaaccccagtgtgaggcccggcctggctcagagcggcatggatcaatctaggaagcgcccagctccccagcagattcaacaagttcagcagcaggctgtgcagaaccgcaatcacaacgccaagaaaaagaagatggccgacaaaatcctacctcagcgcatacgcgagctggtgccggagtcacaggcctatatggacctgctggcttttgagagaaagttagaccaaactatcatgaggaagcggctcgatattcaagaggcattgaagagacctatcaaacaaaagagaaagctgcgaattttcatctcaaatactttcaatcccgccaagtctgatgctgaggacggggagggcactgtggccagctgggagctgcgcgtggagggccggctgcttgaagatagtgccctgtctaagtatgatgcaacaaaacagaaacgcaaattctcttcattcttcaaatcactggtgatagagctggataaggatctgtacgggcccgataatcacctggtcgagtggcaccgcaccgcaacgacccaggaaaccgacggattccaggtgaagcgccctggggatgtcaatgttcggtgcaccgtcctgctgatgctggattatcagccaccccagttcaaacttgacccgcgcttagctagactgcttggcattcacacccagacccgtcccgtcattatacaggctctgtggcaatacattaagacacacaagctacaagacccccacgagagggaattcgtgatttgcgataagtacctacagcagatattcgagagccaaagaatgaagttcagtgaaatccctcaacgtctgcacgccctgttgatgccccctgaacctatcataatcaaccacgttattagtgtagacccgaatgatcagaagaaaacagcctgctacgatattgacgtagaggtggacgataccctcaaaacccaaatgaacagctttctgcttagtacagctagtcagcaggagatagctaccctggataataagacaatgacagacgtcgtcggaaatccggaggaggagcgccgagcggaattttacttccagccctgggcccaggaggccgtatgccgttacttctactcgaaagtgcaacagagacgtcaggagctagaacaggcactcggaatcagaaacacgtag

SEQ ID NO: 136787 - DNA, 1548 bp, synthetic construct
  misc_feature 1..1548: note = Description of Artificial Sequence: Synthetic coding sequence
  source 1..1548: mol_type = other DNA
atggctgccagagctggatttcaatctgttgccccttcaggcggcgccggagcttccggtggagctggagctgcggctgccctcggccccggcggtacaccaggaccgcccgtgcgcatgggccccgcgccggggcaaggcttataccggagcccaatgcccggggcagcatatccccgcccaggcatgctgccgggaagccgaatgacaccacagggtccatcaatgggcccccctggatatggagggaacccctccgttagaccaggcctcgctcagtccggaatggaccagtcccgcaaacgccctgcgccccagcagatccagcaggtgcagcagcaggctgtgcaaaaccgcaaccacaacgctaagaagaagaagatggcggacaagattttacctcagcggattagggaactcgtgcctgaaagccaagcttacatggacctcctggcgtttgaacgtaagctggaccaaaccattatgagaaagagattggatatacaggaggctctcaagagaccaatcaaacagaagagaaaactccgtatctttatctccaacacatttaacccggccaaaagcgatgctgaggatggagagggtacagtggcttcttgggaacttcgcgtagagggcaggctcctggaggacagtgcattgtctaaatacgatgccacaaagcagaagagaaagttttcgtcgttctttaaaagcttggttatagaattagataaggacctctacggacccgacaatcatctggtcgaatggcaccggaccgcaaccacacaggagacggatggcttccaggtcaagagacccggcgatgtgaatgtccgctgcacagtactactcatgctggactaccagccaccacaattcaaactcgatcctcgtctggcccggttgctggggattcatacacaaaccaggcctgtgataattcaggcgctgtggcaatatatcaagacacataagttgcaagatccccacgaaagagaatttgtgatttgtgacaagtacctgcaacagatctttgagtcccagaggatgaagttcagcgaaatcccccagagacttcatgcgctcttaatgcctcctgaacctataattattaatcacgtgatatcagtagaccccaacgatcagaaaaaaactgcctgttacgacattgatgtcgaggtggacgatacactcaaaacgcagatgaacagcttcttactctctaccgcctcacagcaggaaatcgctacgctcgataataagattcatgaaacaatcgagaccatcaatcagctgaagactcaaagggaatttatgctcagctttgctagggatcctcaaggcttcatcaatgattggctgcaaagtcaatgcagggatctgaagacaatgactgacgtggtcggcaatccagaagaagagcggcgagccgaattttactttcagccatgggcacaagaagccgtgtgtcggtacttttactctaaggtccagcaaagacggcaggagctcgagcaggccttgggcatacggaacacttag

SEQ ID NO: 136788 - DNA, 876 bp, synthetic construct
  misc_feature 1..876: note = Description of Artificial Sequence: Synthetic coding sequence
  source 1..876: mol_type = other DNA
atgatgcccctgaacaaacggggctccagcctgccattcaaatcactggtgatagaactcgacaaggatctatacggtcccgataatcacctggtcgagtggcaccggactgccactacacaagagactgacgggttccaggtaaagcgccccggagacgttaatgtgagatgtaccgtgctgctgatgctcgattaccaacccccacaattcaagcttgatcctcgtctcgcccggctgttggggattcatacacaaaccagaccggtgattattcaggctctgtggcagtatatcaagactcataagcttcaggatccgcacgagagagaattcgtcatttgcgacaagtacctgcagcagattttcgaatctcagcggatgaagttttctgaaataccacagcgcctccacgccttacttatgccgcctgaaccaatcattatcaaccacgtcatcagtgtggaccccaacgaccagaagaaaactgcctgctatgatatcgatgtggaggtcgatgatactctaaagacccagatgaatagtttcctgctgtcaactgcgagtcagcaggaaattgcaacgctggataataaaattcatgagaccattgagacaattaatcagctgaaaactcagcgcgagtttatgctatctttcgcccgtgatccacaagggtttattaacgattggttacagagtcagtgccgggatctaaaaacgatgaccgatgtggtgggcaatccagaggaagagcgccgtgcagaattctactttcagccttgggcccaagaagctgtgtgcagatatttttactccaaggtgcagcagagaaggcaggagctggagcaggctctgggtataagaaacacctag

SEQ ID NO: 136789 - DNA, 1362 bp, synthetic construct
  misc_feature 1..1362: note = Description of Artificial Sequence: Synthetic coding sequence
  source 1..1362: mol_type = other DNA
atgtccaaaattagcgaagctgtgaaacgtgcgcgcgcagcatttagctcaggcaggacccgccccctccaatttcggattcagcagttagaagctctccagcgactaatccaggaacaggaacaggaactggtgggcgccttggcggcagaccttcacaaaaacgaatggaacgcctactatgaagaggtggtgtatgttctggaagaaatcgagtatatgatccaaaaattgcccgaatgggccgccgatgaaccggttgagaagactcctcaaacacagcaggatgaattatatattcattccgaaccactgggtgtggtcctggttatcgggacctggaactaccccttcaacctcacgatccagccaatggttggggcgattgcagcagggaattccgtagttctgaagccctcagagctttcagagaacatggcctccttgctcgccacaattatccctcagtacttggacaaagatctgtaccccgtaattaatgggggcgtaccagagactacagagctgttgaaggagcggttcgatcatatcctgtataccggcagcacgggcgtgggaaaaattatcatgacggctgccgccaagcacttgacacctgtaacactggagcttggcggcaaatctccttgctatgtcgacaagaactgtgacctcgacgtcgcctgccgcagaattgcctgggggaaattcatgaattccggacaaacatgtgtggctcccgattatatcctgtgcgaccccagtattcagaaccagattgtggagaagctgaaaaaatccctcaaggagttctacggcgaggatgccaagaagtcccgcgactacgggcgaatcatatcagctaggcatttccagagggtgatggggttgattgaagggcagaaagttgcatatggtggcacaggggatgcggcgacccgatatatcgccccaacaattctgacagatgtcgacccgcaatccccagtaatgcaggaggaaatattcggccctgttctcccaatcgtttgcgtcagatcactggaggaagcaatccagtttataaatcaacgcgaaaagccactcgcactgtatatgttttcgtccaacgacaaggtcatcaagaagatgattgctgagacctctagcgggggagtcgccgcaaatgatgtaatagttcatatcactctgcattcactcccctttgggggtgtgggcaactcaggaatgggatcttaccacggcaaaaaatcttttgagacattctctcatcggcggagctgtctggtgcggcctttgatgaacgacgagggactcaaagttcggtatccacccagtcctgctaaaatgacccaacactag

SEQ ID NO: 136790 - DNA, 1452 bp, synthetic construct
  misc_feature 1..1452: note = Description of Artificial Sequence: Synthetic coding sequence
  source 1..1452: mol_type = other DNA
atgggacggagggtcggcgtggaggttacaccccgatgggccccccagaagtgccaaggagccaggccccagcgcccaggaatgtcgccaggcaaccggatgcctatggccggactgcaggtaggtccgcctgcaggatccccgttcggcgctgcagcgccactcaggccaggtatgcctcctacgatgatggatccctttcgcaaacggctgctggtcccccaggcccagccgcccatgcccgctcagcgcagaggactgaaaaggcgcaagatggccgacaaggtcctgccacagaggattagggaattggtgcccgaatctcaagcatatatggatctgttagctttcgagcggaaacttgaccagaccatcgcacgtaagagaatggagatacaggaggccataaagaagcctctgacccagaagcgcaaactgcggatttacatcagcaatacatttagcccttcgaaggctgagggggacagtgctggcaccgctggtacccctggcggcacccctgccggggacaaagtggctagctgggaactccgtgtcgaaggtaaactccttgacgaccctagcaagcagaagcgcaaatttagctcatttttcaagtctcttgtcatagaactcgataaggaactatatgggcccgacaaccatctggtggagtggcatcgtatgcctacaacccaggaaacagacggcttccaggtgaaaagaccgggggatctgaatgtgaaatgcacactgcttttaatgctagaccaccagccgcctcagtataagctggacccccgcctcgcacgactgctcggcgttcacacacagactcgggctgctatcatgcaggcactgtggctgtacatcaagcacaatcaactgcaggacgggcatgagcgcgagtatattaattgcaatcgatacttccggcaaatcttttcatgtggcagattgcggtttagcgaaatccctatgaaactggccggtctcctgcagcatcctgaccctattgtgatcaatcacgtgatcagtgtcgatcccaacgatcagaaaaagacagcctgctacgatatagatgtggaggttgatgatcctcttaaggcccagatgagtaattttctcgcctccaccaccaaccagcaggagatcgcctccctggacgtcaaaatccacgaaacaattgagtccatcaatcaactgaaaacccagagggattttatgttaagcttttcaacagacccacaggacttcattcaggagtggcttcgatcacagcgaagggatctcaagatcatcacagacgtcataggaaatcccgaggaggaaaggcgagctgctttctatcatcagccctgggcccaggaggcagtggggaggcatatttttgcgaaggttcagcaacggagacaagagttggaacaggtacttgggatccgcttgacctag

SEQ ID NO: 136791 - DNA, 1596 bp, synthetic construct
  misc_feature 1..1596: note = Description of Artificial Sequence: Synthetic coding sequence
  source 1..1596: mol_type = other DNA
atgtcgggtagaggcgccggtgggtttccattacctccactgtccccaggcggcggcgccgttgcagcagctctcggagcccctccacctccagctggccccgggatgcttcccgggcccgcattgcgcggacccggaccagctgggggcgtcggcggacccggggccgccgcattccggccaatgggccctgccggccctgctgctcagtatcagaggcccggaatgtctcccggtaatcgcatgccgatggctggtctgcaggttgggccaccagccgggtcaccattcggcgcagccgctccattaagacctggaatgccaccaacaatgatggaccccttcagaaagcgccttctggttccacaggcacagccgcccatgcctgcacagcgacggggcttaaaaagacgaaaaatggccgacaaggtgctgccccagagaatcagggaactggttcccgagagtcaggcgtacatggatctgctggcatttgaaagaaagctcgaccaaactatagcccgaaagcgcatggagatacaggaggccattaagaaaccgttaacccagaagagaaagttacgcatctacatctcaaacacatttagtccctcgaaggctgaaggtgacagcgccggtactgcaggaaccccaggcggcaccccagctggggataaggttgcctcctgggaactgagggtggaaggaaagctcctggatgatccctctaaacagaaaagaaagttcagctcattcttcaagagcctggttatcgaattagataaagaattgtatgggcctgataatcatctggtggagtggcatagaatgccaacaacgcaggagacggacgggtttcaggtcaaaaggcccggggacctgaatgtgaagtgcacccttcttcttatgctcgaccaccagccacctcagtataagctggatcccagattggccagacttctcggtgtgcatacgcagacacgcgccgccatcatgcaggccttgtggctgtacatcaaacataaccagcttcaggatggccatgagagggagtatattaactgtaaccgctattttagacaaattttttcttgtggccgactacggttttccgagattccaatgaaacttgctggcctgctccagcaccccgatcccatcgtgatcaaccatgtaatcagcgttgatcccaatgatcagaagaaaacggcttgctacgatatagatgtagaggtcgacgatccacttaaggcccaaatgtcaaacttcttagcctctacaactaaccagcaagaaatcgccagcctcgacgtgaaaatccacgaaacaatcgagtcgataaaccagctaaagacgcaaagagattttatgctctccttctccaccgacccccaggacttcattcaggagtggctgaggtcacagagaagagacctcaagatcatcaccgacgtcattggcaatcctgaagaagaacgtcgggcagccttttaccatcagccctgggcacaagaagccgtcggccggcacatctttgcgaaagtgcagcagcgcagacaagaactggagcaagttctcggcatcagactgacctag

SEQ ID NO: 136792 - DNA, 1485 bp, synthetic construct
  misc_feature 1..1485: note = Description of Artificial Sequence: Synthetic coding sequence
  source 1..1485: mol_type = other DNA
atgtccggtaggggcgctgggggcttccccctgcccccgctgagtcccggtgggggggccgctttcagaccgatgggacccgccgggccagccgctcagtaccagcggcctgggatgtccccaggcaatcgaatgcccatggccgggctgcaggtcggtccgccggcaggttctccgttcggcgctgccgcccctcttcgccccggtatgcctcctaccatgatggaccccttccgcaagagactgctcgtcccccaggcccaaccgccgatgcccgctcagaggaggggcctgaagagacggaaaatggccgacaaggtcctgccgcagcgtatacgggagctggtgcccgaaagccaagcttatatggatctgctggcattcgaacgcaaattagatcagactattgccagaaaaaggatggagatacaagaggccatcaagaagccgctgactcagaaaagaaagttacgaatttatatcagtaacaccttttcccctagcaaagcagaaggcgatagcgcggggactgctggaacacctggaggaactccagctggtgacaaggtagcttcatgggagctgcgagtggaaggaaagctacttgacgacccttcaaagcaaaagcgcaaatttagtagcttcttcaaatctctggttattgaacttgacaaggaactctacgggcctgacaatcatctggttgagtggcatcgaatgcctacgacacaggagaccgacgggttccaagtgaaacgccccggcgatttaaatgtcaagtgtactctgttattgatgctggatcatcaaccacctcagtacaaactggatccaaggctggcgaggctgttgggcgtccacactcaaaccagagccgcaatcatgcaggccctctggttgtacatcaagcataatcagcttcaggacggacacgagcgcgagtatatcaattgcaacaggtatttccgtcagatcttctcttgtgggagactccggttttccgagatccctatgaagttagccggcctgctgcaacatccggacccaattgtaattaaccacgtgattagtgttgatcccaatgatcaaaagaagacagcatgttatgacattgatgttgaggttgacgaccctcttaaggcgcagatgtccaacttcctggcgtccacaacaaatcaacaagagattgcatcgttagatgtcaagatccatgagactattgagtcaatcaaccaacttaagactcagcgggatttcatgctgtcatttagcactgaccctcaggattttattcaggaatggctccgctcccaaagaagagacctgaaaatcattacagacgttataggaaaccctgaagaagagcgcagggctgcgttttatcatcagccctgggcacaagaagccgtggggcgacatatctttgctaaagtgcagcaacgccggcaggagctggaacaggtgttgggtattagactgacttag

SEQ ID NO: 136793 - DNA, 1452 bp, synthetic construct
  misc_feature 1..1452: note = Description of Artificial Sequence: Synthetic coding sequence
  source 1..1452: mol_type = other DNA
atggctgccgacgaagtggccggaggagcccgcaaagctaccaagtctaagctatttgagtttcttgttcacggagtgcgccccggaatgccaagcggggcccgaatgcctcaccagggagcccctatgggacccccaggctctccttatatgggctcgccagccgtgaggcccggacttgcgcctgccggtatggagccagctagaaagcgagcagcccctcccccaggccagtcccaagctcaatcccaggggcaacccgtgcctacagcacccgcaaggtctaggtctgcgaagcgaaggaaaatggcagacaagatcctgcctcagcgaatccgcgaactagtgccagaaagccaggcatacatggatctcttagccttcgagaggaaactggaccagacgataatgcgtaagcgggttgatatccaggaggctctgaaaaggccaatgaagcagaagcggaaactgagattgtatattagtaacactttcaatcccgcaaagccagacgcggaagatagcgacggctccattgccagctgggaactccgggttgaagggaagttgctcgacgacccaagtaaacagaaacgtaaatttagcagctttttcaaatctctcgtgatcgaactggacaaagacctgtatggtcccgacaaccacctggtggagtggcatcggacgcccacaacccaggagacagacggctttcaggtaaaaaggccaggcgatctttcggtccgatgcactctgttgctgatgctcgactatcaacccccacagttcaaactcgatcctcgcctcgcgagactcttgggactgcacactcagtcccgtagtgccattgtacaagcactgtggcaatatgtgaagacaaacagactgcaggatagccatgacaaagagtatatcaacggcgataaatactttcagcaaattttcgattgtccccgccttaaattctctgaaatcccccagcgcttaactgctctactgttgcctccagatcccatcgtgatcaaccatgttatcagcgtggatccaagtgaccagaaaaagacagcttgctacgatattgacgtggaggttgaggaacccctaaagggtcagatgtcttcattcctcttatcaactgctaaccagcaggaaatcagtgcgctcgactctaaaattcatgagactatagagtctatcaaccagctgaagattcaacgggatttcatgctgagtttttcacgcgacccaaagggatatgtgcaggatttgctgcgctcccaatccagggacttgaaggttatgacagacgtcgctggcaatcccgaagaagaacgtagggccgaattctatcatcagccttggagtcaagaagcagtgtctcggtatttctactgcaagatccaacaaaggcgtcaggagctagaacagtccctcgtggttaggaacacatag

SEQ ID NO: 136794 - DNA, 1308 bp, synthetic construct
  misc_feature 1..1308: note = Description of Artificial Sequence: Synthetic coding sequence
  source 1..1308: mol_type = other DNA
atgactcccggcctccaacacccaccaacagtcgtccagcggccggggatgcctagtggagccaggatgcctcatcagggcgcccctatgggaccccccgggtcgccgtatatggggtcccccgcagccccagctcggagccggagtgccaaaagaaggaagatggccgataaaatcctgcctcaaaggattagagaactggtgcctgaatcccaggcttacatggacctgttggcctttgaacggaaactggaccagacgattatgcgaaagcgggtggacatccaggaagcactgaagcgccctatgaagcaaaaacgaaaactccggctctatataagcaatacatttaatcctgccaagccagacgccgaagatagtgatgggtccattgcctcctgggaactcagagtggagggaaaactgctggacgatccctcaaaacaaaaaaggaaattcagttcatttttcaagagtcttgtgattgaattggataaggatttgtatggaccagataatcacctagtggaatggcacaggactcccactacacaggaaaccgacggtttccaagtgaaaagacccggagacttgagtgtgcggtgtaccctgctgttaatgctggactaccagccccctcagtttaaactggatcccaggcttgccaggctgttgggacttcatacacagtctcgaagcgcaattgttcaggcactatggcagtatgtgaaaacaaatcggctacaggattctcatgacaaagagtacataaacggtgataaatactttcagcagatatttgactgtcctcggcttaaattcagcgagatcccccagcggctcaccgcattgctcctgcccccagatcccattgttattaaccatgttataagcgttgacccttccgaccagaaaaagactgcgtgctacgacatcgatgttgaagtggaagaacctctaaagggccagatgtcttctttcctgctttctacagcgaaccaacaggaaatcagcgcccttgatagtaaaatccacgaaactattgagagtattaatcagctgaaaatacagagggacttcatgctgagtttttctcgcgaccctaagggttacgtgcaagacttactccgatctcagtcacgggatcttaaagttatgactgatgtcgccggcaatcctgaggaagaacgccgggctgagttttaccaccagccatggtcccaagaagctgtgtcaaggtacttttactgtaaaatccaacaaagacgccaggagctcgaacagagcctcgttgtgagaaacacttag

SEQ ID NO: 136795 - DNA, 1413 bp, synthetic construct
  misc_feature 1..1413: note = Description of Artificial Sequence: Synthetic coding sequence
  source 1..1413: mol_type = other DNA
atgacaccaggcctgcagcacccccccacggtggttcagcgtccgggcatgcctagtggggcacggatgccacaccagggagccccaatgggtcccccaggcagcccttatatgggatcccctgcagtgaggccaggactggcgccagccgggatggaaccagcaagaaaacgcgcagctccacctcccggtcagtcccaggctcagtcgcagggtcagccagtgcccactgccccagccagatctaggagtgcaaagcgccgcaagatggctgataagatccttccacagagaattagggaattggtgccagagtctcaagcatatatggatctgctcgccttcgaacgcaagctggatcagacaatcatgcgcaagcgcgttgatatccaggaagccctgaaacgtcctatgaaacaaaaacgtaagctgagactttatattagcaatacattcaatccagccaagcctgatgccgaggatagcgacggcagcatcgcatcttgggaactgagggtggaagggaagctccttgacgacccaagcaagcagaaaagaaagttttccagcttctttaaaagtttggttattgaactggacaaagacctttatgggcctgacaatcatctcgtcgaatggcaccgaacaccgaccacccaggaaacggatggatttcaggtcaaacgacccggagaccttagcgtgaggtgcaccctgcttttgatgctagactatcagcccccacagtttaaactggacccacgtctcgcaagattactgggactgcatactcaaagtcggagtgccatagtgcaggcactgtggcagtacgtaaaaactaaccgcctccaggacagtcatgacaaggagtacatcaatggtgacaaatatttccagcaaatctttgattgcccccggttaaagttcagcgaaatcccacagcgtctgaccgccctgctcctccctcccgaccccatcgtgatcaaccacgtgattagtgtcgatccgtccgatcagaagaaaaccgcctgctacgacatcgatgtcgaggtggaagagcctctgaaaggccagatgtcctcttttctgcttagcaccgccaatcagcaggagatttccgccttggattcgaagatacacgagacaattgagagcattaatcagctgaagatccagcgcgattttatgttgtcatttagcagggacccgaaaggctatgtacaagatctcttgagatcacagagtcgtgacttgaaagtcatgaccgatgtcgctggaaatcctgaggaggaacggcgggctgaattctaccaccagccctggtcacaggaggctgtgtctagatacttttattgtaagatccagcagagaaggcaagaattggaacaatcgcttgtcgttcgcaacacttag

SEQ ID NO: 136796 - DNA, 1413 bp, synthetic construct
  misc_feature 1..1413: note = Description of Artificial Sequence: Synthetic coding sequence
  source 1..1413: mol_type = other DNA
atgacccctggactgcaacacccgccaactgtcgtacagaggcccgggatgccatccggtgccaggatgccccaccagggagcccccatggggccacctgggtccccttacatgggatctccagccgtcagacctggccttgcacctgccggtatggagccggcccgaaagcgggccgcacctcccccaggccagagccaggcgcagtcgcaaggacagccagtcccaaccgctcccgccagaagtcggtcagctaagagacgcaagatggcagataaaattttacctcagcgcatacgcgagctagtccctgagagccaggcctacatggatctgctggcctttgagagaaagctggatcaaaccattatgaggaaaagggtggatatccaggaggcactgaagcgtcctatgaaacagaagaggaagttgagactctacatctctaatacatttaacccagcgaagcccgatgccgaggatagtgatggctcaattgcctcctgggaactcagagtggaaggcaagttgctcgacgaccctagcaaacagaagagaaaattttcgtcattttttaagtcactagtgatcgaactggacaaggacttatacggacctgacaaccatttagtggagtggcaccgaaccccaacaacacaggagacagatggatttcaagtgaaacgcccaggtgacctgagtgtgaggtgtacgctgttgctaatgctcgactaccagcctccccagttcaagctagatccgcggctcgcgcggctcctgggtctccatacccagtctaggagtgccattgtccaggctttatggcagtatgtgaaaacaaacagactccaggactctcacgataaggagtacatcaatggggacaagtacttccaacagatttttgattgtccacgtctgaagttttcagagattccccagagattgaccgcccttttattaccccccgaccccatagtcattaaccacgtcatcagcgtcgacccctctgatcagaagaaaaccgcttgctatgacatcgatgtagaggtagaggagcccctcaagggccaaatgagctctttcctgttatcaacggcaaatcagcaggagatcagtgctctggattcaaaaatacacgagaccattgagagcatcaaccagttgaaaatccagcgtgattttatgctgtcctttagtagggaccccaagggatatgtacaggatttgctgcggtcccagtcaagggacttgaaagtaatgaccgacgtggcagggaaccctgaggaagaaaggcgcgccgagttttatcaccagccatggagtcaagaggcagtgtcccgctacttctattgcaaaatccagcagaggagacaggaactcgaacagtccctggtggtgagaaacacctag

SEQ ID NO: 136797 - DNA, 420 bp, synthetic construct
  misc_feature 1..420: note = Description of Artificial Sequence: Synthetic coding sequence
  source 1..420: mol_type = other DNA
atgactccagggcttcagcacccaccaacagtggtgcaacggccaggtatgccatccggcgcacggatgcctcatcagggggcccctatgggaccacccggttctccatatatgggcagccctgctgtcagaccggggctggctccggccggcatggaaccggcccgcaagcgcgccgcacctccaccgggacagtcgcaggctcagtctcagggacagccagtccccactgcaccggccaggtcccggagtgccaaacgcagaaagatggctgacaagatcctgccacaacgaatcagggagctagtcccagagagtcaagcttatatggacttactagcattcgaacgaaaattggatcagactattatgaggaagagggtagatatacaggaagccctgaagagaccgatgaaatag

SEQ ID NO: 136798 - DNA, 3081 bp, synthetic construct
  misc_feature 1..3081: note = Description of Artificial Sequence: Synthetic coding sequence
  source 1..3081: mol_type = other DNA
atgaacctgttcaaccttgatagatttcggttcgaaaaacgcaataagattgaagaggcccctgaggccacgcctcagcctagccaaccaggcccttcttcccctatttccctgtccgccgaggaggagaatgccgaaggcgaggtctctcgtgctaatactccagacagcgatataaccgagaagaccgaagacagctcggtgcccgaaactcccgataacgagaggaaagcatctatcagctactttaagaaccaaagagggatacagtatatcgatctgagtagcgatagtgaggacgtggtgagtcccaattgctcaaatacagtgcaagaaaagacttttaataaagacactgtgatcatagtatccgaaccctcagaggatgaagagtcgcagggcctccccactatggctcgtcggaatgatgacataagcgagctcgaggacctttcggagctcgaggaccttaaggatgcaaaactccagactcttaaagagttgtttccccagcgttctgacaacgacctgctgaaactcattgagagcacatcaacaatggacggagccatagccgcagccctgctgatgttcggggatgccggggggggccctaggaagcgcaagctttcttcttctagtgagccatacgaggaagatgagttcaacgatgaccagagcatcaagaagacaagactggatcatggggaggagtcaaatgagtccgccgaaagcagcagtaattgggaaaagcaggagtccattgtcctgaagcttcaaaaggagtttccaaactttgataagcaggaactcagggaggtgctcaaggaacatgaatggatgtataccgaggccctcgagtcccttaaggtttttgctgaggatcaggacatgcagtacgtgtcccaaagcgaggtgccgaatggcaaagaagtaagctcaagatcgcagaactatcccaaaaacgccactaaaactaaactcaaacagaaatttagtatgaaggctcagaacggctttaacaaaaaacggaaaaagaacgttttcaacccaaaaagggtggtcgaagattccgagtatgactccggttctgacgtgggatcaagtctggacgaagactactctagcggagaggaggtcatggaggatggttataaagggaagatactgcatttccttcaggatgccagtatcggagaactgacgttgataccgcagtgttctcagaagaaggcccagaaaataaccgagctccgccccttcaactcctgggaggcgctgttcactaagatgtccaagacaaatgggctgtctgaggatctaatctggcattgtaaaacactcatacaggaaagagacgtcgtaatacggctgatgaacaaatgcgaggatataagcaacaaactcacgaaacaggtcactatgctcacagggaacggcggcggatggaatatagagcagccttcgatactaaaccagagcctctcacttaagccctatcagaaggtagggctaaactggctggccctcgtccataaacacggcctaaatgggattctggctgacgagatgggtcttggcaaaacaatccaagccatcgccttcttggcttatttgtatcaggaaggcaataatggaccccatttgatcgttgtgcctgcaagcactattgacaattggctgcgggaagtgaacctgtggtgtccaacacttaaggtgctctgttattacggatctcaggaggagaggaagcaaatccgcttcaatatccatagccggtatgaagattacaatgtgattgtcacgacttataattgcgccataagcagtagcgatgaccgcagcctgtttcgcaggctaaagcttaattacgccatatttgacgaagggcacatgctgaagaatatggggagcatacggtaccagcatctgatgacaatcaacgcgaataaccggctacttctaacgggaaccccagtccagaacaatcttttagaactgatgtccttacttaacttcgttatgccacacatgtttagctccagtacatctgaaattcgaagaatgttcagttctaagaccaaatccgccgatgagcaaagcatttacgaaaaagagcggattgcccacgctaagcagataatcaagccatttatcttacgacgagttaaggaggaagtgttaaaacagctgccgcccaagaaggataggatcgagttatgcgctatgagcgagaaacaggaacagttgtatttaggcctgttcaatcgactgaagaagtcaatcaacaatcttgagaagaacacggagatgtgtaacgtgatgatgcaattgagaaagatggcgaatcacccactgcttcaccggcagtactacactgctgagaaactcaaggagatgtcccaactgatgctgaaggagcctacccattgcgaggctaatccggacctcatcttcgaagatatggaggtcatgacagattttgagctccacgttttatgcaaacagtacaggcacataaacaacttccagcttgatatggacctgatattagacagcggcaagtttcgggtgttgggatgtatcctgtctgaactcaagcagaagggcgacagggtggtgctgttctctcagtttactatgatgcttgatattctggaggtgctgctgaagcaccaccaacaccgatacttacgtcttgacggtaagacgcagattagtgaacgaatccatctgatagatgaatttaacacggacatggatatttttgtgttcctcctttccaccaaagctggcggactgggcattaacctgacctctgctaacgtggtcatattgcacgacattgactgcaacccatacaatgacaagcaggccgaagaccgttgccatcgggtgggccagacaaaggaagtgctggtgattaagctcataagtcaggggacaattgaggagagtatgctgaagattaaccaacagaagctgaagcttgagcaggacatgaccaccgtagacgaaggggatgaaggctctatgcccgccgacatcgctactttgctcaagacatcgatgggcctctag

SEQ ID NO: 136799 - DNA, 3087 bp, synthetic construct
  misc_feature 1..3087: note = Description of Artificial Sequence: Synthetic coding sequence
  source 1..3087: mol_type = other DNA
atgaacctgtttaacttagataggttcagatttgaaaagagaaacaagatcgaggaggcaccagaggccacaccacagccctctcagcccggcccttcctctcccatcagtttgtcagccgaggaagagaacgcagaaggggaggtgagcagggctaatacacccgactctgatatcactgagaagaccgaggattcaagtgtaccagagacccccgacaacgaacggaaagcgtcaatctcatacttcaagaaccagcgggggattcagtatattgacttaagcagcgatagcgaggatgttgtgagtcccaactgctccaacactgtgcaggagaagacgttcaacaaagacacagtgatcatcgtatctgaaccgtcagaggatgaggaatctcagggtttgcccacaatggctcgccgtaacgacgacatctccgagttagaggatttatctgaactcgaagacttaaaggatgcaaaactccaaaccctcaaggaactgttcccccagaggtctgacaacgacctcttaaagctgattgagtcgacctctacgatggacggggctattgctgccgccttactaatgttcggagatgctggcggaggacctagaaaacggaagctgtccagcagttcagaaccgtatgaggaggacgagttcaacgatgaccagtctattaagaagacccggctggatcacggagaggagtcaaacgaatccgctgagagcagcagcaattgggagaagcaggaatcaatcgtacttaaactccaaaaggaattcccaaatttcgataaacaggagctaagagaggttcttaaagaacatgaatggatgtacacagaggccctggaaagtctcaaggtctttgccgaggaccaagatatgcagtacgtgtcccaaagcgaggtccccaacgggaaggaggtaagttcccggtcccagaactaccccaaaaacgcaacaaaaaccaagctgaaacaaaaatttagcatgaaagcccagaacggttttaacaaaaagcgcaagaaaaacgtttttaaccctaaaagagtcgttgaggattccgagtacgattctgggtcagacgtgggctcaagtctggatgaggactactctagcggtgaagaagtcatggaagacggttacaagggcaagattctgcacttcctgcaggatgcctccattggagagttgactttgatcccccaatgttcccagaagaaggctcagaagatcaccgagcttcgacctttcaattcctgggaggctctgtttacgaagatgagtaaaaccaacggcttaagtgaggatttgatctggcattgtaaaacactgatacaggagagggatgttgttatcagactcatgaataagtgcgaagatatctctaataaactgacaaagcaggttaccatgcttaccggtaacggcggcgggtggaatatagaacaaccaagcatcttgaaccagtccttgtccctgaagccctaccagaaagtcgggcttaactggttggccctcgtacacaagcacggcttgaatgggatccttgctgatgagatgggactgggtaaaactattcaggccatcgcctttctggcctacttgtaccaggagggcaacaatggcccacatctgattgtcgtccctgctagtacgattgacaactggctcagggaagtcaatctgtggtgccctaccctgaaggttctgtgttattacggcagccaggaagagcgcaagcaaatcaggttcaatatccactctcgttatgaggattataatgttatcgtaactacatacaactgtgccatctcgtcttccgacgatcgaagcctctttaggcgtctgaagctaaactacgccattttcgatgagggtcatatgctgaagaacatgggctcaatcagatatcagcatctgatgacaatcaatgctaataatcggctgctgctaacaggaactcccgtgcaaaacaacctgttagagctgatgtctttactgaacttcgtcatgcctcacatgtttagttcttccaccagcgagattaggagaatgttctcttcgaaaacaaagtctgccgacgagcaatcgatctatgagaaagaaaggattgctcacgcgaaacagattattaagccattcatccttcgtcgtgttaaagaggaagtgctcaagcagctacccccaaaaaaggatcgtattgaactgtgcgcgatgtccgaaaaacaggaacaactgtacctgggactcttcaaccgactgaagaagtccattaataatcttgttactgaaaagaataccgagatgtgtaacgttatgatgcagctacggaaaatggcaaatcaccccctgctccaccggcagtactacacagctgaaaagctgaaagagatgtcccaactgatgcttaaggagcccacccattgcgaggccaaccccgacctgatcttcgaggacatggaagttatgaccgactttgaactgcacgtgctttgtaagcagtatagacacattaacaatttccagctcgatatggatcttatactcgactcgggcaaattccgggtactcggttgtatccttagtgagctgaaacaaaaaggagaccgcgtggtgttgttcagtcagttcacaatgatgttggatatcctggaggtgctacttaaacatcaccagcatcgatatctcaggctggatggtaagactcagatttccgagcgcattcacctgatcgacgagttcaacaccgacatggacatatttgtgtttcttctctctaccaaagcaggaggcctcggtatcaatctcacaagcgccaacgtggtgatcctccacgatatcgactgtaacccgtataacgataaacaggctgaagatagatgccacagggtcggtcaaacaaaggaagtcctggtcataaaactaattagccagggcaccatagaggaatctatgctgaaaatcaatcaacagaagctcaagctggagcaggatatgaccaccgtcgatgaaggggacgaaggaagcatgccagctgacatcgctaccctacttaaaacctccatgggcttgtag

SEQ ID NO: 136800 - DNA, 3087 bp, synthetic construct
  misc_feature 1..3087: note = Description of Artificial Sequence: Synthetic coding sequence
  source 1..3087: mol_type = other DNA
atgaatctcttcaacctggatcggtttaggttcgagaaaaggaacaaaattgaggaagctcctgaggccacaccgcagccctcacaaccagggccatccagtcccatttctctgtctgccgaggaagaaaatgcggagggcgaagtcagccgcgccaacacgcccgatagtgatattactgagaagactgaagattccagcgtgccagagaccccggacaatgagcgtaaggcaagcatttcgtacttcaagaatcagcgcggcattcagtacattgatctgagtagtgatagcgaagacgtggtatcccccaattgctccaataccgtgcaagagaagaccttcaataaggacaccgtaattatcgtctccgaaccctctgaagacgaagagtctcaggggctgcctaccatggcacgccgaaatgatgatattagcgaactggaggacttatccgaactggaggatctcaaagatgccaagctgcagacactcaaagagctgtttccgcaaagaagtgacaacgacttgcttaagcttatcgaaagtaccagtactatggatggtgccatcgctgccgcactactgatgtttggggacgcaggcggcggccctagaaagcggaagctctcctcaagctccgaaccatacgaagaggatgagttcaacgatgaccagtccatcaagaagactcggctggatcatggggaggaaagcaacgaatccgcagagtcctcatccaactgggagaagcaggaatccattgtgttgaaactgcaaaaagaatttcccaatttcgataagcaggaacttcgcgaagtccttaaggagcatgagtggatgtatacagaagccctcgaaagtctgaaggtgtttgctgaagaccaggatatgcagtacgtcagtcaatcagaagtccccaatggcaaggaagtctcttcccgcagccagaattatcctaaaaacgccaccaaaacaaagttgaagcagaaattttccatgaaagcccagaacggatttaataagaagaggaagaagaatgtcttcaaccctaagcgtgttgtcgaagactctgagtatgatagcggtagcgatgtcggatctagtttagacgaggactactcctccggcgaagaagtgatggaggacgggtataagggaaagatcctgcatttcctacaggacgccagtattggagaacttaccctgattcctcagtgcagccaaaaaaaggctcaaaagataaccgagctgcgacccttcaactcctgggaagccctcttcacgaagatgagcaagaccaacggcctgtccgaggatctgatttggcattgcaaaactctcatccaggaaagggatgtggttatcagactcatgaacaaatgcgaggacatctccaataaactcaccaaacaggtcactatgctgacaggaaacggcggcggctggaacatcgaacagccctctatcctgaaccaatccctgagtctgaaaccatatcagaaagtgggcctcaactggctggcactggtccacaagcacggacttaacggcattctcgccgacgagatgggtctcggtaaaaccatccaggccatcgcattcttggcttacctttaccaggagggcaacaatggcccacatctaatagttgtgcccgcaagtaccattgacaactggctccgggaagtcaatttatggtgccctactctgaaggtgctgtgttactatgggtcccaagaagagaggaagcagattaggttcaatattcactctagatatgaagattacaacgtgattgttactacatacaactgcgctatctcatcaagcgatgacagaagtctgtttcggcgtctgaagctgaattatgcaatcttcgatgaaggacatatgctcaaaaatatgggaagcattagataccagcaccttatgaccattaacgccaataataggttactgctgacgggcaccccggtccagaataatctgctggagctcatgagcctcttgaattttgtcatgccacacatgttttccagcagcactagtgagatccgccgaatgttttccagtaagacaaaaagtgcagacgaacagtctatatatgaaaaagagcgtatcgcgcatgcgaagcagatcattaagcccttcattttgcgtagggtgaaggaggaggtactcaagcagctccctcctaagaaagacaggatcgagctatgcgctatgtctgagaaacaggagcagctgtatctgggactcttcaacagattgaaaaagtctatcaacaacctggtgacggagaagaataccgagatgtgtaacgtgatgatgcagctgaggaaaatggcaaatcatcctttgctgcatcggcagtactacacagcagagaaactgaaggagatgagccagctgatgttgaaagagcctacccattgcgaggccaaccccgatctgatatttgaagacatggaagtcatgactgatttcgagcttcatgtactgtgtaagcagtaccggcatattaacaatttccagctggatatggatctgatcttggactctggaaagttcagggtgctagggtgcatcctttccgaactcaagcagaagggggacagagtagtactattctctcagtttaccatgatgctggacatcctggaggtgctactcaagcatcaccagcaccgttatttacgtttagacggtaaaacccagatctcggaaaggatacaccttatagatgagtttaacaccgacatggacattttcgtctttttgctgtccacaaaagcggggggtctgggcatcaatctgacttccgccaatgtggtaattctgcacgatatagattgtaatccctacaacgacaagcaggccgaagatcgatgtcatcgggtagggcagaccaaagaggtgctcgtcattaaactgattagtcagggaactatagaggaaagtatgctgaagattaaccagcaaaaattgaagttggaacaagatatgaccactgtggatgagggcgacgaagggtccatgccagctgatatcgccacactgcttaaaacatccatggggctgtag

SEQ ID NO: 136801 - DNA, 957 bp, synthetic construct
  misc_feature 1..957: note = Description of Artificial Sequence: Synthetic coding sequence
  source 1..957: mol_type = other DNA
atgaatctgttcaacctagatagattccgctttgagaagcggaacaagatcgaggaggcgccggaggctacaccgcagccgagccaacccgggccgtccagtcccatctcactgagcgccgaagaagagaacgcggaaggggaagtctcacgggccaacactcctgacagcgacattacagaaaaaactgaggactctagtgtgcctgaaacccctgataatgagaggaaagcctcaatctcgtactttaagaaccagcggggcatccagtatatcgatttaagttctgacagcgaagatgtggttagtcccaactgctcgaacactgtgcaagagaaaacgtttaacaaggacactgttattattgtgagcgagcctagcgaagatgaggagtctcaaggactccccaccatggctagacgaaacgatgacatctccgaactggaggatctctccgaactggaggacctcaaagacgcaaagttgcagacactgaaggaactgttcccacagcggtccgacaatgacctcttaaaactgatcgagtccacttcaaccatggatggagcaatcgctgctgccctgctgatgtttggcgacgccggaggcgggcctcggaagagaaaactgtccagtagctcagagccctatgaggaggacgagttcaacgacgaccaatccattaagaagacacgactggatcacggggaggaaagtaacgagagtgccgagtcctccagcaactgggaaaaacaggagtccatagtcctaaaacttcagaaggagtttcctaacttcgataagcaggagttgcgggaagtcctgaaagagcacgagtggatgtacaccgaggccctggaatccctgaaagttttcgccgaagaccaggacatgcagtacgtttctcaatccgaagtgccaaatgggaaaaagaaagcccagaagaaaaagaagtag

SEQ ID NO: 136802 - DNA, 732 bp, synthetic construct
  misc_feature 1..732: note = Description of Artificial Sequence: Synthetic coding sequence
  source 1..732: mol_type = other DNA
atggctgccattgcggccagcgaagtgctggtggattctgccgaagagggaagtctggctgccgccgccgagctggctgctcaaaagcgggaacagaggctccgaaagttccgggagctacacctaatgaggaatgaagctcggaaactgaaccaccaggaagtggtggaagaagacaagcgtctcaagctgcccgcgaattgggaggcaaaaaaggcccgcctcgagtgggaactcaaggaggaggagaaaaaaaaagaatgtgcagcaagaggcgaagactacgaaaaggtgaaactgctggaaatatctgctgaggatgccgagcgttgggagcgcaagaagaagcggaagaaccccgatctgggtttttccgattacgcagccgcgcagcttaggcagtatcacaggctgaccaaacagatcaaaccggatatggagacatatgaaaggctccgcgagaagcacggcgaagagttttttcccacatccaatagcctgttgcatggtacgcacgtcccatctactgaggagatcgataggatggtgatagacctggaaaagcaaatcgaaaagcgggacaagtatagccgaaggagaccttataatgacgacgcggacattgactatattaatgagcgtaacgcaaaatttaataagaaagccgaacggttctacggaaagtacacggcggaaattaaacagaacctcgagaggggaactgcagtgtag

SEQ ID NO: 136803 - DNA, 606 bp, synthetic construct
  misc_feature 1..606: note = Description of Artificial Sequence: Synthetic coding sequence
  source 1..606: mol_type = other DNA
atggcagctatcgccgccagtgaggtgctcgtggactctgcagaagagggaagtctggctgccgcggccgagctggctgcccagaagagagagcagagattacgaaagtttcgggaattgcatctaatgagagaatgtgccgcccgcggagaagattacgagaaggtgaagctgttagagatctccgcagaagatgccgagcgatgggagcggaagaagaaaaggaaaaatcctgacttaggcttttctgactatgccgcagcccagcttagacagtaccacagactgacaaagcagattaagccagacatggaaacctacgagaggctgagggaaaaacacggagaagagttcttccctacaagtaactccctcttgcacggaacccatgtacccagcacagaagaaattgatagaatggtgatcgacctggagaaacagattgagaagagggataagtactcacgacgtaggccatataacgatgatgccgatattgactacataaacgagaggaatgcgaaattcaacaaaaaagcggagcggttctacggcaaatatacagccgaaattaaacagaatctggaacgcggcactgccgtgtag

SEQ ID NO: 136804 - DNA, 777 bp, synthetic construct
  misc_feature 1..777: note = Description of Artificial Sequence: Synthetic coding sequence
  source 1..777: mol_type = other DNA
atggatggcattatagaacaaaagtcaatgctggtgcatagcaaaatcagtgatgcaggtaagcgaaatggccttataaatacacgcaatctgatggccgaatctagggatggccttgtcagtgtgtatcccgcgcctcagtaccaatcgcacagagtcggcgcatccactgtaccagcctctctggacagctcacgttctgaacccatgcagcagcttctggatcccaacactttgcaacagagcgtagaatctaggtatcggccaaatattatcctatactcggagggcgtcttaagaagttggggggatggagttgccgcagactgttgcgaaaccactttcatcgaggaccgctctccaactaaagactctctagaatatcctgatgggaagttcattgacctgagtgcggatgacattaagatacataccctgagctatgacgtcgaggaagaggaggagttccaggaacttgaatcagactattcctctgatacagaaagtgaagataacttccttatgatgccccctcgggaccatcttgggcttagtgtgttttccatgctatgctgcttctggccactgggtattgcagctttctacttatctcatgagaccaacaaggccgttgctaagggtgaccttcaccaggccagcacatcatcccgtcgggctttgttcttagctgtgctctcgatcactatcggcaccggcgtgtacgtgggtgtcgccgttgccctgatagcttatcttagtaagaataatcatctttag

SEQ ID NO: 136805 - DNA, 717 bp, synthetic construct
  misc_feature 1..717: note = Description of Artificial Sequence: Synthetic coding sequence
  source 1..717: mol_type = other DNA
atggaaagcctgtcggagctgcaaaatcctttgcttccaaggtctcctgcgcaccttcacggaccgtatccgtaccctgaaaccccgccttcatggtcatgccaagaaaagctgtatagctatttgctggggggcgctgggcccgcaggcgcacatcagttattggacccaggaagtctccaactcgcagtcgaagcctggtacaggccctcctgcctgttgggccgcgacaaggtgaaagaacccagagccgggtcttgcgaaactagctttacagaggaccgagaaccccaggagggtccaccagagcagccgactgggccaggacaggccgcggaaaacgtcaccatccaaacagtgagttacggagtgcaggaagaactgcgcgatcaggaagatgaccaagaagaggaggagtcagacgccacatccactgaatcggaaagcgaggataacttcctcacacttcctccacgcgatcatcttggcctgaccttattctcaatgctctgctgcttttggcctcttggaatcgccgctttctatttctcccagggcacctctaaggctatttctaagggggactttaggcttgccagtacaaccagtagacgcgccctgtttctggccaccctagcaatcgccgtgggcgcgggactctatgtcgccgttgttgtggccctcgctgcctatatgtcccagaatggtcacggatag

SEQ ID NO: 136806 - DNA, 717 bp, synthetic construct
  misc_feature 1..717: note = Description of Artificial Sequence: Synthetic coding sequence
  source 1..717: mol_type = other DNA
atggaaagtctgagcgaactgcagaacccactccttcctcgttctccagcccacttacacggtccttatccctaccccgaaacccccccttcatggtcctgtcaagagaaactttatagctatctcttgggaggcgctggaccggccggggcccaccaactgctcgaccccggctcattgcaactggctgtcgaggcatggtaccgccctagttgtctgctgggacgggataaagttaaagagccccgggcaggatcttgcgaaaccagctttacggaagaccgcgaaccacaggaggggccacctgagcagccaacgggaccagggcaggccgccgagaatgtgacaatccagacggtatcctacggggttcaagaggagctacgtgatcaggaagatgaccaggaggaggaggaatcagatgcaaccagtaccgagtctgagtctgaggacaattttcttaccttaccccctcgggaccacttgggcctcactttgttcagcatgttgtgttgtttctggccgttggggattgcagcgttctactttagtcaaggaacgtcaaaggccatcagtaagggcgactttcggctcgctagcactactagcagaagagctctgttcttggccacactggccattgcagttggcgccggcctgtatgtggccgtcgtggtagctttagcggcatacatgtctcagaatggtcatggttag

SEQ ID NO: 136807 - DNA, 243 bp, synthetic construct
  misc_feature 1..243: note = Description of Artificial Sequence: Synthetic coding sequence
  source 1..243: mol_type = other DNA
atggagagcctgagtgaactgcagaaccccctattaccccgctcaccagcacatctgcacggaccctatccttaccccgagacccctccgagttggagttgtcaggagaagctatacagctatctcctcgggggcgccgggcccgccggtgcacatcaactcctagaccccggatctctgcaactagcggtggaggcttggtaccgtccatcctgtctcctcgggcgggacaaggtgaaatag

SEQ ID NO: 136808 - DNA, 2118 bp, synthetic construct
  misc_feature 1..2118: note = Description of Artificial Sequence: Synthetic coding sequence
  source 1..2118: mol_type = other DNA
atgaattatctgagaagacggttatccgatagtaactttatggccaatctgcccaatggctatatgaccgaccttcagcggccccagcccccaccacctcccccaggcgctcactctccaggcgccacacctggtcctgggacagctaccgctgaacgatccagcggcgtcgctccagcagctagccctgccgcaccatcacctggcagctccggagggggaggttttttttctagtctcagtaacgccgtcaaacagactacggctgctgccgccgcgactttttccgagcaggttggtggaggctccggtggagccggccgaggaggcgcagcttcaagagtgcttctcgtgatagacgagccacataccgactgggctaagtattttaaaggaaagaaaattcacggagaaattgatatcaaggtggagcaagctgagttttctgacctcaatctggtggctcatgccaatggaggattttccgtagatatggaggtcttgagaaatggagtgaaggtcgtgaggtcactcaaacccgactttgtgctgataagacagcatgccttctcaatggcccgaaacggagattaccggtcccttgtaattggcctacagtatgccggcatccccagcgtgaacagcctgcattcagtatacaatttctgcgacaagccttgggtatttgctcagatggtgagactccacaagaagctaggaacagaggaattcccgctcatcgatcagaccttctatccaaatcataaggaaatgctcagcagcacgacctatcctgtggttgtcaaaatggggcacgctcattccgggatgggcaaggtgaaagtggataatcaacatgacttccaggacatcgcgtccgtggtggcgctgaccaagacatatgcaactgctgagcctttcatcgatgccaagtatgatgtcagagtacagaagattggacagaattacaaggcctatatgagaacctctgtttccggaaattggaagactaacactggctctgccatgctggaacagatagctatgtctgatcgatacaaactgtgggtcgatacctgtagtgaaatctttggcgggctggatatctgcgccgtggaagcattacatggaaaggacggccgcgatcatatcattgaggtggtgggttcgtccatgccgcttatcggtgaccaccaggatgaagataagcagcttattgtcgaactcgtagtgaacaagatggcccaggccttaccacgccagcggcagagagatgcctccccagggaggggctcccatggccagacaccatcacctggtgccctgcccctaggccgacaaacttcccagcagccagcaggccccccagcacaacagaggccgccccctcagggcggcccaccccagcccgggcctggccctcagaggcagggacctcctctgcaacagaggccgccacctcagggacagcagcatctctcagggcttgggccccccgccggctcacctctgccccagaggttaccgtcgcctacaagtgcaccccagcagccagctagtcaggcagcacctcctactcaagggcagggtcggcagagccgtcccgtcgccggcgggcctggcgcaccgcctgctgcccgacccccagccagcccctcgccccagcggcaagctggaccaccacaggctacccgccagacctccgtgagcggccctgccccccctaaggcctcaggcgcacctcctggcggccagcagcggcaggggcctccacagaagcctcccggacctgctggtcccactcgtcaggcatcacaagccgggccagttccgcgtacggggccaccaaccacgcagcagcccaggcctagcggccccggacccgccggacggccaaagccgcagctcgcacaaaaaccctctcaggatgtacctccccctgcaaccgccgcggcggggggaccccctcatcctcagttgaacaaaagtcaatccctgaccaatgcctttaatttgcccgagcctgccccccccaggccttccctgagccaggacgaagtgaaggcagaaaccatacgctccctaagaaagagtttcgcaagcctcttctcagattag

SEQ ID NO: 136809 - DNA, 2010 bp, synthetic construct
  misc_feature 1..2010: note = Description of Artificial Sequence: Synthetic coding sequence
  source 1..2010: mol_type = other DNA
atgaattatctgaggaggcggttgagcgactcaaattttatggccaatttgccgaacggatatatgaccgacctgcagagacctcagcctcccccacccccgcctggagcccatagccctggcgcaacacccggccctgggacagctacggctgaaagatctagcggggtcgcccctgctgcttccccagctgccccgagcccgggatcttccggcgggggaggcttcttcagctccctgagcaacgcagtcaagcagacaactgccgccgccgccgccacctttagcgaacaggtagggggaggatctggaggggccggccgaggaggcgccgcgtctcgggtgctgctggtgatcgacgagccccacacagactgggctaagtacttcaaaggtaaaaagattcatggcgaaatcgatatcaaggttgaacaagcagagttcagcgacttgaacctcgtggctcacgccaacggtgggttttctgttgatatggaggtactcaggaacggtgtaaaggtggtccggagcttgaaacctgattttgtcctcattcgacagcatgctttctccatggccagaaacggagactaccggtctttagtgatagggctccagtatgccgggattccttcggttaactctctgcatagcgtatacaacttttgcgataagccttgggtgtttgctcagatggtgcggttacataaaaagctggggacggaggaatttccgttaattgaccagaccttttatccaaatcataaagagatgctctccagtaccacctaccccgtggtcgtaaagatggggcacgcacatagcgggatggggaaggttaaagtcgataatcaacacgatttccaggacatcgcttctgtggtcgccctaacaaaaacctacgcaactgctgagcctttcatcgacgccaaatatgacgtgagggtgcagaaaatcggacagaattacaaagcttatatgcggactagcgtcagcggcaactggaagacgaacacgggatctgctatgctggaacaaattgcaatgagcgaccggtataaactgtgggtcgacacatgttctgagatttttggtggcttggacatttgtgccgttgaagccttgcatgggaaagatggcagagatcatatcatcgaagtagtgggtagttctatgccattgatcggcgatcaccaggacgaggataagcagctgatagtggagttagtggtgaataagatggcccaggcccttccccgccagcgccagagagacgcctcgccaggtagggggtcacacggtcaaaccccctctcccggggctcttccccttggccggcagacttctcagcagcccgcgggcccacctgcccaacagcggccaccgcctcagggtggacctccccagccagggcccggtcctcaacggcagggacccccgctccaacaacgaccccccccacaaggtcagcagcacctgtccgggctcggcccgcctgcgggttcgccattgcctcaacggctcccgagccccacttcggccccccaacagccagcttcccaggcagcacccccaacccaaggacaggggagacaatctcggcccgttgccggcggccctggcgcgcccccggctgcccgcccaccagcatccccttcgccccagcgccaggccgggcctccgcaggccacccggcagacttccgtttcaggcccagcccctccaaaagcatctggagctccacctggcggccagcagcgccagggaccccctcagaagccccccggtcctgccggacctaccaggcaggcatcacaggccggccctgtgccgcgcaccggccctccaacaactcagcagccacgcccctccgggccaggacccgctggccgcccaaaaccccagctggcccagaaaccaagccaagacgtgcccccacccgccacagctgctgccggaggtcccccacacccacagctgaaggcttcacctgcacaggcccagccctag

SEQ ID NO: 136810 - DNA, 1743 bp, synthetic construct
  misc_feature 1..1743: note = Description of Artificial Sequence: Synthetic coding sequence
  source 1..1743: mol_type = other DNA
atgaacttccttaggcgtagattgtccgattcctcgtttatggcaaatctgcctaacggctacatgacagatctccaacggccagatagttccacgtccagtccggctagtcctgccatggaacggaggcatccgcaacctctggcggccagttttagtagccccgggagtagcctgttttcatccctgtctagcgccatgaaacaggccccgcaggcgacatccggtctgatggagccgcccgggccaagcactcctattgtccaaagaccaaggattctgttagtgatcgacgatgcgcatacagactggagtaagtattttcacggcaagaaagtgaatggtgagatagagattcgtgtggagcaggctgaatttagcgaactaaatttagctgcatacgtgactgggggatgcatggtggatatgcaggtggtccggaatggtaccaaagtggtgagcaggagtttcaagccagatttcatattagtgcggcagcacgcctactcaatggccctgggcgaggattatagaagcctggtgatcggcttgcagtacgggggcttgcccgcagtaaactcactctatagtgtgtacaacttctgtagtaaaccatgggtgttttcccaattaattaaaatcttccacagcctagggccagagaaattccccctcgtcgagcagacctttttcccgaatcataagcccatggttaccgccccccacttccccgtcgtggtaaaactgggacacgctcatgccgggatgggtaagatcaaggtcgagaaccagctcgattttcaggacatcacatctgtggtcgcaatggctaaaacatatgcaactactgaagccttcatcgactcaaagtatgatattcgcatccaaaaaatcgggagcaattataaagcgtacatgaggacaagcatctctggaaattggaaggcaaataccggttctgccatgctggaacaagtagccatgacagaacgctatcgcctgtgggttgattcctgtagtgagatgttcggggggctggacatctgcgctgttaaggccgtgcacagtaaagatggtagggattacatcatcgaggttatggattcatcgatgccactgattggtgagcacgtggaagaggacaggcagctaatggccgacctggtggtgtctaagatgagccagctgccaatgcccggcggcactgcaccatcgcctcttcgaccctgggcaccccagataaagagcgctaaaagccccggacaagcccagctggggccccagctgggccaacctcaaccaagaccccctccacagggaggccctaggcaggcccagtctccgcagccacagaggagcgggtcaccaagccagcagagactgtccccccaggggcagcagcctctcagccctcagtctggctcgccacagcagcaacggagtcccggttccccacaacttagcagagcatcgagtggatctagtcccaatcaagcctccaaacccggtgcaaccctggcaagtcaacctaggccccccgtccaaggaagaagcacaagccagcagggagaggagagcaagaaacccgccccccctcatccccatctaaataagagccagagtctgacaaactctttgtctacgagtgacacctctcagcgagggacaccttctgaggacgaggcaaaggcagagacgattcggaatttgcgtaagagctttgcatcactattcagtgattag

SEQ ID NO: 136811 - DNA, 1743 bp, synthetic construct
  misc_feature 1..1743: note = Description of Artificial Sequence: Synthetic coding sequence
  source 1..1743: mol_type = other DNA
atgaatttccttcgcagacgtctgagtgactcaagcttcatggctaatctgccaaacgggtacatgacagatctgcagcgccctgattccagcacgagctcgcccgcttcacccgccatggagaggaggcacccccagccacttgccgctagtttcagcagtcctggcagttctctgttctctagtctttcctctgccatgaagcaggcaccccaggccacctcaggtctgatggagcccccagggcccagtactcccatcgtgcagagaccacgcattctgctggtcatagatgacgctcataccgactggagtaaatattttcatggcaaaaaagtgaatggcgaaatagagattcgggtcgagcaggcagagttcagtgagctgaatttggcggcttatgtgacaggaggatgtatggtcgatatgcaggtggtgagaaacggaacaaaagtggtgtctcgctcttttaagccagattttatccttgtcaggcagcacgcctactccatggcattaggggaggattatcggtctctggtcatcggactacaatacggtggactccctgccgtgaattctttgtacagtgtatataacttttgtagcaagccgtgggtcttcagccagttgataaagatcttccattctctgggaccggaaaaattccccctggtcgagcagactttctttcccaaccacaaaccaatggtcactgcgccccatttccctgtcgtcgtgaagctcggtcacgctcatgctggcatgggaaagattaaggtcgaaaatcaattggatttccaagatattaccagcgtagtcgctatggcaaagacatatgccacaacggaagcctttattgactctaaatatgatattaggattcagaagattgggtctaactataaggcttacatgcggaccagtatctccggcaactggaaggcaaacaccgggtcggcaatgttggagcaggttgcaatgacagaacggtataggctctgggtagacagctgtagtgagatgtttggaggactagatatttgcgccgtgaaggccgtacactccaaggacgggcgggactacattattgaagtcatggactcctcaatgcccctcatcggcgagcacgtggaggaggaccgccagctgatggcggatctggtagtaagcaaaatgtcccaacttcccatgcccggcggaaccgccccctcaccattacgaccctgggcgcctcagattaagtctgcgaagtcccccggccaggcacagctcggaccacagctggggcaacctcagccacggcccccacctcagggaggacctaggcaggcccaaagcccacagccccaacgctcgggaagcccgtcccaacagcggctaagtccccaggggcagcagcctctttccccacaatccggaagtccccagcaacagcgcagccccggatctccccagctcagccgagcttctagcggaagctcccccaaccaggcctctaagcccggagctacattggccagtcaaccgaggccccccgtgcaggggagatccacctctcaacagggggaggaatctaaaaagcccgctccaccacatccacatttgaacaagagtcaaagtctgacaaactccctcagtactagcgacacctcgcagcggggcacaccctccgaggacgaggcaaaggccgagacaatacggaatctcagaaaatcattcgcgtcactcttcagcgactag

SEQ ID NO: 136812 - DNA, 1335 bp, synthetic construct
  misc_feature 1..1335: note = Description of Artificial Sequence: Synthetic coding sequence
  source 1..1335: mol_type = other DNA
atgaattttcttcgaagacgcctctccgatagttctttcatggctaatctccctaatgggtacatgactgacctgcagcggccagattctagtacttcgagcccagcaagcccagccatggagaggaggcatccacaacccctcgcagccagcttcagctcccccgggagctcactgttttcgtccctgagctccgccatgaagcaggcaccccaagccacatccggactaatggagcctccgggcccatccacccccattgttcaaagaccccgcatcctgctcgtgatcgatgatgcacacacagactggagcaagtattttcatggaaagaaggtgaacggggagattgagattagagtggagcaggctgaattttccgaactcaatctggccgcatatgtgacagggggctgcatggttgatatgcaggtcgttagaaacggcacaaaagtggtctcccgttccttcaaaccagattttatcctagtgcgccaacatgcttactctatggccctgggtgaggactatagatccctcgttattggactgcagtatggaggactccccgcagtgaacagcttatattccgtctataacttttgttctaagccatgggtgttttctcagctgattaagattttccacagtctgggccccgaaaaatttcccctcgttgaacaaacctttttccccaatcacaaaccaatggtcacggcacctcacttccctgtggttgtcaaattaggacacgcccacgctggcatgggcaagataaaagtggaaaaccaacttgacttccaggacatcacaagtgttgttgccatggctaaaacttacgcgaccactgaagccttcattgattctaaatatgacattaggattcagaagattggctccaactacaaggcttacatgcgtaccagtatttccgggaattggaaggccaataccggcagcgctatgttagagcaggtggcaatgactgagcggtatagattgtgggtcgattcgtgtagtgaaatgttcggcggactggacatttgcgccgtgaaagctgttcactctaaggacgggagagactatattattgaggtgatggatagctccatgcccctgatcggtgagcacgtagaagaagatcgccagctgatggcggaccttgtggtgtctaaaatgagccagttgccaatgccagggggcacagccccgtcccccctacggccgtgggcaccccaaatcaagtcggccaagtcacccgggcaggcacagctcgggccccagttggggcagcctcagcctcggcctcccccccaagtttcattcagcccttag

SEQ ID NO: 136813 - DNA, 342 bp, synthetic construct
  misc_feature 1..342: note = Description of Artificial Sequence: Synthetic coding sequence
  source 1..342: mol_type = other DNA
atgaactttctgagacggcgactatccgactcttcttttatggcaaatctgcccaacggctatatgaccgatttacagcggcctgatagtagtacctcatcaccggcctctccggcgatggaaaggagacaccctcagcctctggcggcctccttctcttccccagggtccagtttgttctcaagcctgtcttccgcgatgaaacaggccccacaggctactagtggcctgatggaaccccctggacctagcacccctatagtgcaacgccctcggatcctgctggtgattgatgatgcacacaccgactggagtaaatattttcacggaaagaaggtgtag

SEQ ID NO: 136814 - DNA, 372 bp, synthetic construct
  misc_feature 1..372: note = Description of Artificial Sequence: Synthetic coding sequence
  source 1..372: mol_type = other DNA
atgaacttcctccggaggcggctgtccgacagttcattcatggcaaacctacctaacgggtatatgactgacctgcagcgaccggactcctctacttcttcacccgcttcgcccgcaatggagaggagacacccccagcccctggcggcttccttttccagcccaggatccagcctcttcagctcactcagctccgcgatgaaacaggctccccaagccacctcgggcctgatggagccacctggccccagcacaccaatcgtacagcggccaagaatcctactcgtgattgacgacgcccacaccgactggtccaagtacttccatgggaaaaaggtcaatggggaaatcgaaattagagtggaacagtag

SEQ ID NO: 136815 - DNA, 561 bp, synthetic construct
  misc_feature 1..561: note = Description of Artificial Sequence: Synthetic coding sequence
  source 1..561: mol_type = other DNA
atggattcgagcatgccactgatcggggagcatgtggaagaggacaggcaattaatggctgacctggtggtgagcaagatgagccagctgcccatgccgggtggcacggcccctagtccactgcgcccatgggccccacaaatcaaaagcgccaaatcccccggccaagcccagctgggcccacagctggggcaaccccaacctcgccccccaccccaaggcgggcccagacaggcacagtctccccagcaacagaggtcccctggatctcctcagttaagccgggcctccagcgggtcgtcgccaaaccaggcctctaagccaggcgcaacactggccagccaaccccgcccacccgtacaggggcgctcaacctcgcagcagggcgaggaatcgaagaagccagcacctccccacccccacctgaataagtcccagagtctaaccaactccctcagtacctctgacacaagccagcgcgggactccaagcgaagatgaggccaaagccgagacaatccgtaacctccggaaaagtttcgctagtttattttctgattag

SEQ ID NO: 136816 - DNA, 1212 bp, synthetic construct
  misc_feature 1..1212: note = Description of Artificial Sequence: Synthetic coding sequence
  source 1..1212: mol_type = other DNA
atgagtcacagaaagttttccgctccacgacatgggagtcttggtttcttgcctcggaaaagaagttcacggcaccgaggaaaagtaaagtctttccctaaggacgacccttctaaacccgtgcatctaactgcgttcctcggatacaaggccggcatgacccacattgttagggaagttgaccggcccggcagcaaggttaataaaaaagaagtcgtcgaagccgttactatcgtggagactccacctatggtggttgtgggaattgtcggatatgtggagacccctcgtggcttgcggacgttcaagacagtctttgctgagcacatcagcgacgagtgcaaaaggcggttctataagaattggcacaagtctaaaaaaaaagccttcacaaagtactgcaaaaaatggcaggatgaggacggtaagaaacagctcgagaaggatttcagttcaatgaaaaagtattgtcaagtcatcagagttatcgcccatactcagatgcgcttacttcctctgaggcagaagaaggctcacttaatggagattcaggttaacggcggcacagttgccgaaaaactggattgggctcgcgagagattggaacagcaggtgccagtgaaccaggtgttcgggcaagatgagatgatcgatgtcatcggagtgactaagggcaaagggtataaaggggtcacgtcccggtggcatacaaagaaactcccccgaaagacgcatcgggggcttcggaaggtcgcttgcatcggggcttggcaccctgctagagtagccttttctgtagcgagggcaggccagaaagggtatcaccaccggaccgagataaataaaaagatctacaagataggccaggggtacttaatcaaggacggtaagctgatcaagaacaatgcctctactgactatgatcttagcgataagagcattaaccccctaggcgggtttgttcactatggggaagttactaacgacttcgtcatgctcaagggctgtgtggttggtaccaagaaacgtgtgcttactctgcgcaagagtctcctagttcagactaagcggagggctctagagaagatcgacctaaaatttatcgacacaactagcaaatttggtcatggccgcttccaaaccatggaagagaaaaaagcgttcatgggcccactgaagaaagaccgtatagcaaaggaagagggcgcatag

SEQ ID NO: 136817 - DNA, 576 bp, synthetic construct
  misc_feature 1..576: note = Description of Artificial Sequence: Synthetic coding sequence
  source 1..576: mol_type = other DNA
atggagggcggtgcctacggtgctggaaaggccggtggagctttcgatccttacactctcgtgcggcagccgcacaccattctaagggtggtaagctggctgttctctatagtggtcttcgggtcaattgtgaacgaagggtacctgaactctgcaagcgaaggagaggaattttgtatttataaccgtaatccaaatgcttgctcctacggagttgcagtcggagtgctggcattcttgacatgtctgttatacctggcgctcgacgtctattttcctcagatcagcagcgtgaaagatcgcaaaaaggctgtgctgagtgatattggagtttctgccttctgggcgttcctgtggtttgtggggttctgttaccttgcaaaccaatggcaggtctcaaagccgaaggacaatcccctcaacgaagggaccgatgcagcccgggcagcgatcgctttctcttttttctcaatctttacctggtcccttaccgcggctttggctgtacggcggtttaaggatctctcattccaggaagaatactccactctcttccccgcttccgcacaaccatag

SEQ ID NO: 136818 - DNA, 702 bp, synthetic construct
  misc_feature 1..702: note = Description of Artificial Sequence: Synthetic coding sequence
  source 1..702: mol_type = other DNA
atggagggaggggcttatggagctggcaaggccgggggcgccttcgatccctacacgctcgttcgtcagccccacactatcctaagggtcgtgtcttggttgttttccatagtggtctttgggtcaatagtgaatgaaggctatctgaattcagcttcagaaggtgaggagttttgtatatataaccggaacccaaacgcctgcagttacggcgtggccgtcggagtcctcgccttcttgacctgtctactttatctcgccctggatgtgtacttcccacagatttcttctgtgaaggaccgcaagaaagcagtgctgtctgacatcggtgttagtgcgttctgggccttcctgtggtttgtggggttctgctacctcgctaaccagtggcaggttagcaagccaaaagataatccgcttaacgagggtaccgacgccgctagggcagcaattgccttttcttttttcagcatcttcacttgggctgggcaagcggtgctcgcctttcagcgataccaaataggggcagattctgccttgttcagtcaggactatatggacccttcccaggacagttcgatgccatatgccccatatgtggagccaactgggcctgacccggccggcatggggggaacctaccagcaacccgctaacacctttgacactgagccgcagggttatcagagccaaggatattag

SEQ ID NO: 136819 - DNA, 579 bp, synthetic construct
  misc_feature 1..579: note = Description of Artificial Sequence: Synthetic coding sequence
  source 1..579: mol_type = other DNA
atgctcactctcgagtttgggatcctggagttcgatcctagttggataggttcatggactcagcggtcctgggtgagttggaggtcacgccctggttgcgaactgttttccatcgtggtgttcggatcaattgtgaacgaggggtaccttaattctgcctcggagggcgaggagttctgcatctataaccgcaaccctaacgcttgtagctacggtgtggctgtaggagttctggcctttcttacatgtctgctgtatctcgcactcgacgtatactttccacaaattagcagcgtgaaagataggaaaaaggctgtcctttcagacatcggagtgagtgctttctgggctttcctttggtttgtgggcttttgctacctggccaatcaatggcaggtctctaaacccaaggacaacccccttaacgaaggaacggacgccgctagggcagccatcgctttctcattcttttctatcttcacttggagcttgactgcagccctggctgtgaggagatttaaagacctcagttttcaggaggagtattccacactcttcccagcttccgcccagccctag

SEQ ID NO: 136820 - DNA, 510 bp, synthetic construct
  misc_feature 1..510: note = Description of Artificial Sequence: Synthetic coding sequence
  source 1..510: mol_type = other DNA
atggaagggggtgcctacggcgcgggaaaagccgggggagcattcgacccatatacgctcgtccgacagccacacactattctccgggttgtgagttggctgttttcaatcgtggtgtttgggtctattgttaacgagggatacctcaactccgcaagtgagggcgaggaattttgtatatacaatcgcaacccgaacgcttgcagctatggagtagcggtgggcgtgttagcattcctgacgtgccttctatatctggctcttgacgtgtactttcctcagatctcatccgtgaaagacagaaagaaagctgttcttagcgacattggggtgtccgcattttgggcgtttctctggttcgttggcttttgctatcttgcgaaccagtggcaggtgtctaagcctaaagacaaccctcttaacgagggaacagatgcagccagagcagcaatcgcattcagcttcttcagcatttttacttggcggagcggggccacgtcacccccttag

SEQ ID NO: 136821 - DNA, 297 bp, synthetic construct
  misc_feature 1..297: note = Description of Artificial Sequence: Synthetic coding sequence
  source 1..297: mol_type = other DNA
atggcttccggagcaggtgggtcttggggccggagcccaccccagagtgctgtgcccaccccatgggttacttttcttcagcctttgagttgggccgtgccaccagctccaccccaacctgggagagtcaaggaggatctcctggaattgatgatgctccagaatgcccaaatgcaccagttgctgctgtcgcgtctagtggccggcgctctgcagcctagacccgccagcccttgccctcaggagtcttgcgctccaacgccaacccctcagtgccatagggattgcggatgttag

SEQ ID NO: 136822 - DNA, 690 bp, synthetic construct
  misc_feature 1..690: note = Description of Artificial Sequence: Synthetic coding sequence
  source 1..690: mol_type = other DNA
atggaaggcgcgagttttggggctggtagggcaggcgcggcgctagatcccgtgtccttcgccaggagaccccaaacactacttagggtagcatcatgggttttctcaatcgcggtgttcgggcccatcgtcaatgaaggttacgtgaacacagacagcggacccgaactccggtgtgttttcaacgggaacgccggcgcatgtcgcttcggcgtggccctgggccttggcgccttcctggcctgcgctgctttcctgcttctcgatgtccgctttcaacagatctcaagcgtgcgcgacagacgccgggccgtgcttttagaccttggcttctcaggactgtggagctttctctggtttgtgggcttttgtttcctgacaaatcaatggcagcgcactgctcccggacctgccactactcaagcgggtgacgccgctcgggccgccatagcttttagtttcttcagtattctgagctgggtggccctgacagtaaaagccttacagaggtttcgccttggaaccgatatgtccctgtttgcaaccgaacagttatcaaccggtgccagccaggcttacccaggatatcccgtcggaagtggtgtagaaggcacagaaacctatcagagccctcccttcacagaaactctggacactagccccaagggctaccaagtgcctgcctattag

SEQ ID NO: 136823 - DNA, 438 bp, synthetic construct
  misc_feature 1..438: note = Description of Artificial Sequence: Synthetic coding sequence
  source 1..438: mol_type = other DNA
atggagggcgcttccttcggcgctggtcgcgcaggcgcggcactggacccagtgagtttcgcacgacggcctcaaacgctccttcgggttgcaagttgggtattctccattgccgtattcggcccaattgtcaatgagggatacgtgaacacagatagcggcccagaactccgatgcgtgttcaatggcaacgccggagcgtgtcgctttggggtagctctcggcctcggcgccttccttgcctgcgcagcgtttctgctcctcgatgtcagattccagcaatccggcggccgagggaaaaccccaccaagccctcaggattggggttcctggccactgtttccttcccacgttccagtggggtccgattgtctcgtgtcggtgatggtcgtcagaccagttagatcacatagccctctaagcttaacaggatgctag

SEQ ID NO: 136824 - DNA, 705 bp, synthetic construct
  misc_feature 1..705: note = Description of Artificial Sequence: Synthetic coding sequence
  source 1..705: mol_type = other DNA
atgcatattccaaagagccttcaggaactggcaaattctgaagctgtacaattcctacgaagacccaagaccatcacaagggtcttcgaaggtgtgttcagcctcatagtgttctcaagtttactcaccgacgggtatcaaaacaaaatggagtcccctcaactgcactgcattctgaactcaaattctgttgcgtgctcttttgcggtgggggccggttttcttgcctttctctcctgcttggcatttttagttctagatactcaggaaactcggatcgctggaacccgattcaaaaccgcctttcagctgttggatttcatcctggccgtgctgtgggctgtggtctggtttatgggcttttgcttcctggcaaaccagtggcagcacagcccacctaaggaatttctccttggatcaagtagcgcccaggctgcaatagctttcacctttttctctattctagtttggatctttcaagcatacttggcgttccaagacctgcggaacgacgcacccgtaccatacaagcgctttctggatgaggggggaatggtgctgaccacactccccttgccatctgctaactcccctgttaacatgcccactaccgggcccaactccctgagctatgctagctccgccctctcgccatgtcttactgcgcccaaatccccaagactcgccatgatgccagataactag

SEQ ID NO: 136825 - DNA, 4722 bp, synthetic construct
  misc_feature 1..4722: note = Description of Artificial Sequence: Synthetic coding sequence
  source 1..4722: mol_type = other DNA
atggcattttcaaaaggcttcagaatctatcataaactggatcctccaccctttagcctcatcgtggaaactcggcataaagaggaatgtctgatgtttgaaagcggcgcagtcgctgttctgagttctgcagaaaaggaggccattaagggcacctactccaaggtcctggatgcttacggactacttggggttttaagacttaacctcggagacacaatgctccactatctggtcctggtgaccgggtgcatgtcagtgggaaagattcaggagtcagaggtatttagagtgacctccaccgagtttatttcgctccgcatcgattcttccgatgaagacaggatctccgaggtacgcaaggttttgaattctgggaacttttactttgcctggtctgcaagtggcatctcactggaccttagccttaacgcacacaggagtatgcaggagcaaaccaccgacaatcgcttcttctggaaccaaagcctgcacctccacctgaaacactatggagtaaactgcgatgattggctcctaaggctcatgtgcggcggtgtggagataagaaccatatacgctgctcacaaacaagctaaagcatgcttgatctctaggctatcttgcgaacgtgccggcactcgcttcaatgtaagaggcaccaacgacgatggtcacgtggctaacttcgttgagacagaacaggtcgtctacttggatgatagcgtgtcttctttcattcagattcgcggcagcgtcccactgttttgggagcagcccggccttcaggtgggctcccatagggttagaatgtcgaggggattcgaggcgaatgctcccgccttcgatcggcatttcagaacccttaaaaacctgtacggcaaacaaatcatcgtcaacctcttaggcagtaaagagggcgagcacatgttaagcaaagccttccagagccatctgaaagcaagcgaacatgcagcagacattcaaatggtgaacttcgactaccatcagatggtaaagggtggaaaggctgagaagttacatagcgttctgaagccccaggtccagaaatttctggattatggatttttctatttcaacggatctgaagttcagagatgtcagagcggaaccgtgagaacaaactgcctcgattgcctggaccgcacaaattcggtgcaagccttcttgggccttgaaatgctcgccaagcagctggaggctctcggactggccgaaaaaccacaactggttactcgatttcaggaggtgttcaggtccatgtggtccgttaacggagactcgattagtaaaatatacgccggcacaggagcactagaggggaaagccaagctgaaggatggggcccgtagtgtgactcgaactattcaaaacaatttcttcgatagcagcaaacaagaggctatcgacgtcctgctgctgggcaacaccttgaacagtgacctggctgataaggcacgagcgctgctcaccacaggttccctgagagtgtccgaacagacactccaatccgcatccagtaaggtccttaagtctatgtgcgagaacttctacaagtattcaaagcccaagaagatccgtgtttgcgtcgggacatggaacgtgaacgggggcaaacagtttagatctattgcgttcaaaaatcaaactctcactgattggcttctggacgcacctaaactcgcaggcattcaggaatttcaagataaacggtccaaaccaactgatatctttgccatcggtttcgaagagatggtggagctcaacgcaggtaatatcgtctcagcctccacaaccaatcagaaactctgggctgtcgaactgcagaagacgatcagccgagataataagtacgtgctactagcaagcgaacaactggtaggcgtatgcctgtttgtgttcatcagaccccaacacgccccatttattagggacgttgccgtcgacacagtgaaaaccggaatgggcggtgccaccggaaataagggagctgtggcgatcaggatgctcttccacacgacctcactttgttttgtgtgtagtcactttgccgcgggccagagtcaggtaaaggagcggaatgaagatttcatcgagatcgcgcgcaagctctcctttccaatgggacgcatgttgttcagccacgattacgtgttttggtgcggagatttcaattaccgtattgatctgcccaacgaggaggtgaaagagcttattcgtcaacagaattgggactccctcatcgcgggcgatcagctgatcaatcagaaaaatgctggacaggtgtttaggggctttctcgaaggtaaggtgacatttgctcccacatacaagtatgatctgtttagcgacgactacgacacctccgagaagtgccgaacccccgcctggaccgatcgcgtgctgtggagacgccggaaatggccctttgatcggtcagctgaagacctcgacttgctaaacgcctccttccaagacgagagcaaaattctgtatacttggacacccgggactctccttcattatggtagagccgagctgaagacatccgaccatcggccagtcgtcgccttaatcgacatagacatcttcgaggttgaagctgaggagcgtcagaatatttacaaagaggtgattgctgttcagggcccaccagatggtactgttctcgtgtccatcaagagttccctcccagagaataatttctttgacgacgccttgatcgacgaactgctgcaacagttcgcctccttcggagaagtgatcttgatcaggttcgtcgaagataagatgtgggtgaccttcctggagggttctagcgccctcaacgttttgtctctgaatggcaaggagctgttgaaccgaacgattacgatcgccctcaagagccccgactggatcaagaaccttgaggaagagatgagcttggaaaaaatcagcattgcactgccctcttcaacatcatcaaccctcctaggagaggatgcggaagtggctgccgattttgacatggaaggggatgttgacgactacagtgctgaggtggaagagttgctccctcagcacctgcagccctccagttctagtgggctggggactagtcctagtagttccccacgcacttctccctgccagtctcccaccatcagcgagggacccgtgccatcacttccaatcaggccttccagggccccctcgcgcacccccgggccacctagtgcccaaagctcccctattgacgctcagccagccacacctttgccgcaaaaagacccagctcagcctctggaacctaagaggcctcctcccccgcggcccgtcgcccctcccacaaggccagcaccgccgcaacgtccaccaccaccttctggcgccagaagtcctgcccccacacgcaaagaatttggtggaatcggcgcccctcctagtcccggggtcgcacgccgcgaaatggaagcacctaagagtcccggcacaactcgaaaggataatataggcaggagtcagccgtcaccccaggccggcctggccggccccggcccggccggatactccactgcaagaccaaccattccacctcgcgctggagtgataagcgcaccacaatcacacgcccgagcctccgctggtcggcttactcctgagtcacagagcaagacctctgaaacctctaaaggaagtacattcctgccagagcctcttaaaccccaagccgcctttcctccacagtccagtttgccgcctccggctcagaggctccaagagcctcttgtacctgtggctgccccaatgccccagagcggcccacagcctaacctagagacgccaccacagcctccgcctcgctcccgctctagccattctcttccaagcgaggcttctagccagccacaggtgaaaaccaacggaatctctgacggcaaacgcgaaagcccgctgaagattgaccctttcgaagacctctcattcaacttactggcagtttccaaagctcagttgtctgtgcagacttctccagtgccaactcccgaccctaagaggctaatccaactaccgagtgcaactcaaagcaatgtcctctcttctgtgagctgtatgccaactatgcctcccatcccggccagaagtcagtctcaggaaaatatgcgttcaagtccaaacccttttatcactggcctgacgcgcactaatccattttccgaccggacggcagccccaggaaacccgtttagggcaaaatcggaagaaagtgaagctacttcttggttcagcaaagaggagcccgtgacgatcagtcctttcccctccctccaaccattaggccataataaatcaagagccagctcctccctggacggtttcaaggatagttttgatcttcagggacagtcaacccttaaaatttctaaccctaaggggtgggtgacctttgaagaggaggaggacttcggagtgaaggggaagtctaaaagcgcctgcagtgatcttctggggaaccagccaagctccttcagcgggagcaacttaaccctgaatgacgattggaacaaagggaccaatgttagcttttgcgtcctgccatccagaagaccacccccccctcccgtgcccctgcttcctccgggcacatctcctccagtcgatcctttcaccactctggcttcaaaggccagcccgacgttagatttcacagagcgatag

SEQ ID NO: 136826 - DNA, 3888 bp, synthetic construct
  misc_feature 1..3888: note = Description of Artificial Sequence: Synthetic coding sequence
  source 1..3888: mol_type = other DNA
atggcatttagcaagggatttcggatctaccataagcttgaccctcctccattttcactgatcgtagagacccgccacaaagaagaatgtctcatgttcgagtccggagctgtggctgtgctgagcagcgctgagaaagaagcgattaagggaacctactcaaaagttctagacgcctatggcctgcttggtgtgctgcggctgaatctgggagacactatgttgcattatttggtgctggtgaccggatgcatgtccgttggaaagatccaagagagcgaagttttccgagttacatctaccgagtttatttcccttagaatagactcctcggacgaagaccgtattagtgaggtgcgcaaggtcttaaattccggcaacttctattttgcatggtccgcgtccggtatatctctggacttatccctgaatgcacacagatcaatgcaggaacagaccactgataatcgctttttctggaaccagtccctccacctccatctgaagcattatggagttaattgtgacgactggctgctcagactgatgtgcggcggtgtggagatcagaacaatatacgccgcacataaacaggcaaaggcctgcctcatttctagactgagttgcgagagagctggcacacgctttaacgtccgcggcaccaacgatgacggccatgtagccaattttgtggaaaccgaacaggtggtgtatttggatgacagcgtctctagctttatccagatccgtggcagtgtgcccttgttctgggagcagcccggtctgcaagtgggatcccaccgggtaagaatgagccgcggcttcgaagctaacgcccccgcattcgatcgacatttccgtactttgaagaacctctacggtaaacagatcatcgtaaatctactgggctccaaggagggagagcacatgctcagtaaagcattccagagtcacctcaaggcttccgaacatgcggccgatattcaaatggtcaatttcgactaccaccagatggtgaaaggcggcaaagccgaaaagctgcactcggtcctgaagccccaggttcaaaaatttctcgactacggatttttctactttaacggatccgaggtgcagaggtgtcaatctggtaccgtgagaactaattgtcttgactgcttggaccggactaattctgtccaggccttcttgggtctagaaatgctcgcgaagcagctggaggccttaggactggccgagaaacctcaactggtgacacggtttcaggaggtgtttcggtccatgtggtccgtaaatggggattccatctctaagatctatgctggcacgggagccttggagggtaaagctaaactgaaagatggggcccgatccgtaacaaggaccatccaaaataactttttcgacagtagcaaacaagaagctatcgacgtgctgcttctggggaacacgctgaattccgatctggccgacaaagcccgggcgctgctgaccactggctccttgcgggtatctgaacaaaccctgcagtctgccagctccaaggtgctgaagagtatgtgtgagaacttttacaagtattctaagcctaaaaagatcagggtgtgcgttgggacgtggaacgtgaatggcggaaaacagtttcggagtattgcattcaagaatcagactctaaccgattggctcctagatgcccccaagctggctggaatccaagagtttcaagataaaagatccaaacccactgatatcttcgccattgggtttgaggagatggtggagctgaatgccggaaacattgtgtcagcttcaactacaaatcaaaagctgtgggctgtggaactgcagaagaccatcagtcgcgataacaaatatgtgctcctggcgtcggagcagctcgttggagtgtgcctttttgtgttcattagacctcagcatgctcccttcattcgggatgtggccgtggacacagttaaaaccggaatgggaggagccacaggaaataaaggagccgtcgccatcaggatgttattccatactacaagtctgtgctttgtctgctctcattttgcggcgggccaaagccaggtgaaggaaaggaacgaggattttatcgaaatcgcccgcaaactgagtttccctatgggaaggatgctgtttagccatgactacgtcttttggtgtggcgattttaactacaggattgatctaccaaatgaggaggtcaaggagctcatcagacagcagaactgggatagtctgattgcgggtgaccaacttatcaatcagaagaacgccggccaggtgtttcgcggctttctcgaaggcaaagtgactttcgcccccacctataagtacgacctgttctccgatgattatgacaccagtgagaaatgccggacacctgcctggaccgatcgagtgctgtggcgccggcggaaatggccctttgatcgtagcgcagaggacttagacctgctgaatgctagcttccaggatgagagtaagatcctgtatacctggacgcctggtaccctcctgcattacggcagagcagagctgaagacgagtgaccaccggcccgttgttgcgctaattgatatcgacatctttgaagtcgaggccgaagagaggcagaacatctataaagaggtaatcgctgtccagggccccccagacgggacggtactggtttcaattaagtcatcccttcccgagaataatttctttgatgacgcgctcatcgatgagctgctccagcagtttgcatcctttggggaggtgatccttattcggttcgtcgaggacaaaatgtgggtgacgttcctggaagggagttctgctctgaatgtactgagtctgaatgggaaagagctcctcaaccgtaccatcacaattgccttgaagtcccctgactggatcaaaaacctggaggaggagatgagcctagagaaaatttccatagctttgcccagcagcacctcatctaccctcctgggagaggacgccgaggtcgccgctgattttgacatggagggcgatgttgatgactactcagccgaggtggaggagctacttccgcagcacctccagccctccagttcttcaggtttgggcaccagtccgagcagctccccccgtactagtccttgccagtctcctaccatctctgaaggacccgtaccatccttgccaatcaggccaagccgtgcaccgtccaggactcctggcccaccatccgcacagtcatcaccaatcgacgcccagccagcaacacccctgcctcagaaagacccagcccagcccctggagccaaaacgcccacctccgccacggcccgtggcccctcctactcgtccggctccaccacagagaccgcctcctccaagcggtgcgcgaagcccagcaccgaccagaaaggaatttggagccccgaagagccccggtacgactaggaaagataatatcgggcggtcccaacctagcccacaggccggcttagccggccctggacccgctgggtactccacagcgcgtcccacaatccctccacgcgctggcgtgatttccgcgccacagagccatgcccgcgctagcgccggacggctgacacctgagtctcaatcaaaaacaagtgaaacatccaagggttctactttcctgccggagcctctgaagcctcaggctgccttcccaccgcagtcgagtctccccccacccgcgcagagacttcaggaaccattggtgccagtcgctgctcccatgccccagtctggaccacaaccaaaccttgagacccccccacagcctcccccacgtagtagaagctctcactccttgccatctgaagcctccagccagccacaacaggaacagccaagtggctag

SEQ ID NO: 136827 - DNA, 4581 bp, synthetic construct
  misc_feature 1..4581: note = Description of Artificial Sequence: Synthetic coding sequence
  source 1..4581: mol_type = other DNA
atggcttttagcaaaggatttaggatttaccacaagctcgatccccccccttttagtttgatcgtggaaacaaggcataaggaagagtgcctgatgttcgaatcaggcgccgttgcagttttgtccagcgccgaaaaagaggctataaaaggaacttacagcaaggtgctagatgcttacggtctgctgggcgtactgaggctcaatctgggagataccatgctacattacctcgtcctggtcacagggtgcatgagcgttgggaaaattcaggagtcagaggtcttcagagttacctcgacagaattcatctccttgcgaatcgactcctcagatgaagacagaatctccgaggttagaaaggtgctgaactctggcaacttttatttcgcttggtccgctagcgggatatcacttgacctctccctgaatgcgcaccgaagtatgcaggaacagacaacagataaccgcttcttctggaatcaatctctacacttgcatctgaagcactacggggtgaattgcgacgactggcttctgcggctgatgtgcggtggcgtggagatccgaaccatatacgcggcccacaagcaggccaaggcatgccttatcagccggttgtcatgcgagagagccggtacacgcttcaatgtcagaggaacaaatgacgacggccacgtggcgaactttgtggaaacagagcaggttgtgtaccttgacgattcagtttccagcttcatacaaataaggggaagtgtgcctctgttctgggaacagcctggacttcaggtcggatcacacagagtccgcatgtctaggggattcgaggctaacgccccagctttcgataggcacttccgtaccctgaagaacttgtatggcaagcagatcatcgtgaacctgttgggtagcaaggaaggagagcatatgctgtccaaggcattccaatcccacctgaaggcttctgaacatgcagccgacatacagatggtaaattttgattatcaccagatggtaaaggggggcaaggccgagaagctgcactctgtcttaaagccacaggttcagaagttccttgactacgggttcttctattttaacggatccgaagtacagcggtgtcagtctggcacagtgagaactaactgtctcgattgcctggaccgcaccaatagcgtgcaggccttccttggcctagagatgctcgccaaacagctcgaagccctgggactagccgagaagccgcagttggtgaccaggtttcaagaagtgttccgatccatgtggtctgtgaatggagacagcatctccaaaatttacgcgggaaccggggccctcgaggggaaggcaaaagccggaaaactgaaagatggtgccaggagcgtgactcgaacaattcaaaacaatttcttcgactcttccaagcaggaagcaattgacgtactgctcctgggaaatactttaaacagtgaccttgcagacaaagcccgcgcgttacttaccaccggttcactcagagcttcaagcaaggtgctcaagtccatgtgcgagaatttctacaagtatagcaagcctaagaaaatccgggtgtgtgtcggcacatggaacgtgaacggcggtaagcaattccgcagtattgctttcaagaatcagactctgactgattggttactcgatgccccaaaactcgccgggatacaagagttccaagacaagaggagtaaacctacagatattttcgccatcggctttgaagaaatggttgaattgaacgctggcaacatcgtctccgcttcgactacgaaccaaaaactttgggcagttgaactccagaagacaatatctcgggataataagtacgtgctgctagcgtctgagcaattggtaggagtatgtctctttgttttcattagacctcagcatgcaccattcattcgtgacgtcgcagtggacacagtgaagacgggcatgggaggagcgaccggaaataagggcgctgtggccatcagaatgctgtttcatacaacttctctgtgttttgtgtgctcacacttcgcagctggccagagccaagtaaaggaacggaacgaagactttatcgaaatcgcccgcaaactgtcctttcctatgggtaggatgctgttttcccacgactacgttttctggtgtggcgacttcaattatcgaatcgacctgcccaacgaggaggtcaaagagttgatcaggcaacagaactgggactcgctgattgctggcgaccaactgattaaccagaagaatgcaggccaggtatttagagggtttcttgaaggaaaggtcacgttcgccccaacttataagtatgacctgttcagcgacgactatgacacctctgaaaagtgccgaacaccagcatggaccgatagagtcttgtggcgccgtcgcaaatggccatttgatcgatctgcagaggacttggacttattgaacgcatcattccaagacgagtcaaaaattctgtacacttggacacctgggacacttctacattacggtagggccgaactgaagacctcagaccaccgtcccgtggttgccctgatcgatatcgatattttcgaagtagaggcagaagagcgtcagaacatatacaaagaagtgatcgccgtgcagggcccccccgatggaacagttttggtcagcatcaaatcatctctcccggaaaacaacttcttcgatgatgcactgatcgatgagttgctgcagcagtttgctagttttggcgaggtgattctgatccgatttgttgaggacaaaatgtgggtgacctttctggagggcagttcagctttaaacgtgcttagtctgaatgggaaggagcttctgaatcgcacaattacgatcgctcttaagtcccccgattggataaaaaacctcgaagaggagatgagcttagaaaagatctctattgccctgccaagttcaacctcctcaaccttactgggcgaagacgctgaggtcgccgctgatttcgatatggagggcgatgtggatgactacagcgccgaggtggaagagttgcttcctcagcaccttcagcccagtagcagctcgggacttggaactagtccctcttcctcaccgcgcacaagcccatgccagtcccctacaattagtgaggggccggtaccctctctgccaatccggccttccagggcccctagtaggacgccaggccccccttctgctcagagtagtcccatcgatgctcaacccgcaacccccctgcctcagaaggatcccgctcagccactggaaccaaagcgtccccccccgcctcgcccagttgctccacctacgaggcccgcacccccccagcggccccctccgccgagtgggaggagtcaaccatccccacaggctggactggccgggccagggcccgccggctactcaaccgcgagacctactattccgcccagggcaggggtgatctccgctcctcagagccacgcacgagccagtgcaggacggcttacacctgaaagccagagcaagacctcagaaacatccaaaggctccacgtttttgcccgagccactgaagccgcaggctgcattcccccctcaaagctcattgccacctccagcccagcgtctgcaggaacctctggtccccgtggccgcccccatgcctcagagcggccctcagcctaatctcgagacccccccgcagcctccgccaagatcacgatcgtcccactccctgccatctgaagcctcctcacagccacaagtcaagacgaatggcatctccgacgggaagcgggagagtcccctaaagattgaccctttcgaggatttatcttttaatttactggccgtgagcaaagcacaactttctgtgcagacttcgccagtaccaaccccggacccaaagaggttaatccaacttcccagcgctactcagtccaacgtgcttagcagcgtttcatgtatgccaactatgccacccatccctgccagaagccagtctcaagaaaatatgagatctagccctaatccttttataacaggtcttactcggactaacccttttagcgaccggactgccgcacccggcaatccgttcagggcaaagtcagaggagagtgaagcgacaagctggttttcaaaagaagagcctgttacaatcagtccctttccatcactgcagccccttggccataataagagtcgtgcatcctcttctctggacgggtttaaagactcattcgatttacaaggccagtccacactgaaaatctccaatcctaagggttgggtcacattcgaggaggaagaagactttggggtgaaaggcaagtctaagtcggcctgcagcgatctcctgggaaatcaacccagcagtttctcaggctccaatctaacactgaacgatgactggaacaaggggaccaacgtctccttctgcgttctgccctcgcgacgaccccctccaccacctgtgcctttgctgccacccggcacctctccccctgtggaccctttcaccacattggctagcaaggcgagccctacactggatttcactgagaggtag

SEQ ID NO: 136828 - DNA, 4053 bp, synthetic construct
  misc_feature 1..4053: note = Description of Artificial Sequence: Synthetic coding sequence
  source 1..4053: mol_type = other DNA
atgcgcaagcgatgggcgtgctggtctggaagtgatgctcccggaggctgcggaggcggatgtggccggcgccgtcgaagaagccgccgcaagcgggcagcttccgaagagagacggatggcatttagcaaaggctttcggatatatcacaaactcgaccctcctccgttctccctgattgtggagacaaggcacaaagaagagtgtttgatgtttgagtctggcgccgtggcggttctgagttcagcagagaaggaagcaatcaaaggaacctatagtaaggtgttggacgcttacggtctgctcggggtcttaaggctgaatctgggggatacaatgctccactacctggtattagtgaccgggtgcatgagtgtgggaaaaattcaggagtccgaggtgtttagagttacaagtactgagttcatatctctgcggatagatagctcagatgaagacagaatttccgaggtacggaaagtgttgaattccggcaatttttacttcgcctggtctgcaagcggtatttcactggacctaagtctgaatgcccaccgtagtatgcaagagcaaaccaccgataatagatttttttggaatcagtctctgcacctgcacctgaaacactatggggtgaattgtgacgactggctcttgcgcctcatgtgtggcggtgtggaaataaggaccatttatgcagcccacaagcaggcaaaagcctgcctgatttcaagattgagctgtgagcgcgccgggacccggttcaatgtgcggggaacaaacgacgatgggcacgtcgctaactttgtggagactgagcaagtggtgtaccttgatgatagcgtctcttctttcatccaaattcgcggctctgtcccactcttctgggaacagcccggacttcaagtaggctctcacagagtacgtatgtcccggggattcgaagcaaatgcccctgcttttgataggcattttagaactctgaaaaacttatacggcaaacagatcattgtcaacctgctcggatcgaaggagggcgagcatatgttatcaaaagcgttccaaagccacctaaaagcatcggagcatgccgcagacatccagatggttaactttgactatcatcaaatggtcaagggtgggaaagctgaaaaactccacagtgtgttaaagccccaggtccagaagttcctagactacgggtttttttacttcaacggctcagaagtccaacgctgccagtctgggaccgtgcgcaccaactgcctcgattgcttagaccgcaccaattctgtgcaggcatttctgggactcgaaatgctcgcaaagcagctcgaggctttgggacttgccgagaagccccagctggtaacccggtttcaggaggtgttcagatcaatgtggtctgtgaatggtgattccatctctaagatttacgcaggtacaggcgccctagaggggaaagccaagcttaaggatggagcccgctcagtaacccgaaccatccaaaacaatttctttgactcctcgaagcaggaagcaatcgacgtgctgctgctggggaatacgctgaattccgatttagccgacaaggctagagccctgctcacgaccggtagcctgcgcgtgtcagagcagaccctccagtcggcctcttccaaggtcctgaaatcaatgtgtgaaaacttctataagtacagcaaacccaagaaaattcgggtctgcgtgggcacgtggaacgtgaatggcggtaagcagtttcgtagcattgccttcaaaaatcagaccctgactgactggctgctagacgcccccaagctcgcaggcattcaggagtttcaggacaagcgcagcaagcctacagacattttcgcaataggctttgaggagatggtggaactgaacgcggggaatatcgtgagtgcaagtaccactaaccaaaagctttgggcggtcgaactacaaaaaaccatcagccgcgataataagtacgtgcttttggcatccgagcagctggttggcgtgtgcttgttcgtgtttattcgacctcagcacgccccattcattagggacgtcgcagttgatacagtgaaaacaggaatggggggagctaccgggaacaagggcgccgtggctattcggatgctgttccatacaactagcctttgtttcgtctgctctcactttgccgccgggcagtctcaggtgaaggagcgcaacgaggactttatcgagatcgcccgaaagctgtcctttccgatgggccgcatgttattcagccacgattatgtattctggtgtggggattttaactataggatcgacctgcctaatgaagaggtgaaagagctgatcagacagcagaattgggatagcctcattgccggcgatcagctgatcaaccagaagaatgccggacaagtgttcaggggcttcctggaaggcaaagtaactttcgcccctacctataaatatgatttattctctgatgattacgatacttccgagaagtgcagaactccagcttggactgaccgagtgctgtggcgccgccgcaaatggccgtttgataggtcagcagaggacctggacctgctcaacgcctcttttcaggacgagagtaagattctttatacctggactccagggactctcctgcattacggtcgagcggagctgaaaacaagtgatcacagacccgtggtcgcactcatagatatcgacatttttgaggtggaggcggaggagcgccagaacatttacaaagaagtcatagccgtccagggccctcctgacggcacggtattggtttcaattaaaagctccttgcctgagaacaactttttcgacgacgcactgatcgatgagttgctacaacagtttgcgtccttcggggaagtgatcctgatccgcttcgtcgaggacaaaatgtgggtaacattcttggagggttccagcgccctcaatgtgctgagtctgaatggcaaagaactcctgaacaggactatcacaattgcactcaagtctcccgattggatcaagaatctggaagaggagatgagcctggaaaagatctctatcgccctgcccagcagcacctcttccacgctgctgggcgaggatgcggaggttgctgcggatttcgacatggaaggcgacgtggacgattatagcgcagaggtggaggagctgctgcctcagcatctgcaaccttcgagcagctctgggctgggcacgagtccttcttctagtccaagaacatctccctgtcagtctcctacaatttccgaggggcccgtgcctagtctgcccattagaccttccagagcaccctcacgcactcctggcccgccatcggcccagtcaagccctatcgacgcgcagccagccacaccactgccacagaaagatcctgctcagcccctggaaccaaaaaggccaccccctcccaggcccgtagctcctcctactagacctgcccctccacaacgacctccgcctccatctggtgccagaagccctgccccaacccggaaggagttcggggggattggggcaccaccatctcccggcgtggcccgccgggaaatggaggctccaaagagcccaggcacgacccgcaaagacaacattgggcgtagccagccatcaccccaggcggggcttgcaggcccagggccggctggttattccaccgcccgccctacgattcctccacgcgccggggtgatttctgccccccagtcgcacgctagggcaagtgccgggaggctgactcccgaatcccagtcgaagacttcagaaacatcaaagggctctacattccttccagaaccgttaaagccccaggccgcctttcctcctcagtctagcctgccgcctcccgctcagcgactgcaagaaccattggtgcctgtggcagcaccaatgccccagtcggggccacaaccaaatcttgagacgccaccacaacctccccctaggagtaggtcaagtcacagtttaccatcggaggcctcaagccagccccaacaggagcagccttcaggctag

SEQ ID NO: 136829 - DNA, 4839 bp, synthetic construct
  misc_feature 1..4839: note = Description of Artificial Sequence: Synthetic coding sequence
  source 1..4839: mol_type = other DNA
atgcgcaaacggtgggcctgttggtcaggttcagatgctcctggtgggtgtggaggtggctgcggaaggcgccgcagaagatcaagaagaaaaagagctgcaagcgaggaacggagaatggccttttcaaaaggctttcggatttatcataaattggacccaccccctttctctctgatagtagaaacacgccataaggaggagtgtttgatgtttgaatctggtgctgtggcggtgcttagctctgccgagaaggaggccattaaaggcacttactccaaggtgttggatgcatacggtctcctcggggtccttcgactgaatttaggggatacaatgcttcactatttggtgcttgtcactggttgcatgtcagtcggcaagatacaggaatcggaagtctttcgcgtgacaagcactgagttcatctccttgcgcattgattcctcagacgaagacaggatctcagaggttcggaaagttttgaactccggtaatttttactttgcatggagcgcatctggcataagcctggacctaagtctgaatgcgcatcggtctatgcaagagcagaccacagacaatcgcttcttctggaaccagagccttcacctgcacttgaaacattacggcgtgaactgtgacgactggctcctcaggctgatgtgcggtggggtggagatcaggacaatctatgctgcccataagcaagccaaagcgtgtctaatctcaaggttatcctgtgaaagagctggaacccgatttaacgtgagaggcaccaacgacgacggccatgtcgccaacttcgtcgagacggaacaggtcgtctatcttgatgattctgtgtcctcctttatccaaattcgcggcagcgtgcccctgttttgggaacaacctggactgcaggtcgggagccatcgggtacgaatgtctaggggatttgaggctaacgctcctgcctttgataggcactttaggactctgaagaacctgtatgggaaacagatcatcgttaatctgttaggaagtaaggaaggcgaacacatgctttccaaggctttccagagccatctgaaggctagcgaacatgccgcagacatccaaatggtgaattttgactaccatcaaatggtgaaggggggcaaagccgaaaagctgcattctgtactgaaaccgcaggttcaaaagtttttggattacgggttcttttattttaatggcagcgaggtacagcgttgccagagcggaacagttaggacaaattgtcttgactgcttggacaggacaaactcagtccaagccttcctgggccttgaaatgcttgctaaacagttggaggctctgggcttagcagagaagccccagctagtcaccaggttccaagaagtctttcggtctatgtggtccgtgaacggagactctatcagtaagatctacgccggcaccggggctctcgaaggcaaggccaagctgaaggatggcgctcgctccgttactaggacaattcagaacaatttctttgactccagcaaacaggaggccattgatgtgctgctcttgggtaacactcttaattcagacctggccgacaaagcgcgcgcattgctcactaccgggtccctgagggtgtctgagcaaacgttgcagagtgctagttccaaggtgttaaagtctatgtgtgagaacttctataaatacagtaagccaaaaaagatcagggtctgcgtgggcacctggaatgtgaacgggggaaagcaattccggagtatcgctttcaaaaatcagacgttgactgattggctgctggacgcccctaagttggccgggatccaagagtttcaggacaagagatccaaaccaaccgacatattcgcaataggctttgaagagatggtggagctgaacgctgggaatatcgtgagtgccagcacaaccaaccaaaagctttgggctgttgagctccagaaaactatcagccgggacaacaagtacgttctgctggctagcgagcagctggtgggcgtgtgtttgttcgtttttattcgaccgcagcacgccccttttattagagacgtggcagtcgacactgtgaaaacggggatgggcggtgctacaggaaacaaaggggcagtcgccattagaatgctgtttcacacaacatcgctgtgctttgtgtgctcgcatttcgcggccggacagtcccaggttaaggaacggaacgaagatttcatagagatcgccagaaaactctcattccctatgggcaggatgctgttctcccatgactacgtgttctggtgtggagatttcaattaccgcatagacttaccaaacgaggaggtgaaggagttgatccgtcagcaaaactgggattctttgatagccggagaccaacttatcaaccagaaaaacgcaggtcaggtgtttcggggctttctcgaagggaaagtcacgtttgcacctacatacaagtacgatctgttctccgatgattacgacacatctgaaaagtgtcgcacacccgcttggacggacagggtcctttggcgccgacgcaaatggccttttgacagatcagcagaggacctggacttattaaacgcctcgtttcaggacgagtcaaaaatattatacacatggacacctgggaccctccttcattatggacgcgctgaactcaagacttctgaccaccgtccagtggtggcgctaatcgacatcgatatattcgaggtagaagctgaggagcggcagaacatttataaagaggtgatagctgttcaaggaccaccagacggcaccgtgctggtatccattaagtcctccctcccagagaataacttctttgacgatgctctgattgacgagctgcttcagcaatttgcctcattcggtgaggtgatactgatccgtttcgtcgaagacaaaatgtgggtgacctttctcgaaggctcctctgcccttaacgttctgtctctcaacgggaaggaactgctaaacaggacaattacaattgcgctaaagtcccctgactggattaaaaatctggaggaggaaatgtccctggagaagatctcgattgccttaccatctagtacttcctctacgcttctcggggaagacgcagaggtcgcggccgattttgatatggagggagatgtggatgactattccgctgaggttgaggagctcctgccccaacacttgcaaccgtcctcctcctcagggttaggaactagcccgagctctagccctcggacatcaccgtgccagtcacctacaatctctgaaggccccgtgccttccctgcccattcggccatcaagggcaccctcgagaacaccagggcccccatctgcccagagcagccccatcgacgcccagccggccacacctttaccccagaaggatcccgcccaaccgctcgaacctaaaaggccccccccacctaggcctgtcgcccctcctacacgtccagccccaccccagcggcctccccctccttccggtgcgcggagcccggctcccacccggaaggagtttggaggcattggtgccccaccatctcctggggttgctcgccgggagatggaagccccaaagtcacctgggaccactaggaaagacaatatcgggcggagtcagccaagcccccaggctggattggcggggcccgggcctgctggctattctactgccagacccaccatccccccacgggctggggtcatcagtgcaccacagtctcatgcccgtgccagcgctggcaggctaacacctgagtcccaatcaaaaacctccgaaacaagcaaagggtcaaccttcctgcctgagccactcaaaccgcaggccgcttttcctcctcaaagcagtttaccacctcccgcccaacgtttgcaggagccactggtcccagtcgctgcccccatgcctcagtccgggccacagccaaacctagaaacacctcctcagccaccccccagaagcaggtcttcacattctctgccttccgaggcctcctcacagcctcaagtcaagaccaacggcatctccgatggaaaaagggaatctccactgaaaatagacccattcgaggacctgagcttcaatcttcttgcggtcagcaaggcacaactgtccgtccaaacctccccagtgccgacccctgatccaaagcgcctaatccaactgcccagtgctacgcaaagtaatgtgctatccagcgtgtcatgtatgcccacaatgccaccgattcccgcaagatcccaaagtcaagagaatatgcgctctagccctaacccattcatcaccggtctcactaggactaacccattcagtgatcgtaccgctgctccagggaatccttttagggctaagagcgaggagagcgaagctacctcgtggtttagtaaggaggaacccgtgacaatttccccgtttcctagtttgcagcctctcgggcacaataagagccgagccagtagctcactggatggcttcaaggatagtttcgatctgcaagggcaaagtacgctcaaaataagtaatccgaaaggatgggtgacattcgaggaagaggaagacttcggcgtcaaaggcaaatccaaaagcgcttgttcggatctgctcggtaaccagccgtcctcgttcagcggaagcaacttgacccttaacgatgattggaataagggcactaacgtttctttctgcgtgctgccatcacgtcgtcccccccccccccctgtcccactacttccccctgggacctccccgcctgtggacccctttacaaccctggccagcaaagccagtcctacccttgactttaccgagcgatag

SEQ ID NO: 136830 - DNA, 4491 bp, synthetic construct
  misc_feature 1..4491: note = Description of Artificial Sequence: Synthetic coding sequence
  source 1..4491: mol_type = other DNA
atggccctgagcaagggactgcgcttgctgggcaggctcggtgctgagggcgactgtagcgtactcctggaagcccggggaagagatgactgcctcctgtttgaagccggtactgttgccactctggcgcccgaagagaaggaggtgatcaaggggcagtacggtaagctcaccgatgcctacggctgtctgggcgaactgcggctgaaatccggtggaaccagcctctcgtttctagttctcgtgacaggctgcacatctgtcggccggatcccggacgctgagatatataagatcaccgccactgacttctatccgttacaggaggaggctaaagaagaggaaaggttaatcgccttgaaaaagatcctgagcagcggcgtcttctattttagttggcctaatgatgggtcacgtttcgacctcaccgttcgaacccaaaagcagggagatgactcaagcgagtggggaaactccttcttctggaaccagctccttcacgtccctttgcggcagcatcaagtgtcctgctgtgattggctgctcaagattatttgcggcgtcgtaaccattcgtaccgtgtacgcctcccataaacaggcaaaagcctgtctcgttagcagggtgagttgcgaacggacaggtacgcgctttcacacccgtggagtgaatgatgacggccacgtgagcaactttgtcgaaacggagcaaatgatctatatggacgacggagtatcctctttcgtgcaaatccgaggctctgtgcccttattttgggaacagcccggcctgcaggtgggcagtcaccacttacggttgcaccgcggactagaggcaaacgcccccgcgtttgacaggcacatggttttattaaaagaacaatacggtcagcaagtggtggttaatctcctcggctcgagaggcggggaagaagtcctcaatagagccttcaaaaagctcttgtgggcctcctgccacgccggagacacacccatgatcaattttgatttccaccagtttgccaaggggggaaagcttgaaaaactggaaacgctgctgcgcccccagctgaaacttcactgggaagattttgatgtttttactaagggtgaaaacgtctcacccagatttcagaaggggaccctgagaatgaattgtttggactgtctagacagaaccaatactgtgcaaagttttatcgctctcgaggttttgcatctgcaactgaagacgctaggtctgagcagtaaacccatagtcgaccgattcgtggagagcttcaaggctatgtggtccctaaatggacattctctatcaaaggtgttcacggggagcagggcgctggaagggaaagcgaaggtgggtaagctgaaagatggggcaagatccatgtccaggacaattcagagcaacttcttcgacggcgttaagcaagaggctattaagctcctcctggtgggggacgtgtatggcgaggaggtcgctgacaaaggcggaatgttgttagattccacggccctgctcgttactccgaggatcctgaaagcaatgactgagaggcaaagtgaatttacaaactttaagcggatcagaatcgcaatgggaacttggaatgtgaatggcggaaaacaatttcggagtaatgtgctgcgcacagcggagttgaccgattggctgttagactcacctcagctgtctggggcgaccgattcccaagacgactcatctcccgccgatatttttgctgttggatttgaagaaatggtagagctttcggccggcaacattgtcaacgcatcaacgactaacaagaagatgtggggagagcagctgcaaaaggccatctcccgttcccaccgttacattctgctgacctccgctcagctggttggggtttgtttgtatatctttgtacggccatatcatgtgccctttattcgcgacgtggccattgacacggtgaagacagggatgggggggaaggctgggaataaaggagccgtgggaatccggtttcagtttcactctacgtctttctgcttcatttgttcgcacctgactgctggacagagtcaggtcaaggaacggaatgaagattacaaggagatcacccagaagctttgtttccctatgggacggaatgttttctcacacgactacgtgttctggtgcggtgattttaactaccggattgacctcacctacgaagaagtgttctatttcgttaagcgccaagattggaagaagctgctggagttcgaccagctgcaacttcagaagagttctgggaaaatcttcaaagacttccacgagggagcgattaatttcggacctacgtacaagtacgacgtcggctccgccgcatacgacactagcgataagtgcaggacgcccgcttggactgatcgagtgctgtggtggcggaagaaacaccctttcgacaagactgctggagagctcaatctgctcgactctgatctggacgtggacaccaaggtcagacatacatggtcacctggggcacttcaatactacggaagggctgaactgcaggcttcagaccatcgcccagttttggcaatcgtggaggttgaagtgcaggaagtcgatgtgggggcccgtgagcgcgtgtttcaggaggtgtctagttttcagggaccgctcgacgcaaccgtagttgtgaacttacaaagcccaacactggaagagaaaaacgagttcccagaggaccttcggaccgagttaatgcagactctgggttcatacggcacaatcgtacttgtccgcataaaccaaggccagatgctggtgacctttgccgactcgcactcggctctctctgtgctggacgtggacggcatgaaggttaaagggagagccgtgaaaattcgcccaaaaacaaaggactggcttaaaggtttgagggaagagatcatccgcaaaagagacagtatggcgccagtgagtccgacagcaaactcatgcctgttggaggaaaattttgactttacaagtctggactacgaatccgagggagatattctagaggacgatgaagattacttggttgacgaattcaatcaacccggggtctcagattcagaactcggcggtgacgatctgagcgacgtgccaggtcctaccgccctggcccctccctccaaatcccctgccctgacgaagaagaagcaacatccaacttataaggatgatgccgacctggtcgagctcaagcgcgagctggaggctgtgggggagtttcggcaccgctccccttcaaggagcctcagtgtgcccaatagaccaagaccaccacagcccccacagagacccccaccaccaactggacttatggtaaagaagagcgcttcggacgcatccatcagctccggaacacacggccaatactccattctgcagactgcacggctgttgcccggggcaccccagcagccaccgaaggccaggaccggaattagcaagccgtacaatgttaagcaaatcaagaccaccaacgctcaggaggcagaagccgctattaggtgtctcctggaagcccgcggtggcgccagtgaagaagctctgtcagctgtcgcccctcgagatctagaggccagcagcgagcctgaacctacgccgggagctgcaaagcctgagactcctcaagctcctcctctactcccacggcgtcctcctccccgcgtgccagctatcaagaagcctacgctgagaaggactggcaaacccctgagtccggaagagcaatttgaacagcagacggtccatttcacgattggtccacccgagacgagcgtggaagcccccccagtagtaaccgcaccacgggtccccccagtgcctaagccacgtacattccagcctggcaaggccgccgagcgcccaagccacagaaaacccgccagcgacgaagcgccccccggcgctggggccagcgtccccccgcccctggaggcccccccccttgtccctaaggttccaccaagacggaaaaagtctgctccagccgcgtttcacttgcaggttctgcagtcaaatagccagctgctacagggccttacttacaactctagcgactctcctagcggacaccctccagccgccgggactgtgtttccgcagggggatttcctgagcactagcagtgctacttcaccggacagtgatggcactaaagctatgaaaccggaagcggccccattactcggcgactatcaggatccattctggaacttgcttcatcaccctaaactcctgaacaacacttggctttccaagtctagcgacccactggacagcgggacccggtctccaaaacgcgatcctatcgaccctgttagtgctggggcctccgcagctaaagcggagctcccaccagaccatgagcataagaccttagggcactgggtgaccatttctgatcaggaaaaacggacagcattacaagtctttgaccctctggcgaagacctag

SEQ ID NO: 136831 - DNA, 1746 bp, synthetic construct
  misc_feature 1..1746: note = Description of Artificial Sequence: Synthetic coding sequence
  source 1..1746: mol_type = other DNA
atgcagacactggggagttacgggacaatcgtgttggtgcgcattaaccaaggccagatgctcgttacatttgccgatagccactccgctctgtcggtcctggatgtggacggcatgaaagtgaagggcagggcagtcaaaatccgacccaagacgaaagactggcttaaaggcttacgagaagaaatcattcgcaagcgggacagcatggcccctgtctccccaaccgcaaattcgtgtctcctcgaggagaactttgatttcacatcattggattatgaatctgagggagatattctggaagacgatgaggactatctggtcgatgaattcaatcagccaggtgtgtccgatagcgaactcggcggggacgatttatctgacgtgcctgggcccaccgccttggcccctcccagcaagagtcccgctctcacaaaaaagaagcagcacccaacttacaaggatgacgccgacctagtcgagctcaagcgcgagcttgaggcagtcggagaatttaggcaccggtcgcccagcagaagcttatccgtcccaaatcgcccgagacctccgcaaccgccccagagacccccaccccctacaggcctgatggtaaaaaaatcggctagcgatgcatccatcagtagtggcacccatgggcagtatagtattctccagaccgcaaggctgttgcccggcgccccccagcagccccctaaggcacgaaccggtatctctaagccatacaacgttaaacagattaagacaactaacgctcaggaagccgaggccgcaataagatgtctcctggaggcacgcggcggtgcctctgaggaagcattgtccgcagtggctcctcgcgatctcgaagccagctctgagccagaacccacgcccggagccgctaaaccggagacccctcaagccccccctctgctgccaaggaggccaccaccgcgcgtgccagccattaaaaagccgaccctgcgtcgaaccgggaagcctctttctcctgaagaacaattcgaacaacagaccgtgcacttcaccattggaccaccagaaactagtgttgaggcgcccccagtggttaccgccccgagggtcccccctgtgcccaaacccaggacttttcaacctgggaaggcagcagagcggcctagtcatcggaagccagcttctgacgaggcaccaccaggagccggggcctcagttccacctccgctggaggcaccccccctcgtcccgaaagtgcctcctcggagaaaaaaaagcgcacctgcggccttccacctccaagtcctgcagtctaattcccaactcctgcaggggctgacttataattcatcggatagtccctcgggccaccctccagctgctggtactgtgtttccccagggggactttttgagcactagcagtgccacatcccccgattctgacggcacaaaggccatgaagcccgaggccgccccactgttaggcgactatcaggatccgttctggaatctgctgcaccacccaaaactgctgaataacacttggctttccaaatctagtgatccactagactcagggaccaggagcccgaagcgggaccctatagaccctgtttccgccggcgcatctgctgccaaggccgaactgcctcccgaccacgagcacaaaactcttggtcattgggtgacgatcagtgaccaggagaaacgaacggctcttcaggtcttcgaccctcttgccaaaacatag

SEQ ID NO: 136832 - DNA, 411 bp, synthetic construct
  misc_feature 1..411: note = Description of Artificial Sequence: Synthetic coding sequence
  source 1..411: mol_type = other DNA
taaggacgggatgactgcctgcttttcgaagccggaactgtagctactttagccccggaagaaaaagaggtgatcaagggacagtatgggaaactgaccgatgcttatggctgtttgggagagctcaggctcaaatccggtggaacttctctgtctttccttgttttggtgaccggatgtacctcagtcgggcgaatccccgacgccgagatttataagattactgcaaccgacttctaccccctccaagaagaagccaaggaggaggaaaggctcattgccttgaaaaagatcctgagctctggggtgttctacttttcctggccaaacgacggctctcggttcgaccttaccgtacgcacacagaaacagggggatgatagtagtgagtggggaaactcatttttctag

SEQ ID NO: 136833 - DNA, 3867 bp, synthetic construct
  misc_feature 1..3867: note = Description of Artificial Sequence: Synthetic coding sequence
  source 1..3867: mol_type = other DNA
atggctctatccaaagggctgaggttgctcggcaggcttggggctgaaggggactgcagcgtcctgctggaagcacggggaagagacgattgtctcctgtttgaagccggaacagtggcaactctcgcccccgaggaaaaggaggttattaaaggtcagtacgggaaattaaccgacgcttacgggtgtttgggcgaacttaggctgaagtccggaggcaccagtctgagttttctggtcttagtaaccggatgtactagcgttgggcgtatcccagacgcagagatctataaaattaccgcaacagacttttatccactccaggaggaggccaaagaggaggagcggttgatcgctctgaaaaagattctgagcagcggcgtgttttactttagctggcctaacgatggatcccggtttgacctgactgttcggacccaaaaacagggcgatgattcatccgaatggggcaattcattcttctggaaccagctcctgcacgtgcccttaagacagcaccaggtgtcttgttgcgattggttgctgaagatcatttgtggagtcgtcaccatccgtactgtgtatgcatcgcataaacaggccaaggcatgcttggtgagtcgggtttcttgtgagcggacgggaactagattccatacacgaggtgtgaacgatgatggccacgtgtctaactttgttgagacagaacaaatgatctacatggacgatggagtctcgtccttcgtgcagatccgaggtagtgtaccgctgttttgggagcagcccgggttgcaggtcggatcccaccacctgagactgcaccgcggcctggaagccaacgccccagcatttgataggcacatggtcctccttaaggaacagtacggccaacaggtcgtcgtgaacttactcggtagcaggggaggggaggaggtgttaaaccgtgctttcaaaaagttactctgggcctcgtgccatgctggagacacaccaatgatcaactttgatttccatcagttcgcgaaaggcggcaaactggagaagctcgagacactcctccggccccaactgaagcttcactgggaggacttcgacgtcttcactaagggcgagaatgtcagtcccagattccagaagggtacgctccggatgaactgcctggattgcttggatcgaactaacacggtccagagtttcatcgcactcgaggtgttgcatttgcaacttaagactctaggactcagctctaaaccaattgtggaccggttcgttgagagttttaaggcaatgtggagtcttaatggccactccctgagcaaagtatttacaggatcacgggctttagaaggcaaagccaaggtcggcaagctgaaggacggagcaagatctatgtcccggacaatccagtcaaatttctttgatggtgtcaaacaggaagcaataaaattgctcctggtgggagatgtgtatggggaagaggtcgcggacaagggggggatgctgttagatagcacagctctcttggtgacccccagaatccttaaagccatgaccgagaggcagagtgaattcaccaattttaaacggattcgaatcgccatggggacatggaacgtcaacggcggaaaacagtttcgctcaaatgtccttagaaccgccgagctcaccgactggctgttggacagcccccagctgtccggagctactgactcacaggacgattctagtcccgccgacattttcgcagtggggtttgaggagatggttgagctttctgccggtaatattgtgaacgcctctacaacaaataagaaaatgtggggagaacagcttcagaaggccatctcccggtcacatcggtatatcttactgacttccgcccagttggtcggtgtctgcttgtatatttttgttcggccatatcacgttccttttatacgcgacgtggccatcgacactgtgaagacaggaatgggcgggaaagcggggaacaagggtgctgtcggaatcagattccaatttcacagcacatcattttgttttatctgtagtcatctgacagcagggcagagtcaagtcaaggaacgcaacgaagattataaggaaataactcagaaactgtgtttcccaatgggccggaacgtttttagccacgactacgtgttctggtgtggtgacttcaactaccggatcgacctgacttatgaggaagttttctactttgtcaagcgtcaggactggaaaaaactattggaattcgatcagctgcagctgcagaagtcctcaggtaagatcttcaaagactttcacgaaggggcaattaattttggcccaacttataaatacgacgtaggtagtgccgcatacgataccagtgataagtgtaggactccggcctggactgatagagtgctatggtggaggaaaaagcacccgttcgacaaaacagccggggaactgaacctgctggattcagaccttgacgtagacaccaaggtcagacatacctggtcaccgggcgcattgcaatactacggaagagccgagttacaagcctctgatcatagacccgtgctggctatcgtggaggtggaggtgcaggaggtcgacgttggcgcccgggagcgcgtgtttcaggaagtgtcatcattccagggcccccttgacgcaactgttgtggtgaaccttcaatctcctactttagaggagaaaaacgaattccccgaggaccttaggactgagctcatgcagacactgggatcttatggcacaattgtgttagttaggattaatcagggccagatgctggtgacgtttgcagattctcatagcgctctcagtgtacttgatgttgatggcatgaaagtcaagggcagagcagtgaagattcgacccaaaacgaaggactggctgaaaggcctaagggaggaaatcatccggaaaagagattccatggcgccagtgagcccaacagcgaacagctgcctgctggaagagaactttgactttacttccctagattacgagagcgagggggatatcttggaggacgatgaagattatttggtggacgagtttaaccagcccggagttagtgatagcgagctgggtggggacgacctttcagacgtccccgggcccaccgcactggcacctccaagcaagtccccagccttgaccaagaaaaagcagcaccccacctacaaagacgacgcggacttagtcgaattaaagcgcgaactggaagccgtgggcgagttccgacatcgcagtcccagtaggtccctgtccgtgcctaataggccccgcccaccacagccgccccaaaggccacccccccctacaggacttatggttaagaaaagtgcaagtgatgcctctataagttccggcactcatgggcagtattcaattctccaaacagcacgtctgcttcctggtgccccccaacagccccctaaagcccgcacgggaatcagtaaaccctacaatgtgaaacaaatcaagactacaaacgcccaggaggccgaagccgcaatccgatgcctgctcgaggctaggggcggggcttctgaagaagccctgagtgccgtagccccgcgcgacttggaggcctcctcagaaccagaaccaactcccggagctgccaaaccagaaaccccacaggcccctcccctgctcccaagacgaccaccaccccgcgttcctgcgattaagaaacccactcttcggcggaccggcaagattgtcttttgttccaggtctcaagcttcccagccctgtttactgcttcagcggcatgaattcgtgaggacagtggcagcccaacggttggctagtgtggatacgtctgggtcctccgtctag

SEQ ID NO: 136834 - DNA, 4356 bp, synthetic construct
  misc_feature 1..4356: note = Description of Artificial Sequence: Synthetic coding sequence
  source 1..4356: mol_type = other DNA
atggcactttccaagggactgagactcttaggccgacttggggctgagggcgattgttccgtattattagaggctagggggcgcgatgactgtctgctgtttgaggcgggcaccgtggcaactctggccccagaggagaaggaggtgatcaagggccagtacggaaaactcactgatgcttacggttgtctgggcgagctaagactgaaatctggaggcacatctctttccttcttagttcttgtgactgggtgtaccagcgttgggaggatccctgatgccgaaatttataaaatcaccgccacggatttctatcctttgcaggaagaggcaaaagaggaggaaaggttgatagcgctgaagaaaatcctgagcagtggagtgttttacttttcctggcctaatgacggatcgagattcgacctgacagtacgaacccagaagcagggtgatgactcatccgagtggggaaatagtttcttctggaatcagctcctccatgtgcctctaagacagcaccaagtcagctgctgcgactggctgctgaagatcatctgcggggtggtcaccattcgaacagtgtatgcctcccacaagcaggctaaggcctgccttgtgtctcgggtgtcctgcgagaggactggcacacgcttccataccaggggtgtcaatgatgacgggcatgtcagtaacttcgtcgaaactgagcagatgatctacatggatgacggcgtaagtagctttgtgcagatcagagggtctgtcccacttttttgggagcagcccggcctccaagttggatctcatcacctgagactccacagagggctggaggctaacgccccagcttttgaccggcacatggtacttctgaaggagcagtacggccagcaggtggtggtgaacctactggggtccaggggtggggaagaggttctcaacagggcattcaaaaaacttctgtgggcctcttgccatgcaggcgatacccccatgataaacttcgacttccatcagtttgcaaaaggggggaagctggaaaagctcgaaaccctccttaggccccaactgaagctccattgggaggattttgacgtttttactaagggggaaaacgtcagcccgagatttcagaagggcaccttaaggatgaactgtttggactgcctggatagaacgaacaccgtgcagagctttattgccctcgaggtattgcacctccagctgaaaactctgggactatcaagcaagccgattgtcgataggtttgtagagtcgtttaaagccatgtggtctttaaatgggcactctctctccaaagtcttcacggggtctcgcgccctagaggggaaggcgaaggttggaaagctgaaggacggggcacgcagtatgagccggactatccagagtaatttcttcgacggtgtgaaacaggaggcaattaagcttctgctagtgggagacgtgtacggcgaggaggtggcggacaagggaggaatgcttctggattctaccgccctccttgttactcccaggattctgaaagctatgaccgagcgccagagcgagttcacgaactttaaacggatacgaattgctatgggaacgtggaacgttaacggcggaaagcagttcagatcgaatgtcctgaggacagctgaattaaccgattggttactggactccccacagctctccggggccaccgactcacaggacgattcctctccagccgacattttcgctgtgggatttgaagagatggtggagctttcagcagggaacattgtcaacgcaagcaccacaaacaagaaaatgtggggcgagcaattgcagaaagccatctcgagatctcataggtacatcttactcacctctgctcagctggttggggtttgtttgtatatattcgtgcgaccctaccatgtgccttttatccgcgacgtggctatcgacacagtgaaaaccggaatggggggcaaggcaggtaacaaaggcgccgtggggattagatttcagttccattccacatccttctgttttatttgtagccacctgacggccggacaatcccaggtgaaagaaaggaacgaagattataaggagatcacccagaagctctgttttcctatgggccgaaatgttttttcacacgactatgtcttctggtgcggcgatttcaactatcgcatagacctgacgtacgaggaggtgttctacttcgtgaagcgccaagactggaagaagttgctagaatttgatcaattgcagttgcagaaatcgtcagggaagatcttcaaggactttcatgaaggcgccatcaactttggtccgacctacaaatatgacgtagggtccgcagcctacgacacaagtgacaaatgtcgaactccggcatggaccgatcgcgtcctctggtggcggaagaaacatccattcgataaaactgctggggagcttaacctgctggatagcgacctggatgtggatacaaaggtaagacatacatggtcacctggggccctgcagtactacgggcgagccgaactccaggcgtccgatcacaggcccgtcctagccatcgttgaggtggaagtccaggaagtggacgtgggtgctcgcgaaagagttttccaggaagtatcgagttttcagggtccactcgacgctacagtcgtggtgaacttgcagtctcctaccctggaagagaagaatgagtttccagaagatttgcggaccgaactaatgcaaacgctgggctcctacggcacgatagttttggtaaggattaaccaaggacaaatgcttgttacatttgcggactctcacagcgccctgtctgtgctggatgtggacggcatgaaggttaagggtcgggccgtcaagattcggccaaagactaaagactggctgaagggactccgtgaagagatcattaggaaaagagattcgatggccccagtcagtccaactgctaatagttgcctcttagaggaaaactttgacttcacctccctagactacgaatccgaaggagatattctggaggacgacgaagattacttagtggatgagttcaaccagcccggcgtgtctgattccgaacttggtggggatgatctgtccgatgttcctgggcctacagcacttgctccaccaagcaagagtccagctcttactaaaaagaagcagcatcccacatataaggcaggtctgatggtgaagaagtccgcttcagatgcttccataagttctggtacccacggacagtattcgatcttacagactgctcggctcctcccaggggccccacagcaaccccctaaggcccgcacaggcatctccaagccatacaacgtcaagcaaatcaagacaacaaacgcgcaggaggccgaagccgccatccgatgtcttcttgaggcccgggggggcgcttctgaagaggctctgtctgcagtggcaccccgggatctcgaagctagctctgaaccagagcccacacccggcgctgccaaacctgaaaccccacaggcaccacctctcttgcctcgtcggccaccacccagggtgcctgcgatcaagaaacccaccctaagaagaaccgggaagccactctcgcctgaggagcagttcgagcagcagacagtgcatttcacaattgggccacccgagacgtcagtggaggccccaccagtggtgactgcaccaagagtaccacccgttcccaagcctagaaccttccagccgggtaaggccgccgagcggccttctcatcgtaagcctgcctctgacgaagccccacctggggcaggcgcctcagttccaccaccccttgaggcgccccccctagtgcccaaagtgccaccaagacgaaaaaaatccgccccagctgccttccacttgcaggtgcttcaaagcaactctcaattgctccagggattaacctacaactcctccgatagtcctagcggacacccccccgccgcaggtacggtatttccacagggagatttcttgtcaacatccagcgccaccagccctgattctgacgggacaaaagccatgaagcccgaagcagcccctttactaggggactaccaggatccattttggaaccttctgcatcacccaaaacttttaaacaacacctggctgtccaagagctctgaccctttggactcaggaacgcgatccccaaagagagaccccattgaccccgtgagcgcgggtgcgagtgccgccaaggctgaactgccccccgaccacgagcacaagaccctgggtcactgggttacaatctcagaccaggaaaagcggacggctctgcaggtgttcgatccactcgctaaaacgtag

SEQ ID NO: 136835 - DNA, 279 bp, synthetic construct
  misc_feature 1..279: note = Description of Artificial Sequence: Synthetic coding sequence
  source 1..279: mol_type = other DNA
atgttcctctatgcatccggccccgcaccacctgccggcacctgcagatggggcggtcaggggggtacgtccctctccttcctggtcctggtgacaggctgtacttctgtggggcgcataccggatgccgagatctacaaaatcaccgcgaccgacttttatccgctgcaagaagaagccaaagaagaggagaggctcatagcacttaaaaagatcctatcttcaggggtgttctacttctcctggccaaacgacgggtcccgatttgaccttacgtag

SEQ ID NO: 136836 - DNA, 1551 bp, synthetic construct
  misc_feature 1..1551: note = Description of Artificial Sequence: Synthetic coding sequence
  source 1..1551: mol_type = other DNA
atgtttctatatgcctccggacctgcgccgccggcaggcacttgcaggtggggaggacaggggggtacctcactttcctttctggtgctggtcactggatgtacctctgttggacggatacctgatgctgaaatctacaagattaccgcaaccgatttctaccccctccaggaagaagcaaaagaagaagagcggctgattgccttgaaaaaaattctgtcctccggcgtcttctacttttcttggcctaacgatggatcacgatttgatcttacagtgcgcacgcaaaaacaaggagatgactcttcagaatggggcaattccttcttctggaatcagctgctgcacgtgcctttgcgccagcatcaggtgagttgttgcgattggttgctgaagatcatctgcggcgtggttactatccgcactgtctacgctagccataaacaagctaaagcttgcctggtgagccgtgtcagttgcgaacgcaccggaacgaggtttcacacgcggggtgtaaacgatgatgggcacgtttcgaattttgtggaaacagaacaaatgatatacatggacgatggtgtatcctcattcgtgcagattaggggcagcgtgccgctgttttgggagcagccgggacttcaggtgggctctcatcatctgaggctgcacagagggctagaggccaacgcccccgcatttgatagacacatggtcctgctcaaggagcagtacggccagcaagtggtggtcaacctactcggtagcaggggaggagaagaggtgctgaaccgggctttcaagttcgcaaaaggcgggaagttagagaaacttgagacattattgaggcctcagctgaaactccattgggaggactttgacgtctttactaagggggagaatgtctccccgagatttcagaaaggaacgcttcgcatgaactgtctagattgtctagacaggaccaacacagtgcaaagtttcatcgcgttagaggtcctgcatctgcagctgaaaactctgggcctatcttctaaaccaatcgtggaccgatttgtggagagctttaaagccatgtggtcactcaatggacactcgctgtccaaggtgtttaccgggtctagagccctggagggcaaagcgaaagtgggcaagttgaaagacggcgcccggtctatgagccggaccatccaatctaattttttcgatggcgtcaaacaggaggcaattaagttgctacttgtaggcgatgtatacggggaggaggtggctgacaaagggggcatgttattagactccacggctctcctggtaaccccacgtatcctgaaggccatgacagaacgccagtccgagtttaccaattttaaaaggataagaatcgccatgggcacttggaatgttaatggcggcaagcagtttcgctcaaatgtactgcgcacagctgaactcactgactggctgctggatagccctcagctctccggcgccacagactcacagggcgaaggaagtgatttcgggggtgataaaattcaactgcatcttacatag

SEQ ID NO: 136837 - DNA, 438 bp, synthetic construct
  misc_feature 1..438: note = Description of Artificial Sequence: Synthetic coding sequence
  source 1..438: mol_type = other DNA
atgaatggcagggtggactacctcgtgacagaagaagaaattaatcttacccgtggccccagcgggttaggtttcaacatcgttggaggcacagatcagcagtacgtgtccaacgactccgggatctatgtcagtaggataaaggaaaacggggcagctgccttggatggcagactgcaggagggcgacaaaatcttaagcgtcaatgggcaggatctgaagaacttactgcaccaggatgctgtggacttattccgcaatgccggatatgccgtaagcctccgcgtgcagcatcgcctgcaggttcaaaacggacctattggccataggggagaaggggacccttcaggcattcccatcttcatggttctggtcccagtttttgccttaaccatggtggccgcatgggccttcatgcgataccgccagcagttgtag

SEQ ID NO: 136838 - DNA, 957 bp, synthetic construct
  misc_feature 1..957: note = Description of Artificial Sequence: Synthetic coding sequence
  source 1..957: mol_type = other DNA
atggccggcaggtctctgactagcaaagccgagcctaccgctggtgcagtggacagagcagagaaggcaggcggccaagatacatcctcccagaagatagaagatctgatggaaatggtgcagaagctgcagaaagtgggaagtctggaaccacgggtggaagtgctgatcaaccggattaacgaggtgcaacaagctaaaaaaaaagcaaataaggacctgggagaagctcgaactatctgcgaggccctgcaaaaggagctggacagtttgcatggcgaaaaggttcacttgaaggaaattttatctaaaaagcaggagactctgcgcattctgaggctgcactgccaggagaaagagtcagaggctcaccgcaaacatacgatgttgcaggagtgcaaggagaggatttctgcgttaaacttgcaaattgaagaagaaaaaaacaaacagcgacagttacgtttggctttcgaagaacagctcgaggacctcatgggtcagcataaggacctgtgggactttcatatgccggaaaggctagcaaaggaaatttgtgccctggattcctcaaaggaacaacttcttaaggaagagaagctggtcaaggctacattggaagacgtcaagcatcagctctgctctctctgcggggcagaaggcccttccactctggatgaaggcctgttcttgcggtctcaggaggctgcggccacggtacagctgtttcaggaggagcataggaaggccgaggagttgctcgcggcggcggcccagcgccaccagcagctccagcaaaagtgtcagcagcagcagcagaaaagacagcgactgaaagaggagctggaaaagcacggaatgcaagtgccagcccaggctcagagtacacaggaagaagaggcgggacccggtgacgtggccccacgacccgggcgaccagtgacatggtggagctag

SEQ ID NO: 136839 - DNA, 1056 bp, synthetic construct
  misc_feature 1..1056: note = Description of Artificial Sequence: Synthetic coding sequence
  source 1..1056: mol_type = other DNA
atggcgggtcggagtctgacttctaaagccgaaccaaccgctggagccgtggaccgagctgaaaaggctggcggccaggatacgtcgtctcagaagatcgaggatctgatggagatggtccagaagctgcaaaaagtgggatctctggagccacgggttgaggttctaatcaaccggatcaacgaggtccagcaggccaagaagaaagcaaataaagatctcggtgaagcaaggaccatctgtgaggctctgcagaaagagctggatagcttacacggagaaaaggtgcacttgaaggagatcttaagcaagaagcaggagacactgcgaatcttgcgcctccactgccaggagaaggagtcagaagcacacagaaagcacacaatgctacaagagtgcaaagagcgcatctcagccctcaacctccagattgaagaagaaaaaaataaacagaggcagttgcgactcgcgttcgaggagcagctggaggatcttatgggtcagcacaaggatttgtgggactttcacatgcctgagcgactggctaaggagatttgtgccttggattcatccaaggagcaactgctgaaggaggaaaaactggtgaaggccacattggaggatgtaaagcatcagttgtgcagtctgtgtggtgcggagggcccatctacgttggatgaaggtcttttcctgcgtagccaggaggccgccgcaacagttcaattgtttcaagaggagcatcgcaaggcagaggagctgcttgccgccgctgcacaacggcaccagcaactgcagcagaaatgccaacaacagcagcaaaagcggcagcggcttaaagaggagctagagaaacacggaatgcaggttcccgctcaggcccagagcacccaggaggaggaagcaggtcccggggacgtcgcctcaccaaagcccctgaaaggagagaggcctggcgctgctcaccaagctggccctgacgtcctgatcggtcaggaggataccctccaccccgatctgtctccaagaggcttccaggaaatcaaagaactgttttag

SEQ ID NO: 136840 - DNA, 849 bp, synthetic construct
  misc_feature 1..849: note = Description of Artificial Sequence: Synthetic coding sequence
  source 1..849: mol_type = other DNA
atggagatggtgcagaagctccaaaaggttgggtctctagagccccgggtggaggtgctgattaaccgaatcaatgaggtgcagcaagccaaaaaaaaagcgaacaaggatctcggcgaggcccggacgatttgtgaagccctccagaaggaattagactcactccacggcgagaaggttcaccttaaagagattctgtcgaaaaagcaagagacacttagaatcctgcggttacactgtcaggagaaggagtcggaagcccacagaaagcatacgatgttgcaggagtgcaaagagcgcattagtgcattgaaccttcaaatcgaggaagaaaagaataagcagagacagttgagacttgcatttgaagaacagttggaagatctgatgggtcagcataaggatctctgggatttccatatgcctgagaggctcgcaaaagagatctgtgccttagactctagcaaggagcaattactaaaagaggagaagctggtgaaagcgactctagaagacgtgaagcatcagctctgctcactgtgcggggccgaagggcccagcacgctggatgagggccttttcctgaggtcacaggaggcagctgccactgttcagctttttcaggaagaacatcgcaaagctgaagagcttctggccgccgctgcccagcgccaccaacagctccagcaaaaatgccaacagcagcagcagaagcggcagagacttaaggaagagctagagaaacatggaatgcaagtgccagcgcaagcccaatccacacaggaggaggaggctggtccgggagatgtcgctccaagacccggaaggcccgtaacatggtggagttag

SEQ ID NO: 136841 - DNA, 849 bp, synthetic construct
  misc_feature 1..849: note = Description of Artificial Sequence: Synthetic coding sequence
  source 1..849: mol_type = other DNA
atggagatggtacaaaagcttcagaaggtgggcagtctggagccacgagtggaagtcctgatcaatagaatcaatgaggtgcagcaagccaagaagaaagccaataaggacttaggggaggcgcggaccatttgcgaggccctgcaaaaagaactcgatagcctccacggcgagaaagtacatttgaaagaaattctgagcaagaagcaggagacccttcgcattctgcgcctgcattgccaagagaaggaatcagaggcccatcgcaagcacactatgttgcaagagtgtaaggagaggatcagcgcccttaacctccagatagaggaggaaaaaaacaagcaacggcagctcagactcgcctttgaggaacagctggaggatcttatgggtcaacataaagatctgtgggactttcacatgccggaaagactggccaaggagatctgtgccttggattctagtaaagaacaactactgaaggaagagaagctggttaaggccaccctggaggacgtgaagcatcagctttgttccctctgtggcgccgagggtccttcaactcttgacgagggtcttttcttgcgttctcaggaggctgcagctaccgttcagctgtttcaagaggaacaccgaaaagcggaggagttgctggctgctgccgcacaacgccatcagcaattacagcaaaaatgtcagcagcagcagcagaaacggcaaaggttaaaagaggaattagagaagcacggcatgcaggttcccgctcaggctcaatcgacccaggaagaggaggctgggcctggagacgtggctcctaggcccggaagaccagtgacctggtggagctag

SEQ ID NO: 136842 - DNA, 657 bp, synthetic construct
  misc_feature 1..657: note = Description of Artificial Sequence: Synthetic coding sequence
  source 1..657: mol_type = other DNA
atggagagacaaggtgtggatgtgcctcatgttaagtgcaaagatcaggaaccgcaaccactcggagagagcaaagagcatcccagatgggaagagaattgcgaggaggaggcaggagggggtcctgcgagcgcgtcatgtcaacttacagtgttggaaggcaagagcgggctttacttttcgagccttgatagctcgattgatatactgcagaaacgggcgcaggagcttatagaaaatatcaacaagagtagacaaaaggatcacgcactcatgacgaattttcggaacagtttgaaaacaaaggtgagcgatttgacagagaaattggaggagcgtatctaccagatctataatgaccacaataaaattatccaagagaagctgcaggaattcacccagaaaatggcaaaaatttcacacctggagacagagctgaagcaggtctgccacagcgttgagaccgtgtataaggatctatgtttgcagccagagcagtctcttcgccttcgctggggccccgaccactcgcgcggtaaatcccctccccgcccgggtaatagtcaaccccccgatgtcttcgtgagttctgtcgcagaaaccacatcgcaagcaaccgcttccgaggtccagacaaacagagacggcgaatgctag

SEQ ID NO: 136843 - DNA, 2931 bp, synthetic construct
  misc_feature 1..2931: note = Description of Artificial Sequence: Synthetic coding sequence
  source 1..2931: mol_type = other DNA
atggagaagcagaaaccgttcgcactctttgtgccgccaagatccagttcatcccaggtgtccgcggtgaagccacagactctagggggtgactccacattttttaaaagcttcaataagtgcacagaagacgatttcgaatttccgttcgctaaaactaacctgtccaaaaatggtgagaacattgactctgaccctgcacttcaaaaggtcaactttctgcccgtgctggaacaggtcgggaattccgactgccactaccaggagggcctgaaggatagcgaccttgagaatagcgaagggctgagccgtgtgtatagcaagctatacaaggaggcagaaaaaattaaaaaatggaaggtgagcaccgaagctgaactacggcagaaggaaagcaaacttcaggaaaaccgcaagatcatcgaagcacagaggaaagccatccaagagctgcagtttgggaatgagaaggtgtctcttaagttagaggaggggatccaggaaaacaaggacctgattaaggagaacaatgctacaaggcacttatgtaacttgctcaaggagacatgcgcaaggtccgcagagaaaacaaaaaagtatgagtatgagagagaggaaacacgccaggtttacatggacctcaacaataacattgagaagatgattacagccttcgaggagctgagggtgcaggccgagaatagcaggctggagatgcactttaaactgaaagaagattatgagaagattcagcatttggaacaagaatacaaaaaggaaatcaatgataaggagaaacaggtgtctctgctcctcatccagattaccgaaaaggagaataaaatgaaggacttgaccttcttgctggaagagagtcgcgacaaggtgaaccagctggaggaaaagacaaaactccagagcgagaatctcaagcagtccattgagaaacagcatcatctgaccaaggaactcgaagacataaaagtatccctccagcgatctgtgtcaacgcagaaagccctggaggaggatctgcagattgcaacgaagacaatctgtcaactcacagaagagaaggagacgcagatggaggaatctaataaagcgagagcagcccatagctttgtggtaaccgagtttgagaccaccgtctgctccctggaagagctgctgagaaccgaacaacaaagactggagaagaatgaggatcaacttaagatcctgactatggagctccagaaaaagtccagcgaactcgaggagatgactaaactgacaaacaataaagaagtggagctggaagagctgaagaaagttctcggggaaaaggagactttgctatatgagaataaacagttcgagaagattgccgaggagctcaagggcaccgagcaggaattgataggcctactgcaggcccgtgagaaggaggtacacgacctggaaattcagctcaccgcaataactactagtgagcagtattactccaaagaggtcaaggaccttaaaacagagctcgaaaacgagaaactgaagaacaccgagcttaccagccattgtaataagcttagtctagaaaacaaagagctgacgcaggaaacctccgatatgacattggaactcaaaaatcagcaagaagacatcaataataataagaaacaggaggagaggatgctgaagcagattgaaaatcttcaggagaccgagacacaactcaggaacgaactcgagtacgtcagggaggaactcaagcagaagcgggacgaagtgaagtgcaagttggacaagagcgaagagaactgcaacaatctgcgcaagcaagttgagaataaaaacaagtacatcgaggagctccagcaggagaataaggcacttaagaagaaaggaacggccgagagtaaacagctgaacgtctacgaaatcaaggtgaacaaactggagctggagttagaatccgccaagcaaaaattcggtgagattaccgatacttaccaaaaggaaattgaggataagaagatttctgaagaaaatttgctcgaggaagttgagaaggccaaggtcattgcggatgaggctgtaaaactgcaaaaagaaatcgataagcggtgccagcacaaaatcgccgagatggttgctctcatggagaagcacaaacatcagtacgacaagatcattgaagaacgggattccgaactgggcctgtataaatcaaaagagcaggaacagtcatccctacgcgcatctctggagatcgaactgtccaacctgaaggccgaacttctgagtgtgaagaagcagctcgaaatcgagcgcgaagaaaaggaaaagttgaaacgcgaagcgaaggagaacaccgccacactgaaggagaaaaaggacaaaaagacgcagacctttctgctggagacacccgaaatatattggaaactggattccaaagcggtacccagtcagactgtctctcgaaacttcacgtctgttgaccatggaatctcaaaggacaagcgtgactacctctggactagtgccaaaaacaccctgtccacccctctgcccaaggcttacactgtaaaaactcccactaaacccaaacttcagcagcgagagaacttgaatatccccattgaggagagtaaaaaaaagcgcaagatggctttcgaattcgacataaactctgattcgtctgagacaactgatttgctgtctatggtctcagaggaagagactttaaagaccctatacagaaacaataatccacctgcatcccatttgtgtgtgaaaaccccaaaaaaggccccatcctcactgacaactccgggttccacgctgaagttcggggccattagaaagatgcgagaggatcgttgggcagtgatcgccaaaatggataggaaaaaaaagctgaaagaggccgaaaagcttttcgtgtag

SEQ ID NO: 136844 - DNA, 2931 bp, synthetic construct
  misc_feature 1..2931: note = Description of Artificial Sequence: Synthetic coding sequence
  source 1..2931: mol_type = other DNA
atggagaaacagaagcccttcgccctttttgtgcccccaagaagctcatcaagccaggtgtcagcagtgaaaccccagacactgggaggggactcaacctttttcaagtcatttaacaaatgcaccgaagacgactttgaattcccgtttgcaaaaaccaatttgagcaaaaatggcgagaacattgacagcgacccggccctgcagaaagtcaacttcctccccgtgctggaacaggtcgggaacagcgactgtcattaccaggaggggctgaaagacagcgatcttgagaactctgaaggtttgagtcgcgtatactctaaactgtacaaggaagccgaaaaaattaaaaaatggaaggtgagtaccgaagccgagctacgccagaaagagtctaagctgcaggaaaatcgtaaaatcatcgaagcacagaggaaggccattcaggaattgcagttcggtaatgaaaaggtgtcgttaaaacttgaagagggtatacaggagaacaaggacctgataaaagaaaacaacgctacgcgccacctgtgcaatctcttgaaggaaacatgcgcgaggagtgctgagaaaactaagaaatacgaatacgagcgcgaagaaactaggcaggtgtacatggatctcaacaataatatcgaaaaaatgataactgcctttgaagagctgcgggtgcaagcagaaaattctagactggagatgcatttcaaactgaaggaggactatgagaaaatccaacacctggaacaggaatacaaaaaagaaattaatgacaaggagaagcaggtgtccttacttcttatccagattaccgagaaggaaaataagatgaaggacctgactttcctattagaagaatccagagacaaggtgaaccagctggaggaaaagacgaaactgcagtccgagaacctgaagcagtctatcgagaagcaacaccacttgactaaggagctagaagacattaaggtgtccctgcagcgcagtgtgtccacccagaaggccctggaggaggatctgcagattgctactaagactatttgccagctgacggaggagaaggagacgcagatggaggaaagcaataaggcgcgtgccgcccatagcttcgtggtgacagagttcgagacaaccgtgtgtagccttgaagaactccttcggacggagcagcagagactggaaaagaacgaagatcagctgaaaatcctgaccatggaactgcagaaaaagtcctcagagctcgaggagatgaccaaactcactaataataaagaggttgagctggaggaactgaagaaagtgctgggggagaaggaaactctgctgtacgagaacaagcagttcgaaaagatcgctgaggagctcaaggggaccgaacaggagttgatcggcctcctacaggcacgagagaaagaagtgcacgacttagagatccagctcactgcgatcacaaccagcgagcagtactactctaaggaggtcaaggacctgaagacagaactggaaaacgaaaagctaaaaaataccgaactgacaagtcactgtaacaaactgagcttggaaaacaaggagctgacacaagagaccagcgatatgaccctggagctcaagaatcagcaggaggatatcaataacaataagaagcaggaggaaaggatgcttaaacagatagagaaccttcaagaaacagagactcagctgcgcaacgagctggaatacgtgcgagaggagttgaagcagaaacgagacgaggtcaaatgcaagctggataaatccgaggaaaattgcaacaacctacgcaagcaggtggagaataaaaacaaatacattgaagagctccagcaagagaacaaagccctgaagaagaaaggcacagccgagtccaaacagctgaacgtgtacgagattaaagttaataaacttgagcttgaactcgagagcgctaaacagaagttcggagagattacagatacttatcagaaagagatcgaggacaagaagatctctgaggaaaacctgcttgaagaggtggagaaagccaaggtgatcgctgatgaagccgtcaagttgcagaaggaaattgacaaaagatgccagcacaagatcgccgaaatggttgctttaatggagaaacacaagcatcagtacgataagattattgaggaaagggactcagagttgggcctgtacaaatcaaaggagcaagaacagtcgtcacttcgtgcatccctggagattgaactttcgaacctgaaggctgaactattgagcgtgaaaaagcagctggaaatcgagcgggaagaaaaggaaaagctcaaacgggaagcaaaagagaacacggctacgctcaaggagaagaaggataaaaaaacccagacatttcttcttgaaactcccgagatttattggaaactggacagcaaggctgtcccatctcagaccgttagccggaactttacctccgttgatcacggcataagcaaggataaacgtgattacttatggacgtccgccaaaaacaccctctctacccccttgccgaaagcctataccgtgaagactcccaccaagccaaaacttcaacagcgcgagaaccttaacattcccatcgaggagtccaagaagaagaggaagatggccttcgagtttgacattaactctgattcttctgagacgacagacttgctgagtatggtgtcagaagaagaaacactaaaaacactgtatagaaataacaacccccctgcgtcccacctgtgtgtcaagacaccaaagaaagcacctagcagcctgaccacacccgggagcaccttgaaatttggggcgatccgcaaaatgcgagaagatcggtgggctgtgatcgcaaagatggatcgcaaaaagaaattgaaggaggctgagaagttgtttgtgtag

SEQ ID NO: 136845 - DNA, 2379 bp, synthetic construct
  misc_feature 1..2379: note = Description of Artificial Sequence: Synthetic coding sequence
  source 1..2379: mol_type = other DNA
atggaaaagcagaagccattcgcccttttcgtgccccccagaagttcatcctcccaggtgagtgcagttaaaccgcagactctgggaggtgatagtaccttctttaagtcctttaacaagtgcacggaggacgatttcgagttcccattcgccaagaccaacctttctaagaatggtgagaacattgactccgaccccgctcttcagaaggttaactttctccccgttctcgagcaagtagggaattcggattgccattaccaagaaggcttaaaggatagtgacctggaaaactctgagggactctctcgggtctacagtaagctctataaagaggctgaaaaaataaaaaaatggaaagtgagtacggaagccgaactccgccagaaggaatctaaacttcaggagaaccggaagattatagaggctcagagaaaggcaattcaagaattacagttcggcaacgagaaggtgagcctgaaactggaagaaggcatacaagagaacaaagacctcattaaagagaacaatgcaacgcgtcacctgtgtaatttgcttaaagagacttgtgcaagatctgcagaaaaaacgaagaaatacgaatacgaacgggaagaaacccgacaagtctacatggacttaaataataacatcgagaaaatgatcactgctttcgaagagctgagagtgcaggccgagaacagtaggctcgagatgcattttaagttgaaagaggactatgaaaagatccaacacttagagcaagagtacaaaaaggaaatcaatgataaggaaaaacaagtaagcctgctgctgatccagattaccgagaaagaaaataaaatgaaggacctgactttcctgcttgaagaatctagagacaaggttaatcagctggaagaaaagacaaagctgcaatctgaaaaccttaaacagagcattgagaaacagcatcacctcaccaaagaacttgaggatatcaaggtgagtctccagcgatcagtttctactcagaaagccctcgaagaagacctccaaattgcaacgaagaccatctgccagctcactgaggagaaagaaacccaaatggaggaaagcaataaagcccgggctgcccatagttttgtggtcacagaatttgaaacaacggtgtgttcactcgaagaactcctgaggactgagcagcagcggctcgagaaaaacgaagaccagttaaaaatcctcaccatggaactgcaaaagaagtcctctgaactggaagagatgactaagctgacaaataacaaggaagtcgagctagaggaactaaaaaaagtcctcggagagaaagagacccttctgtatgaaaacaagcagttcgaaaagatagcggaggaactgaagggtacggagcaggagctgattggtctgctgcaggcacgagagaaagaggtgcatgatctagaaattcagctgacggccattacaacaagcgagcagtactactctaaagaggttaaggatctgaaaaccgagctcgagaatgaaaagttaaaaaacactgagctgacttcccattgcaataagctgtccctcgagaacaaggagctcacccaggaaacatctgacatgacactggaattaaaaaatcaacaagaggacatcaacaataacaaaaaacaggaagaacggatgttaaagcagatcgaaaacctgcaggaaacagaaacgcagctgaggaatgaacttgagtatgtccgcgaagaacttaaacaaaagcgcgatgaggtcaaatgcaagctcgataagagtgaagagaattgtaataacctgcggaaacaagttgagaacaaaaataaatacatagaggaactgcagcaggaaaataaggcactcaagaagaagggaaccgctgaaagcaagcagttgaatgtgtacgaaattaaagttaacaagctcgaacttgagctggaatcggccaagcagaaatttggcgagattactgacacttaccagaaagaaatcgaggacaaaaaaatctccgaagagaatctccttgaggaagtagagaaagcgaaggtcattgcggacgaggcagtgaagctacaaaaagaaatcgataaacgctgccaacataagatcgccgaaatggtcgcccttatggaaaaacataagcaccagtacgataaaataatagaggagcgggactccgaacttggcctgtacaagtccaaggaacaagaacagagcagcctgcgagcctctctcgagatcgagctgtctaacttgaaagccgagctgttatcggtcaagaagcagctggaaatcgagagggaggaaaaagaaaaactaaaacgtgaggcaaaggaaaacaccgcgacactgaaggagaaaaaatag

SEQ ID NO: 136846 - DNA, 2388 bp, synthetic construct
  misc_feature 1..2388: note = Description of Artificial Sequence: Synthetic coding sequence
  source 1..2388: mol_type = other DNA
atggagaaacagaagcctttcgcactctttgtgccccctaggagctcaagtagccaggtgtccgcagtgaaacctcagacactgggaggtgactctacattctttaaaagctttaataaatgcactgaggatgatttcgaatttccattcgccaagacaaatctaagcaagaatggcgaaaacatcgactctgaccctgctttacagaaggttaactttttgcccgtgttagaacaggtcgggaacagcgattgtcactaccaagagggtttgaaggactctgaccttgaaaattccgaagggctgtctcgggtgtactccaaactgtacaaggaggcggagaaaattaagaagtggaaggtttctacggaggccgagctgcgccaaaaggagagtaaattacaggagaatagaaagatcattgaggcccagcgcaaagctattcaggagctccagtttggcaatgagaaggtctccctcaagttggaagaaggtatccaggagaataaggacttaatcaaggaaaataacgcaacacgccacctgtgtaacctgctcaaggagacttgtgccaggtccgcagagaagacaaagaaatatgagtacgagcgcgaggaaacaagacaggtatacatggacctgaataataacatcgagaaaatgatcacagcgttcgaggaactgcgcgtccaggcagaaaatagtagactggagatgcactttaagctgaaggaggattacgaaaaaatacagcacctggagcaggaatacaagaaagaaattaatgacaaagagaaacaggtgtccctcctgctgatccagatcactgagaaggagaataagatgaaggacctgacgttcttgctggaggagagcagggataaggtaaaccagttggaggagaagacaaaactccaatcagagaatctgaaacaatctatcgagaaacaacaccacctgacgaaggagcttgaggacatcaaagtgtctttgcagaggagcgtgtctacacagaaggcgttggaggaagacctgcaaatcgcaacgaaaacaatctgtcagctgaccgaagaaaaggaaacacaaatggaagaaagtaacaaggccagggcagcccattctttcgtcgtgacagagttcgagacaactgtgtgcagcttagaggagctgctgcgcacagagcaacagaggttggaaaaaaatgaggaccagctcaagatcctgaccatggagttgcagaagaagtcttcagaactggaggagatgactaagctgaccaataacaaagaggtcgagcttgaggaactgaaaaaggtcctgggggaaaaagagaccttgctttacgaaaacaagcaatttgaaaagattgcagaggagctgaaaggcactgagcaggaactcattgggttgctgcaggctagagagaaagaagtccatgacctcgagatccagctgacggcgattactacgagtgaacagtactatagcaaagaagtcaaagatctgaagaccgaactcgagaatgaaaaattgaaaaacactgaattaacttcccactgtaacaaattgagcctggagaataaggagctcactcaagagacttccgatatgaccttggagctcaagaatcagcaagaggacatcaataacaacaagaagcaggaagagcggatgctcaagcagatcgaaaatctgcaagaaacagaaacccagctgcgaaatgaactggagtatgtccgtgaagaacttaaacagaaaagagacgaagtgaagtgcaagctcgacaagagcgaggaaaattgtaacaatttgagaaaacaggtggagaacaaaaacaagtacatagaggagctccagcaagaaaataaggccctcaaaaagaaaggcaccgcggagtcaaagcaacttaacgtctatgagatcaaagtgaacaagttagaactggaattggagagcgccaaacaaaaattcggtgaaatcaccgatacttaccagaaggagatcgaggacaaaaaaatatcggaggaaaaccttctggaggaagttgagaaggcgaaggtgatagcagacgaggcagtcaaactgcaaaaggaaatcgacaagagatgccagcataagattgctgaaatggtggccctgatggaaaagcataagcaccagtacgataagatcattgaagaacgcgactctgagctgggcctgtacaaatctaaggagcaggagcaaagttctctcagggcaagtcttgagattgaactgtcaaatcttaaggctgagctcctcagcgtgaagaaacaactagagatcgaacgggaggaaaaggaaaagctcaagagagaagccaaggaaaacactgctacactcaaggaaaagaaagataaaaaatag

SEQ ID NO: 136847 - DNA, 4593 bp, synthetic construct
  misc_feature 1..4593: note = Description of Artificial Sequence: Synthetic coding sequence
  source 1..4593: mol_type = other DNA
atgccaatcagacctgacctgcagcagctggagaaatgcatcgatgacgcccttcgcaaaaatgacttcaagcccctcaaaactctgctccagattgacatctgtgaagatgtgaaaatcaaatgcagcaaacagttcttccacaaagtcgataacttgatttgccgcgagctgaataaagaggacattcacaatgtatctgccattctcgtgtccgtgggtcgatgcgggaaaaatatctcagttctgggccaggcaggcctgctgactatgatcaaacaggggctgatacagaagatggtggcctggttcgaaaaaagtaaagacataatacagtcgcaggggaattccaaggatgaagccgttctgaatatgatcgaggatcttgtagatttgttgctcgtgattcacgacgtttcagacgaagggaagaaacaagtggttgagagttttgtccctaggatatgttcactggtgatcgattccagggtcaatatttgtatccagcaggaaatcattaagaaaatgaacgccatgctcgataagatgccccaagatgctagaaagatcctgtccaaccaagagatgttaatcttgatgagcagcatgggggagcgcattcttgatgcaggtgattacgacttgcaggttggcatcgtggaagcactgtgcagaatgactaccgaaaaacaacgccaggaactcgcccaccagtggttttctatggatttcatagcgaaagcctttaagaggatcaaggactccgagttcgagactgactgtaggattttcctgaacttagtgaatgggatgttaggagataaacggcgagttttcacatttccttgtctcagcgcctttctggacaagtatgagctgcagatccctagcgatgagaagctcgaggagttctggatcgatttcaatctcggaagccagactctgtcgttttatattgcaggagacaacgacgaccatcagtgggaggccgtcacagtgcctgaggagaaggtccagatctactccatcgaggttagagagagcaagaagctactcaccatcatcctgaaaaataccgtgaagatcagcaagcgagagggaaaagagctgctgctgtacttcgacgcctccctggagatcacaaacgtgacacagaagatcttcggcgccaccaaacaccgcgagagcattcggaagcagggtatctccgtggcgaaaacatccctgcatatactttttgatgcttccggttcccagatccttgtgcccgagagccaaatatcacccgtgggggaggagttagtcagcctcaaagaaaaatcaaagtctccgaaagaattcgcaaaacctagtaaatacattaaaaacagtgacaagggaaacaggaataatagccagttggagaagactacccccagcaaaaggaagatgtctgaggccagtatgatcgtgtccggcgccgatcgctacacaatgaggtctccagtccttttctccaataccagtatcccgcctagacgcagacgcatcaagccacccttgcaaatgacatcttccgcagaaaagccttccgtgtctcagacctcggagaatcgcgtggataacgccgctagcctgaagtctagaagctctgagggaagacacagacgagacaatattgataagcatatcaaaacagccaagtgtgtggagaacactgagaacaagaatgtcgaattcccaaatcagaacttctctgagctgcaggatgtgattcctgattcccaggctgctgagaagagggatcatacgatcctgcctggtgtgctggataatatctgtggcaacaagatacattccaaatgggcctgctggacaccagtgacaaacatcgagctttgcaataatcagagggcttcaacaagctccggtgacaccttaaaccaagacatcgtgattaataagaaactaacaaagcagaagtccagctcttccatctcggaccacaattccgaggggaccgggaaggtcaagtataaaaaggagcagacagatcacattaaaatcgacaaagcagaggtcgaggtttgtaaaaaacataatcagcagcagaaccaccccaaatactctgggcagaagaacactgaaaacgccaaacagtcagattggccagtagagtcggagacaacgttcaaatctgtccttttgaataagaccatcgaagaatcattgatctacaggaaaaagtacatcctgtccaaggatgtgaacacagctacttgcgacaagaacccctctgcttcgaagaacgtacagtcccataggaaagcggagaaagaacttacctcagagctgaactcctgggatagtaagcagaagaaaatgagagagaaaagtaaagggaaagagtttacaaacgtggcagaaagccttatttctcaaatcaataagagatataaaacaaaggacgacattaagagcaccaggaaactcaaggagagcttgattaattccggcttttccaacaagcctgtggtgcagctgtctaaggagaaagttcagaaaaaaagctacagaaaacttaagaccaccttcgtgaatgttaccagcgaatgcccggtgaatgacgtctacaactttaacctgaatggagctgacgaccctatcatcaagttggggattcaggagttccaggctaccgccaaagaagcctgtgccgacagatccattaggctggtggggccaagaaatcatgatgagcttaagtcgagcgttaagacaaaggacaaaaaaatcatcaccaaccatcagaagaaaaacttgttctccgacacggaaacggagtaccgctgtgatgatagtaaaaccgacatatcctggctcagagagcctaagagcaagcctcagctgattgactatagtagaaataaaaacgtcaaaaaccataaatcaggtaagtctcggtcctctctggagaagggccagccatcttctaagatgacgccctcgaagaatattaccaagaagatggataagactataccggagggtaggatccgcctgcccagaaaagctaccaaaaccaagaaaaactacaaggatctctccaactcggagagcgagtgtgaacaagagtttagtcattccttcaaggagaacataccagtgaaagaagagaacatccacagtcgaatgaaaacagtcaagctgccaaaaaagcagcagaaggtgttttgcgccgagacagagaaggagctaagtaagcagtggaagaatagtagcttactgaaagatgctattcgtgataactgccttgatttaagtcccagatctctcagcggtagcccctcaagcatcgaagtcaccagatgtattgagaagatcaccgaaaaggactttacgcaggactacgactgtataacaaaaagcattagcccctaccccaagacatcttctctggagagtctcaattccaacagcggtgtcggaggcacaatcaaatcccctaagaataatgagaagaactttctctgcgcatctgagagttgtagcccaatcccccgacccctgtttttgccacgtcacacgcccactaagtccaacactatagtgaatcgcaagaaaatcagtagcttggttctgactcaggagactcagaatagtaattcctacagcgatgtgagcagctactcctccgaggaaagattcatggagatcgaatcacctcacatcaacgaaaattacatacagagcaaaagagaggaatctcatttggccagctcattaagtaagtccagcgagggccgagagaaaacctggtttgacatgccttgcgacgcaacccatgtaagcgggcctacacagcacctcagccgaaagagaatttatatcgaagacaacctctccaacagcaatgaagttgagatggaagaaaaaggagaaaggcgggccaacttgttgcccaagaagctctgcaagattgaagacgccgatcatcacattcacaagatgtcagagtctgtgtccagcttatctactaatgatttcagcatcccatgggaaacgtggcaaaacgaattcgcggggatagagatgacctacgagacctatgaacgacttaactcagagtttaaacgtagaaataacattagacacaagatgttatcatactttactacacaatcgtggaaaactgcccagcagcacctgcgcacaatgaaccaccagtctcaggatagtagaattaagaagctcgataaattccagtttataatcatcgaggagttagaaaactttgagaaagatagccagtcattgaaagatcttgagaaggagtttgtggatttctgggaaaaaattttccagaagttctccgcctaccaaaaaagcgaacaacagagactccatctactcaaaacttctttggcaaagtccgttttctgcaacaccgattcagaggaaaccgttttcacttctgaaatgtgcctgatgaaggaagacatgaaggtcctgcaggacagactcttaaaggacatgctagaggaggaactgcttaacgttcggcgggagctgatgtctgtgttcatgagccacgagagaaatgctaatgtttag

SEQ ID NO: 136848 - DNA, 4593 bp, synthetic construct
  misc_feature 1..4593: note = Description of Artificial Sequence: Synthetic coding sequence
  source 1..4593: mol_type = other DNA
atgcctatacggccagatctgcagcagcttgagaaatgcatagatgacgctttgaggaaaaacgactttaagcccctcaagactctgctgcagatcgacatctgtgaggatgtgaagattaaatgctctaaacagttttttcataaggtcgataacctgatatgtcgggagctgaacaaggaggatatccacaatgtcagcgcgatcttggtgtctgtcggcaggtgtgggaaaaacatctctgtcctgggacaggccggtctcctgaccatgattaaacaaggcttaatccagaaaatggtcgcgtggttcgaaaagagtaaagacattatccagagtcaaggcaatagcaaggacgaagccgtcctcaacatgatcgaggatctggtggaccttctgctcgtaattcacgacgtctccgatgagggtaaaaagcaggttgtcgagagttttgtccctcggatatgctcactcgtgatcgactctcgagtgaatatttgtatacaacaggaaattatcaaaaagatgaatgctatgttagacaaaatgccacaggatgctcgcaagattctgagtaaccaagaaatgctgatcctgatgtccagcatgggggagagaatactggacgcaggagactatgatctccaagtcgggatagtagaagcactttgccggatgactactgagaaacagaggcaggaactggcccaccagtggttctccatggattttatcgcaaaggcatttaagaggattaaggactcagagtttgagactgactgcagaatctttctaaatctggttaacggcatgctcggcgacaagagaagagtgttcacattcccgtgcctctccgccttccttgataagtacgagctgcagattccatccgacgaaaaattggaagagttctggatagacttcaatcttggatcgcagacgctgagcttctatatcgcgggtgataacgacgatcatcagtgggaggccgtcaccgtgcccgaagagaaagtgcagatttattccatcgaagtcagggagtcaaaaaaactattaacaattattttgaagaacacagttaagatctctaagcgggaggggaaggaacttctcttgtatttcgatgcttcattggagatcactaacgtgacgcaaaaaatcttcggcgcaactaagcacagggaatccatcagaaagcagggcatatcagtagccaagacctctctgcatattctcttcgacgcttcgggctcgcagatcctagtgccggaatcccagatatctccggtaggcgaagagctagtgtctctgaaggagaagtccaagtccccaaaggagtttgccaagcccagtaagtacataaagaactcagataaagggaatcggaataactctcagctagagaagaccactccaagtaagagaaaaatgagcgaggcctcaatgatagtaagcggggcagatcgatataccatgaggtccccggtgctgtttagtaatacctcaattcctcctcgaagaaggcgcattaagccccccctgcagatgacctccagcgcggagaagccctctgtaagtcagacaagtgaaaatcgagtcgacaatgccgcatctcttaagtccagatcatcggaaggaaggcataggagggacaacattgacaaacatattaagacagccaagtgcgtagagaacactgagaataagaacgtggagttcccgaatcagaatttcagtgagcttcaggatgtgatacctgacagccaggcagccgaaaaaagggaccacacgattcttcctggggtgctggataatatttgcggaaacaagatccattctaagtgggcctgttggactcctgtcaccaacattgagctatgcaacaaccagcgggcttctacaagctcaggcgacacactcaaccaggatatagtcattaacaagaaactcaccaaacagaagtccagttcctcaatcagcgatcataattccgaaggcacgggaaaggtgaaatacaaaaaggaacagaccgaccacattaagattgataaggccgaagtggaagtctgcaaaaaacacaatcagcagcagaaccacccaaaatatagcggccaaaagaacaccgagaacgctaagcagtcagattggccagtcgagtcagaaactacttttaaatccgtgcttctgaacaaaaccatagaggagagtcttatttatagaaagaaatacattcttagtaaggacgtgaataccgctacatgcgacaaaaaccctagcgcatcgaagaacgttcagtcccaccgtaaggctgagaaggagcttacctcagagctaaattcctgggactctaaacaaaaaaagatgagggaaaagtccaaaggtaaagaatttactaacgtggcagaatcccttatctctcagattaataaacggtacaagacaaaagacgacataaaaagtacgcgaaagctaaaagagtccctcatcaactccgggttcagtaacaagcctgtggtccagttgagtaaagagaaggtgcagaagaagagctaccggaaactcaagacaaccttcgttaacgtcacatccgagtgcccggttaacgatgtctataatttcaacttaaatggcgccgacgatccgatcatcaaactgggtattcaggaattccaggcaactgcgaaggaagcctgcgcagatcgtagcattagactggtgggccctcggaatcacgacgaactaaagagcagcgtgaagactaaagacaagaaaataattactaaccaccaaaaaaagaatctgttctcggatacagagacagagtacaggtgtgatgatagtaagaccgacatctcctggctccgggagcccaaaagcaagccccagctgatcgattacagccgcaacaaaaatgtaaagaaccacaagagcgggaagtcccgaagctccctggagaaaggacaaccttctagcaaaatgactcccagtaaaaatataacaaagaaaatggacaagacaataccagagggtaggatccgacttcctcgtaaggccactaagactaaaaagaactacaaagatctcagcaattctgagagtgaatgcgagcaggagttcagccactccttcaaggaaaatatccccgtaaaggaggaaaacattcactcccggatgaagacagtgaaacttcccaaaaagcagcaaaaagtattctgcgctgaaaccgaaaaggagttgagtaaacagtggaaaaattcatcgctgctcaaagacgctattagggataactgtctggatttatctcctagatccctgagcgggtctccctcttccatcgaagttacccggtgcattgaaaaaatcacagagaaggatttcacacaggattatgactgtattacgaagtcgatatcaccatacccaaaaacctcctctctcgagtctctcaactccaactctggtgtgggcgggacaatcaaaagtccgaaaaacaatgagaagaattttttgtgtgcttctgagagctgctctccaatcccccgtccattattcctgccccgccacacaccaaccaagtctaatacaatagtgaaccgcaagaagatcagctctctcgtgctcactcaggagacacagaactccaattcctattccgatgtttcctcatactcatctgaagagagatttatggagatagagagtcctcatattaacgaaaactacatccagtcaaagagagaggagtcccaccttgcctctagcctcagcaagagctcagaagggagagaaaagacctggttcgacatgccatgtgacgccacccatgtgagcggtccgacccagcatttaagtcgaaaaaggatttacatagaagataatctgtctaacagcaacgaggtagagatggaggagaaaggcgagcgtcgggccaatctgctgcctaagaaactctgcaagatcgaggatgccgatcaccatatacacaagatgagtgagtccgtgagttccctgagcactaacgattttagcattccatgggaaacttggcagaacgagtttgctggaatcgagatgacctatgagacatacgagcgactgaactctgaatttaagcgcaggaacaatattagacataagatgctttcatacttcacaactcagagttggaagaccgcacagcagcatctgaggaccatgaaccaccagtcccaagatagccggattaaaaaactggacaagttccagtttataattatagaggaattggagaattttgaaaaggacagccagagcctgaaagacctcgaaaaagagttcgtggatttctgggaaaaaatatttcagaaattctcagcgtatcagaagtccgaacagcagaggcttcacctgctgaaaacaagcttggcgaagtcagtgttttgcaacactgatagcgaggagacggtgtttactagtgaaatgtgccttatgaaggaggatatgaaggtccttcaggacaggctgctgaaagacatgctcgaggaggagctcctgaatgtgaggcgagagctaatgtctgtcttcatgtctcacgagcggaatgccaacgtctag

SEQ ID NO: 136849 - DNA, 3072 bp, synthetic construct
  misc_feature 1..3072: note = Description of Artificial Sequence: Synthetic coding sequence
  source 1..3072: mol_type = other DNA
atgcccatccgtcccgacctgcaacagctggaaaagtgtatagacgatgccctccgtaaaaatgatttcaagcccttgaagaccctccttcagatcgacatatgcgaggatgttaaaatcaagtgttccaagcagttttttcacaaggttgacaatctgatttgtagagagctcaataaagaagatattcataacgtaagcgctatattggtttccgtaggaagatgcggtaaaaacatctctgtgctcggacaggctgggctgctgacaatgattaaacagggtcttattcaaaagatggttgcttggttcgaaaagagcaaggacatcattcagtcacaaggaaacagtaaggacgaagcagttctcaatatgatcgaagacctcgtggatcttctgcttgtcattcacgatgtttcagatgaggggaagaaacaggttgtggaatctttcgtcccccgcatatgcagtttggttattgactctagagtcaatatttgtatccagcaggaaatcattaagaaaatgaatgcaatgttggacaaaatgccccaagacgcccgaaaaatcctgtccaaccaggagatgctaattctgatgagcagcatgggggagaggatcctcgacgctggggactatgatctgcaagttgggatagtggaggcgctgtgccgcatgaccactgagaagcagaggcaggaacttgctcaccagtggttttctatggacttcattgccaaagcgttcaaaaggattaaggactctgagttcgagactgactgccgtatctttctgaacctcgtgaatggcatgctcggtgataaacgacgtgtattcacttttccttgcctgagtgcttttctcgacaagtacgagcttcaaatcccctctgatgagaaactagaggagttttggatcgactttaacctgggcagccagacactttccttttacatcgccggcgataacgatgatcatcaatgggaggctgtcaccgtccctgaggaaaaggtgcagatttacagtattgaagtgcgcgaatccaagaaactcctgacaatcattctgaaaaataccgtgaagatctccaaacgggaggggaaagaattgctcctttatttcgacgcatccctcgagatcaccaacgtgacacagaagatctttggagcgaccaagcacagggagagcatccgtaaacaggggatctctgtggcaaagaccagcttgcacatccttttcgatgccagcggaagtcagatcctggtccccgagagtcagatttcacccgtcggggaagaactcgtgtctctgaaggagaagtccaaaagccccaaggagttcgccaaaccttctaaatacatcaagaattcggataagggaaatcggaacaatagtcagctcgagaagaccaccccttcgaaacgcaagatgagcgaggctagcatgatcgtttctggagccgaccgttacacaatgagatctccggttctctttagcaatacatcaattcctccccggaggcgccgtattaagcctccccttcagatgaccagcagcgccgaaaaaccatccgtgtcgcagacttccgagaaccgggtggacaatgctgcatcactcaagtctcgctcatccgaagggcgacatcgacgcgacaacatcgataagcacatcaaaacagctaagtgtgtcgagaataccgagaacaaaaacgtggagtttccgaaccaaaacttctctgagctgcaggatgttatccccgactcccaggctgctgagaaacgcgaccacaccatactgcccggggttctagacaatatttgtggcaacaaaatccactctaaatgggcttgttggacccccgtgacaaatatcgagctttgtaataatcagagagccagtacttcttcaggggataccttgaaccaagatattgtcatcaacaaaaagctgacgaagcagaagtcgagcagttctatcagtgaccataatagcgagggaacgggcaaagtgaaatataaaaaagagcagacagatcacattaagatagataaggccgaggttgaagtgtgcaagaagcacaatcagcagcagaatcaccctaagtactctggtcagaaaaatacagagaacgctaaacagtctgactggcccgtggagtctgagactaccttcaagtccgtgttgctcaacaagacaattgaagagtctctgatctaccgcaagaagtatattctgagcaaagacgtcaacactgccacctgcgacaagaacccatcagcgagcaagaacgtccagagtcaccggaaggcggagaaggaactcacgtcagagctgaactcatgggacagcaagcagaaaaagatgcgtgagaaatcaaagggcaaggaatttacgaatgtggcagaaagtctgatcagccagattaacaagcgatataagaccaaggatgatataaaaagcacacgcaaactcaaggagagcctgattaactctgggttctctaataagcctgtcgtccagttgtcaaaagaaaaagtccaaaagaaatcatataggaaattaaagacgacattcgtgaacgtgacgtctgaatgccctgtgaacgatgtttacaattttaacctgaacggagccgacgatcctatcatcaaactcggcattcaagagttccaggcaacggccaaggaggcctgtgctgataggtccattaggctcgtgggacctcgtaaccacgacgagttaaagtcctccgttaaaacgaaagacaagaagatcattacaaatcatcaaaagaagaatttattctcagatactgagaccgagtaccgctgtgatgactccaagacggatatctcgtggctgcgcgagcctaagtccaagccccagctgattgactattcaaggaacaagaacgtaaaaaatcacaagtcaggaaagagtaggtcttccctcgaaaaggggcaacctagcagcaaaatgacaccttctaaaaatataactaagaagatggacaaaaccatccctgagggacggatacgtctgcccaggaaggccaccaagacaaagaagtag

SEQ ID NO: 136850 - DNA, 711 bp, synthetic construct
  misc_feature 1..711: note = Description of Artificial Sequence: Synthetic coding sequence
  source 1..711: mol_type = other DNA
atggtcagctccggcaaaaagtactcccggaagtctggcaaaccttctgtggaggatcaattcactcgtgcttacgactttgagacagaggataagaaggatctgtctggctccgaggaggacgtgatcgaagggaagacggccgttatcgagaaaagacgcaagaaacggtccagtgcaggggttgtcgaggacatggggggcgaagttcagaatatgctagagggcgtcggagtagacatcaataaggccctactggctaagagaaaacgactggagatgtatactaaagcctcccttaagactagtaaccagaagatcgagcatgtttggaagacacagcaagatcagcggcagaaacttaatcaggagtattcccaacagttcctgacactgtttcagcagtgggacctggatatgcagaaggccgaggaacaagaagaaaagattttgaatatgttcagacagcagcaaaagatcttgcaacaaagcaggatcgttcagtcccagaggttgaagacaattaaacaactgtatgagcaatttataaaaagcatggaagagctggagaaaaatcacgataatctcctaacaggcgcccagaatgaattcaaaaaggagatggccatgctgcagaaaaaaattatgatggagacacagcagcaagaaatcgcgagcgttcgtaaatctctgcagtctatgttattttag

SEQ ID NO: 136851 - DNA, 711 bp, synthetic construct
  misc_feature 1..711: note = Description of Artificial Sequence: Synthetic coding sequence
  source 1..711: mol_type = other DNA
atggttagttctgggaaaaagtacagtcgaaagagcggcaagccttcagttgaagatcaatttactcgtgcttatgatttcgagaccgaggataaaaaagacttatctggctctgaagaggacgtaatcgaaggcaaaaccgcggtaatagaaaagcggcgtaaaaaaagatcatcagcaggtgtcgtcgaggacatggggggagaggtgcagaacatgttggagggagtcggggtcgatatcaacaaggcgctgctggctaagcgcaagcggctggaaatgtacaccaaggccagcttgaagactagtaaccaaaaaatcgaacatgtgtggaaaacccagcaagaccagcgccagaaacttaaccaggaatactcccagcagttcctgaccctctttcagcagtgggatttggatatgcagaaggcagaagagcaggaggagaagattcttaacatgtttaggcagcagcagaagatcttgcagcaaagcaggattgtccagtctcagaggctcaaaacgattaagcagctttacgaacaattcattaagtctatggaggagttggagaaaaatcatgacaatctgctcacaggagcccagaacgagttcaaaaaggaaatggcaatgctgcagaaaaagattatgatggaaacccaacaacaagagatagcctccgtacggaagagcttgcagtccatgctgttttag

SEQ ID NO: 136852 - DNA, 711 bp, synthetic construct
  misc_feature 1..711: note = Description of Artificial Sequence: Synthetic coding sequence
  source 1..711: mol_type = other DNA
atggtaagtagtggaaaaaaatactcaaggaagagcggcaagccctccgtggaagatcagttcaccagagcctatgactttgagacagaagacaagaaagacctttcaggcagtgaggaagacgtcatcgaaggtaagaccgcggtgatagaaaagagaaggaaaaagaggtcatccgctggggttgtcgaggacatggggggtgaggtccagaatatgctggagggcgtcggggtggacatcaacaaagccttgttggccaagcgcaagcggctggagatgtacaccaaagcgtctttgaagacatctaatcaaaagatagagcatgtttggaaaacacagcaggatcagcgacagaagctcaaccaggagtacagccagcaattcctgacattgtttcaacagtgggacctcgacatgcaaaaggcagaagaacaagaggagaagatcctcaatatgtttaggcagcagcaaaaaatcctccagcagtctcgcatcgtccagagccagcggcttaaaactatcaagcagctgtatgagcaatttattaaaagtatggaagagctggagaaaaaccatgataacctgctcaccggcgctcagaacgagttcaagaaggagatggccatgctccagaaaaagattatgatggaaacccagcagcaagaaatcgcgtcagttaggaagtctcttcagtctatgcttttttag

SEQ ID NO: 136853 - DNA, 942 bp, synthetic construct
  misc_feature 1..942: note = Description of Artificial Sequence: Synthetic coding sequence
  source 1..942: mol_type = other DNA
atgcttctgctcgcagatatggatgtggtgaatcagctggttgccggcggacagtttcgggtggtgaaggagcctctcggatttgtgaaggtgctacagtgggtcttcgctatctttgccttcgccacctgcggttcctactcaggagaattacagttaagcgtggattgcgccaacaagactgaatctgacctgtctatagaggttgagttcgagtatcccttccgactgcaccaggtgtactttgatgcacccacctgccggggcgggactaccaaagttttccttgtcggtgattatagctcttcagctgaattctttgtcactgtcgctgttttcgcctttttgtactctatgggagccctggccacatatattttcctacagaacaaataccgcgagaataacaagggccccatgctggactttctcgcaacagctgtgttcgccttcatgtggctggtctccagctctgcatgggctaagggattgagcgatgtaaaaatggcgaccgatcctgaaaatattattaaagaaatgcctgtgtgcaggcagacaggaaatacgtgcaaagagttgcgtgatcctgtgacatctgggctgaacaccagcgtagtgttcggctttctcaacctggtactctgggtcgggaacttgtggttcgtcttcaaggaaaccggctgggcggctccctttctgagagcccccccaggtgcgcccgaaaagcagcctgcgccgggagacgcttacggcgacgctggttatggccagggacctggaggatacggcccccaggatagctatggccctcagggaggctaccaaccggactatggccagcctgcggggtcaggcggcagtggatatggaccacaaggggattacggccaacagggatacggaccgcaaggggcacccacctcgttttccaaccagatgtag

SEQ ID NO: 136854 - DNA, 942 bp, synthetic construct
  misc_feature 1..942: note = Description of Artificial Sequence: Synthetic coding sequence
  source 1..942: mol_type = other DNA
atgctcctactggccgacatggatgtcgtaaaccagctcgtggcagggggtcagtttagggttgtcaaagaacctttaggttttgtgaaagttctccagtgggtcttcgcgatattcgcctttgcaacctgcggcagttattccggcgagctgcagctgagtgttgattgcgcaaataaaaccgaatctgaccttagcatcgaggtcgaatttgagtacccatttagactgcatcaggtgtactttgatgcacctacttgccgtgggggaaccacgaaggttttcctggtgggcgactactctagctcggcggaatttttcgtaaccgtggccgtgttcgccttcctttattctatgggggcactggccacatatatattcctccagaacaaatatagggaaaacaataagggacccatgctcgacttcttggcaactgccgtgtttgccttcatgtggttagtctcgagcagtgcttgggcgaaaggactgtccgatgtgaagatggcaaccgaccccgagaatattatcaaggaaatgcctgtgtgccggcagactgggaacacatgtaaggaacttagggaccctgtcacgagcggcctaaatacatcagttgtgttcgggtttctgaacctggtgctgtgggtgggaaacctctggttcgtgttcaaggagactggttgggccgcaccctttctccgtgctccaccaggagcccctgagaaacagcccgcgcctggcgatgcctatggcgacgccggttacggccagggaccaggaggttacggaccacaggactcttatggtcctcagggaggctatcagcctgattatggtcagccagctggcagtggggggagcgggtacggccctcagggggattatggccagcaggggtacggtccgcagggcgcgcctacctctttcagcaaccagatgtag

SEQ ID NO: 136855 - DNA, 588 bp, synthetic construct
  misc_feature 1..588: note = Description of Artificial Sequence: Synthetic coding sequence
  source 1..588: mol_type = other DNA
atgggggcccttgccacctacatctttctccagaacaaatatcgcgaaaataacaagggacctatgctcgacttcttggctactgctgtgtttgccttcatgtggctggtctcatcctcagcgtgggctaagggcttatctgatgttaagatggccaccgatcctgagaacatcatcaaggagatgcccgtgtgcagacagacaggcaacacctgtaaagagctgcgtgatcccgtgacatccggcctgaatacaagcgtcgttttcgggttcctaaacctggtgttatgggtcggcaacctgtggtttgtttttaaagagactggctgggccgcaccgtttctcagagccccacctggtgctcctgagaaacagcccgcgcccggcgacgcttatggcgatgctggctatgggcaggggcccggcggatacggaccccaggatagctatggaccccagggcggctaccagccagattacgggcagcctgcaggctcaggggggtctgggtatggtcctcagggcgactatggccaacaggggtacggaccccaaggagcccctacctccttctccaatcaaatgtag

SEQ ID NO: 136856 - DNA, 2712 bp, synthetic construct
  misc_feature 1..2712: note = Description of Artificial Sequence: Synthetic coding sequence
  source 1..2712: mol_type = other DNA
atggaaggctattcagaggaggcgtccctcctccgccacctggagaaggtcgcttctgaggaagaggaggtccccttggtggtctacctcaaagagaatgcggctctgctgacagccaatggcctgcatctctcccaaaaccgagaagcccagcagagttctcctgcgccccctcccgccgaggtccactctcccgcagccgacgtaaaccagaacctggctagccccagtgcgacgctcactacccctacctccaattcttcgcataatccccctgccaccgatgtgaaccagaatccacctgccaccgtggtgccccagagcctgccactatcatcaattcagcaaaattcttcagaggctcaactgcctagcaacgggacggggcccgcctctaaaccaagtacattatgtgctgacgggcaaccccaggcaccggccgaagaagtcaggtgtagtaccctgttgatcgataaggtgtcgacccctgccaccaccacctctacgttcagtagagaggctaccttaataccaagtagtaggccacccgccagtgacttcatgagctctagcctgctaatcgatattcagcctaacactcttgtggtctcagcggatcaggaaatgtccggtagggccgccgcaactactcccactaaggtttattctgaagtgcattttacgctggcgaaaccacccagcgtggttaaccggacggctagaccctttggtatccaggcacccggaggtacaagccagatggaacgctcgccgatgctggagcggcgccacttcggggaaaaggcaccagctccccagcctcccagcctgcccgaccgcagcccgaggccacagcgccacattatgtcccgctctcccatggtggaacgacgcatgatggggcagagatctccagcctcggagcgccgacccctcgggaacttcaccgccccccccacatatactgagacactctctaccgcaccactggcatcgtgggtgagatcacctccatcttattctgtcctttatcctagttccgacccaaagtcctcacacctgaaaggccaggccgtccccgcctcaaagacaggcattctggaggagagtatggccagacggggctcccgaaagagcatgtttacattcgtcgagaaaccaaaggtgacccccaaccccgacctgctcgacctggttcagaccgctgacgagaaaagacgtcagcgagatcaaggagaggtgggcgtggaggaagaaccctttgccctcggtgctgaggcatctaacttccagcaggaaccagctccaagggatcgagcgagtcccgctgcagctgaggaggtcgtgcccgaatgggcttcctgtttgaaatctccccgcattcaggccaagccaaaacctaagcccaaccagaatcttagcgaggcttctggtaagggagctgagctctacgcaaggagacagtcgcgcatggagaaatacgtgatcgagagcagttcccatactcccgaactggcccggtgcccaagccccactatgtccctcccctcttcatggaagtatcctaccaacgctcccggggcattccgggtggctagcaggtctcctgcccgcactccgccagcatcgttataccatggttacctccctgagaatggcgtcttgcgcccagagcctacgaagcagcccccctatcagctaagaccatctctgttcgtacttagccccattaaagagcctgccaaagtatcccctcgagccgcgagcccagccaaaccatcttctctggacctggtgccgaatttgcccaagggtgctttgcccccgagccccgccctgccgcggcccagtcggtcgtctcccggcttgtacacatcccctggtcaggattctcttcaacctaccgcggtgagccccccttatggcggtgacatcagcccggtctctcctagtcgagcgtggagcccgcgcgcgaagcaagcccctcggcctagtttttcgacccgtaatgctgggattgaggcgcaggatcggagggagtctctacctacgagtcctccatggaccccgggggccagtagacctccatcatctctcgatggatgggtaagcccaggcccctgggagcccggaaggggctcctccatgagttcaccccctcctctaccccccccaccacctatgagccccagttggtccgagcgctccgtgagccctctgagacctgaaacagaggctagaccgccatcgagacagctgcaggcattgctggctcgaaatattataaacgcagccagacggaagagtgcctcccccagatctgcaggcgctgagaatcctcggccgttttctccaccccgagcccccccgcccccacctccaccacctcccccccctcccaggatgcggagcccacaacctgccaggcctgggtcagcagccgtgcctggggcggctttcgcccctatcccaagatccccactcccggccggaccgtcctcttgcacgtcacctagatcccccctgcctgcaccgcccagaccattcctatacaggagaagccccacagattcagatgtgtcccttgactctgaagactcaggggccaagtctccaggcattctgggatacaatatctgtcctagaggctggaacgggtctctgcgcctgaagcgggggtctctgcccgcagaggcttcttgtaccacctag

SEQ ID NO: 136857 - DNA, 2790 bp, synthetic construct
  misc_feature 1..2790: note = Description of Artificial Sequence: Synthetic coding sequence
  source 1..2790: mol_type = other DNA
atgttgggcccacatttacctcccccccccctggcaccttccgaaggtcggcctacaccatgtgctttccagatccctgatggttcctacaggtgtctagctcttgaggccgaggagtcatctggagaggaaggcctgcagggagaagttggcccgaccgacctggaggaagatgagggcgtgtcacgaagcggagacgacagcgcctgtagagtaactcagggaacgccacagcttcctaaagcgttgggcatccagccacctagctgttcacgggaggagcagggcgcatcacaacacgatgaccgcgcaagtcaggactgggacgtggtgaaagccgggcagatgatgacggctagcccaagtcctggtcctggacccagagtcgctcagaaacctgcgctggggcggtctaccagcctcaccgaaaaagacctgaaggaggccaaggccagatcccagcagatcgctgctcagctgactacccctccctcatcaaattctcgcggtgttcagcttttcaaccgtagaagacaaagggtgaacgaattcacactggaaagccacgggcagagaggacagaaacctagccaggagtcactgcgagtgctgccctcaagtctgccggggcacgcccccgggttaagtctatcttccactagcctgcctgagccaggacccccacgccatccaagtcctcagtcccctgataggggcgtgcccgggcacagtatggagggttacagcgaggaggccagtctgttgcgacatctggaaaaggtggctagcgaggaagaagaagttcctcttgtggtctacctgaaggaaaacgctgcgctcctgaccgccaatggtctacatctgtctcagaacagagaagctcagcagtcctctcctgctccgccacctgcggaagtacatagccccgccgctgatgtaaaccagaacctcgctagtcctagcgcaaccctcacaactcctacttccaactcttctcataaccctcccgcgaccgatgtcaaccagaatcctccggcgaccgtcgttccacagagtcttccactgtcatccatccagcagaattcaagcgaagcccaactaccaagcaacgggaccgggccagccagtaaaccgagtaccttatgtgctgatgggcaacctcaggccccagctgaagaagtaaggtgctccacattactgatagacaaggtctcaacgccagccactacaactagcaccttctcaagggaggctactctcataccctcctcccgacctccagctagcgatttcatgagcagttccctgctgatcgatattcagccaaacactttggtcgttagcgctgatcaggagatgtcaggacgtgcagccgctactacgccaacgaaggtatatagcgaagtgcacttcactctggctaagcccccgtccgtcgtaaacagaaccgctagacccttcggcatacaggcgcccggaggaacatcgcaaatggaacggtccccaatgctggaacggcggcacttcggcgaaaaggctccagccccccagcctccctctctaccagatagaagcccaagacctcaaagacatattatgagtcgatcacctatggttgagagaagaatgatggggcaaagatctcctgcatctgagagacggcctcttggcaactttacggcccctcccacctacactgagactctgtcgacagcaccactggcctcttgggtacgtagccctccttcttatagcgtattgtaccccagcagtgatccgaagagctcccaccttaaaggtcaagcggttcctgccagcaagacaggcattctcgaggaatcaatggcccgacgtggcagccgcaagtcaatgtttacattcgtagagaaacccaaagttacacctaatccagacctgcttgaccttgttcaaacagccgacgagaaacgacgacagcgggatcagggggaagtgggggttgaggaggaaccctttgccttgggggccgaggcatccaattttcaacaggagcctgctccgcgggatcgggcttccccggccgccgctgaggaggtggtgcctgagtgggcgtcttgcctgaagtccccgcgaattcaagccaaacctaaaccaaagccaaaccagaatctcagtgaggctagtggtaagggcgcagagctttatgccaggagacagagtcggatggagaaatatgtcatcgagagctcctcccatactcccgaactagcccgctgtcctagcccaactatgtcgctgccaagttcctggaaatacccgaccaatgctccaggagcatttcgggttgcctcaaggtcccctgcaagaactcccccagcgtctctctaccacggctatctaccggagaacggggtgcttcgacccgagcctacaaaacagccaccataccagcttagaccatctctcttcgtcctgtccccaatcaaggaaccagccaaggtcagtcccagagccgcaagtcccgcaaagccttctagtctggacctggtccccaacttacctaagggagcgctgcccccttcaccagcactcccaagaccaagcaggagcagccccggcctctatacttccccaggccaggacagtctccagcctacggccgtctcccccccttacggcggtgatatatcccccgtttctccaagtagagcttggagtccccgggccaagcaagccccaagaccatccttctcaacacgaaacgccggaattgaagctcaggtctggaaaccatctttttgtttcaagtag

SEQ ID NO: 136858 - DNA, 2058 bp, synthetic construct
  misc_feature 1..2058: note = Description of Artificial Sequence: Synthetic coding sequence
  source 1..2058: mol_type = other DNA
atggagggttattctgaggaggcgagcctgctcagacacctggagaaagttgccagtgaagaggaggaggtgcccctggtggtttacttgaaagagaacgcagcactgttaactgctaacggtctgcatctgtcacagaaccgcgaggcacagcagagtagcccggccccacctccagcagaggtgcacagtcccgccgctgatgtgaatcagaacctagcgagcccttctgcaactctaacaaccccaactagcaattcatcgcacaaccctcctgcaacggacgtcaaccagaaccccccagccacagtagtccctcagagcctgcctttgtcctctattcagcagaattcttccgaggcccagctgccgagtaacgggaccggaccagcctccaagccttccaccctatgcgccgacggccagccacaagcccccgctgaagaagtgagatgcagcacactgctgatcgataaggtgtcgacccctgccaccacaacttctactttcagtcgtgaggcaacattgattccgagttccaggccaccagctagcgattttatgtcttccagtttacttattgacatccaaccaaatacactagtcgtctccgccgaccaggagatgtcaggccgggccgctgctactacccccactaaagtctacagtgaggttcatttcacacttgccaaacctccatcagtcgtgaaccgaaccgcaaggccctttggcatccaggcccccggcgggaccagccagatggaacgtagtcccatgctagaacgaagacattttggcgaaaaggccccggcaccacagccacctagcctgcctgaccggtctccgcgaccccagagacacattatgtcacgctcgccgatggtggagcggcgaatgatggggcagcggtctcctgcttctgagcgccgacccctggggaatttcaccgccccgcccacatacacagagaccctgagcactgcaccactcgctagttgggtaaggagtccccctagttactctgtcctatacccatcctcagaccctaagtcttctcacttaaagggacaagctgtgcccgcctccaaaactggtattctcgaagagtctatggcacgccgcgggtcacgtaagtctatgttcacattcgtggaaaagccaaaggtgaccccaaatccagaccttctggatcttgtccaaaccgccgatgaaaagaggagacaaagggatcagggcgaggtgggcgtcgaggaggaaccctttgcccttggtgccgaggctagtaattttcagcaggagcccgccccccgagacagagccagccccgctgctgccgaggaagtggtgccagaatgggcatcgtgcctgaaatccccacggattcaggccaaaccaaagccaaagccaaaccagaacctatctgaagcctcaggcaaaggggccgaactgtatgcccgccgccaaagtcgcatggagaagtatgttatcgagagtagctcacacacccctgaattagccagatgtccatccccaacaatgagtctgccatcatcttggaagtacccaaccaatgcccctggagcttttcgggtcgcttcccgaagccctgcacgtacgcccccagccagcctgtaccatgggtacctcccagagaacggtgtactacgtccagaaccaactaaacagcccccttatcagctgaggccctccctttttgtgctatccccaatcaaggagcccgccaaagtgtcccctcgagccgccagccctgcaaaacccagtagcctggacctggtgcccaatctgcctaaaggggcgttacctccaagccctgctttaccaagaccatccagaagtagtccaggactgtatacctcacctgggcaggatagcctccagcccacagcagtctccccaccttatggtggcgatatctcacccgtttcgccctcccgggcctggagcccgagagctaaacaagctcccaggccctccttttcgacccgcaacgccgggattgaggcccaggtgtggaagccctccttctgctttaaatag

SEQ ID NO: 136859 - DNA, 2790 bp, synthetic construct
  misc_feature 1..2790: note = Description of Artificial Sequence: Synthetic coding sequence
  source 1..2790: mol_type = other DNA
atgttgggcccccatttgcccccaccaccgctggcgccctctgaggggaggccgaccccttgcgctttccaaatcccagatgggtcttaccggtgtctggcattagaagctgaagaaagctcgggcgaagaagggctgcagggtgaggtcggccctaccgatctcgaagaggatgagggagtgtctcgttcaggcgacgattccgcctgccgagtgacccaaggcactccacagctcccaaaggcactgggcatccagcctccatcctgttccagggaagagcagggggcatcacagcatgatgatagggcctctcaagactgggacgtggtcaaggccggacagatgatgaccgcctccccgtcgcccggaccaggaccaagggtggcacaaaaacctgccctcggacgatcaacaagtctgacagaaaaagatcttaaggaggccaaggcccgtagccaacagattgccgcccagttgaccacaccgccaagttctaatagccgcggagtacagctctttaaccgccgacgccagagagtaaacgaatttactctcgagagccatggccagagaggtcagaagcccagccaggaatccctcagagtactacccagtagcctgcctggccacgcccctggactatccttaagttccacctctttgcccgaacccggaccccctcgccacccttctccacagagccccgaccgaggcgtgcccggccatagcatggagggatactccgaggaggcgagtctcttgcggcatcttgagaaggtcgcaagcgaagaagaagaagtgcccctggttgtgtatctcaaggaaaacgccgctctcctgacagcgaacgggctgcacctgagccagaatcgggaggcacagcagagttctcccgcccctcctcccgccgaggtacactctccggccgcggacgtcaaccaaaatctggcatcaccatccgcgaccttgacaactcctacctccaattctagtcataatcctccagctacggacgtgaatcagaaccctcctgcaactgttgtgcctcaatcactccccctcagttccatccaacagaattcgtccgaagcccaactgccttctaatggcacaggaccagcatcaaaaccttctactctttgcgcagatgggcagccacaggcccccgccgaggaagtccggtgctcaacgctgcttatcgataaggtgagtacccccgccactacaacatcgactttttcacgcgaagccactttgatcccctcgagcaggcccccagcaagcgactttatgagcagttccctgctcatcgatatccaacctaataccctcgtcgtgtccgcagatcaggaaatgtcaggcagggctgccgccacaacaccgaccaaggtatatagtgaggtgcacttcactctggccaaacccccttcagttgtcaatcgtactgcaagaccatttggtatccaagcaccaggcggaacctctcagatggagcggtccccaatgctcgaacgacgccatttcggcgagaaagcacctgcgccacagcccccctcgctcccagaccgatcacctcgccctcagcgacacatcatgtccagatccccaatggtcgagcgccgcatgatggggcagcgttctcctgcatcagagaggaggcctctaggcaatttcacggcaccccccacctacacagagaccctctccacagcacccctggcaagctgggtacggtcaccgccctcttattctgtcctctacccttcttccgacccaaagagctctcatctcaaggggcaagctgttcctgcgagcaagacaggcatcctggaggaatccatggccaggaggggaagccgcaaatcgatgtttacttttgtggagaagcctaaagttactccaaacccagatctgctggatctagtacaaacagctgatgagaaaaggagacagcgcgatcagggggaggtgggggtggaggaagaaccattcgccctgggcgccgaggcctcgaactttcagcaggaacccgcgcctagggaccgggcgagcccggctgctgccgaagaggtggtgccagaatgggcttcatgcctgaaatcaccacgcattcaagcaaaaccaaagccgaagcctaaccaaaacttgagcgaagccagcggcaagggagccgagctttacgccagaaggcagagtaggatggagaaatatgtgatcgagtcatcaagtcacacccctgagttggctagatgcccaagtcctacaatgtccctgccaagttcctggaaatatcccactaacgcgccgggggcttttcgggtggcaagcagaagtcccgctcgaactccgcccgcctctctatatcatggatacctccccgaaaacggtgtgctgaggccagaaccaaccaaacaacccccctaccaactaagaccctccttgttcgtcctgtcacccataaaagagcctgcgaaagtttcccccagagccgcgtcaccagccaagccaagttcattagatttggtgcccaacctgcccaagggggccctgcccccctctcccgcactgcccaggcctagtaggagctccccgggattatacacaagccccggacaggactcgctgcaacctactgcagtctcccctccttacggcggtgatatatcccccgtgagcccgtcacgcgcgtggagtccaagggccaagcaggcaccccggccttccttctccacccggaacgcaggcatagaggctcaggtttggaagccctctttttgtttcaaatag

SEQ ID NO: 136860 - DNA, 636 bp, synthetic construct
  misc_feature 1..636: note = Description of Artificial Sequence: Synthetic coding sequence
  source 1..636: mol_type = other DNA
atggacaatttgagttctgaggaaattcaacaaagagcacaccagattacagatgaatccctcgaatccacaagacgcatcctcgggctggcaatcgagagccaggatgccggcatcaaaacaataacgatgttagatgagcagaaagagcagcttaatagaatcgaggaagggttggatcagatcaacaaagatatgcgcgagacggagaagacactgaccgagctcaacaagtgttgcggcctttgtgtgtgtccttgcaataggactaaaaattttgagtcgggtaaggcgtacaagactacttggggggatgggggagaaaactctccttgtaatgtcgtatcaaagcagcccgggcctgtgacgaatggccagcttcagcaacccactacaggggccgctagtggaggctacatcaaacggattactaacgatgccagggaagacgagatggaggagaacctaacacaagttggaagcattctcggcaacctgaaggatatggccttgaatataggcaatgagatcgacgcacaaaaccctcagattaaacgcattaccgataaggctgataccaatcgggaccgtattgatatcgctaacgcacgggctaaaaaactcatagactcttag

SEQ ID NO: 136861 - DNA, 477 bp, synthetic construct
  misc_feature 1..477: note = Description of Artificial Sequence: Synthetic coding sequence
  source 1..477: mol_type = other DNA
atggacaacctttcctccgaggaaattcagcagcgcgcccatcagataacggatgaaagtctggaatccactcgccgcattctcggcctggcgatcgaatcgcaggatgctggtataaagaccattactatgctcgacgagcagaaagagcagctgaacaggattgaggagggtctggaccagatcaataaggatatgcgggaaaccgaaaagacactgacagagctcaataaatgctgcggcctctgcgtctgtccctgcaatagtatcactaacgacgcaagggaggacgagatggaagaaaacttgacgcaggtgggttctattcttggcaacttaaaagatatggccctaaacattggcaacgaaattgatgcccagaacccacaaattaagcgaatcacagataaggcagatacgaaccgcgacaggatcgatatagctaatgctcgcgccaagaagttaatcgacagttag

SEQ ID NO: 136862 - DNA, 477 bp, synthetic construct
  misc_feature 1..477: note = Description of Artificial Sequence: Synthetic coding sequence
  source 1..477: mol_type = other DNA
atggataacctgtctagcgaggagattcaacaacgggcccatcaaattactgatgagagtttagagtctacaaggcgaatcttgggcctggcaattgagtcacaggacgccggcattaagactatcaccatgctcgacgaacagaaagagcagttaaaccggatcgaagagggcctcgaccagattaacaaggatatgagggagactgaaaaaacattaacggagctgaacaagtgttgcgggctgtgcgtatgtccatgcaactcgattactaacgacgctcgcgaagatgaaatggaggaaaatctcactcaggtgggttcaattctgggaaacctgaaagatatggccctgaacatcggtaacgagattgacgctcaaaaccctcagatcaagaggataactgataaggcagacaccaacagggacaggatagatatcgcaaatgccagggcaaaaaagctcatcgatagttag

SEQ ID NO: 136863 - DNA, 621 bp, synthetic construct
  misc_feature 1..621: note = Description of Artificial Sequence: Synthetic coding sequence
  source 1..621: mol_type = other DNA
atggctgaggacgcagacatgaggaacgagctcgaagagatgcaacgaagagcagatcagctcgcagatgaaagcctcgagtcaacaagaagaatgctgcagctggtcgaagagtcaaaagacgctggtatacgcacactggttatgctcgacgagcagggagagcagctcgagcgaatagaggagggaatggaccagatcaataaagacatgaaggaggccgaaaaaaatctcacagatctgggcaaattctgtggactgtgcgtgtgcccatgtaataaattgaagtcttcagatgcttataagaaggcctgggggaacaaccaggatggagtcgtggcctctcagcccgcaagggtggttgacgagagggaacaaatggctatttccggcggatttatcaggagagttacaaacgatgcacgcgagaatgagatggacgagaaccttgagcaggtatcaggcattatcggcaacctgcgacacatggcattggatatgggcaatgagattgatactcagaaccgacagatagaccggatcatggagaaggccgattccaacaagaccaggatagatgaagcaaaccagagagccaccaagatgttgggcagcgggtag

SEQ ID NO: 136864 - DNA, 621 bp, synthetic construct
  misc_feature 1..621: note = Description of Artificial Sequence: Synthetic coding sequence
  source 1..621: mol_type = other DNA
atggcggaggatgccgatatgagaaacgagctggaagaaatgcagcgtcgggccgaccagctggcagatgaatccctggagtcaacaagacggatgctgcagctggttgaagaaagtaaggacgccggaataagaaccctcgttatgctcgacgagcagggcgaacagctcgaccgggtggaagaaggcatgaaccacattaatcaggacatgaaggaagccgaaaaaaacctgaaagatctgggcaagtgttgtgggctgttcatctgcccttgtaacaagctaaagagctcggacgcctacaaaaaagcctggggaaataatcaggacggggtcgtcgcatcccagcccgctagagttgtggacgagcgggagcaaatggcaatctcgggtgggttcatccgaagggtgactaacgacgccagggagaatgagatggatgagaacttagagcaggttagcggaattattggcaaccttaggcacatggcactggacatgggcaatgaaatcgatacacagaatcggcaaatcgatcgaattatggagaaggctgattctaacaagactcgaatagacgaagccaaccagagggccaccaaaatgctcggtagcggttag

SEQ ID NO: 136865 - DNA, 282 bp, synthetic construct
  misc_feature 1..282: note = Description of Artificial Sequence: Synthetic coding sequence
  source 1..282: mol_type = other DNA
atggcagaggatgctgacatgcgtaacgagttggaagaaatgcagcgacgggccgatcagttggctgatgagtcactggaaagtacacgccgtatgttacaactcgtggaggaatcgaaagacgcgggtatccggaccctggtgatgctggacgagcagggcgagcagctggagcgcatcgaagagggcatggaccagatcaacaaggacatgaaggaggccgagaaaaacttgaccgacttgggcaagttttgcggcctgtgtgtttgtccttgtaactag

SEQ ID NO: 136866 - DNA, 1500 bp, synthetic construct
  misc_feature 1..1500: note = Description of Artificial Sequence: Synthetic coding sequence
  source 1..1500: mol_type = other DNA
atgaagcactctctcaacgctttgctgatcttcctgataattacttctgcatggggaggttcaaagggaccacttgatcagcttgaaaaagggggcgagactgctcagtcagctgatccacagtgggagcagttaaacaataaaaatctttctatgccgctattacccgccgatttccacaaggaaaacacagtaaccaatgattggattccagaaggggaggaggatgatgactatctggacctcgaaaaaatcttctccgaagacgatgactacatagatattgtggacagcctgagtgtgtctccaacagacagcgacgtgagcgccggcaatatactgcaactgttccacggaaaaagtaggatacagagattgaacattttgaatgctaagttcgctttcaacctttacagggtgttgaaggaccaggtaaatactttcgacaatatctttattgcgcctgtagggatctccaccgcgatggggatgatcagtctgggactgaaaggcgaaacccatgaacaggtgcattctatccttcacttcaaggattttgttaacgcatcttctaaatatgagatcaccactatccacaacctgtttaggaaattgacacatagattgtttcgccggaatttcggttacaccctccgtagcgtgaacgacctttacattcagaagcagttccccatactcctggactttaaaaccaaagtccgcgagtattacttcgctgaggcccagatagccgactttagcgatcccgccttcattagcaagactaacaaccatatcatgaagctcaccaaaggccttatcaaagatgcattggaaaacattgatcccgctacccagatgatgatactgaactgcatctatttcaaaggttcatgggtaaataagtttcccgttgagatgacacataaccataacttccgcttaaacgaacgcgaagtggtgaaggtttcaatgatgcagactaagggtaatttccttgcggccaatgaccaggaacttgactgcgacattctgcagttagagtacgtcggcggcatttccatgcttatcgtcgtgcctcacaagatgtctggaatgaagaccctggaggctcagctaacccctagggtagtcgaaagatggcagaaaagcatgacaaatcgcacaagggaagtcctgctacctaagttcaagctggaaaagaactataacctggtagagtccctcaagctgatgggaatccggatgcttttcgacaagaacggcaatatggccggaatatccgaccagagaatagccatagacttgtttaagcaccaaggaactataacagtgaatgaggaaggtacacaggctaccaccgtcactacagtgggcttcatgccactcagcactcaggtgcgattcacggttgaccgccctttcctctttctgatttatgagcaccggacatcctgtctgctgtttatgggcagagtggcaaatcccagccgaagttag

SEQ ID NO: 136867 - DNA, 1269 bp, synthetic construct
  misc_feature 1..1269: note = Description of Artificial Sequence: Synthetic coding sequence
  source 1..1269: mol_type = other DNA
atggtctcggagtcccatcacgaggctcttgccgccccccctgtaactacagtggccacggtcctgcccagcaacgcgacggaacccgcttccccaggcgaggggaaggaagacgcgttttcgaagctgaaagaaaagttcatgaacgaacttcacaagattcccctgccaccctgggccctgattgctatagctatagtagcagtgctgttggtcctgacttgctgcttctgcatctgtaagaagtgtctattcaagaaaaagaataagaaaaagggcaaagaaaaaggcggtaaaaacgcaattaatatgaaagacgtgaaggatttaggcaaaactatgaaggatcaggccctgaaagacgacgacgcggagacaggcctgacagacggcgaagagaaggaagagccaaaagaggaggagaaattgggcaagctgcagtatagcttagattatgactttcagaacaatcagctgctggtgggtatcattcaggctgccgagctgccagctttggatatggggggcacgagcgatccatacgtcaaagtgttcctactgccagacaagaagaagaaatttgagaccaaggtacatcgtaaaacccttaatcctgttttcaatgagcagttcacattcaaagtcccctatagtgaactgggcggtaagactctggtcatggcagtctacgattttgaccgtttctccaaacatgatataattggggagtttaaggtgccgatgaatacagtcgactttgggcacgtgactgaagaatggcgagacctgcagtcagccgagaaagaagagcaggagaaactgggtgacatttgttttagtcttcggtacgtgcctacagccggcaagctcaccgtcgttatcctcgaggccaaaaacctgaagaagatggatgttggtgggctctctgacccatatgtaaaaatccatctaatgcagaatggcaaacgtttaaagaaaaagaaaaccacaatcaaaaagaataccctgaacccctattataacgaatcctttagctttgaggtccctttcgagcagatacagaaagttcaggtggtggtaacagttctggactacgacaagattggcaaaaacgacgcaataggaaaggtatttgttgggtacaacagtactggcgccgaactgagacattggtctgatatgctggccaacccgcgtaggcccattgcccagtggcacaccctgcaggtcgaggaggaggttgacgcaatgctggccgttaaaaaatag

SEQ ID NO: 136868 - DNA, 1269 bp, synthetic construct
  misc_feature 1..1269: note = Description of Artificial Sequence: Synthetic coding sequence
  source 1..1269: mol_type = other DNA
atggtgtcggagtcacatcacgaggcactcgcagccccaccagtcacaactgtcgccactgttctgccaagcaacgctaccgagccagctagcccaggagaaggcaaggaggacgcattctcaaaactgaaagaaaaatttatgaacgaactccacaaaataccactgcctccatgggcactgattgccatagccattgttgccgtgctgctcgtactcacatgctgtttttgtatttgcaagaagtgcttgtttaagaagaagaataaaaagaagggcaaagagaaaggggggaagaatgcaattaacatgaaggacgtcaaggatttgggcaaaaccatgaaggatcaagccttgaaggacgatgatgctgaaactggcctaacggatggagaagaaaaagaggaaccaaaggaagaagagaaactgggcaagctccagtattcacttgactacgactttcaaaacaatcaacttttggtgggaatcatccaagcggccgaactgcccgccctggacatgggtggcacctcagatccgtatgtgaaggttttcctgctgcctgacaagaaaaagaaattcgagactaaggtgcataggaaaaccctgaatcctgttttcaatgagcagttcacttttaaggtcccgtactccgaattaggcgggaaaaccttggtgatggccgtttatgatttcgatcgtttcagtaaacacgatatcatcggtgagttcaaagtacctatgaataccgtggactttggacatgtgacagaggaatggagggatctgcagtccgcagaaaaagaggaacaggagaagcttggggacatatgtttctcgctcagatatgttccaaccgccggaaagctcaccgtcgtaatcctggaggccaagaatcttaagaagatggatgtgggaggtctctcggatccttacgtcaagatccatctcatgcaaaatggcaagcgattaaaaaagaagaagaccactatcaagaagaacacccttaatccgtattataacgagagcttcagcttcgaggtgccatttgagcagattcaaaaagttcaagtggtggttaccgttctggattacgataagattggtaagaatgatgctataggaaaagtcttcgtgggctacaactctacgggtgctgaactgcgccactggtccgacatgttggccaacccacgtcgaccaattgcccagtggcatacgcttcaggtggaagaggaagtggatgccatgcttgctgtgaagaaatag

SEQ ID NO: 136869 - DNA, 549 bp, synthetic construct
  misc_feature 1..549: note = Description of Artificial Sequence: Synthetic coding sequence
  source 1..549: mol_type = other DNA
atggtgtctgaaagccatcatgaagccttagccgctccaccagtgactaccgtggccaccgtgctgcctagcaatgccaccgaaccggctagtcctggggaaggcaaagaggacgcattctccaaactgaaggagaagttcatgaacgagctgcacaagatccccttgcctccctgggctctgatcgccatagctatcgtagcagtacttctggtactgacttgttgcttttgtatttgcaagaagtgtctatttaaaaaaaaaaataagaagaaaggaaaggaaaaaggagggaaaaacgctataaacatgaaggacgttaaagatcttggtaagacgatgaaggatcaggcactgaaggatgacgacgcggagaccggtctgaccgatggcgaggaaaaggaggagcctaaggaagaagaaaagcttggtaaattgcagtactcactggattatgacttccaaaacaaccagctacttgtgggcattatccaggccgctgagctgcccgccctggatatgggcggtacatctgacccctacgtgtag

SEQ ID NO: 136870 - DNA, 177 bp, synthetic construct
  misc_feature 1..177: note = Description of Artificial Sequence: Synthetic coding sequence
  source 1..177: mol_type = other DNA
atggtgagtgaaagccaccatgaggcccttgccgctccaccagtcacaacagtcgcaaccgtattgccatcaaacgccactgagcctgcgtcgccaggagagggtaaggaagatgcttttagtaagctgaaggagaagttcatgaatgagctgcacaagatcccactccctccgtag

SEQ ID NO: 136871 - DNA, 219 bp, synthetic construct
  misc_feature 1..219: note = Description of Artificial Sequence: Synthetic coding sequence
  source 1..219: mol_type = other DNA
atggtcagcgaatcacaccacgaagctctcgccgctccaccagttacaaccgtcgctacagtccttccatccaacgccactgagccggccagtccgggagaaggaaaagaggacgctttctcaaagctgaaggaaaagttcatgaacgaactacacaagattccccttccaccgtgggcattaatcgctatcgccatcgtggccgtgctgctggtctag

SEQ ID NO: 136872 - DNA, 222 bp, synthetic construct
  misc_feature 1..222: note = Description of Artificial Sequence: Synthetic coding sequence
  source 1..222: mol_type = other DNA
atggtgtctgaatcacatcatgaggcgctcgctgctccacctgtgaccaccgtggccactgtgctcccttctaacgctaccgagccggccagcccgggggaaggcaaggaagatgcattcagcaaactcaaagaaaaatttatgaacgagctgcacaagatacctttgcctccctgggctctgatcgcaattgccatagtggctgtcctgctagttctgtag

SEQ ID NO: 136873 - DNA, 285 bp, synthetic construct
  misc_feature 1..285: note = Description of Artificial Sequence: Synthetic coding sequence
  source 1..285: mol_type = other DNA
atggtgtcagagtcccatcacgaggctctggcggcccctcctgtcacaactgtcgctactgtgttaccgagcaacgccacagaacccgcaagtcccggcgaaggcaaggaagatgctttctccaagctcaaggaaaaatttatgaatgagctgcataagatcccccttcctccgtgggcactgattgccattgccatcgtggctgtactgctcgtgctgacctgctgcttctgtatttgtaaaaagtgcctctttaaaaaaaaaaataagaagaaaggcaagtag

SEQ ID NO: 136874 - DNA, 1269 bp, synthetic construct
  misc_feature 1..1269: note = Description of Artificial Sequence: Synthetic coding sequence
  source 1..1269: mol_type = other DNA
atggtgtctgagagtcaccacgaggccttggccgcaccaccggtgaccaccgttgccacagttctgccaagtaacgctaccgaaccagcatctcccggtgaaggaaaagaggatgctttctcgaagctgaaagaaaagttcatgaacgaactgcacaaaatcccactgccaccgtgggcacttattgcaatcgccatagttgcggtgctgctggtgctcacctgctgcttctgtatttgcaaaaaatgtctctttaagaagaagaataaaaagaaaggtaaggagaagggcggcaaaaatgcaatcaacatgaaagatgttaaggatctgggcaaaacaatgaaggatcaggctctcaaggatgatgacgctgaaacaggcttgaccgacggagaggaaaaagaagagcccaaagaagaggaaaagctcggaaaactgcagtacagcctggactatgattttcagaataatcagttgctcgtggggattattcaggccgctgagttgccggcgttggatatgggaggaacgagtgatccctacgttaaggtgttcctcttacccgacaaaaagaaaaaatttgagaccaaagtccacaggaagaccctcaatccggtgtttaacgagcaattcaccttcaaggtaccctacagtgaactcggagggaagaccttggtgatggctgtgtatgactttgacagattttccaaacatgacataatcggggagttcaaagttccaatgaacacggtcgacttcggccacgttacggaggagtggcgggatttacagtcggctgagaaagaagagcaggagaaactcggcgacatctgcttttcactccgctatgtgcccactgccggcaagttaaccgtggttatcctcgaggcaaaaaatctcaagaagatggacgtgggagggctctcggatccatacgttaaaatccatctgatgcaaaacggtaaacgtctgaagaaaaagaaaaccacaattaagaagaatactctgaatccgtactataacgagagcttttcctttgaggtgccatttgaacagatacagaaggtgcaggtggtggtgactgtcttagattacgacaaaatcggcaagaacgatgccattgggaaagtgtttgtggggtacaatagcacaggtgctgagctaagacactggtccgatatgcttgctaatccccgcaggcctatcgctcagtggcacacccttcaagtcgaagaagaagtggatgcaatgctggcagtaaagaagtag

SEQ ID NO: 136875 - DNA, 1773 bp, synthetic construct
  misc_feature 1..1773: note = Description of Artificial Sequence: Synthetic coding sequence
  source 1..1773: mol_type = other DNA
atgagcggggattatgaggatgatttatgccggcgcgcgttgatactcgtgagcgacctgtgcgccagagtgagagatgcggataccaacgaccgctgtcaggaatttaacgatagaattcggggctaccccagggggccagatgccgatatctctgtcagcctgttgtcagtgatcgtcacattttgcggtatcgtgctgttgggggtcagtctgttcgtgtcgtggaagttgtgttgggtcccttggcgagacaagggaggtagcgctgtgggcggaggcccactaaggaaggacctcggtcccggcgtcggcttagccggtctggttgggggaggcgggcatcatttggccgctggtctgggaggccatccgctgctgggcggaccgcatcatcacgctcacgccgcgcatcatccaccattcgccgaactgctggaacccggatccttgggaggttctgacacgccagaaccgtcttatctggatatggacagttatcccgaagccgctgccgccgcagtggccgccggagtgaagccctcccaaacctcccccgagctgccatctgaaggaggcgccggctccgggctgttgcttttgccgccctctggaggcgggctgccatccgcgcagtctcaccagcaggtaacatctctcgcccccacgacaagataccctgcactccctcggcccctgacccaacagactctaacaagccagccggaccccagcagcgaagaacgcccccccgcactgcccctcccactgcctggaggagaggagaaggcaaaactcatcggccagattaagccagaactgtatcagggcaccggtccagggggcaggcgtagtggaggggggccgggaagcggggaggcaggaaccggcgccccctgcggacgcattagtttcgcgctgaggtatttatacggctctgaccagctggtcgtgcggatcctccaggcactggacttacctgccaaagatagcaatggcttttcggatccctatgtaaagatatatctcctaccagacagaaagaaaaagttccagacaaaggtccaccggaagacactcaatcctgttttcaatgagaccttccagttttctgtgcccctggctgagcttgcccaacgcaagctccacttcagcgtttatgacttcgacagatttagtcgccacgacctgatcggacaagtggttttggataacttattggagcttgcagagcaaccacccgatagacccctttggcgcgacatagtggagggtggaagtgagaaggcggatctcggggaactaaacttttcattatgctacttgcctacggctggccgactcacggtgactattatcaaagccagtaatcttaaggccatggatctcacaggattctcagacccctatgttaaggcctcattgattagtgaaggcagacggctgaagaagagaaagacgagcatcaagaagaatacgcttaaccctacttacaacgaggcactagtgttcgacgttgccccagaaagcgttgaaaatgtaggacttagcatcgcagttgttgattatgactgtattgggcacaacgaggtgatcggggtgtgtcgagtgggccccgacgcagccgatccccacggccgggaacattgggctgagatgttggcgaacccccggaagcccgtcgaacattggcatcagttggtagaggagaagacagtgacgagtttcaccaagggctcgaaaggcttgagcgagaaagagaactccgaatag

SEQ ID NO: 136876 - DNA, 1773 bp, synthetic construct
  misc_feature 1..1773: note = Description of Artificial Sequence: Synthetic coding sequence
  source 1..1773: mol_type = other DNA
atgagcggggattatgaagacgacctttgtcggcgagctctcatcctggtctccgatctttgcgctagagtgcgagacgcagacaccaatgatagatgtcaagagtttaatgatcgcatccgagggtacccgaggggcccagatgccgatatttctgtgagcctgctgagcgttatagtgaccttttgtggtatagtgctcttaggcgtgtctctcttcgtatcatggaagctgtgttgggtaccatggcgcgataaaggggggtccgcggtcggcggcggacccctgcgcaaggatctgggcccgggcgtcggactcgccgggttagtagggggaggtggccaccacctggccgccggactggggggccacccattgctgggggggccacaccaccatgcccatgctgctcatcaccccccttttgccgaactcttggagccagggtcactaggagggtccgacacgcccgagccgagttaccttgatatggactcctacccggaagccgctgccgccgctgtcgccgcaggcgttaaacccagtcagaccagcccagagctgccgtcagaaggaggcgccggttccggactcctgctgctgcctcctagcgggggaggattaccctccgcccagtctcatcagcaggtgacatcactcgccccgactacccgctatccagcactgccaaggcctctgacacaacagaccctgactagccagcccgatccctcaagcgaagaaaggcctccagctttgcctctgccccttcctggaggcgaggaaaaggccaaattaatagggcagatcaagcctgaactttatcagggaactgggcccggcgggcgcagatctggagggggacctggttcaggagaggccgggaccggtgccccgtgtggaaggatctctttcgcccttagatacctgtacggttccgaccaactggtggtcaggatattgcaggccctagacctccccgcaaaagactcaaatggatttagcgatccgtacgtgaagatttatttgctgcctgaccgcaagaaaaaatttcagaccaaagtgcacaggaagactcttaaccctgtatttaatgagaccttccaattttccgtccccctggctgagctggcacagcgaaagctccatttctccgtgtacgacttcgatcggtttagtcgccacgacctgataggccaggtggtgctcgacaatttgttggaacttgcagagcagccgccggacagaccgctttggcgcgacatcgtagaaggcgggtccgagaaggcagatctgggagaactgaatttctccctgtgctacttgccaaccgccgggcggctgacagttacaatcattaaagccagcaatctgaaagcgatggaccttacggggttctcagacccctatgttaaagcctcccttatctccgaggggcgcaggttaaagaaacggaagacttctatcaagaaaaacaccctcaacccaacatacaatgaagcccttgtgtttgatgtggctcccgagagtgttgagaacgtgggactgtccattgcagtcgtagactacgattgcattggtcacaatgaggtgatcggggtctgtcgggtgggccctgatgcagcggacccccacggcagggagcactgggcagaaatgctggccaatccacggaaacctgtcgagcattggcaccagcttgtggaggagaagactgtgacctctttcactaagggatcaaaaggcctcagcgagaaagaaaactcagagtag

SEQ ID NO: 136877 - DNA, 1773 bp, synthetic construct
  misc_feature 1..1773: note = Description of Artificial Sequence: Synthetic coding sequence
  source 1..1773: mol_type = other DNA
atgagcggcgactacgaggacgacttgtgccgacgagccttaatcttagtgagcgatctgtgtgctagggttagggatgcagacacaaatgatcgctgtcaggaattcaatgacagaatccgcggatacccgcgcggccctgatgcagacatatccgttagtctgctttccgtgatcgtgaccttttgtggaatcgtgctgctgggggtgtctctgtttgtatcatggaagctctgctgggttccttggcgtgacaaaggaggttctgcagtggggggagggcccctacgcaaagacctcggcccaggcgtcgggctggcaggcctcgtgggcggagggggtcaccacctcgccgcgggcctcgggggacaccccttgttaggcgggccccatcaccatgcgcatgccgcccaccatcccccctttgcggaacttttagaacctggctccttaggtggcagcgatacgcctgaaccctcttacctcgatatggactcctatccagaggctgccgccgctgctgtggcagctggtgtaaaaccatcccagacgagccccgagctgccttccgagggaggggctgggagtgggcttcttttgctgcctccgagcggcggagggctccctagcgcgcagagccaccaacaggtcacctcgttagccccaacgacccgctaccctgcccttccccgacctctaactcaacagacactcacctcacagcccgacccaagtagcgaagaacgaccaccagccctccctctccccctaccaggaggggaggagaaggctaagcttataggacaaattaagcctgagctgtatcaggggaccgggcctggggggcggcgctccgggggaggacctggctctggcgaagccgggaccggcgccccttgcggacgaattagctttgccctgcgctacctctacggttccgatcagcttgttgtgcggattctgcaggcactcgacctcccagccaaggactccaatggcttctccgacccgtatgttaaaatttacctgctgcctgataggaaaaaaaaatttcagaccaaggtacatcggaaaactctaaaccctgtcttcaatgaaacctttcaattttctgtgcccctggctgagctggcccagcgcaaactgcacttttcggtgtatgatttcgatagattcagccgccacgatttaattgggcaagtagtgctagataatcttctggagctggcagaacaaccaccagatcgaccactctggagggacatcgtcgagggaggctcagaaaaagccgatctcggggaactgaacttttccctgtgctacctgccgacggctggtagactgacagtgaccatcataaaggcaagtaacctcaaggcgatggatctgaccggtttcagtgacccgtatgtcaaggcctcccttatctccgagggtaggagacttaagaaacgaaaaactagtataaagaaaaacacccttaatccaacctacaacgaggcacttgtctttgacgtggctcctgaatccgtagagaatgttggtctgagtattgcggttgtggattacgactgcattggtcacaacgaggtgatcggggtttgtagggtgggtcccgacgctgccgacccccacggacgtgaacattgggcagagatgttagccaatccacgcaaaccagtagagcactggcaccagctggttgaggaaaaaacagttacctcatttaccaagggttctaaaggtctgagcgaaaaagagaatagcgagtag

SEQ ID NO: 136878 - DNA, 1773 bp, synthetic construct
  misc_feature 1..1773: note = Description of Artificial Sequence: Synthetic coding sequence
  source 1..1773: mol_type = other DNA
atgagtggagattatgaagatgacctatgtaggagagcactgattctcgtctccgacttgtgtgccagagttcgcgacgccgataccaacgaccgctgccaggagttcaacgacagaataagaggttatcctcgaggcccggacgctgatatcagtgtgtcactgctgagtgtcatcgtgaccttttgcgggattgttttactgggggtgtctttattcgtgtcctggaagctttgttgggtgccctggcgcgataaaggtggctcggccgtgggcgggggaccactgcggaaagacctgggcccaggtgtgggtctagctggtctggtcggggggggcggtcaccacctggccgccggattgggcggacacccactgctgggcggccctcatcatcatgcccatgcggcgcaccacccgccctttgccgaactgctggagccaggaagcttgggaggaagcgacacgccggagccaagctacctcgatatggattcttaccctgaggccgctgccgcagccgtcgcagcgggagtgaagccatcccagacctcccctgagctccctagcgagggcggcgccggctctggacttctgctgcttccaccaagcggcgggggcttgccctcagcccagtctcaccagcaggtgaccagcctggccccaacaacccgataccctgctttgccccgacctttgacacagcagacactgactagtcagcccgacccttcctctgaggaacggccgcccgcgctgccacttcctttaccgggcggtgaagaaaaagcaaaactgattggtcaaatcaaaccggagctctatcaggggaccggacccggggggcgtaggagcggcggtggccctggatccggagaggcagggaccggagcgccatgtggccggatttccttcgcgctgagatatctgtacggatccgaccagctggttgtgcgcattcttcaggctcttgacctgcctgctaaggatagtaacgggttttcagacccgtatgtgaagatatacctgctgcccgacagaaagaaaaaatttcagaccaaggtccaccgaaagacgctaaacccagtgtttaatgagacatttcagttctcagttcccctcgccgagctcgcccagaggaagttgcacttcagcgtatacgatttcgaccgcttcagccggcatgaccttattggtcaggtagtcttggacaatcttctcgaacttgccgaacagccccctgaccggccactgtggagggacatcgtcgaaggagggtcagaaaaggccgatcttggggaactcaatttcagcctgtgctacttgcccactgcaggaagactgactgtgacgatcattaaggccagcaacctaaaagcgatggacctgactggcttcagtgatccatatgtgaaagcatccttgatcagtgagggtcggcggctgaagaagcggaaaacatcaatcaaaaagaatactctcaatccaacgtacaatgaggccctggtgtttgatgtcgctccagaatccgtagagaacgtggggctgtctatagcggtggtggactacgactgcatcggacacaatgaagtcataggagtctgcagagtggggcccgacgcagcagacccacacggaagagagcattgggccgagatgctggccaatccacgaaagcccgtggagcactggcatcaactggtcgaggagaaaactgtaaccagcttcactaagggcagcaagggcttgtcagaaaaagaaaattcagaatag

SEQ ID NO: 136879 - DNA, 1278 bp, synthetic construct
  misc_feature 1..1278: note = Description of Artificial Sequence: Synthetic coding sequence
  source 1..1278: mol_type = other DNA
atggctccaataaccacaagccgcgaagaatttgatgagattcccacagtggtgggtattttctcagccttcggacttgtctttactgtatccctgttcgcctggatttgctgccagagaaaatcgagtaagtccaacaagactccgccatataaattcgttcacgtattaaaaggagtcgatatctacccagaaaatttaaactcaaaaaagaagtttggggccgacgacaagaacgaggtgaagaataaacctgccgttcccaagaatagcctgcacttagacctcgaaaagagagacctgaatgggaactttcccaagacaaatctgaagccagggtccccttctgacctagagaatgcaacgcctaaactcttcctggagggagaaaaagaatcagtgtcacctgaaagcctaaagagtagtaccagcctgactagtgaagagaagcaggagaagttgggcactctctttttcagtctggagtacaattttgaacgcaaagcttttgtggtcaacatcaaagaggccagggggcttcctgctatggacgagcaaagtatgacatctgacccatatattaagatgacaattctgcctgaaaaaaaacataaggtcaagactagagtgctccgcaaaaccctcgatccagcttttgacgaaactttcacattctacggtattccgtacactcaaatccaggaactggcgcttcacttcactattctcagctttgatagattcagcagggacgatataatcggagaggtgcttattcctctatccgggatagaacttagtgagggcaagatgctgatgaatagagagattattaagcgaaacgtacgcaagtcctcaggaaggggtgagctgctcatatcactgtgctaccaatctaccacaaatacattgaccgtggtagtgttgaaagccaggcacctgcccaaatctgacgtaagcggtctatcagacccctacgtgaaagtcaacctgtaccatgccaaaaagcgaataagtaaaaagaaaacccatgtcaaaaaatgtacacctaacgcagtcttcaacgaactctttgtttttgacattccctgcgaggggttagaggatatatctgtggaattcttggtgctcgactctgagaggggcagtagaaatgaggttataggccaactcgtgttgggcgccgcagctgagggaacgggcggcgagcattggaaggaaatctgcgactaccctaggcggcagatagcaaaatggcacgtactgtgcgacggctag

SEQ ID NO: 136880 - DNA, 693 bp, synthetic construct
  misc_feature 1..693: note = Description of Artificial Sequence: Synthetic coding sequence
  source 1..693: mol_type = other DNA
atggatctgctgagcgagaagaagcataaggtgaagacgcgggtgctgcgaaaaacgctggacccagcctttgacgagaccttcacattttatggcatcccatacactcagatccaagaactagccctgcactttaccatactctcgtttgatcggttcagtcgggacgacatcattggcgaagttttgatccccctgtctgggattgagctgagtgaaggcaaaatgctgatgaacagggagattattaagcgtaatgtcaggaaatctagcggcagaggtgagctcctgattagcctgtgttatcagtccaccactaatacactcaccgtggtggtgctgaaagctcgccaccttcccaagtccgacgtgtctgggttgtctgatccctacgttaaagtcaatttgtaccatgccaaaaagagaatttccaagaaaaaaacacacgtgaaaaagtgcacccccaacgcagtgttcaatgaactgtttgtctttgatatcccgtgcgagggtttagaagacatcagtgtcgagttcctggtcctggatagtgagagaggatccaggaacgaagtgatcggacagctcgtgctcggcgcggcagcagaaggtaccggaggggaacactggaaggaaatctgtgattaccctcgacggcagattgccaagtggcacgtcctctgcgacggttag

SEQ ID NO: 136881 - DNA, 1476 bp, synthetic construct
  misc_feature 1..1476: note = Description of Artificial Sequence: Synthetic coding sequence
  source 1..1476: mol_type = other DNA
atgccaggtgccagggacgctttgtgtcaccaggctctccagttgctggctgagttatgcgcccggggagcactggaacacgatagctgccaagatttcatctaccacctgcgagaccgggcccggcctcggttgcgagaccccgatattagtgtgtctttgctgaccttggtggtcactgcttgcgggctagcactcttcggggtctctctgttcgttagctggaagctttgttgggtgccctggcgggagagaggactgccctccgggagtaaggataacaaccaagagccactgaactacatggacactgagacaaacgaacaggaaaacagcgaagactttctggatcccccgacgccctgtccagacagctcaatgaagattagtcacacttctcccgacattccactgtccacacagactggtatccaggagaactgtgctcatggcgtacgggtccagaggcaggttacggaacccacatcatccgcccggcataatagcataaggcgtcagctcaacttgtccaatccagacttcaatatccaacagctccagaaacaggaacaactcactggtatcggcaggatcaagcctgagctgtacaaacagcggtccttggacaacgatgacggcaggcggtcaaactccaaggcttgtgggaaacttaatttcattttgaagtacgactgtgacctggaacaactcattgtgaagattcacaaagccgtgaacctccctgcaaaagactttagcggcacatcagatccgtacgtgaagatttacctgttgccagacaggaagactaagcaccagaccaaagttcaccgcaaaaccttgaatcctgtgtttgatgaagtttttctatttcctgtcccttataatgatcttgaagccaggaaattgcatttcagtgtttatgatttcgaccgattttccagacacgatttgattgggcaggtggttgtcgatcattttcttgatctggccgacttcccccgagaatgcatcctgtggaaagacattgagtacgtgaccaacgataacgtcgacctcggcgagctgatgttctccctgtgttacctgcccactgcaggccgcctaacaattactatcattaaggctcggaatctaaaggcgatggatatcactggagcatcggatccctacgtgaaagtatctttaatgtgcgacggaagacggcttaaaaagagaaagacctccaccaaaaggaacacgctgaaccccgtgtataacgaggccatagtctttgacgttcccccagaaaatatcgaccagatccacctgagcattgcagtgatggattacgacagggtgggccataatgaaattattggagtgtgccaggtgggaaatgaggccgagcgccttggacgggatcattggagcgaaatgctgagttacccaagaaagccaatcgcccactggcattccctggtggagaagagatag

SEQ ID NO: 136882 - DNA, 960 bp, synthetic construct
  misc_feature 1..960: note = Description of Artificial Sequence: Synthetic coding sequence
  source 1..960: mol_type = other DNA
atgctggcgaaggttgtcgagggcgatttggctttcaagggcgggcgggacattagtgtctccctgcttaccttggtggtgaccgcgtgcgggctggcgctgttcggagtgtctctctttgtcagctggaaattgtgctgggtcccatggagggagcgcgggctaccctccggcagcaaggacaataatcaggaacccctcaattatatggacactgaaacgaacgaacaggaaaacagcgaggattttctggatcccccaaccccttgccctgactcgagcatgaagatatctcatacatctcccgatatccccctgagcacccagacaggtatacaggagaactgcgctcacggtgtgcgagttcaacgccaggttaccgagccaaccagttcagcacgtcacaattcgatccgtaggcaattaaacctcagtaaccctgatttcaatattcagcaactccaaaagcaggaacaactgaccggcatcggtcgcattaaaccggaactgtacaaacagcggtcgctggacaacgacgatggcagaaggagcaactcaaaagcctgtgggaaactgaattttatcctcaagtatgattgtgatctggagcaactcatagttaaaattcataaagcagtcaacctacctgcgaaagactttagtggcacgtcagacccatacgtaaaaatctatctcctccctgatcggaagacgaagcaccagacaaaggtccataggaagactctgaatcccgtcttcgatgaggttttcctttttccagtgccctacaatgatctagaggcaagaaaactgcatttcagtgtctatgactttgaccgctttagccgccatgacctgatcggccaggtcgttgtggatcatttcttggacctggcagactttcccagagaatgtatcttgtggaaggacatagagtatgtgaccaatatcttatcgtag

SEQ ID NO: 136883 - DNA, 1161 bp, synthetic construct
  misc_feature 1..1161: note = Description of Artificial Sequence: Synthetic coding sequence
  source 1..1161: mol_type = other DNA
atgttccctgagcctccgactcctggacctcccagcccagacacaccccctgactcatctcgaatctcacacggaccggtacccccatgggccctggcaacgatcgttctcgtcagcggccttcttatcttttcctgttgtttctgtttgtaccgaaagtcatgtaggaggagaacaggcaagaaaagtcaagcgcaggcccaagtccatctgcaggaagtcaagggtctgggacagtcatacatcgacaaagttcagccggaggtagaagaattggaacctgccccctcagggcctggccagcaagtcgccgataagcatgagctaggaaggctgcagtactcactggattacgactttcagagcgggcagttgctcgtgggcatattgcaagcaatggggctggccgccctggacctgggcggtagttccgatccgtacgtcagggtgtacctgctgccggacaaaagaaggcgctacgagacgaaagttcaccgtcagacgcttaatccccactttggcgaaaccttcgccttcaaggtgccatatgtggaactaggagggagggtcctggtcatggcagtctacgactttgatcgcttctcaagaaacgacgcaatcggggaggtccgggtaccaatgagttccgttgacctgggcaggcccgttcaggcttggcgcgagctgcaagccgctccgagagaagagcaggaaaagctgggcgatatctgcttctcactgagatacgtaccaacggccggcaagctgacagtgatagtgctcgaagccaaaaatttgaaaaagatggatgtgggtgggctgagtgatccttacgtgaaagtgcatctgctgcaggggggcaagaaggtgaggaaaaaaaaaactaccatcaagaaaaatacccttaatccttattacaatgaggctttttcctttgaagtcccatgcgatcaggtgcaaaaggtgcaggtcgaactgacggtgctcgattatgacaaactgggaaagaacgaggcgattggcagggtggcggtgggcgccgccgctgggggagctgggcttaggcactgggcggacatgcttgccaatccccgccgccctatcgctcagtggcattccctgcggccaccagaccgagtgcgactgcttcccgccccgtag

SEQ ID NO: 136884 - DNA, 1161 bp, synthetic construct
  misc_feature 1..1161: note = Description of Artificial Sequence: Synthetic coding sequence
  source 1..1161: mol_type = other DNA
atgtttcctgaaccgcccaccccgggccccccttctcctgatacaccccccgacagctcccggatctcacacggtccagtcccaccctgggccctcgcgacaatcgtactggtctccggcttgcttatcttctcgtgctgtttttgtctgtacagaaagtcctgtagacgtcgcacgggcaagaagtctcaggcacaggctcaggtgcacctacaagaagtgaagggactgggccagtcctacatagacaaggtgcagcccgaggtggaggaactcgagcccgcaccttcagggcctggccagcaggtcgcagataagcacgagcttgggcgattgcagtatagcctggactatgatttccagtccgggcagttattggtcggcatcctacaggctatgggcttggcggccctggacctgggcgggtcttccgatccctatgtaagagtgtatctcctgccagataagcgtcggcgttacgagaccaaagttcaccgccagaccctgaatcctcatttcggcgagaccttcgcattcaaagtgccctacgtcgagctaggaggacgggtgctggttatggccgtttacgacttcgaccgcttctcccggaatgatgccatcggagaggttagagtcccaatgtccagtgtggaccttgggcgccccgtgcaggcatggcgcgagcttcaggcagccccgagggaggagcaggagaaattgggcgatatttgcttctcactgaggtatgtgcctaccgcaggtaagttgacagtaatagtcttagaggccaaaaacctgaaaaagatggatgtcggcggcctgtccgacccatacgtcaaagtccatctcctgcagggcggcaaaaaagtacgcaagaagaagactacaattaagaaaaatactttgaacccttattataatgaagcattttcgtttgaagtaccttgtgatcaggtccagaaggtccaggtagagctgaccgtgttagattatgacaagcttggtaagaatgaagccatcgggagggtggccgtgggtgccgccgccggcggagccgggcttcgccactgggccgacatgctggctaatcctcgacggcccattgctcagtggcatagtctgagacctcccgacagagtgaggctgctgcctgcgccatag

SEQ ID NO: 136885 - DNA, 1149 bp, synthetic construct
  misc_feature 1..1149: note = Description of Artificial Sequence: Synthetic coding sequence
  source 1..1149: mol_type = other DNA
atgaccaggggtggctgcccagtcagtgctcggctctttgctcagcgacctcatggttcatggagctcactgttatgcgtcggtctcaagggcaggctgggctgggagtgggggacccgagtactcgaatgtttgtgtaggaaggattctcgcacccctccgccatgttcgcggagtccccagccgcgcggtttacaccgaccaactaggctgcctacaccagtcgctagcgccaccgcgcaggttcagccagaggtggaggaactcgagccagcaccgagcggcccaggccagcaggtggcagacaaacacgaactggggcgcctgcaatactccctggactacgattttcagtcgggccaactgcttgtggggatactgcaggcgatgggacttgccgccttggatctgggcggcagctccgacccttacgtccgagtctacttactcccagacaagagacggagatatgaaaccaaggtgcacaggcaaactctcaacccacactttggagagacatttgcttttaaggtcccatatgtcgagctaggtggccgagtcctggtgatggctgtatacgatttcgatagattctcaagaaacgatgccattggagaggtaagggtaccgatgtccagcgtggatctgggtagaccggttcaagcctggcgtgaactacaggccgcaccacgcgaggaggagaagctcggagatatttgcttcagcctccggtatgtcccgaccgctggcaaactgacggttattgttctggaagccaaaaatctcaaaaaaatggacgtgggaggtctgtccgatccttacgttaaggtccatctcctgcaagggggcaagaaagtgcgcaaaaaaaagaccacaatcaagaaaaatacccttaacccgtactacaatgaagctttttctttcgaagtgccgtgtgatcaagtacagaaggttcaggtggaacttacagtcttggactacgataaattaggcaaaaacgaagccattggccgggtcgcagtgggggccgccgccggcggtgcaggactccgtcattgggctgacatgctcgctaacccccgcaggcccatcgcccaatggcactcccttagacctcccgaccgagttaggctactgcctgctccctag

SEQ ID NO: 136886 - DNA, 1533 bp, synthetic construct
  misc_feature 1..1533: note = Description of Artificial Sequence: Synthetic coding sequence
  source 1..1533: mol_type = other DNA
atgtccggggtgtggggagctggtggcccacgatgtcaagaagctctggcggtactcgcttccctttgtcgggctcggcccccaccactgggtctagatgtagaaacttgcaggagtttcgagctccagccgccagaaaggagtccatcagcagccggggccggcacttcagtctcgctcttagcggtcgtggtgatcgtgtgcggggtggcactggtcgccgtattcctgttcctattttggaaactgtgttggatgccgtggagaaacaaggaggcttcctcaccatcaagtgccaaccccccgctagaggctttgcaatctcccagtttcagagggaacatggctgacaagcttaaagatcccagcaccctgggatttctggaggccgcagttaaaatcagccatacatcccctgacatccctgccgaagtgcagatgtctgtcaaggagcatatcatgcgccacacacgactccagcggcagacaactgagccggccagtagcacacgtcatacgagttttaagaggcatttgccaagacagatgcacgtttcctctgtcgactacggcaatgagctgccccctgccgccgagcagcccaccagcatcggacgcatcaagccagaactttacaaacaaaaaagcgtagacggtgaggacgcgaagtctgaggccactaaatcttgtggtaagatcaacttctcactgcggtacgattatgaaaccgagactctgatagtgaggatactgaaagccttcgatctgcctgccaaggatttctgtggaagcagtgacccttacgtaaagatatatctgcttcctgaccggaaatgtaagctgcaaacccgggtgcaccgaaaaactctgaatccgacttttgacgaaaatttccacttccctgttccatacgaagagctcgctgaccgtaagctgcacctctccgtcttcgattttgatagattcagccgccatgacatgattggcgaagtgatcctggacaatttgttcgaggcttccgacctgtccagagagacatccatctggaaggatatccagtatgctaccagcgagagtgtggacctgggggaaataatgttcagcctctgctatctgcctacagctgggaggcttacacttacagttatcaaatgtcgaaacctcaaagccatggacatcactgggtattccgacccgtatgttaaggtgtcgctcctatgcgatgggcggcgtcttaagaagaagaagacaaccattaagaagaacactttgaatcctgtctataatgaggccattatcttcgacatcccccccgagaatatggatcaggtaagcttattgatctcagtcatggactatgatagagtgggacacaatgaaatcatcggggtttgtcgcgtgggaatcacagcagaaggcttgggccgggaccactggaacgagatgcttgcttatcctcgaaagccgatagcccattggcacagcctggttgaggttaagaaatccttcaaggaaggcaatcctaggctgtag

SEQ ID NO: 136887 - DNA, 1278 bp, synthetic construct
  misc_feature 1..1278: note = Description of Artificial Sequence: Synthetic coding sequence
  source 1..1278: mol_type = other DNA
atgccgtggcgtaacaaagaggcctcctctccctcaagtgctaacccccccctcgaagccttacagtcaccatcatttcggggaaatatggccgataagctcaaagaccccagcactcttgggtttttggaggctgcagtaaaaatttcacacacatcccccgatatccccgccgaggtacagatgagtgtgaaggagcatataatgcggcatactcggctccagcgacaaaccactgaaccagcgtcgagtacacggcatacctcattcaaacggcacttaccccggcagatgcatgtaagctctgtggactacgggaatgagcttccaccagccgcagaacagcctacctccatcgggagaattaagcccgaactctacaagcaaaagagtgttgatggagaggacgcaaagagcgaagctactaagtcttgcggcaaaatcaacttcagcctacggtacgactacgaaactgagactctgatcgtgaggatcctgaaggcgtttgatctgcccgccaaagatttttgcggttccagcgacccctacgtaaaaatatacctgctgcctgatagaaaatgtaaactgcagacacgcgtgcatcgaaagactttgaatccaacattcgacgaaaattttcactttccagtcccttacgaggagttggcagaccgcaagctccacctgtccgtgttcgatttcgaccgtttttcacggcacgacatgattggagaggtgattctggacaacttgttcgaggctagcgacctttcccgggagacatcaatctggaaggacatccaatacgccacttctgagagcgttgatcttggcgagatcatgttctcactttgttacttaccaaccgcgggacggcttactcttaccgtgattaagtgtcgcaacctgaaggccatggatattactggatattctgacccttatgtcaaagtttcactattgtgcgatggcagacgccttaagaaaaaaaagaccacgattaagaaaaacaccttgaatcctgtgtataatgaggccatcatctttgatattcctcccgagaatatggaccaggtgtcactgctgatctctgtgatggactacgatagagtgggtcataacgagatcattggggtgtgcagggtgggaatcacagcggaaggtcttggtcgagatcactggaacgagatgctggcatacccacggaaacctattgcccactggcacagccttgttgaagtgaagaagtcatttaaggaaggaaatcctaggctgtag

SEQ ID NO: 136888 - DNA, 1278 bp, synthetic construct
  misc_feature 1..1278: note = Description of Artificial Sequence: Synthetic coding sequence
  source 1..1278: mol_type = other DNA
atgccctggagaaataaagaagcgagttccccttcctcagcaaacccacctcttgaagcccttcagagcccctctttcagagggaacatggcagacaaacttaaggatcctagcacacttgggttccttgaggcagcagtgaagatctcccatacttctccagatatccctgccgaggtccagatgagcgtgaaggagcacatcatgcggcacaccaggctccaaagacaaactaccgagcccgcatcgtcaaccagacacacctcattcaagcgccacctgccacggcagatgcacgtttcaagcgtggactacggcaacgagttgcctcccgccgccgagcaacccacgtctatcgggcggataaaaccagagttatacaaacagaaaagcgtggacggcgaagatgcgaagagcgaggccaccaaaagctgtggcaagatcaacttcagcctgagatacgactacgagacggagactttgatagtacggatcctgaaagccttcgacctaccggccaaggacttctgtggcagcagtgacccctacgtaaagatatacctgctgcctgatcgcaaatgcaagctccaaacccgtgtgcatagaaagacactgaatccaacattcgatgaaaattttcatttccccgttccttatgaagaactggctgaccgtaagctccatctctccgtctttgattttgacagattttctcggcatgacatgattggggaggtcatactggacaacctatttgaagcctccgacctgtcccgcgaaaccagtatttggaaagacattcagtatgctactagcgagagcgtagatctgggtgagataatgtttagtttatgttaccttccaacagccggccggttgaccttaactgtgatcaagtgtagaaatctaaaagccatggatattactggttattcagacccttacgtgaaggtttccctgttgtgtgacgggcgaagattaaagaaaaagaagacaaccattaaaaaaaatactttgaatcccgtttataatgaggctatcatctttgatattcctcccgaaaacatggatcaggtgagcttgctgatttccgtaatggactacgacagagtgggccacaacgagattattggtgtgtgtcgagttggcataacagccgagggactaggacgggaccattggaacgagatgctcgcttaccctcgaaaaccaattgcccactggcacagcttagttgaagttaagaagagctttaaggagggcaatcctcgattgtag

SEQ ID NO: 136889 - DNA, 1533 bp, synthetic construct
  misc_feature 1..1533: note = Description of Artificial Sequence: Synthetic coding sequence
  source 1..1533: mol_type = other DNA
atgtcgggtgtgtggggagcgggagggccgaggtgccaagaagccctagccgtcttggcgagtctgtgtcgggctaggccaccaccattgggactcgatgtggagacctgcaggtcatttgaactgcaaccgccggagaggagtcccagcgcagccggggcagggacctccgtttcactccttgccgttgttgtgattgtgtgcggcgtagcgctcgttgccgtttttctctttctgttctggaaactgtgctggatgccctggcgcaataaggaagcttccagtccatcaagcgccaacccacctctggaagctctccagtccccgagttttcgcggcaacatggctgataagcttaaggatccctccacactgggatttctggaggctgccgtgaagatcagccacacatcccccgacattccggcggaggttcagatgagcgtcaaggaacatattatgcgtcacactcgactgcaaaggcagactaccgagcccgcgagctctacacggcacacatcctttaagcgacacctgccgagacagatgcatgtctcctccgtggactatgggaatgagcttccaccagcagcagaacaacccacgagtatcggaaggatcaagcctgagctatataagcagaaatcagtggacggcgaagatgccaagtccgaggccactaaatcctgtggcaaaatcaactttagtctgcgatatgattatgaaaccgaaactctcatagtccgtatcttgaaggcctttgacctgccagctaaggacttctgcggatcgagcgacccctatgtgaagatttacttattgcctgatcgtaagtgtaaattgcaaaccagggttcatagaaaaactttgaatccaacattcgatgagaacttccattttccagtgccatatgaggagttggccgaccgcaagctgcatctctctgtgttcgatttcgacagatttagccgacatgatatgattggcgaggtgatcctggataacctctttgaagccagtgacctgtcaagagagacttcaatttggaaggacatccagtacgccacatcggagtctgtcgacctgggcgagataatgtttagcctgtgttacttaccaactgctggccggctcactcttaccgtaatcaagtgtaggaacttaaaggccatggacattacgggatacagtgatccttacgtgaaagtttctttactgtgtgacggtaggcgcctaaaaaaaaaaaagaccacaatcaagaaaaacacgttgaatcctgtttacaatgaggctattattttcgacatacctccagaaaacatggatcaggtctcacttctgatatccgtcatggactacgacagagtggggcataacgaaatcatcggagtttgccgggtgggcattacggccgagggactgggccgagatcattggaatgaaatgctggcctatccacgtaaacctatagcacactggcattccttagttgaggtgaagaagtctttcaaagaagggaaccctaggctgtag

SEQ ID NO: 136890 - DNA, 288 bp, synthetic construct
  misc_feature 1..288: note = Description of Artificial Sequence: Synthetic coding sequence
  source 1..288: mol_type = other DNA
atgccgtggaggaacaaggaggcttcatcaccctcttctgccaatcccccgctggaggcattacagtctccatctttccgcggaaatatggccgataagctgaaggatccttctacactgggcttcttagaggctgccgtgaaaataagccatacgtcccctgatatcccggcagaggtgcaaatgtccgttaaggagcacattatgcgtcacacgagactgcagaggcaaacaacagagcctgctagctccacacgccacacttccttcaagaggcatctcccgtag

SEQ ID NO: 136891 - DNA, 261 bp, synthetic construct
  misc_feature 1..261: note = Description of Artificial Sequence: Synthetic coding sequence
  source 1..261: mol_type = other DNA
atgccttggcggaacaaagaagcatccagtccttcttcagccaacccaccactagaggccctgcaatcacctagctttcgggggaatatggccgacaagcttaaggatccttcaacattggggttcctggaagccgccgtgaagatctctcacacatctcctgacatccccgcagaggtgcagatgtcagtgaaggagcatattatgcgccacacacgcctgcaaaggcaaactacagagcctgccagctcgaccaggtag

SEQ ID NO: 136892 - DNA, 1212 bp, synthetic construct
  misc_feature 1..1212: note = Description of Artificial Sequence: Synthetic coding sequence
  source 1..1212: mol_type = other DNA
atgtaccgcgatcccgaggccgcatcacccggtgcacccagcagggacgtactgctggtgagcgccatcattaccgtctctctgtctgtgacggttgtgctctgtggcctgtgtcattggtgtcagcgaaagttgggcaagcgctataaaaatagtttagagacagtaggcacgccagacagtgggaggggaaggagcgagaaaaaggctatcaaactccccgccggtggcaaggccgtcaacaccgcccctgtaccaggccaaacaccccatgacgagagcgacagacgtaccgaacctcgctcttccgtcagtgatttagtgaacagcctcacaagtgagatgttaatgctgtcgcccggatccgaggaagacgaggctcatgaaggatgttcccgagaaaacctcggccggattcagttttctgtcgggtataacttccaggaatcaaccctgacagtgaaaatcatgaaagcgcaggaattgcccgctaaggacttcagtggtaccagcgacccctttgtcaagatctatctgctgcctgataaaaagcacaagctggaaacaaaagtgaaacgtaaaaatctgaatcctcactggaacgagacttttctctttgagggatttccgtacgagaaagtcgttcagaggatcttgtatttgcaggtacttgactacgatagattctctcgaaacgatccaattggggaggtgtctattccactgaacaaagtcgacttgactcagatgcagacattctggaaggatttgaaaccctgtagtgatgggtctggctcgcggggcgagctgttgctctccctttgttacaatccatcagcaaatagcatcatcgtcaatatcataaaggctcggaatctgaaggctatggacattggaggtacctcggacccctacgtgaaggtttggctgatgtacaaggataaacgagttgagaagaaaaaaacagttacgatgaaacgtaatctgaatccaatattcaatgagtccttcgcctttgatatacccaccgagaaactccgggagactaccattataatcaccgtcatggacaaggacaagctgagtcgcaacgatgtgatcggcaaaatctatctcagttggaaaagcggtccaggggaagtcaagcactggaaagacatgatcgccaggcccaggcaaccagtcgcccagtggcaccagttgaaggcatag

SEQ ID NO: 136893 - DNA, 1266 bp, synthetic construct
  misc_feature 1..1266: note = Description of Artificial Sequence: Synthetic coding sequence
  source 1..1266: mol_type = other DNA
atggcagtggatgtggctgaatatcacctgagtgttataaagagcccaccgggatgggaagtgggtgtgtacgccgccggcgctctcgcattgctgggcatagccgcagtgagcctctggaagctctggacctcaggtagcttcccaagcccttcgcctttccctaactacgactatcgctatctgcagcagaaatacggcgagtcctgcgcagaggcacgagagaaaagggtgcccgcctggaacgctcagcgggcctcgactcggggtcccccgtccagaaagggatcactgtccattgaagacacattcgagtccatatccgagcttggccccctagagctaatggggcgagaactggacctcgccccatacggcacgctgcgaaagagccagtctgcggactctctgaacagcatttcaagcgtgtctaatacttttggccaggactttaccctgggtcaagtagaagtgtccatggagtacgatacggccagccacaccctcaacgtggcagtgatgcaggggaaagatctcctggaaagagaggaagcttcgtttgaatcctgctttatgcgggtgtctctcctcccagacgagcagatcgtgggaattagtagaatccaaaggaatgcctattcgatctttttcgacgagaaatttagcattccgttggaccccacagccttggaagaaaaaagcctgaggttctcagtgtttggcatcgatgaagacgagaggaatgtcagtaccggcgtggtggaacttaagttgtcagtactcgatcttccactgcagcccttttccggctggctgtatttgcaggatcagaacaaggccgcagacgccgtgggggaaatacttctgtcgctaagctacctgcctacagctgaaagattgactgtcgtggtggtcaaggcgaagaaccttatctggacaaacgacaagacgacggctgatccattcgtgaaggtctatttgctgcaggatggccggaaaatgagcaagaaaaaaacagccgtcaaaagagacgatccaaatccggtgtttaacgaagcaatgatcttttcagttccggcgatcgtgctacaggatctctcacttagagtgaccgtggctgaatcatcctctgacggccggggtgacaacgtgggtcatgtgataattgggccctcagcctctggtatgggcacaacccattggaaccagatgctggctaccctgcggagacccgtgtctatgtggcacgctgtgcgcagaaattag

SEQ ID NO: 136894 - DNA, 1266 bp, synthetic construct
  misc_feature 1..1266: note = Description of Artificial Sequence: Synthetic coding sequence
  source 1..1266: mol_type = other DNA
atggccgtggacgtcgcggagtaccatttgtctgtgattaagtcccctccagggtgggaagtgggtgtctatgccgccggggccttggctctgttaggcatcgccgctgtgtctctctggaaactttggacaagtggcagtttccctagcccatccccttttccgaattatgattatcggtatctgcagcagaagtacggcgagtcctgtgcagaggctcgagagaagcgagtccccgcttggaacgcccaacgggcctctacacgggggcctccatcacggaaggggtcgctgagcattgaggacacgttcgaaagcatcagcgaacttggccctctcgaactgatgggccgggagctggacctggccccttatggcacactgaggaagtcccagtccgctgatagcctaaacagtatttccagtgtgtcaaacaccttcggccaggattttacacttggccaagtagaagtgtcaatggaatatgatactgcttctcacacgctcaatgtggccgtgatgcaggggaaagacctgcttgagagagaggaagcgtctttcgagagctgtttcatgcgagtctctttgctgcctgacgagcagattgtgggcattagccgcattcagcgtaatgcttatagcatattcttcgatgaaaagtttagtattcctctggaccctaccgccttggaagagaagtctctccgcttctcggtttttggcatcgatgaggatgaaaggaacgtcagtacaggcgtggttgagctgaagctttccgtccttgacttacccctccaaccgttcagcggctggctctatctgcaggatcagaataaggccgctgacgcagtgggcgagattctgttgtcgcttagctatcttccgaccgccgaaaggctgacagtggtagtggtcaaagctaagaacctgatctggactaacgataagaccacagcagatcccttcgtaaaggtgtacctgctgcaggatgggaggaagatgagcaagaagaagactgctgtaaaacgtgatgatcccaacccagtgttcaatgaagcaatgatcttctccgtgcccgcaatagtactccaggacctctccctccgagtaaccgtcgcggaatctagcagcgatggccgcggagacaacgttggccacgttatcattggcccctccgcctctggcatgggaaccacccattggaaccaaatgctagctaccctgagacgacccgtgtccatgtggcacgctgttcgcaggaactag

SEQ ID NO: 136895 - DNA, 1266 bp, synthetic construct
  misc_feature 1..1266: note = Description of Artificial Sequence: Synthetic coding sequence
  source 1..1266: mol_type = other DNA
atggcggtggatgtggctgaataccatctatctgtaatcaagagtccaccagggtgggaggtcggcgtctacgccgccggcgccttggctctcctgggcattgccgcagtttccctgtggaagctatggacttccggcagctttccaagcccctctcctttccccaattacgactatagatacctgcagcagaagtatggggagtcctgtgccgaggctcgcgagaagcgcgtcccagcctggaatgctcagcgcgccagtactcgtggcccaccttccagaaaaggcagtctttctattgaggatactttcgagagtatttctgagctaggacctctggagcttatgggaagggagttggacctggcgccttatggaacacttcgcaagagccaatcggccgacagcttaaatagcatttcctctgtcagcaacacctttggccaggatttcaccctgggacaggtggaagtgtccatggagtatgacacggcatcacacaccttaaatgttgctgtaatgcagggaaaagacctgctggaaagggaggaggcgagtttcgagtcctgttttatgcgtgtgagcctgcttccagacgaacagatcgttgggatctccagaatccagaggaacgcgtattcaattttcttcgacgagaagttttctattcccttggatcccactgctcttgaagagaaatcgctccgcttttccgtgttcggcattgacgaggatgagaggaatgtaagtacaggggtggtggagcttaaactgtctgttctggacctgccacttcagccgttttcggggtggctctacctccaggaccagaataaggctgccgacgcggttggggaaattctcctgtcactctcctatctaccaacagctgaacgtttgactgttgtagtcgtcaaggcgaagaatctgatttggacaaacgacaagacaacagccgatccatttgtcaaggtctacctgttgcaagatggccgaaagatgagcaaaaaaaaaacagcggtgaagagggatgatccaaacccagtcttcaatgaagccatgatcttctccgttccagccattgtcctgcaggacctatccctcagagtgacggtggccgagtccagcagtgacggacggggtgataatgtaggacatgtaattattggaccgtctgctagcggtatgggtaccacacattggaatcagatgttggcaactttaaggcggcctgtttccatgtggcatgctgtgcgcaggaattag

SEQ ID NO: 136896 - DNA, 1281 bp, synthetic construct
  misc_feature 1..1281: note = Description of Artificial Sequence: Synthetic coding sequence
  source 1..1281: mol_type = other DNA
atggttcttagcgtgccagtaatagcgctcggcgccacactcggaactgccacaagcattctagcgctctgcggcgtgacttgtctttgcagacacatgcaccctaaaaaagggctgttgccccgggatcaagatccagacttggagaaggctaagcctagcctgttggggtccgctcagcaattcaatgtcaagaaaagtaccgaaccagtccagcccagggcactgttgaaatttcccgacatctacggtccgaggccagcagtcacagctcccgaggtcataaactatgccgactattctcttagaagtacagaagaacccacggccccagcgagtccccaacctcccaacgattcgcgcttgaagaggcaggtaactgaagaactcttcatcctgccccaaaatggcgtagtcgaggatgtgtgcgttatggagacatggaatcctgaaaaggccgcgtcttggaatcaagcccctaagctgcattattgcctcgattacgactgccagaaagcagagctgtttgtcacccgactggaggccgtcaccagtaaccatgatggcggatgtgactgctacgtacagggatcagtcgcaaaccggaccggctcggtggaggcgcagactgcactaaagaagagacaattacataccacctgggaagaggggttagtccttcccctggctgaagaagagctgcccaccgccaccctaacgctgacactgcgcacttgcgatcgcttctccagacatagtgtggctggcgagttaaggcttggcctggatgggacaagcgtgcctcttggagccgcccagtggggagaactcaaaacctccgccaaggaaccttccgctggcgcaggtgaggtgctcctgagcattagttaccttcccgccgccaaccgattactggtggtcctcataaaggccaagaatcttcacagcaatcagtctaaggagcttctcggtaaggatgttagtgtgaaagtgactctgaagcatcaggccaggaaactcaagaaaaagcagaccaagcgggcaaaacacaagatcaatcccgtgtggaatgagatgatcatgtttgaactccctgacgacctgctgcaagctagctctgtggaactagaggtgttggggcaggatgatagcggccaaagctgtgccctgggccactgtagcctgggtctgcacacctctggttctgaaaggagccactgggaggagatgctgaaaaacccaaggaggcagatcgctatgtggcaccaattacacttgtag

SEQ ID NO: 136897 - DNA, 1554 bp, synthetic construct
  misc_feature 1..1554: note = Description of Artificial Sequence: Synthetic coding sequence
  source 1..1554: mol_type = other DNA
atgctgcttctatttctgtacataaataaaaaattttgctttgagaatgttgggggattccccgatctggggagcgagtactccactcgaaaaaacagccaagataaaatttacaacagctatatggacaaagacgagcacggtagcagcagtgagtcggaggatgaggccttgggaaaataccacgaggccctctcccggacacataactctaggctccccctagctgattcccgccagagaaactatgcctgggaaacccggcagaagtactcccccctgtctgcagagtacgacggctacagctcggaagcctccattgacgaaggaaactgtattcagcgaatgcgccggacccctccactggacgagctccagccaccgccctaccaagacgactctggatcgccccacctgtcatgtaccccaagcgaaatcggcgattcaaagtgtgagttttctcattgttcaaattctccccgttgtagctataacaagtgcccatccgagggttccaccggacatgagattgagtcctttcacaataagggctatgaggaagatgtgcccagcgatagcacagcagttttaagtcccgaagacatgtctgcgcagggttcatcatcccaactgccaaagccttttgaccctgagcccgaagcgaagtacggtactttggacgtaacatttgactacgactctcaggaacagaaactgctggtgaccgtcactgcagtgacagatatacccacatataataggactggaggaaacagctggcaagtgcatttggtgctgttgccaatcaaaaaacagagggcgaaaacaagtatccagcgggggccgtgtcccgtctttaccgagacattcaagtttaatcacgtggaatccgaaatgattgggaactatgccgttcgtttcagattgtatggcgttcacaggatgaagaaggagaagattgttggcgaaaaaattttttacttgaccaagctcaacctccagggcaagatgtccttgcccgtaatactcgagcctagctataatcacagcggctgtgactcccagatgagtgtcagcgaaatgtcttgcagtgaatcgacatcgtcatgccaatcactggagcacggcagcgtccctgagatcctgattggcctcttgtataatgccaccacagggcgtctaagcgctgaagtcattaagggctcccacttcaagaatctagccgccaatcgcccccccaacacatacgtgaagctcacgctcctaaactccatggggcaggagatgtctaaatgcaagaccagcatccggaggggacaacccaacccggtgtacaaagaaacgttcgtgttccaagtagccctgtttcagctgtcagacgttactcttatcctttctgtctacaacaagagaagtatgaaaaggaaagagatgatcggatggatctcactggggctcaattcaagcggcgaggaggaactgaaccactggacagaaatgaaagaatccaaagggcagcaggtatgtcgctggcatgccctgcttgagtcctag

SEQ ID NO: 136898 - DNA, 1725 bp, synthetic construct
  misc_feature 1..1725: note = Description of Artificial Sequence: Synthetic coding sequence
  source 1..1725: mol_type = other DNA
atggctatcgaaggcggtgagcgcacatgtggggtccatgagctgatttgtattaggaaagtgagcccagaggccgtgggattcctgtcagccgtgggtgtgttcatcattttgatgctcctgctgttcttatacatcaacaagaagttctgctttgaaaatgttggtggatttcctgacctcggcagtgaatacagcacacgtaagaattctcaagacaagatttataacagttacatggacaaagatgagcatggtagttcatctgaatcagaggacgaggccctcggaaagtaccacgaagccctgagtcggacacacaatagtcggctgcctttggctgactccagacaacgcaattacgcctgggagacgaggcagaagtattctcctctctccgcagagtacgacggctattcatctgaagctagtattgacgaggggaactgtatacagaggatgcgcaggactccgcccctggatgaattgcagccccctccatatcaagacgatagtggcagcccccacttaagctgcactccgagcgaaataggggactcaaagtgcgaatttagccactgctcaaactctccaagatgctcctacaacaaatgcccctcggaggggtctacaggacatgagattgagtcttttcacaataaagggtacgaagaggacgtgccttccgattcaacagcggtgctaagcccagaggatatgtccgcccaggggagtagctcccagttaccaaagcccttcgatcctgagccagaagccaagtatgggacccttgacgtaaccttcgactacgattcccaggagcagaaacttctggtaaccgtgaccgcagtgacagatatccccacttataatcgcaccggcggaaattcttggcaggttcacttggtacttctacccattaagaagcaacgtgcgaagactagcatccagcgcggtccctgcccagtctttacagagacttttaagtttaatcatgtggaatcggagatgattggcaattacgccgtacggttcaggctgtacggagtccaccgcatgaaaaaggagaaaatagtgggcgagaaaatattttacttgaccaagctcaatctgcaaggaaaaatgagcttacctgtcatcctcgagccatcgtataatcacagtggttgcgactcacagatgagcgttagcgagatgagctgctccgaaagtacctcctcttgtcagtcattggaacacggcagcgtacccgaaatcctcattggcctattgtataacgccaccactgggcggctgagcgccgaggtgattaaaggctcccatttcaagaatctcgctgccaaccggccacctaatgggctgttttgctgcctcaagcatttgataggtgggcaggtgtacatcataagagacacttatgtgaagcttactcttcttaactctatgggccaggagatgtccaaatgtaaaacttctattagacggggtcagccgaaccctgtttacaaggagacgtttgtgttccaggtggcattgtttcagttgtcagacgtgactctgatactcagcgtgtacaacaagcgatcaatgaagagaaaagagatgattgggtggatctccttggggctcaatagctccggagaggaagaactgaaccattggacagaaatgaaagagagcaagggccaacaggtttgtcgatggcacgcccttctggaatcatag

SEQ ID NO: 136899 - DNA, 1377 bp, synthetic construct
  misc_feature 1..1377: note = Description of Artificial Sequence: Synthetic coding sequence
  source 1..1377: mol_type = other DNA
atggccatcgaaggtggcgagcggacatgtggagtacatgaacttatttgcatccgtaaggtcagtcccgaagctgtgggattcctcagcgcagttggcgtttttattattcttatgttacttctgttcctctatattaacaaaaaattttgctttgagaacgtgggcggttttcccgatctgggctctgagtacagcacacggaaaaacagtcaagataaaatctataattcttacatggacaaagacgaacatggatccagctcggagtccgaagatgaagcccttggaaaataccacgaagcactctcccggacacataacagccgactgcctctggccgactcgcggcagcgaaattatgcgtgggagaccaggcagaagtattctccactgagtgctgagtacgatggttacagcagtgaagcgtccattgacgaaggtaattgtatccaaagaatgaggcgcacacctcctctggacgagcttcaacctcctccctaccaggacgattccggttcaccacacctgtcatgtacacctagcgagattggcgattccaagtgtgagtttagccactgttcgaactccccaagatgctcttataacaaatgtccgtctgaaggatccactgggcatgagattgagtcgtttcacaacaagggttacgaagaagacgtgccaagtgacagcactgctgtactgagcccagaagatatgtccgcacagggctcctccagtcagctgccgaaaccctttgaccctgagcccgaggccaaatacgggactctggatgttacatttgattacgacagccaggaacagaaactactcgtgacagttaccgccgtgaccgatatccccacctataacagaactggtgggaactcatggcaggtgcacttggtgctactacctatcaaaaagcagagagcgaagacatccattcagcgcgggccatgtccagtgtttacagagacgttcaagttcaaccacgttgaatcagagatgattggcaattacgccgtgcgcttccggctatatggcgtccatagaatgaagaaggagaagattgtgggggagaaaatcttctacctaacgaaactcaatctgcagggaaagatgagcctccccgttatcttggagccaagctataaccacagcggttgcgattcccaaatgtccgtttccgagatgagttgttctgagagcacatcttcttgccagagtctggaacacggaagcgtccctgagatactgatcggactcttgtataatgcgacgacgggccgcctgtccgctgaagtcattaaaggttcgcatttcaaaaacttagctgctaataggccccccaagatggactgtagcgttgtgtag

SEQ ID NO: 136900 - DNA, 1860 bp, synthetic construct
  misc_feature 1..1860: note = Description of Artificial Sequence: Synthetic coding sequence
  source 1..1860: mol_type = other DNA
atggcaagcgcgtcctggaggctgaaggtggaacgcgaacctgtagaatacatgaacctatcggtgctggaaaagattgggtattttagtgtcgcgaggctcgagtactcaggcacaatcctggcccactgtaacttcagactcctcgggtcaaacgattccagcgcctccgcctcccaggtaacgggcacaactgtctcccccgaggccgtggggtttctgagtgccgtcggcgtgtttataattttgatgcttctgctgttcctgtacataaacaagaaattctgtttcgagaacgtgggaggatttcctgacctaggctccgaatactctacaaggaagaactcgcaggataagatatacaattcttacatggataaggacgagcacgggagctcaagcgagtccgaggatgaggcgttggggaaataccatgaggccttgagccggacccacaacagcagactcccgctggccgactctaggcagcggaattacgcctgggagacgcgccagaaatatagtcctctgagcgccgaatacgacggctattcctctgaagcttctatcgacgagggcaactgcatccagagaatgcgacgaacacccccgctggacgaactgcaacccccaccttaccaggacgacagtggatccccacatctctcctgcaccccctccgagataggcgattctaagtgtgaattcagccactgtagtaactcgcctaggtgttcgtacaataagtgtcctagcgaggggtctacaggccatgaaatcgagagcttccataacaaaggatatgaggaagacgtcccatctgactccaccgcagtcctttcgcccgaggacatgtcagcacagggatcgagcagccagttgccgaaaccattcgatcctgagcctgaggccaaatacgggaccttagatgtcacctttgattatgactcccaggaacagaagctgttagtcacagtcaccgccgtcacagatattcctacatataatcggacaggaggcaacagttggcaggtgcacttagtcctgctccccatcaagaaacagagggccaagacctctatacagcgggggccatgcccagtcttcaccgaaactttcaagtttaaccatgtggagtccgagatgatcgggaactacgccgttcgtttcagattatatggggttcatcggatgaaaaaagagaagatagtgggagagaagatcttctaccttacaaaactcaatcttcagggcaagatgtccttgccagtaatactggaaccctcttacaaccatagtggctgcgacagccaaatgagcgtctctgaaatgtcttgtagcgagtccaccagttcctgccaatcccttgagcacggatccgttcctgagatcctgattgggctgctgtacaacgcaaccaccgggagattgtcagcggaggtaatcaagggcagccattttaaaaacctagctgccaataggccccccaacggactgttttgctgcctgaagcatctgattgggggccaggtgtacatcatcagagacacctatgtaaagcttaccctgttgaattcaatgggacaggagatgagtaagtgtaaaacctctatcagacgaggacagcccaatcccgtgtataaggaaacttttgtgtttcaggttgctctttttcaactgtcagatgtgaccttgattctgtccgtgtataataaaagatctatgaagaggaaggagatgatcggctggatctcactgggtctaaactcttcaggcgaagaagagcttaaccattggactgagatgaaggagtccaaggggcagcaagtgtgcagatggcacgccttgctcgagagctag

SEQ ID NO: 136901 - DNA, 1668 bp, synthetic construct
  misc_feature 1..1668: note = Description of Artificial Sequence: Synthetic coding sequence
  source 1..1668: mol_type = other DNA
atggctattgaaggcggagagcgaacatgtggtgtgcatgagctgatttgcatcagaaaggtgtctcccgaggccgtcggattcttgagcgcagtcggagtattcatcatcctgatgctgttgctatttctttacatcaataagaagttttgtttcgaaaatgttggaggctttcctgatcttggctctgagtactccacaagaaagaatagccaggacaaaatctataactcttacatggataaggacgagcacggcagtagcagtgagtctgaggacgaggcgttaggtaagtaccacgaggccctttcccgaactcacaactcgagactccctctcgccgattcacgccagcggaactacgcatgggagactcggcaaaagtactcccccttgtcggcggagtatgacgggtacagttcggaggcctcaattgatgaggggaactgcattcagcggatgcggagaacccctccactggatgagttacagcctcctccgtaccaagacgatagtggttcccctcacctttcatgtactccatccgaaattggagactcaaagtgcgaattttcccactgcagcaacagtccgcgttgttcttacaacaaatgccctagcgagggttctacagggcacgagatcgagagctttcataataaaggatacgaagaagatgtaccatccgactccacagctgtgctgtccccggaggatatgagcgctcagggaagttccagccagctccccaagccctttgatcccgaacccgaagcaaaatatggtaccctggacgtgacttttgattatgatagccaggagcagaaactcctcgttaccgtaaccgctgtcaccgacattccgacttacaacaggacaggggggaattcatggcaagtgcatctcgtccttctaccaatcaagaagcaaagagcaaaaactagcattcagcgtgggccgtgtcccgtttttactgagaccttcaagtttaatcatgtggaaagcgagatgatcggaaattacgcagtccgcttccgcctatatggggtgcatagaatgaagaaggagaaaatcgtcggggagaaaatcttttatttaaccaaattaaacctgcagggcaagatgtccctccctgtgattctggagcctagttataaccactcaggatgtgattctcagatgtcggttagcgaaatgagctgtagtgaaagcacatcctcttgtcagtccctggagcatggaagtgtgccagaaattctgatcggcctgttatacaacgcgaccaccggacgcctgtctgcagaagttataaagggctctcatttcaaaaacctggcagccaaccgcccccccaatacatatgtcaagctgacgctgctcaatagtatgggacaagagatgtcaaagtgcaaaacaagcattaggcgtggtcaaccgaaccccgtgtacaaggaaacttttgtattccaggtagcactcttccagttaagcgatgtgactttgattttaagcgtctacaacaaaaggtccatgaagaggaaagaaatgattggttggatatcccttggcctcaactcgtctggagaagaagaacttaaccattggaccgagatgaaggagtccaagggacaacaggtgtgccgttggcacgccctgctggagagctag

SEQ ID NO: 136902 - DNA, 1746 bp, synthetic construct
  misc_feature 1..1746: note = Description of Artificial Sequence: Synthetic coding sequence
  source 1..1746: mol_type = other DNA
atggccattgaggggggggagcgaacctgcggcgtgcatgagctgatatgcatccgaaaagtctcccctgaggcggtcgggtttcttagtgccgtcggtgtatttattatcctcatgctgctccttttcctgtacatcaataagaagttctgttttgagaatgtgggcggatttcccgatttggggagcgagtactcaacacgcaagaacagccaggataaaatttataatagctatatggacaaagatgagcatggttctagctccgaaagtgaggatgaggcattggggaagtatcatgaggccctgtcacgcacacataacagtcgccttccccttgcagattccaggcagcgcaattatgcgtgggagacccggcagaagtacagtccgctgagtgcagaatacgatggctacagctctgaagccagtatcgatgaaggcaactgtatccagcgcatgcgccgtactccacccctggatgagctccaaccccctccttaccaagacgattcagggagccctcacctgtcatgtacaccgtcagaaatcggtgatagcaagtgtgaatttagccactgctctaatagcccccgctgtagctacaataagtgtccttcagaggggtccactggccacgaaattgaaagtttccataacaagggctatgaagaagacgtgccttctgattcgactgcagtgttgtcaccggaggacatgtctgcacagggctcatctagtcaattaccgaagcccttcgatccagagcctgaggccaagtacgggactctcgacgtaaccttcgactacgatagtcaggagcagaaactgttagttacagtaaccgcggtgacagacatacccacgtacaaccgaacaggcggcaattcttggcaggtgcacctcgtgctactgccgatcaaaaagcagcgggctaagactagcatccaacggggcccgtgccctgtcttcacagagaccttcaaattcaatcacgtcgaatctgaaatgatcggcaattatgcggtgcgattcaggctgtacggggtgcatagaatgaaaaaagaaaagattgtaggagagaagattttctaccttaccaagctcaacctgcaaggtaaaatgtcactccctgtgatactcgagccaagctacaaccactccggctgcgactcccagatgagcgtatcagaaatgtcatgcagtgaaagtacatcctcttgccaaagtctcgagcacgggagcgtccctgagatcctcataggtctcctttacaacgcgacgaccgggaggctgtcagccgaggtgatcaagggtagtcatttcaagaacttagcggccaatcgaccccccaccttccatcctctcctgagtgatgggctgttctgctgcttgaaacatctaattggtggccaggtctacatcatacgcgatacatacgtgaagctgaccctgctaaatagtatggggcaggagatgtctaaatgcaaaacctccattcgccgagggcagccgaatcccgtctacaaagaaacttttgtcttccaagtggctttgttccagttatccgacgtaaccctcattcttagtgtgtacaacaagcgaagtatgaagcggaaagagatgatcggatggatttcactcggactgaatagctctggtgaagaggaactcaaccattggaccgagatgaaagagtcaaagggccagcaggtctgcagatggcatgcactgctggagagttag

SEQ ID NO: 136903 - DNA, 1554 bp, synthetic construct
  misc_feature 1..1554: note = Description of Artificial Sequence: Synthetic coding sequence
  source 1..1554: mol_type = other DNA
atgctgctgctgttcctctatatcaataagaaattctgtttcgaaaatgtcggcggctttcccgacttgggcagcgaatactccaccaggaagaacagccaagacaagatttacaacagctacatggataaagatgaacatggcagcagttccgaatccgaggacgaagcactgggaaaatatcacgaggcgctcagcaggacccacaattccaggctgccactggctgattctcgccagcgtaactatgcttgggagacgcgccagaaatactcccctctctccgccgagtatgacggatattcgagcgaagcaagtatcgatgagggtaactgtatacagcggatgcgccgcacccctcccctggacgagcttcagccaccaccttaccaggacgacagcgggtcaccgcacctgtcctgcactccctctgagatcggagactctaaatgcgaattcagccattgctctaactcaccgagatgttcctataacaagtgcccatctgagggctctaccggacatgagatcgaaagcttccacaacaaaggctacgaagaagatgtcccctccgactcaaccgcagtgctgtccccagaagacatgagcgcccaaggcagctccagccagttacccaagccttttgaccccgagcctgaggcgaaatacggcactctcgacgttaccttcgattatgacagccaagagcaaaaactgctggttaccgtgaccgctgtaaccgacatcccgacgtacaaccggaccgggggaaattcttggcaagtgcatttggtcctgctccctattaagaagcaacgtgccaagaccagcattcagcgggggccttgtccagtgtttactgaaacattcaagtttaatcacgttgagtccgagatgattggtaattatgcagtgcgattccgactctatggagttcatcggatgaagaaagagaagatcgtgggcgagaaaattttttatctcactaagttaaacctgcaggggaagatgtcactgcctgtgattctagagcccagttataatcatagtggatgcgatagccagatgagcgtctcagaaatgtcatgttcagagtccacaagctcatgtcagagcctggagcacggctctgtgccagagatactgattggcctcctctacaatgccacaactgggcgcctctcagccgaggtcattaagggatcccactttaagaatctagcagcaaaccgaccgccaaatacctacgtgaagttaacattactgaactccatgggccaggaaatgtcaaagtgcaaaaccagcatcaggcgcggtcaaccaaatcctgtgtataaagagaccttcgtgttccaggtagccctgtttcaactttcggatgtcacactgatcctgagcgtgtacaataagcgatccatgaagcgcaaagaaatgatcggatggatatctttaggactgaactcaagtggtgaggaggaactgaatcactggactgagatgaaagagagtaagggccagcaagtatgccggtggcacgccctcctggaaagttag

SEQ ID NO: 136904 - DNA, 1266 bp, synthetic construct
  misc_feature 1..1266: note = Description of Artificial Sequence: Synthetic coding sequence
  source 1..1266: mol_type = other DNA
atggccgaacagcttgccctggtaatcggcgggactatcgggggcctgcttctcctcctcttgatcggcgcctcatgctgtctttggcggagattctgtgccaccttgacttacgaagagctccccggtacgccagcaatggccactaccgcagcctcatcgggtcagagggaccgcccctgccagcctcatgccagaactcagctatcgcggcctcctgccgtgccatttgtggtgccaccaaccctgcaagggcgagactgggtgcccctgcacagcggagagtgggccgacgcgccctgggatccatgtccagcaagtgaactccttccgcataccagttctggtggcctgggggacgcgtgtatggttggggccattaatccagagctctacaagtttcccgaagacaagagtgaaaccgatttccccgatggctgtttaggccgcctctggtttagcgtggagtacgaacaagaggccgagaggttgttggttggcctgataaaagctcaacaccttcaagccccttctgagacctgttccccgttagtcaagctgtacttgttgccagacgagcgcaggtttctccaatctaagacaaaaaggaagacttctaacccccagtttgacgagcactttatatttcaggtgtcttccaagacaataactcaacgcgttctgaaattttccgtgtaccacgtagaccggcaaagaaagcatcagctgctgggacaggtgctgtttcccctaaaaaacgaaaccctcgtaggcgactgccgcagggttatatggagagaccttgaggctgaatcattggaaccccctagtgaatttggtgatctgcagttttgcctgtcatataacgattacctcagcagactgacagtcgtcgtgcttagagccaagggtctccggcttcaagaggacaggggaattgtgtcggttttcgtcaaagtgtcactgatgaaccataataagttcgtgaaatgcaaaaaaacatccgcggttctgggttctatcaatccagtctacaatgagacatttagcttcaaggccgatgcgacagaactcgacaccgcgtctctctcactgaccgtggtgcagaacatggaaggagacaagtctcaacaactgggacgggtggttgtgggcccatatatgtacacacgcgggcgtgagttagagcactgggatgaaatgctgtctaaacccaaggaactggtaaaacgatggcacgcattatgccggacaaccgagccatag

SEQ ID NO: 136905 - DNA, 1425 bp, synthetic construct
  misc_feature 1..1425: note = Description of Artificial Sequence: Synthetic coding sequence
  source 1..1425: mol_type = other DNA
atgggggtggtactgagtcctcaccccgcacccagccgccgcgaaccccttgccccgctcgcccctggcacccgcccaggctggtcaccagcagtgtctggaagttcacgaagcgctttgagacccagcactgccggcccaggaccgggacccggcactgggtgggggggaaccgctgcaagcggccgctgggtaccagcccccgcagtgcactgtgctgcacctagagccgctgctgggcaccaacagcatcacggtccccctctttgttctccagatggagcccctagacgcttcaagcgccggcctgggagcccagcccctgctgcacagaccggcgaaacatccctccgtgagcagcctcatgggggaccccccgccgtaccattcgttgtgcctcctactttgcagggccgggattgggtgccactgcactctggggagtgggctgacgctccatgggacccgtgtccggctagtgaactgttgccgcacaccagctcagggggactgggcgacgcctgcatggtgggggctattaatcccgagttatataagtttcccgaagataaaagcgaaacagattttcccgacggctgtctcggacgactgtggttttcagttgagtacgagcaggaggccgagcgcctcctggtaggactaatcaaggcccagcatctccaggccccatcagaaacatgcagcccactagtgaaactgtaccttctgcccgatgaacggcgctttttacaatctaagactaagcgcaagaccagcaatccacaattcgacgaacatttcatatttcaagtctcctctaagactatcacccagagagtactcaaattttccgtgtaccacgtggatcggcagcggaagcatcagcttctcggccaggtgctcttccctcttaagaacgagacgctggtgggtgattgtcggagagtaatctggagagacttagaagctgaaagcctcgaaccaccttcggagttcggagatctgcagttctgtctctcctacaacgattatctgagtcgcctaactgtggtggtgctaagagccaaggggctgaggctgcaagaggatcgggggattgtctccgtattcgtcaaggtcagcctcatgaatcacaataaattcgtgaaatgtaaaaagacgtcagccgtgctcggctcaataaaccctgtatataacgaaacattcagttttaaagccgacgctacggaacttgacactgccagcctgtccctgacggtagttcagaacatggagggtgataagagtcagcaattggggagggtcgttgtggggccctacatgtacacccggggaagagagctggagcactgggacgagatgctcagcaagcccaaagaattggtcaaacgctggcatgccctctgtcggacaaccgagccatag

SEQ ID NO: 136906 - DNA, 1173 bp, synthetic construct
  misc_feature 1..1173: note = Description of Artificial Sequence: Synthetic coding sequence
  source 1..1173: mol_type = other DNA
atggctgagcaactggccctggtcataggcggtaccatcggcggactgctgctgctgctcctcattggcgcttcttgctgtctgtggagacgcttctgcgccaccttgacatacgaggaactgcctgggactccggcgatggccacaacggcggcctcatctgggcaaagggataggccctgccagccacatgcgagaacgcagctgtcccggccgcctgcagtgcctttcgtagtcccaccaacattgcagggcagggattgggtgccgcttcattctggggaatgggctgatgcgccatgggacccctgtcctgctagcgagctgctgccccatacgagcagcggaggtcttggggacgcgtgcatggtgggcgctataaatcctgagctgtataagttccctgaagacaaaagcgaaacggatttcccagatggatgtcttgggcgactgtggttctcagttgagtacgagcaagaagccgagcgtctgctggtgggactgatcaaggcccagcacttgcaagcaccatctgagacatgttcccctttggtgaaattatatcttctgccggacgagcgacggttccttcagtctaagacaaagcgaaagacaagcaatcctcagttcgacgaacattttatcttccaggttagttctaaaaccatcacccagcgcgtcctgaaattcagtgtctaccacgtggataggcaaaggaagcaccagttgctagggcaagtgctctttccactgaaaaacgagacgctggtgggggactgtcggcgcgtcatttggcgagatttagaggccgagtcactcgaaccgccctcagagttcggtgacctgcagttctgcctttcctataacgattacctgtccagactgactgtggtggttttgcgggccaaggggctgagactccaggaagacagagggatcgtaagtgtgttcgtgaaggtcagtcttatgaatcacaataaatttgttaaatgtaagaagacttctgccgtactcggatctattaatcccgtgtacaacgaaaccttttctttcaaggccgatgcaaccgaactggataccgcctcgctgtctctcacagttgtccaaaacatggaaggagataagcaggctacgactgtcgagctctttctctttcatctgaccagcggttag

SEQ ID NO: 136907 - DNA, 543 bp, synthetic construct
  misc_feature 1..543: note = Description of Artificial Sequence: Synthetic coding sequence
  source 1..543: mol_type = other DNA
gatgagcattttatttttcaggttagctccaaaaccattactcaacgcgtactgaagtttagtgtctaccatgtggatcggcagagaaaacaccagcttttaggccaggtcctcttcccactgaagaacgagacactggttggggactgtcgacgcgtaatctggagagacctcgaggctgaaagtcttgagcctccatctgaatttggggacttacagttttgcctcagttacaatgactacctgtcacggctgaccgtggtggttctacgagcaaagggcctccgcctgcaagaggaccgggggatagtgagcgtgtttgtaaaagtgagtctcatgaatcacaataagttcgttaaatgcaaaaaaacttctgcagttctgggcagtatcaaccccgtgtataatgagacattctcattcaaggcagacgctacagaactcgatacggcctctctgtccttgacagttgtccaaaacatggagggcgataagcaagccacaacggtggagcttttcctgtttcacttgacttccggttag

SEQ ID NO: 136908 - DNA, 783 bp, synthetic construct
  misc_feature 1..783: note = Description of Artificial Sequence: Synthetic coding sequence
  source 1..783: mol_type = other DNA
atggtaggggcaatcaaccctgaattgtacaagttcccagaggataagtctgagacgtgttcaccgctagtcaaactgtatctgctgcctgacgagcgccggtttctgcagtcaaagactaagcgaaaaactagcaacccccagtttgacgaacacttcatcttccaggtgtcttcaaagacaatcactcaaagggtactgaagttctctgtgtatcatgtggacaggcaaaggaaacaccagctcctggggcaggtactcttcccgctgaagaacgaaaccctggtgggggactgtcgccgcgtgatttggcgagacctggaggcagagagcctcgagcctccgagcgaattcggggacttgcagttctgcctgtcgtataacgactacttatctagactgactgtggtggtgctgagggcaaaaggacttcggttacaggaggaccgcggcatagtgtccgtttttgtgaaagtttccctcatgaaccataacaaatttgtgaaatgcaagaaaacaagcgctgtcctgggcagcattaaccctgtctataacgagaccttttcatttaaggctgacgccacggaactggacactgcctccttaagcctgaccgtcgtgcaaaacatggagggcgataagtcccagcagctgggccgggttgttgttggaccttacatgtatactcgcgggagagagctggagcattgggacgaaatgctgtccaagccgaaagagctcgtgaagagatggcatgccctgtgtcgtacaacagagccctag

SEQ ID NO: 136909 - DNA, 1047 bp, synthetic construct
  misc_feature 1..1047: note = Description of Artificial Sequence: Synthetic coding sequence
  source 1..1047: mol_type = other DNA
atggcagaacagctcgcgctcgtgattggaggaaccataggcgggctgctcctattattactgataggggcctcttgctgcctatggaggcgattctgcgctactctgacttacgaggaactcccgggtacccctgccatggcgacaacggcagccagctccggacagcgggatagaccttgccagccacatgccagaactcagctgagccggcccccagctgtgccttttgtggtgccccccaccctgcagggccgtgattgggtgcctctgcattctggagaatgggctgacgcaccatgggacccgtgtcccgccagcgagctcctgccacacacaagctctggagggctgggagatgcttgcatggtaggggctataaaccccgagctttataaattcccagaagataaaagcgaaacagatttccccgacggctgtctgggccgcttatggttcagcgtcgagtacgagcaagaggcggagagattgctggtcggcctcattaaggctcaacacctgcaagcaccaagcgagacgtgttcgcccctggttaagctgtatcttctcccggacgagcgacggtttcttcagagcaagactaagcggaagaccagcaatccacagttcgacgagcacttcatctttcaggtatcaagcaagaccatcacccagcgtgtgctaaaatttagcgtgtatcatgttgaccgccaacggaaacaccaactgcttggtcaagtcttattcccgctcaaaaacgagactctggttggtgactgcagacgcgtcatttggcgggacctagaggcagagagtttggaaccaccttccgaatttggagatctgcagttctgcctcagttataacgattacttgtctcgcttaactgtcgtggttctccgtgccaagggactccgcctgcaggaagatagagggattgtgtccgtgtttgtgaaggtgtctctgatgaaccataacaagtttgctaaatgcaagcccgggcccgatcttggcgaggagtccagaggtagcctcaatctgaaatag

SEQ ID NO: 136910 - DNA, 1173 bp, synthetic construct
  misc_feature 1..1173: note = Description of Artificial Sequence: Synthetic coding sequence
  source 1..1173: mol_type = other DNA
atggcagaacaactggccttagtaatcggtggcaccattggaggtcttctcctcctgctcctgatcggtgcaagctgctgcctatggcggaggttttgcgcaaccttaacctacgaagaattgcctggcacccccgcgatggccactactgcagcttccagcggacagcgagacaggccttgccagccacacgcacgaacacagttgagtcgccctccagccgtcccgttcgtagtgccacccacgttgcagggacgcgactgggtacctctccattctggggagtgggccgatgctccatgggacccttgtccggcttccgaactgcttcctcacacatcgagtggcggactcggcgacgcttgcatggtgggagccattaaccccgagctctacaagttccctgaggacaagtccgaaaccgattttccagacggctgcctgggccggctgtggttctcagtcgagtatgagcaggaggccgaaaggttgttggttggcctgattaaggcacagcacctgcaggcacctagtgagacatgctctcccttggtgaaactgtatctgctgcccgacgagaggcggtttctccagagcaagacaaagcggaagacttctaacccacaattcgacgaacacttcatctttcaggtctcctctaagactattacccagcgcgtacttaagttctctgtctatcacgtagatagacagagaaagcaccaattacttggtcaagtgctgttcccgctgaagaacgaaacactggtgggagattgcagaagggtaatctggcgtgatctggaggctgagagcctagaaccaccttcagagtttggcgatctgcagttctgcctatcgtacaatgactacctctcccgactaactgtggtcgtactgcgagctaaaggcctccgtctccaagaagataggggaattgtgtccgttttcgtcaaggtaagcctgatgaatcacaataaattcgtaaagtgcaaaaaaacatcggccgtgctgggaagcattaaccccgtgtacaatgagaccttcagttttaaggctgatgctacagagttggatacagccagccttagcctgaccgtggtgcaaaatatggagggggataagcaggcaaccaccgtggaattgttcctgttccatttgaccagtggatag

SEQ ID NO: 136911 - DNA, 1152 bp, synthetic construct
  misc_feature 1..1152: note = Description of Artificial Sequence: Synthetic coding sequence
  source 1..1152: mol_type = other DNA
atggtcctcgccatggcctcccaagacgtacagaatttctttcagccattttcatcctggatctctcgggtttacgaagccctgcaacaggctggcgatatgctctctgccagtctagtgaacatttctaagcaagatagtaagctctccgacaaacttgatcaggacctggataatatccaaattcaagaaacgtactttgaggacgaagaacaggacaacgattggagccaggaggatgcgaattctctgttccttgaagtggaccacttttcctgttgcaactcagatcttcaggactcagcgcagaatagcagcccatctctctctcaacatgccaaggatagctgctcaaccatgtctcagtggccgaattgggcaagtgacgacaggaagttgccccatgtactcagcagcattgccgaagaagaacaccacctggaaaaacaacggtccggtctccaacacggtttcgatagtcaactccctggaactctcgagacagttaacggtaaaaagcaggtgaatagttttggtgatgatgaggaattgtctacctccagtgactccgatgaggaagttattaagcagtttgaaatctcagtgtcccgctctcagagttttcgctctgtcacgtcggagaaaggaaagcaaaccggtctggaacagaaaccaaaattctctagaagcctcctgacacacggcgaagacggcaccgaagtctccgcctgtgaggacttggacggggccagtcagagaaggtacagtgagaatctttcctatggggaagacgatcatatccctgcccactcccagtctccgtgcgagaggggagacgctaaacaccatggcacaagccaccaggaatccagcgtcgtgcagtccttgcgaagacagtccacagagggaagcctggagatggaaaccgctttcaactcaagaggctttgaggactcatatgcgactgatagttctagcatgtggtctccagaggccaatttaaatctgaagcggaagggctatctgctggatgtctactgcctttctagtcccctgctgtttaccacgagccttcatcggaggaataggactggccccatctgcaggtgtcaccccgggagtcagtcccctagtcaatccgttgttacatag

SEQ ID NO: 136912 - DNA, 1938 bp, synthetic construct
  misc_feature 1..1938: note = Description of Artificial Sequence: Synthetic coding sequence
  source 1..1938: mol_type = other DNA
atggtgttagccatggctagtcaggatgtgcaaaacttttttcagccttttagtagttggatttctcgcgtttacgaggctctgcagcaggctggcgatatgttgtccgcgtctctggttaacatcagcaaacaggattccaagctttccgataagcttgaccaggaccttgacaatatacagatccaggagacttactttgaggacgaggagcaggacaacgattggagccaggaagacgcaaatagtcttttcttggaggtcgatcatttttcctgttgtaattcggatcttcaggattccgctcagaacagtagcccgtccctgagtcagcatgctaaggatagctgctccactatgtcacagtggccaaattgggcatctgatgaccgcaagctgccccacgtcctttcctccatcgctgaagaggaacatcatctggagaagcagcggtctggcttacagcatgggttcgactcccaacttcccgggactctggaaactgtcaatggcaaaaagcaggtcaatagctttggggacgacgaggagctatccacatcttccgacagtgatgaggaggtgataaaacagtttgagatctctgtatcacgctcccagtcgttccggagcgtgacctccgaaaagggtaagcagaccggactagagcagaaacccaaattctctcgaagcctgcttacccacggagaggacggcacagaggtctctgcgtgcgaagatctggacggtgcaagtcagagacgttattcggagaatttaagctacggggaagacgatcacatccccgctcatagccagagcccttgcgagcgaggagatgccaaacatcatgggacctcacatcaggagagctcggtcgtacagagtttacgcagacaatctaccgaaggcagtttagaaatggaaacagcttttaactcccggggcttcgaagattcctacgctacggattctagttcaatgtggagtcctgaggagcaggatcgcactaatctgcaggtgccgagtggcgtctctgagcccatctcaaaatgtggtgatttggatgttattttcgagtatagagccgcctctcagaagctaactgtcactattgtgagggcacagggactccccgacaaggatagaagtggggtcaactcctggcaggtgcatgtggtactgctgccaggcaagaagcatcggggccggaccaatattcagagggggccaaacccagtgtttcgcgagaaggtgaccttcgcgaaacttgagccacgtgatgtagctgcctgtgcagtccgcttccggctgtacgcagctcggaaaatgacacgggagcggatgatgggagaaaagctgttttacttgagtcatctccatcctgagggggagatgaaggtaacgctggtgctggagcctcgctctaacatcagctccggcggatcaccactgagcccctccgcagtgtcgcacagcgacagtaccagtagcactcagtccctatcacatggtggtgcgccagaattactggttggtttgtcatataacgctacaaccggccgcttgtctgtggaaatgattaaagggagccacttcagaaatctggctgtgaacagggcgccagacacctatggaaagctgtttctcctgaactcagtcggccaagagatgagccggtgtaagaccagtattaggcgcggccaacccaatcccgtctataaagagacgtttgtattccaggtcgccctgtttcaactctcggacgtcactttaatgatatcagtctataatagacgcacgatgaagagaaaggagatgattggctggattgctcttggacaaaacagctctggagaggaagagcaggaccactgggaagaaatgaaggaaacgaagggtcaacagatttgccggtggcacactctgctggagtcctag

SEQ ID NO: 136913 - DNA, 1653 bp, synthetic construct
  misc_feature 1..1653: note = Description of Artificial Sequence: Synthetic coding sequence
  source 1..1653: mol_type = other DNA
atgcctcaacgggggcatccaagccaggagggcctgtgggctctgccatccctgccgatggcccacgggccgaaacctgagaccgagggcctccttgatctgtcattcttaactgaagaggaacaagaggcaattgccggcgtcttacagcgagatgcacgcctgagacagcttgaagagggccgagtgtccaaactgcgcgctagcgttgcagatcccggccagctgaaaattctgaccggcgattggtttcaggaagcccggtcccagcgacatcacaatgctcatttcggcagcgatctggtccgcgccagtatgcgccgaaaaaaatcgacccgaggcgatcaggctcctggccacgaccgcgaagcggaagccgcagttaaagagaaggaagaaggccccgagcctcgactcacaatcgatgaagctccacaagaacgcctcagagagactgaagcatcagaccctgaggaagctagccaagctcaggaagatcctgggcagggagaccagcaggtgtgcgccgaagaagcagaccctgagctggagcccgcctcaggcggcgaacaggagcctaggccgcagcaggctcagaccaaagccgctagccagatcctcgagaacggagaggaagcaccaggccccgatccgtccctggatcgtatgctctcaagcagcagttctgtgagttccctgaactcctcgacattgagtggcagtcagatgtcccttagcggtgacgctgaggccgtccaggttagggggtcggtgcactttgccctgcattacgaacccggagcggctgaactcagggtccatgttatccagtgccagggtctggcagctgcccggcggcgccgaagtgacccatacgtgaaaagttatctattgcctgacaagcagagcaaacgcaagactgcagtgaagaagcggaacctgaacccagtgtttaacgagaccctgcgctactcggtgccacaagctgagctgcaggggagagttctctcccttagcgtgtggcaccgagaatccctagggcgaaatatctttctgggagaagtggaggtacctttggatacttgggattggggctccgaacctacttggctcccactccagccacgtgtgccaccttcgccagatgacctaccctccagggggcttcttgcattgtcattgaagtacgtgcctgcgggcagcgaaggcgcaggactgcctccatcaggcgaactgcatttctgggtcaaggaggctcgcgacttactgccactgcgcgccgggtccctggatacctacgtgcagtgctttgttttacctgatgactctcaggcatcccgtcagagaactcgggtggtgcgacgtagtctgtccccagtgttcaatcataccatggtgtacgatgggtttggacccgcagatctccgccaggcctgtgctgagttaagtctgtgggaccatggcgcccttgccaatcggcaactgggcggcaccagactttcacttggcaccggttcatcctatggattgcaggtgccgtggatggattctaccccagaggagaaacaattgtggcaggccctgctggaacagccgtgtgagtgggtggatggtcttttgccactgagaaccaatctggcccccaggacatag

SEQ ID NO: 136914 - DNA, 231 bp, synthetic construct
  misc_feature 1..231: note = Description of Artificial Sequence: Synthetic coding sequence
  source 1..231: mol_type = other DNA
atgccacagcgcgggcatccctctcaggaggggctgtgggcgcttccaagtttgccaatggctcacggaccaaagcctgagaccgaaggtctcctcgatctgagtttccttaccgaggaggagcaggaggccattgccggcgtgttgcaaagagacgcgcgactcaggcaattagaagaaggcagggtgtcaaaacttagggctagtgtggccgaccctggccagctttag

SEQ ID NO: 136915 - DNA, 1065 bp, synthetic construct
  misc_feature 1..1065: note = Description of Artificial Sequence: Synthetic coding sequence
  source 1..1065: mol_type = other DNA
atgccacagaggggacaccccagccaggagggtctttgggccctccctagtcttcccatggcccacggtccgaaacccgaaactgaaggtttgctcgacctctccttccttaccgaagaggagcaggaggccattgccggggtgcttcagcgggacgccagattgcgccagctcgaagaaggacgtgtgagcaaattgagggcaagcgtggccgaccccgggcagttaaaaatacttactggagattggttccaggaagctaggagtcagcggcaccacaatgcccactttggatccgatctggttagagcttccatgcggcggaagaagtccactcgcggcgaccaggcaccaggacacgatcgagaggccgaagccgctgtgaaggagaaggaggaagggcctgagccaaggctcacaatagatgaagccccgcaggaaaggttgagggagactgaaggccctgatttcccctcaccttcggtacccctgaaagcatcagatcccgaagaggcaagtcaagctcaagaggatccaggccagggtgatcagcaggtgtgtgcagaagaagccgaccctgaattggaacctgcatctggaggggagcaagagcccaggccccaacaggcccaggtcgggggaagtggtccttggctgctatcaacatccggagccgactccgggcggggggctctacttccgagagcggcatcacggcctagaccaagggccctcggggcaggcgtaggcaaagagggggcacctagacatcttcccccactgcagaccaaagccgcttctcagatactggaaaatggagaagaagctccgggacctgatccaagcctcgacaggatgcttagctctagtagctctgtttcctctctgaactcatctacccttagcggtagtcagatgtctttatctggtgatgctgaagccgtgcaagtgagaggttccgtccactttgccctccattacgagccaggagctgctgagctgagggtccatgtgatccaatgccaggggcttgccgccgctaggagaagacggtcagacccatag

SEQ ID NO: 136916 - DNA, 606 bp, synthetic construct
  misc_feature 1..606: note = Description of Artificial Sequence: Synthetic coding sequence
  source 1..606: mol_type = other DNA
atgggaaccacagcattgcttggaggggtgcggctctccgagaccatcccggtcaagcgacttgcaagaggcttggctagggtcagggacggcggctggggctcaccgcaggccggagagaaggcactcggagggccattgctgacctccggatcacatctgccttcctacgtgaagagctatttgttgcccgataaacagagcaaacggaaaacagctgttaaaaagagaaacctgaatcctgtctttaatgaaactctgaggtatagtgtgccccaagccgagctgcagggtagggtactgagtctgagtgtctggcatagggaaagcttgggccggaacattttccttggagaggtggaagtacctctcgacacttgggattggggcagcgaacccacctggctgcctttgcagcccagagtgccaccatcccccgacgacctgccttcaagaggtctgttagcattgtctcttaagtacgtgcccgctggatccgagggcgcgggcctccctccatctggagagctccatttttgggtcaaggaggcgcgtgaccttcttcccctacgtgcaggctctctcgatacatacgtacagtggtag

SEQ ID NO: 136917 - DNA, 1083 bp, synthetic construct
  misc_feature 1..1083: note = Description of Artificial Sequence: Synthetic coding sequence
  source 1..1083: mol_type = other DNA
atgccccagcgcggccatccatctcaggaaggactctgggcactgccaagtttgcctatggcccatggccccaagccagaaacggaaggtctcctggatctaagctttttgacggaagaggagcaggaggctatagctggcgttcttcaaagagatgccagacttcgccagctggaggaggggagagtttccaagctcagagcgagcgtggcagacccgggccagttaaagatcctgacaggtgattggttccaggaagcacggagccagaggcatcacaacgctcatttcgggtccgatctcgtcagggcttccatgcgcaggaagaagagtacccggggcgaccaggcccccgggcatgatagggaggccgaggctgccgtcaaagagaaggaggagggaccagagccacggctgactatcgacgaggctccccaagagagactgcgggagaccgaggggcctgatttcccatccccctcagtcccccttaaagcgtctgatcccgaggaagcttctcaggcacaagaagatccgggccaaggtgatcagcaggtctgcgcggaggaggccgatcctgagctggagcctgccagcggaggggaacaggaacctagaccccaacaagcacaggtcggggggtccggcccgtggctgctttccacatccggggcagactcagggcggggagcactgctgcctcgagccgcgtcccgcccacggcctagggcgctcggggccggagtgggcaaagaaggcgcaccacggcatctccctccgctccagacgaaagccgcgagccagatcctggaaaatggcgaagaagcccccgggcccgacccctctctagacaggatgctcagtagttcaagcagtgtttctagcctcaattccagtacagtgagaagggaaggcggagatcccggaggccggggcgtggaccccttcaggtgcgtggcacccgcttgtcccagcctggccgccgggcccacggctgcggcacctcagccagcgacttatgatccaggcctgaagcccccccggtgtccaaggcccagacgcgagccttgtgaacggccttag

SEQ ID NO: 136918 - DNA, 879 bp, synthetic construct
  misc_feature 1..879: note = Description of Artificial Sequence: Synthetic coding sequence
  source 1..879: mol_type = other DNA
taacctcgaccccaacaagcccaggtcggagggtcaggtccctggttgctttctacctcaggcgcagatagtggcaggggcgccctgctgccacgggccgcctcaagaccgaggcccagggcactgggagccggcgtgggtaaggagggagccccaaggcacctgccaccactgcagaccaaagctgcctctcagatcctggagaacggtgaagaggcacccgggcctgatccttctctggatcgaatgctgagcagcagcagcagtgtgagctctttaaacagtagcactctgtcaggctcccagatgagcctgtctggggatgccgaggccgtacaagtgcgcgggtcggtgcatttcgcactgcactacgagcctggcgcagctgaactcagggtgcatgtgattcagtgccagggcctggcggccgctagaagacgtcgcagcgacccctacgtcaaatcatatttgttgcccgataaacagtccaagaggaagacagcggttaagaaacggaatctgaaccctgtgtttaacgaaacactcagatattctgtgcctcaggcggaacttcaagggagggtgctgtctctgagcgtgtggcaccgagagagtctggggcgtaacatctttctgggagaggttgaggtgccattagatacatgggactgggggtcagagccaacttggctgccactgcagccccgagtgcctccaagcccagatgacctgcctagccgcggcctactggcactgtctttgaagtacgtgccagcgggctctgagggtgcaggtctgcccccctccggtgagctccacttttgggtcaaggaagcgcgggacctacttccactccgcgcaggcagtctcgatacttag

SEQ ID NO: 136919 - DNA, 1689 bp, synthetic construct
  misc_feature 1..1689: note = Description of Artificial Sequence: Synthetic coding sequence
  source 1..1689: mol_type = other DNA
atgccccaacggggacatccctcgcaagagggactctgggccctgccttcacttcctatggcacacgggcccaagccagagactgaggggttactggatctgtcattccttacagaggaggaacaggaggccatcgcaggagtcctgcaacgggatgctcggctgcgccagctggaggaaggccgagtgtcaaagctgcgggcgagcgtcgccgacccaggtcagttgaagatcctaaccggagattggttccaggaggcgcggtcccagaggcaccacaatgcacattttggctctgacctggtgcgggcctccatgcgcagaaaaaagagcacacggggagaccaggctcccgggcacgacagagaagctgaggcagctgttaaggaaaaggaggaagggccagagccccgactgaccattgatgaagcccctcaggaacgactccgcgagactgaaggcccggacttccccagcccgagcgtcccgctcaaggccagcgatcccgaagaggccagccaggcacaagaggatccaggacagggtgatcaacaggtctgtgcggaagaagccgatcctgagctcgaacccgcctcaggaggagagcaggagcctcgcccacagcaggcacagacaaaagccgcctctcagatactggaaaatggggaggaagcaccagggcccgacccctccctagatcgcatgctctctagttcttcgagcgtctcctcactgaactcctcaactctctccggttcacagatgagcttatccggcgacgccgaggcagttcaggtgagaggtagcgtgcacttcgcccttcactatgaaccaggagccgctgagcttagagtgcacgtcatccagtgtcagggcctggcggccgcccgtcgaaggaggtcggatccctatgtgaagtcctatctgctgcccgacaagcagagtaagcggaaaacggcggtcaagaagaggaacctgaaccctgtgttcaacgaaactcttcgctattcagtcccccaggccgagcttcaaggcagggtacttagtctcagcgtatggcatcgggaatccctgggacgtaatatctttctgggagaggtggaagtccctctggacacatgggattggggcagcgagcccacttggctccccctccaaccgagagtgcccccttctccggatgacctgccatcaagaggcttgctcgcactgtcgctcaagtacgtgcccgccgggtccgagggggccggtctccctcccagcggagaactacacttctgggtgaaagaggcacgcgacctgttacctctgcgcgccggcagtttggatacatacgtacaatgtttcgtgctgccagatgacagtcaggcctcaagacagcgaacacgggtggtgcgtcgcagtttgtccccagtattcaaccacaccatggtctacgatgggtttggacccgctgaccttaggcaggcttgtgccgaactgagcttgtgggatcacggcgccctcgcaaaccgccaactgggcggtacccggctatccctcggaacaggctccagttacgggcttcaggtcccatggatggattctactcccgaggagaagcagctgtggcaggccctgttggagcaaccctgcgaatgggtagacgggctgttgcccctgagaaccaacctcgcaccaagaacgtag

SEQ ID NO: 136920 - DNA, 2808 bp, synthetic construct
  misc_feature 1..2808: note = Description of Artificial Sequence: Synthetic coding sequence
  source 1..2808: mol_type = other DNA
atgattgatctgtcttttcttactgaggaagaacaggaagcaatcatgaaggtgcttcaaagagatgctgccttaaagagggcagaagaggagagagtccgtcacctgccagagaaaataaaggacgatcagcagctgaagaatatgtctggacagtggttctatgaggctaaagcaaaacgacacagggacaaaattcatggagcagacatcatccgcgcctccatgcgtaaaaagcgcccccagattgctgctgaacaatccaaggacagggaaaatggggctaaggaaagctgggttaacaatgtgaacaaagacgcatttctgccgcccgaacttgctggcgttgtcgaggaacccgaagaggacgcagcccccgcttccccttctagcagtgtggtcaaccccgcgtcaagcgtgatcgacatgtctcaggagaatactagaaagcccaatgtttcccctgagaagcaacgtaaaaatcctttcaacagctcaaagttgcccgagggacacagctctcaacaaacaaagaacgagcagagcaagaatggacgcaccggtctcttccagacatcaaaggaagacgagctcagtgaaagcaaagagaagagtacagtggctgatacatctatccagaagctcgaaaagagcaagcagactctgccggggctttccaacgggagccagataaaggcaccaatcccaaaggccaggaagatgatttataagtcaactgacctgaataaggatgataatcagagcttcccccggcagagaactgatagccttaaagcgcggggcgctcctaggggaattctaaaacgcaacagcagtagcagttccactgattcggagactttaaggtataaccataacttcgaacccaaaagtaaaatcgtctctcccgggctgaccatccatgaaaggatcagcgaaaaagaacactcactcgaagataactcctcccccaacagtctggagccgttgaaacatgtaagattctctgccgtgaaagacgaattacctcagagtcccggactcattcatggcagggaggttggggagttcagcgttctagagagtgatagactgaagaatggtatggaggatgctggggatactgaggagtttcagtctgaccctaaaccctcacaatacagaaaaccgtccctgttccaccagagtacctcctctccttacgtgtcaaagagcgaaacgcaccagcccatgacatccggaagtttccccatcaacgggttgcactcccactctgaggtcctaaccgcgcgtccgcagagcatggaaaactcacccactattaacgaaccaaaagacaagtcctctgagttaactcggttagaaagcgtgctgcctaggtcgcccgcggacgagctgtcccactgcgtagagcctgaaccttcccaggttcccgggggaagttcgcgtgatagacagcaaggctctgaagaggagccttcaccggtgctgaagaccctggagcgctccgccgctagaaagatgccgtctaaaagcctggaggacatctcatccgacagtagcaaccaagccaaagtcgataaccagccagaggagttggtgcgttctgctgaagacgttagtacggtccccacacagccagataatcccttctctcatcccgataagttgaagcgcatgtccaagtctgtgcctgcatttcttcaggatgaatccgatgatcgggagactgatactgccagtgagagcagctatcagttgtcccgtcacaagaagtcccctagttccctcaccaatctctcctcctcgagtggtatgacctccctgtcgagcgtcagtggctccgtcatgtcggtgtactctggagatttcggaaatcttgaggtaaaagggaacatccaatttgcaatcgagtacgtggaatccctgaaggagcttcacgtcttcgtggctcagtgcaaggatttagccgctgccgacgtgaagaaacagaggagtgatccctacgtcaaggcatatctgctgcccgacaaagggaagatgggaaaaaagaagactttagtggtcaagaaaacattaaaccccgtgtataacgaaattctgcggtacaaaattgagaagcagattcttaaaactcagaagttgaatctcagcatttggcatagggatacatttaaacgtaactcgttcctcggcgaggttgaactcgacctcgagacctgggactgggacaacaagcagaataagcaactgcgctggtaccccctcaaaaggaaaacagctccagtggcccttgaagccgaaaacaggggtgaaatgaagctggccctgcaatacgtgcccgaacctgtgcccggaaagaaacttcccaccacaggcgaagtgcacatctgggttaaggagtgtctggacctgcccctcctccgcgggagccatctgaacagcttcgtcaaatgcacgatactcccagatacatctcgcaagtctcgccagaaaaccagagccgtcggaaaaaccacaaaccctattttcaaccataccatggtgtacgatggcttcaggcctgaagacctgatggaggcctgcgtcgagttgactgtgtgggaccactataagctcacaaaccaatttctggggggccttaggatcgggttcgggacaggtaagtcttatggtaccgaggtcgattggatggactcaacaagcgaggaagtcgccttatgggaaaaaatggtcaacagtcctaatacttggatcgaggctactctaccgctcaggatgctcctcattgcaaaaatttctaagtag

SEQ ID NO: 136921 - DNA, 3819 bp, synthetic construct
  misc_feature 1..3819: note = Description of Artificial Sequence: Synthetic coding sequence
  source 1..3819: mol_type = other DNA
atggacgagcccaacgctgaacaggtgtacaaccctagccagttcgagaatctcaggaagttttgggatcttgaggctaacagcaactctaaagataacgacaagaatatcacaactaccagccagaagaactctgcaccttttaacagacaaaaacacaaggagttctcggatatcaagctttcaggcaaaaatactcacgaggccgaagtgcttctttctccaaagaaggtaatggcacgagaggagatggaaaaactgaattccaaggggatccttcaggttctgcctgacgagatcacattccctctgagccccttgagaaagtatacttaccagctgcctggcaacgaatctagcaaagaaaacgtagagaagaataccgagggaatagttactcctgtctttaaggaggagaaagactatagcgagcaggagatccaggagagcattatcaaaacaaacgtgctttctaaagactgcaaagatacctttaatgactccctgcagaaactccttagcgagacctctaccccagcgattcagccctctggtggaaaagttcatggtaagcaggtattagagccctcggtcagcgaaaacaggacctggccgcaaaaaactgactttgccgacaccgaggaggaagtcaagggtcctgaaaaaatcattaacgagcacgtggataagaccgttgtgcatcctaaggtcaagagaaattccctcacggcctcactggacaagctgctaaaggaagcgaccgggacttctccttcgcctcttcaagctaaattggccccggtgatcactgggactaattcaaaattggaagaaggtcgattcttcggcaaagggattgaacagtctcacaatacctcagcagacaaaagggaaatactagcaccctttcctgtcagggatgagacatttggcaatacggccttattaaagaaggctgagagcggcgaatgccaattgtctacacaaaacttgattcagatggccgcagaggactcacaccctctggatccaacatcccagctaagcagaaagggttccttcggagatgtcgcttcccccccgcaggacatgttatttccacaggacgcacatcttgtcccacaggctagagtgcaccctagccagacggagattagcgagacagtggagaaagtgatcctgccccctcggccagtgctgaacgacgttagcgcagcactgcagaagctgtgtggggaggtgtggttaagctacccagccggtcgcgaggtgggcccaggcgaagtaaaccccgagtttccggaggcagtgcagcctgtctgctcgcccctgaaccctcccggggtgataagcccatgggctaccatggacaccatagtcccagacaggaaagacttttactcctccaatgttgtgcctgataagacacatgaggtcggttcttacttggctgcgcagatgtccccatcggatcagacattgagcagctttgcaagtatagtggcccagtatggaaagggcctgcctcaagaagttgaagagatcgtcagggagactatagtgcagcctaagtccgagtttttagagttctccgcaggactggaaaaactgctcaaggaagaaacggagacctttccatcaaagtacgagtctgacaccgggaatctcagcccttctaagctcatcggatcaactgaagaaccccggagggcaacttcagagtgccaccctgaagaattgaaggagaccgtggagaaagccgaggccccccttatcacagagtcagctttcgacgccggcttcgagaagctactgaaggagataacagaagcacctccataccagccccaggtgagtgtgcgggaggagacacacgaaaaagaatcttcccaatccgagcagactagattcctcggcaccgtcccccacttttacagagcggcatcgcaaaccagcgaaatgaaggacaaaagcaatgggcttgagtcccaggtgaatcagtgtgataagatgctgggcggtgacgctcttgttacggacctgctggtagacttctgcggatctcggagcggagttgagatcccccggacccctcagctgtatgtggctcatgagatcggcacaatcaaaactgtgacaccacctgaagaccgcgactcagaatctggggtcgctggaggccagggcaccctgcaagaacctggattcggcgaagcctccgaagccatcagtgttagccgaaacagacagccaatccctctgctgatgaataaggagaatagtacaaagacgtccaaagtggaactcactctcgcaagtccttatatgaagcaggagaaggaagaggaaaaggaaggcttcagcgaatccgatttttctgacggaaacacatcctcgaatgccgaaagctggcgaaaccccagttccagcgaggaggagccatctcctgtcttaaaaactctcgagcgcagcgccgccagaaagatgccatcaaagagcctggaggacatctccagtgacagtagcaatcaggcgaaagtggacaatcagccagaagagctcgtgaggtctgccgaggatgatgagaaacccgaccagaaacccgtaaccaacgaatgtgtccccaggatatcaactgttccaacacagcccgataatccattcagtcaccccgataagctcaaaaggatgagtaaaagtgtgcccgctttcttgcaagacgagtcagatgatagggagaccgacacagcaagcgagtcgtcttaccagttgtctcggcataaaaagtcacccagctccctgactaacctctctagctcttctggcatgacgtcccttagttctgtgagcggaagcgtgatgagcgtttactccggagacttcggaaatcttgaagtgaagggtaatattcagttcgccatcgagtatgtagagtcactaaaggaactacatgtctttgtggcacagtgcaaagacctcgctgctgccgacgttaagaagcaaagatctgacccatatgttaaagcttatcttctgccagataagggtaagatggggaaaaagaaaaccctcgtggttaaaaaaacattgaaccctgtgtataatgagatcctccgttacaaaattgagaaacagatccttaagacccagaagctgaacttatctatttggcatcgtgacacttttaaaagaaattcattcctaggagaagttgagctagatctagagacctgggattgggacaacaagcagaacaagcagttaagatggtatcctctgaaacgaaaaacagccccagtggcccttgaggcagaaaaccgaggggagatgaagttagccctgcagtatgtgccagagcccgtgccgggcaagaagttgccaacaaccggagaggttcatatatgggtcaaagaatgcctggatttgcctctcctcaggggttcccacctgaatagcttcgtgaaatgtacaattcttccagatacatctcgcaaaagtaggcagaaaacgcgggccgtggggaaaaccacaaaccccatctttaaccatacaatggtgtatgacggatttcggccagaggatcttatggaagcgtgcgtggagctcacagtatgggatcactacaagctcactaaccagtttttgggcggcttgcgcataggcttcgggactggcaaaagctatggcaccgaagtggattggatggattcaacaagtgaagaagtggctctttgggagaagatggtgaactctccgaacacgtggattgaggctactctcccgttgcggatgttgcttatcgcaaaaatctctaagtag

SEQ ID NO: 136922 - DNA, 5343 bp, synthetic construct
  misc_feature 1..5343: note = Description of Artificial Sequence: Synthetic coding sequence
  source 1..5343: mol_type = other DNA
atgattaactcgagcctcagcatgctgttttcttatttagaaaaatacttctacgtagcagatgagctaagccactgtgtggagccagaaccatcacaggtcccagggggctccagtagagacagacagcaaggaaagccaccacctctgccagccttgaaggctaagacctcatccaggtctggaccgtacgctacagagattaaaaaatcgaccgatgatagtatattcaaagtcctcgactggttcaaccggagctcctattcggatgacaacaaatctttcctgcagcacccccgcggcatagagagcaaggagaagaccgattccaaaagtcaggtggccgtggacctcgtcactgatgatacgaccctgagagaaaacggctctaagaccctctccccaagtaagatcgaactgaagccagtaagatccgattctccctttcaagctgagggagatatgctcgtgtctgaaagctgtcaggataacaatgtgaacataaagtcgaaattcatgaacctttctcagaaaggcacccctaaggaggggcccggaatcttgcagccatttgagtcatatggcaccccttcccagggtagcaagaatatggactactctcaagactccaagtcgccaggcaaaggaaacggagctagcccttcaaactctaactacagctactccgtactgaaagaaagtgatgccgaaaaccaggttccatgtaacacaaataatattggtaacctcggcgaagaagagccaaagttccacgcccacgaagagaatagggggcactcagaggtaaacttcgactcctcaacagtggtgaaggagccaggactaaaggacaatatgaacgccgagagaaaatctaaagttgggaatacatatattctgaaggcgagtctcgagccagaaaatatcaagtccactccaggtgtggcaaataacggctctccctggaagaagccagaagtccaattccagcaggaggctggagaggtgcctaagaatcaggtgcaaagagaaaaatacaagagggtgtctgacaggatttccttctgggagggtgagaaggcgggagcgaagattacgcatgagaaaccaactagctcttgtagccaagaacagccatctgccaaagcgtaccaacccgtgaagaagtctcagggcgtgtcatctatggatagcctttccactgatcagtctgagtataaccaagctattccaaaacgagtggtgctggacgaggatgatcaggcttcccagttgtctaattcttatagctctaacaagtcaaaggagaccaagccacagattgccggcccctcaaggtactatctgagcgctgaacagagcgataaagtgtcccttttccagaataagaagaacgaacccatcaagcgctctcaggtggctgatagtttaccttcccggcgcaatatcacactgcccgcacttcagccacccagcaatgtagggtcggagaggcacgccccactggaaaaagatcgtcccctcgttagagagtcaaatgcgaattttaaggtaatgtccctgaaagaacgaatggacgaaccaaatgcagagcaggtctacaacccttcccaatttgagaatcttcgcaagttttgggacctggaagctaattctaactctaaggacaatgacaagaacatcactacaacaagtcagaaaaacagtgcgccattcaaccggcagaagcacaaggagttcagcgatattaagctgtctggtaagaacacccatgaggcggaagttctgctgtccccaaagaaggttatggctagggaggagatggagaagttaaatagcaaagggatactgcaggttcttcctgatgaaatcacttttcccctgtctccactgaggaagtacacctatcaactcccaggaaacgagtcatccaaagagaatgtagagaagaacacagagggaatcgtcacccccgtgtttaaagaagagaaggattactctgagcaggagatccaagagtccatcataaagaccaacgtcctctccaaggattgcaaagatacttttaacgacagcctgcagaagctgttgtccgagactagtaccccagccatacagcctagtggcggcaaagtgcatggcaaacaggtgttggagccatcagtgtctgagaaccggacctggccgcaaaaaacggatttcgcagatacagaggaagaggtgaaaggccctgaaaagattatcaacgaacacgtcgacaaaacagtggtgcacccaaaggtgaagagaaatagcctgaccgcatctctggacaaattactgaaggaggctaccggtacatcaccatctccactgcaggccaaattggcacccgttattactggcacaaactccaagctcgaggagggccggttcttcggtaaggggatcgaacaatcccataacaccagtgctgataaaagagaaatactggccccatttccggtacgcgatgagaccttcggcaatacagccctacttaagaaagccgagtcgggagagtgtcaattgagcacacaaaacttaatccaaatggcagcggaagactcacatccgctcgaccctaccagccaattgtctagaaaagggtcgttcggggacgtagctagcccaccacaggacatgctgttccctcaggatgcacacctggtgcctcaggctcgggtgcatccttcacagaccgaaatctccgaaacagtagaaaaggtgatcctgccacccagacccgtgttaaatgatgtgtcggctgcgctgcaaaagctttgcggagaggtgtggctctcttaccctgccggacgggaggtgggaccaggcgaagtcaatcctgaattcccagaggccgtgcaacccgtttgtagcccactaaatcccccaggggtgatctcgccctgggcgacaatggataccatcgttccggatcgcaaagatttttactccagcaacgttgtgcccgataaaacgcacgaggttgggtcctacctcgccgctcaaatgtccccctctgaccaaaccctgtcttcatttgccagcattgttgcccagtatggaaaagggctgccgcaagaagtggaggagatcgtccgggagacaattgtccaacccaaaagcgagtttctggagttttcggctggccttgaaaagctgcttaaagaggagactgagactttcccgagcaagtatgagtctgacaccgggaatttgtcacccagtaagctcattggtagtaccgaggagccacgacgagcaacatctgagtgtcacccagaggagctgaaggagaccgtcgagaaggccgaggcacctctgattacggaaagcgcttttgatgccgggtttgaaaaactcctgaaggaaattaccgaagctcccccctaccagccccaggtctctgttcgcgaggaaacccatgagaaagagtctagccagagcgaacagactcggtttcttggtacagttccccacttctaccgcgcggctagtcaaacctccgaaatgaaagataagtcaaacggcctggagtcccaggtgaatcaatgtgacaaaatgttggggggagatgccttggtgacagatctactggtcgatttctgcggcagtcggagtggagttgagatcccccgaaccccccaactgtacgtagcgcacgagattggaacgatcaaaaccgtgacacctccagaagaccgtgacagtgagtcgggcgtcgctggcggccagggcaccttgcaagaaccagggtttggcgaggcaagcgaggctattagcgtctccagaaaccgccagccaatccccctcctgatgaataaggaaaatagcaccaaaaccagcaaggtggagttgacccttgcctccccttatatgaagcaggaaaaagaggaggagaaagaggggttttcggagtcggactttagcgatggcaacacctccagtaacgcggagtcttggcggaacccgagctcgagcgaagaagagccttcgcccgttttgaaaaccctcgagaggagtgccgcacggaaaatgccatccaagagtctagaggatatctcctctgacagctccaatcaagctaaggtcgataaccagcctgaagagctggtccgatccgcagaggacgtgtctacagttcctacccaaccagacaaccctttctcgcacccggacaaattgaagagaatgtccaagagcgtacccgcatttctccaagatgagtctgacgacagagagactgacacagcatccgaaagttcctaccagctgtcaagacataaaaagtctccatcatccctgactaatctttcatcttcatccgggatgacctccctctcctctgtctcagggagcgttatgagtgtctatagcggagacttcgggaatctcgaagtaaagggcaatatacagtttgctattgagtatgtcgagagtttgaaagagctgcatgtctttgtagcacagtgcaaggatctggctgcagctgatgtgaaaaagcagcgcagcgacccatacgtgaaagcgtatcttctcccagacaagggaaaaatgggtaagaagaaaaccttggtcgtgaagaagacattgaacccagtctacaatgaaatcctgaggtataaaatagaaaagcagattctcaagacccagaagttgaacttgagtatctggcatagggacacttttaagcgcaatagcttcctaggggaggtggaactcgatcttgagacctgggattgggataacaagcaaaataagcaattacgctggtatcctttgaagaggaaaaccgccccagtggcactagaagccgaaaatcgcggagaaatgaagcttgccctccaatacgtccccgagcccgtccctggaaaaaaactccctaccaccggggaagtacatatctgggttaaggagtgcttggacctgccgttgctgagaggaagccacctaaactcgtttgtgaagtgtactattttgccagacacgagcagaaagtctaggcagaaaacccgggccgtcggcaagaccaccaatccaattttcaaccataccatggtttatgatggcttccgccccgaggacctgatggaggcctgtgtcgaacttaccgtctgggaccactacaagctcaccaaccagtttctggggggcttacgcataggctttggcaccggaaagtcttatgggacagaggtggattggatggatagtacttcagaggaggtcgctctgtgggagaaaatggttaactcgccaaatacgtggattgaggccacgctgccgcttagaatgctcctcatagccaagatatccaaatag

SEQ ID NO: 136923 - DNA, 1098 bp, synthetic construct
  misc_feature 1..1098: note = Description of Artificial Sequence: Synthetic coding sequence
  source 1..1098: mol_type = other DNA
atgtctgacgatagggagaccgacacagccagcgagtctagctatcagctgagccgacataaaaaaagtccctccagcctgactaacctgtccagctccagtggaatgaccagcctgagcagtgtatctggctcagtgatgtctgtgtattctggagatttcggtaacctggaggtaaagggaaatattcaattcgcaatcgaatacgtggagagcctgaaggagctccatgtgtttgtagcccagtgtaaggatctggccgctgcagatgtgaagaaacagcgctcggatccttatgtcaaagcctatctgctccctgacaaaggaaagatgggaaaaaagaagactctcgtagtgaaaaaaacccttaaccccgtctataacgagatcctgaggtataagattgaaaaacagatacttaagacacagaagctgaatctgtccatatggcacagagatacattcaaacgtaatagttttctcggcgaggtagaactggacctggagacatgggactgggacaacaagcagaacaagcagctaaggtggtaccccctgaagagaaagacagcccccgtcgctttggaagctgagaaccgtggcgagatgaagctggcactgcagtatgtgccggagcccgtgcccgggaagaaacttccaacaacaggcgaggtgcatatctgggtgaaggaatgcctagacctgcctctccttaggggctcccacctgaattccttcgtgaagtgtacaattctccctgacacttccaggaagtcccggcaaaagactagggctgttggtaagaccaccaatcccatttttaatcacactatggtgtatgacggattccggcccgaagatttgatggaagcttgtgtggaattgaccgtgtgggatcactataagttaactaaccaattcctgggaggcttgcgcataggcttcggcactgggaagagttacggtacagaagtggactggatggacagcacaagcgaagaagtggccttatgggaaaagatggtcaactctcccaatacgtggattgaggcaacacttcccctgagaatgctgctgatcgccaaaatatcgaagtag

SEQ ID NO: 136924 - DNA, 2733 bp, synthetic construct
  misc_feature 1..2733: note = Description of Artificial Sequence: Synthetic coding sequence
  source 1..2733: mol_type = other DNA
atgattgaccttagcttcttgaccgaggaagaacaggaggccataatgaaagtcctccaaagggacgcagcactgaagagagccgaggaggagagggtacggcatttaccagagaaaatcaaagacgaccagcagcttaaaaatatgagcggtcagtggttttacgaggcgaaagcaaagcggcaccgggataaaatccacggagccgatattatcagggcgtccatgaggaagaagcggccccagattgccgctgaacagtccaaggatcgtgagaacggcgccaaagagagctgggtgaataatgtgaacaaagatgcattcctgccacccgaattggccggagtcgtggaggagcctgaagaagacgctgctccagcttcaccgtcctcctccgtcgtgaatccagcttccagcgtgatagatatgtcccaggaaaacacacggaagcccaatgtgagcccggagaagcgcaagaaccctttcaattcaagcaaactccccgaaggccattcatcccaacagacgaaaaacgaacagtctaaaaatgggagaaccggcctgttccaaacaagcaaggaggacgagcttagcgagtccaaagagaagagcactgtcgctgacacgtctattcaaaagctcgagaagtcgaaacagaccctaccaggactgtccaacgggtctcagatcaaggcccccatcccgaaggcaaggaagatgatatacaagtctaccgacctgaacaaagatgataaccagtcttttccgcggcagcgcaccgacagccttaaggctagaggcgctcctagaggaatcctgaagcgcaactccagctcatcgagtaccgactcagagacccttagatacaaccacaatttcgagccaaagtccaaaatcgtgagtcctggtttaaccatccacgaacgcatcagcgagaaggaacattccctggaagataatagctccccaaattccctggaaccattgaagcacgttcgtttctctgccgttaaagacgaacttcctcagtccccggggctgatccacgggcgggaggtgggagaattctcggtactcgaatctgatcggttgaagaatggaatggaagatgccggcgatacggaggaatttcagtcagaccccaaaccttcgcaatataggaagccaagcttgtttcatcagagcacgagctcgccttatgtctctaaatctgagacccaccagcccatgacgtcagggagctttcccatcaatgggctgcactcacacagcgaagttctgaccgcaagaccacaatctatggagaacagtccgactattaacgaaccgaaggataagtccagcgaactgacccggcttgagtctgtcctgcccagaagtccggccgacgagctttctcattgcgttgaacctgaaccctctcaggtgcccggggggagtagtcgggaccgccagcaaggctctgaggaagagccatcccctgtacttaaaacactggaacgctccgctgctagaaaaatgccttccaagtcactggaggacatttccagcgattctagtaaccaggcgaaagtggacaaccagcctgaggagctagtccggagcgctgaagatgatgagaaaccagatcagaaaccagtgaccaacgagtgtgtacccaggatctccaccgtgcctacacagccagataatcctttctctcacccggacaaactgaagcgaatgtccaagtccgtccccgccttcttgcaggacgaggtcagtggcagcgtcatgtcagtttactctggtgattttgggaatctagaagtgaaggggaacatccaatttgccatcgaatatgtcgagtctctcaaggaactgcacgtattcgtggcacagtgcaaggatttggctgcggccgatgtcaagaaacagcgatccgacccttatgtgaaggcctacctgctgccagataagggaaagatgggcaaaaaaaaaaccttggtcgtcaaaaagaccctcaatcccgtgtacaacgaaatactacgctacaaaattgagaagcaaattctaaagacacaaaaactcaatctgtctatctggcatcgcgacaccttcaagcggaacagtttcctgggagaagttgaactggatctggagacttgggattgggataataaacaaaataagcaactgcgatggtaccccctgaagaggaagaccgccccagtggcgttggaggccgaaaacagaggggagatgaaattagccctccaatatgtccctgagccagtccctgggaagaagttacctactaccggcgaagtgcacatttgggtgaaagaatgtcttgatctccctctccttcgcgggagccacctgaattccttcgtcaaatgcacaatactcccagacacgagtcgtaaaagtcgccaaaagacccgggcggttggaaaaactaccaacccaatattcaatcacactatggtgtatgacggattcaggcccgaagatctcatggaagcttgcgtagaactgaccgtgtgggaccattataagctgaccaatcaattcctcggcggcctgaggatcggatttggcaccgggaaatcctacggcacagaagtggactggatggatagtacctcggaagaagtcgccctatgggagaagatggtgaattcccctaatacttggatcgaggctacactgccattaagaatgctactgattgcaaagattagtaaatag

SEQ ID NO: 136925 - DNA, 2733 bp, synthetic construct
  misc_feature 1..2733: note = Description of Artificial Sequence: Synthetic coding sequence
  source 1..2733: mol_type = other DNA
atgatagatctctcctttctgacagaagaagaacaagaggcaattatgaaagtgctccagagggatgccgcgcttaagcgggccgaggaagagcgcgttaggcatttgccggaaaagatcaaagatgaccagcagctgaagaacatgagtgggcaatggttctatgaggcaaaagcgaaaagacacagagacaagatccacggcgcggacattattcgtgccagtatgcgcaagaagcgaccacagatcgccgccgagcagtccaaggatcgagagaacggcgcgaaggaatcttgggtgaataatgtgaacaaagacgcgttcctgccaccagagctcgccggtgttgtggaagaacctgaggaagacgcagccccggcaagccccagtagttcggtggtcaaccccgcttcatccgtgatcgatatgtcacaggagaacactcgcaaacctaatgtcagtcccgagaagcgcaaaaatcctttcaacagcagcaaactgccggaaggccactcgtctcaacagactaaaaacgagcagagcaagaacggtcgtaccggactatttcagacatccaaagaggacgagctcagtgagtctaaggagaagtcaacagtagctgacacatctatccaaaagctcgaaaaatccaagcagaccctgcccggattatcaaatgggtctcagatcaaggccccgattccaaaagcacggaaaatgatatataaaagcaccgacctcaataaagacgataatcagtcattcccacgacagagaacagatagcctgaaggcacgaggcgcacccagggggatcctgaagcggaactcaagctcgtcatccaccgattcggaaaccttgagatacaaccacaacttcgagcctaaatctaagatcgtgagccccgggctgaccattcatgagagaattagtgagaaggaacactcacttgaagataattctagcccaaactccctggagcctctaaaacacgtgcgctttagcgccgtgaaggatgagctgcctcagagtccgggtttgatccacggacgcgaggtgggagagttttcagtgctggagtctgatagactaaagaatgggatggaagatgccggagacacagaggaattccaatccgacccgaagccaagtcaatatcgtaagcccagcttatttcatcagagcacttcgagcccctatgtgtccaaaagcgagacgcaccagccgatgacgagtggctcattccctatcaacggactacatagccattccgaagtcctaactgctcgtccgcagtcaatggaaaactcgcccaccattaatgaacccaaggacaagagtagtgaactgactaggctggaaagcgtgctacctcggtccccagctgacgaactgagccattgtgtagagccggaaccgtcccaagtccctggaggtagctctcgagatcgtcagcagggctccgaggaagagcctagccctgtgttgaagacattggagcgctcagccgcccgcaagatgccaagcaagtcgttagaagacatcagcagtgacagctctaatcaggcaaaagtggacaatcagcctgaggaactcgtaaggtctgcagaagacgatgaaaaacctgatcagaagcccgtgaccaacgaatgtgtcccaaggatctctaccgtgcctacacagccagacaaccccttttcccaccctgacaaacttaaacggatgtcaaaatccgtgcccgcgtttctgcaggacgaggtgtctggatctgtaatgagcgtctattccggcgatttcgggaatctggaggtcaagggtaacattcagtttgccatcgaatacgtggagtccctaaaggaacttcacgtgttcgtagctcagtgcaaagacctggcagccgccgatgttaagaagcagcgctctgatccctatgtgaaggcctacctattaccagacaaagggaagatgggcaaaaaaaagaccctggtagtaaagaaaacattgaaccctgtgtataacgaaattctaaggtacaagatagaaaagcagatcctgaagacccagaagctcaacctgagtatttggcatcgggacacctttaagaggaactctttcctgggggaggtagagctggacctggaaacgtgggattgggacaataaacagaacaagcagctacgctggtaccccctgaagcgtaaaaccgcacccgtcgccctggaggcagagaaccgcggagaaatgaagcttgcccttcagtatgttcctgagccagttcccgggaaaaagctgcccacaaccggggaggtgcacatatgggtcaaagagtgcctggacctccctctcctgaggggctcccacctgaattcatttgtgaaatgtaccatccttccagatacctctcggaaatcgagacagaaaactagggccgtaggcaagaccactaacccaattttcaatcacaccatggtatatgacggatttcggccagaggacctgatggaagcctgtgtcgaactgacggtgtgggatcactacaagctcaccaaccagttcttggggggcctcaggattgggtttggcaccggcaaatcctatgggacagaggtggactggatggactccacgtctgaagaggtggctctgtgggaaaagatggtgaactccccgaacacgtggattgaggctaccttgccgctgcgcatgttgctcatcgccaagattagcaagtag

SEQ ID NO: 136926 - DNA, 192 bp, synthetic construct
  misc_feature 1..192: note = Description of Artificial Sequence: Synthetic coding sequence
  source 1..192: mol_type = other DNA
atgtccaaatcagtgcctgccttcttgcaggacgaaagcgacgatagagagaccgacaccgcgagtgaaagtagctatcagctcagtaggcacaagaaatcgccgagttctctgaccaatctgtcttctagctcaggcatgacaagcctgtcaagcgtctccgggagcgtcatgtccgtttactccgggtag

SEQ ID NO: 136927 - DNA, 3771 bp, synthetic construct
  misc_feature 1..3771: note = Description of Artificial Sequence: Synthetic coding sequence
  source 1..3771: mol_type = other DNA
atggatgaaccgaacgccgaacaggtctacaacccttcccagttcgagaatttgagaaagttttgggatttagaagccaattctaactcaaaagataatgataaaaacatcactaccacctcccaaaaaaattctgcgccttttaataggcagaaacataaggaattctccgatattaagttaagtggaaagaacacacatgaggccgaagtccttctgtcacctaaaaaggtgatggctagagaagagatggagaagttgaactccaaaggtatattacaagtcctgccagatgagatcacattcccgctttcgcccctgcggaagtacacttaccagctcccgggcaacgagagctccaaagaaaatgtggagaagaacactgagggcatcgtgaccccggtctttaaagaagaaaaggactattccgagcaggagatccaggagagcatcattaagactaatgttctctcgaaggactgcaaagacacgttcaatgattcgctgcagaagctactatccgagacctcaacccccgctattcagccaagtggtggcaaagtgcacggcaaacaagtcctcgaacccagtgtgagcgagaaccgcacctggccacagaaaaccgattttgccgatacagaggaagaggtgaaagggcctgagaagattatcaacgaacacgttgataaaactgtagtgcacccaaaggtgaagagaaactccctgacggcctctttagacaaactgctgaaggaggctacggggacatccccaagtcccctccaggctaaattggcaccagtaattaccggcacgaatagtaagctggaggagggacgcttcttcggcaaaggcattgagcagagtcataacacctcggccgacaagagggagattctagccccctttccggttcgcgatgagacattcggtaataccgccttattgaagaaggctgaatccggagaatgtcaactttccactcaaaatcttattcagatggccgcggaagatagccaccccctcgaccctacgtctcagctttcgcgcaaaggatcattcggagacgtggccagtcccccgcaggacatgctattcccacaggatgctcatctggtccctcaggcacgggtacacccttcccaaactgaaatctctgagaccgtggagaaggtaatactgccacctaggcctgtgctgaatgacgtgtcagccgcactccagaagctctgtggtgaagtttggctatcctatccggctggccgcgaagtaggccctggtgaggtcaatcctgagttcccagaagccgtacagcccgtgtgcagccctctgaatcctcccggcgtgatctcgccgtgggccaccatggacacaatagtgcccgatcgaaaagacttctactccagcaacgtcgtgcctgataagacacatgaggtcgggtcgtatcttgcagctcaaatgtctccctctgaccagaccttaagtagctttgcgagtatcgtggcacagtacgggaaaggactgcctcaagaagttgaggaaatcgtgcgtgagactatcgtacagcccaagtccgagtttcttgagttcagcgcaggactcgagaaactcctgaaggaagagaccgagactttcccatccaaatatgagagtgataccggaaacctcagccctagcaaattgatcggatctaccgaggagcctaggcgcgctacctctgaatgccatcctgaggagctcaaagaaactgtcgagaaggctgaagctcctctcatcacagaatcagcattcgacgctggctttgagaagctgcttaaggagatcactgaggcaccaccatatcaacctcaggtgagcgtacgggaagaaactcacgagaaagaatctagccagtccgagcaaaccaggttcctgggcaccgttcctcacttctatcgcgctgcaagccagacctcggaaatgaaagataagtctaacggtctggaaagtcaagtcaatcagtgcgacaaaatgttgggtggggacgcccttgtcacagacctcctcgtggatttttgtggcagtaggtccggcgtggaaatccctaggacaccccagctgtacgttgcgcacgaaattggtaccataaaaactgttacgccacctgaggacagggattcagagtctggcgttgctggaggccaggggacactacaggaacctggctttggcgaagcctccgaggccatcagcgtctcaagaaatcgtcagcccattcccctgctgatgaataaagaaaactccaccaaaacgtcaaaggtggagctgaccctggctagtccctacatgaaacaggagaaagaggaagaaaaggagggcttctcagagtccgacttctctgacggcaatacctcatccaatgcagagtcttggcgtaatccttcttcctccgaggaggaaccatcgcctgtgctcaaaaccctggaaaggtccgctgcgcgaaagatgccgtccaagagcctggaagatattagtagtgactcctccaaccaggccaaggtggataaccagcccgaggagttggtgaggtcagccgaggacgtctcaaccgttccaacccaaccagataatccatttagccaccctgataagcttaaacgaatgagtaagtctgtccccgcattcttgcaggatgagagcgatgatagggagacagatacagccagtgagagttcgtaccagctctcgcgacataagaaatctccttcaagtcttaccaatctgtctagcagctcaggcatgacctctctgtcttctgtatcgggcagcgttatgtcggtgtactctggagacttcgggaacctggaagtaaaaggtaatatacagttcgccatcgagtacgtcgaatctctgaaagagctgcacgtcttcgtggcccagtgcaaggacttagctgcagccgatgtgaaaaaacagcgcagtgatccgtatgtaaaggcctatctcctgccagacaaggggaagatggggaaaaagaaaaccttagtagttaaaaagaccctcaatccagtgtacaatgagatcctgagatataaaattgaaaaacagatactaaagacccaaaaacttaatctgtcaatttggcaccgagatactttcaagcgaaatagtttcctaggcgaggtggaactagacctggaaacttgggactgggacaacaaacagaacaagcagctcaggtggtatcctctgaagcggaagaccgctccagtagccctggaggctgaaaaccgaggagaaatgaagctcgccctccagtatgtcccagaacccgtccctgggaagaaactccctactaccggtgaggtgcacatatgggtcaaggaatgcttggatcttccacttcttagaggcagtcatctgaatagcttcgtcaagtgtaccattctgccagataccagccgcaagtcccgtcagaagacacgtgccgtcggcaagactactaaccctattttcaatcatacgatggtgtacgacggctttcggcccgaggatctcatggaagcctgtgttgaactgacagtgtgggatcactataaactaacgaaccagttcttagggggactgaggatcggctttggaactgggaaaagctatggcacagaagttgattggatggattccacatcggaggaagttgcgttgtgggagaagatggtaaactcacctaacacgtggatcgaggcgaccctaccactgcgcatgctgctcatcgcaaaaatctccaagtag

SEQ ID NO: 136928 - DNA, 1131 bp, synthetic construct
  misc_feature 1..1131: note = Description of Artificial Sequence: Synthetic coding sequence
  source 1..1131: mol_type = other DNA
atgtccaagagtgtgccggcattcctgcaagatgagtcagacgaccgtgagacggataccgcctccgagagctcctatcagctgagtagacacaaaaagtcccccagtagcttgaccaatctctcctctagctcgggcatgaccagcctttcttccgtctcaggttctgtgatgagtgtgtacagcggggacttcggcaatctggaggtgaaagggaacatccagttcgcgatagaatatgtcgaatccctgaaagagctgcatgtgttcgtggcgcagtgcaaggacctcgccgcagctgatgtgaagaaacagcgctcagacccttacgtgaaagcgtacctcctgccggacaaaggaaagatggggaagaagaagaccctcgtcgttaaaaagactcttaatccagtgtacaacgagattcttagatataagatcgagaagcagattctaaagacccagaaactgaacttatctatatggcatcgtgataccttcaagcgcaactcatttctgggcgaggtggagctggacctggagacatgggactgggataacaagcagaacaagcagttgcgctggtatcccttgaaacgaaaaacggcacccgtggcactcgaagccgaaaaccggggtgagatgaagcttgctctgcagtatgtgcccgagcctgtaccaggcaaaaagttgcccactaccggagaagtgcatatctgggtgaaggagtgcctggacctgccgctccttagaggaagccaccttaactctttcgttaagtgcaccatcctgcctgacacaagtcgaaagagcaggcagaagacccgggcagtggggaaaaccaccaacccaatctttaaccatacaatggtctacgatggattccggcccgaagatctaatggaagcctgtgtggagttgaccgtttgggatcactacaaattgacaaaccagtttctcggcggcctacgcattgggttcggtacaggaaaaagctacggcacggaggtggactggatggattcaaccagtgaagaggttgccctttgggagaagatggtcaactcaccgaacacatggattgaggcaaccctccctttacgcatgttgctgatcgctaagattagcaagtag

SEQ ID NO: 136929 - DNA, 312 bp, synthetic construct
  misc_feature 1..312: note = Description of Artificial Sequence: Synthetic coding sequence
  source 1..312: mol_type = other DNA
atgtcgaaatcagttccagccttcttgcaggacgaatcagatgaccgcgagaccgacaccgccagtgagagttcatatcagctcagtaggcataaaaagagtcctagtagcctgacaaacctttcttcttccagtggaatgacttcgctgtcctcggtgagcggaagcgttatgtcggtctattcaggagatttcggcaacttagaagtgaaaggcaatatccagttcgcgattgagtacgtcgagagcttaaaggaactgcacgtgttcgtggcccaatgtaaagatctggctgccgccgacgtgaagtag

SEQ ID NO: 136930 - DNA, 2709 bp, synthetic construct
  misc_feature 1..2709: note = Description of Artificial Sequence: Synthetic coding sequence
  source 1..2709: mol_type = other DNA
atgagtggccagtggttctacgaagctaaagcaaagagacatcgtgacaagatccatggcgctgacatcatccgcgcttctatgcggaaaaaaagaccgcagatagccgcagaacaatcgaaggatcgagaaaatggagccaaggaatcatgggtgaacaatgtgaataaagacgcttttctaccaccagaactggccggggtggtggaagaacccgaagaggacgcagcacctgccagcccctcgagttccgtcgtgaaccccgcttcaagtgtcattgatatgtcgcaagagaacactagaaagcctaacgtctcccccgagaagagaaaaaatccctttaactcatcaaaactgccggagggccattcatctcagcagacaaagaacgagcagtcgaagaatggtagaactggcctgttccagactagtaaagaggacgagttaagtgagtccaaggaaaagtcaaccgtcgctgatactagtattcagaaactcgaaaaaagcaaacaaacactccctggcctgtccaatggcagccagatcaaagctccaattccgaaggctcgaaagatgatttacaagtcaacagatctaaataaagatgacaaccagtctttccctcgtcagagaacagatagcctcaaggctcgcggcgcaccccggggcattctgaaaagaaattccagtagctcttcaaccgacagcgaaactttgcggtacaaccataacttcgaacctaagtcgaaaatcgttagccctggcctgaccatccacgagagaatcagtgaaaaggagcatagcctagaagataattctagcccaaattccctggagcccctgaagcacgtgcgttttagcgctgtgaaggacgagctgcctcaaagtcccggcctaatccatggcagagaagtgggtgaattcagtgtgctggagtctgaccggctgaagaacgggatggaagatgcaggggacacagaggaattccagtccgaccctaagcccagtcagtaccgaaagccgtctctttttcaccagtccacatcaagcccctatgtttctaagagcgagacccaccagcctatgacatctggaagttttcccattaatggactccattcccactcggaagtgctgaccgccaggcctcagagtatggaaaactctcccaccatcaatgaaccaaaggataaatccagtgagctgacacgcctcgagagcgtgctcccccggtcaccagccgatgagctgtctcattgtgtggaaccggagcctagccaggtgccaggtggcagttctagggataggcaacaaggctctgaggaggaaccatcccccgtgctgaagacactggagaggagtgccgcccgcaaaatgcccagcaagtcattagaagatatttctagcgacagttcaaatcaggccaaggtggataaccaaccagaagagcttgtccgttccgccgaagatgacgaaaaacccgatcagaaaccagtaacaaatgaatgcgtgccgaggatttcaacagtacctactcaacctgataatccattctctcaccccgacaaacttaagaggatgtctaagtctgtgcctgcctttctgcaggacgagtcggatgaccgggagacggacactgccagcgagagcagctatcagctgagtagacacaaaaagtccccaagcagcctcaccaatctgagcagttcctctgggatgacttctctatccagcgtatctgggtcggtcatgtcagtttattctggcgatttcggcaacctggaggtgaaagggaacatacaattcgccatcgagtatgttgagtctcttaaagagctacatgtctttgtggcacaatgtaaagacctggccgcagccgatgtcaagaagcagaggtcggatccctacgtgaaagcctaccttctgccggacaaaggcaagatggggaagaagaaaactttggtcgttaagaaaactctgaaccccgtctacaatgaaattcttagatataagatagaaaagcagatcttgaaaacccagaaactgaatttaagtatttggcatagggacacctttaagaggaactccttcttgggtgaagtagaattagatttggaaacatgggattgggacaacaaacaaaataaacagctcaggtggtacccgttaaaacggaagaccgcaccagttgcactggaggctgaaaataggggagagatgaaactcgccctccagtatgtccccgagccagtgcctgggaaaaagctgcctaccaccggggaagtccatatctgggttaaagaatgcctggatctcccacttctacgaggcagtcacctgaattcctttgttaagtgcaccatcctgccagacacaagtcgcaagtcacgccagaagacccgggcagtggggaagaccaccaatccaatcttcaaccacacaatggtgtacgacggttttcgtccagaggacttaatggaggcttgcgttgaactgaccgtgtgggaccattacaagctgaccaaccaattcttggggggtctgaggattggctttggcacaggaaaatcctatggaacagaggttgattggatggatagtacatcagaggaagtagcgctgtgggaaaagatggttaacagtccaaacacatggatcgaagccacgctaccactcagaatgctgctgattgccaaaatctctaaatag

SEQ ID NO: 136931 - DNA, 483 bp, synthetic construct
  misc_feature 1..483: note = Description of Artificial Sequence: Synthetic coding sequence
  source 1..483: mol_type = other DNA
atgagtaaaagcgtaccagcatttctgcaggatgaagtgagcggcagtgtgatgtccgtgtatagtggagactttggaaacctggaggtcaaaggcaacatccagtttgcaatcgaatatgtcgagtccctgaaagaattacatgtgtttgtggctcaatgtaaggacttagccgctgcagacgttaagaaacagcggagcgatccctatgtcaaagcctatctgctgcctgacaagggaaaaatgggcaagaagaagaccttagttgtaaagaagactctgaatcccgtatacaacgaaattctgcgttacaagatcgagaaacagatcctgaaaacgcagaagctcaacttgtcgatctggcatagggacaccttcaaaaggaattcattcctcggggaggtggagctagacttggagacgtgggactgggataataagcaaaacaagcagctgcgctggtatcccctcaagcgcaagtag

SEQ ID NO: 136932 - DNA, 2805 bp, synthetic construct
  misc_feature 1..2805: note = Description of Artificial Sequence: Synthetic coding sequence
  source 1..2805: mol_type = other DNA
atgatcgatttgagcttccttaccgaagaagagcaggaggccatcatgaaagtgctccagcgcgacgccgcccttaaacgggcagaagaagagagggtaaggcatctccccgagaaaatcaaagacgaccagcaacttaagaacatgtccggccagtggttctacgaagctaaggccaagagacatcgagacaagatccatggcgctgatataatacgagcctctatgaggaagaagcggccacagattgccgctgaacagagtaaagatagggaaaacggcgcaaaagagtcttgggtcaacaacgtgaacaaggacgcctttctccccccagaactcgctggcgtcgtggaggagcccgaagaagacgctgcccctgcaagtcccagcagcagcgttgtgaatcctgctagcagcgtgatcgacatgtcacaagagaatactagaaaaccaaatgtctctccggaaaagcgcaagaacccattcaacagctcaaagctgcccgagggtcactcttcgcagcagacaaaaaatgagcagtctaaaaacgggcggactgggctgtttcaaacatcaaaggaggatgaattgagcgagagtaaggagaaaagtacagtcgcggacacctctatccaaaagctggagaaatccaagcagactctccccgggttgtctaacggaagtcagataaaggctcccatcccaaaggccaggaaaatgatctataaatccaccgaccttaataaagacgacaatcagtcatttccaaggcaacgcacagactccctgaaggccaggggtgctccaaggggcattctgaagcgcaactcaagctcgtcttccaccgactccgaaaccctccgttataaccacaactttgaaccaaaaagtaaaatcgtgagtcctggtctgactatacatgaacgcataagcgagaaagagcattctcttgaagacaatagttctccaaacagcctggaacccctaaaacatgtccggttttccgccgtgaaggatgagctgccgcagagccctgggctgatccacggtcgcgaggtgggagaattttcagttcttgaatctgacagactgaagaacggtatggaggacgctggagatacggaggaatttcagagcgaccctaagccctcacaatataggaagccctctctgtttcatcagtctacctcttctccatatgtgtcgaaaagtgagacgcatcagcctatgactagtggtagttttcccattaatggcctgcactcacactctgaggtgttgaccgctcgaccccagagcatggaaaatagcccaacaatcaacgaaccgaaggacaaatctagtgagttgacacgcctggagagtgtgctgccacgaagcccagctgatgagctctcccattgtgtagagccagaaccctcccaggtacctgggggaagctcacgcgaccgacagcagggatccgaggaagaaccatctccagtgctgaaaactctcgagcggtcagcagctcggaagatgccgtctaagtccttggaagacatctcctcagattcgagcaatcaggccaaggtggataaccagccagaggagctcgtgaggagcgctgaagatgtaagtacagtgcccacacagcctgacaacccattctctcatccagataagcttaaacgaatgtcaaagagcgtacctgcgtttctgcaggatgaaagtgacgaccgcgaaaccgacaccgcctctgagtccagttaccagctgagtcgccataagaagtcacctagtagcttgactaacctgtccagcagcagtgggatgacatcactcagttcagtctcaggctcagtgatgagtgtctattcaggagactttggtaacctggaagtgaaagggaacattcagtttgccatcgaatatgtcgagagcctcaaggaactgcacgtcttcgttgcccagtgcaaagacctggccgccgccgacgtgaaaaaacaaaggagtgacccctacgtgaaagcgtatttgctccccgacaagggcaaaatgggcaaaaagaaaaccttggttgtcaaaaagactcttaacccagtctacaatgaaatactgcggtacaagattgagaaacagattcttaaaacacagaagctcaacctcagcatatggcatagggatacatttaaacggaactcattcctgggcgaagtggaacttgacctggaaacatgggactgggacaacaagcagaataaacaactgcggtggtacccgctaaaaaggaaaaccgctcccgtcgcactggaggccgagaaccggggcgagatgaagctcgctctgcagtatgtgcccgagcccgttccaggcaaaaaattgccaactacgggcgaagtgcatatttgggtgaaggagtgtttggatctgccgttgttgcgaggcagtcatttaaattccttcgtcaagtgtaccatcctacctgatactagtagaaagagtaggcagaagacccgggcagtcgggaagacaacgaatccaatttttaatcacacaatggtgtatgatgggttccgcccagaggatctgatggaggcttgcgttgagctgacagtctgggatcattataagctgacgaaccagttcctaggcggcctcaggataggcttcggcaccgggaagtcctacgggacagaggtcgactggatggattccacatctgaagaggtggcactctgggaaaaaatggttaacagcccaaatacatggatcgaagccacactcccactcaggatgctcctaatagccaaaataagtaagtag

SEQ ID NO: 136933 - DNA, 468 bp, synthetic construct
  misc_feature 1..468: note = Description of Artificial Sequence: Synthetic coding sequence
  source 1..468: mol_type = other DNA
atgagcaagagtgtccctgctttcctgcaggatgagtctgacgatcgcgagacagatactgctagtgaatcctcataccaactgagtaggcacaagaaaagtccatctagtctgacaaatctgagcagcagctcaggcatgacctcactgagcagtgtgtctggatccgtcatgtcggtgtacagcggtgatttcgggaacttggaagtgaagggaaacattcagtttgcgattgaatacgtggagagtttgaaagaactgcacgtgttcgttgcccagtgtaaggaccttgcggcagcagacgtgaaaaagcaaagaagcgatccctatgtaaaggcgtatctgttacctgacaaaggtaagatggggaaaaagaaaacactggtggtgaagaagacactcaaccctgtgtataacgagatcctccgctataaaattgagaagcagattcttaaaacacaaaagtag

SEQ ID NO: 136934 - DNA, 1131 bp, synthetic construct
  misc_feature 1..1131: note = Description of Artificial Sequence: Synthetic coding sequence
  source 1..1131: mol_type = other DNA
atgtccaagagcgtgcctgcatttcttcaggacgaatctgatgacagagaaactgatactgcatcggaaagcagctaccagctgtcccgccataaaaaatctccttcttctctaaccaacctcagctcctcttctgggatgacctcgttatcttcggtgtcaggcagcgtaatgtctgtctattcaggcgattttggcaatttagaggtcaagggtaatatccagtttgccatagaatatgtcgagtcactgaaggaactccacgttttcgtcgcccagtgtaaagacctggccgcggccgacgtgaaaaaacaaagatccgatccctacgttaaggcttacctgcttccagacaagggcaaaatgggtaagaaaaaaacattggtcgttaaaaaaactctgaaccctgtgtataacgagattttgagatacaaaattgaaaaacaaatcctgaaaactcagaagctcaatctaagtatttggcatagggataccttcaaacggaactctttcttaggtgaagtcgagttggacctcgagacctgggactgggacaacaagcaaaataaacagctgcgctggtaccccctgaagcggaaaacagctccagttgcgctggaagccgaaaaccggggagagatgaaactggccttgcagtacgtgcctgagccagtccccgggaagaagctgccgacgaccggcgaggtgcacatctgggttaaggaatgccttgatctgccattactgcggggatcccatcttaacagtttcgttaagtgcacaattttgccagatacatcccgtaagagcagacaaaagactcgggccgtagggaagaccactaatccaatttttaaccatacgatggtttacgacggattcaggccggaggatcttatggaggcctgtgtggaactgactgtgtgggaccattataagctgacaaaccagtttttaggggggctacggatcggctttgggaccggcaaatcttatgggaccgaggttgactggatggactctacttcagaggaggttgcattgtgggagaaaatggtgaactctcctaacacatggatagaggcaaccctgcccttacgcatgctgttaatcgccaagatttcaaagtag

SEQ ID NO: 136935 - DNA, 1956 bp, synthetic construct
  misc_feature 1..1956: note = Description of Artificial Sequence: Synthetic coding sequence
  source 1..1956: mol_type = other DNA
gagacagtggagaaagcggaggcgcccctcatcacagagtctgccttcgacgccggctttgagaaattgctgaaggagataacggaagcccccccttatcagccccaggtgagcgtgcgagaggaaacacacgagaaggagtcatcacagagtgaacagactcgcttcttaggtacagtgccacacttctacagggccgcatcccagacttcagaaatgaaggacaaatccaacggccttgaatctcaagtcaatcagtgcgataaaatgctaggaggggatgctctggttaccgacctgctcgttgacttctgcggaagtaggagtggagtcgagataccacgaactccacagttatacgtggcccatgaaattgggactattaaaactgtgactcccccagaggacagagactcagaatctggtgttgctgggggacagggcactctccaagagcccggcttcggagaggcaagcgaggcaatttcagtctctagaaatcgacagccaattcctctactcatgaacaaggagaatagcacaaaaacttcaaaggtggagcttaccttagcttctccttatatgaagcaagagaaagaggaggaaaaagagggtttctcagaaagcgatttctctgatggcaacacttcatccaatgccgagtcctggaggaatcccagttcaagcgaagaggaacctagcccagtcctgaagaccctcgagcgcagcgcagctcgaaaaatgccttcgaagtctctggaggatattagctcggatagctctaatcaggcaaaagtggacaaccagcctgaggagctggtaaggtcggccgaggatgacgagaagcctgaccagaagcctgtgacgaatgagtgcgtacctagaatttcaaccgtccccacccagcctgacaaccctttttcacacccggacaaactgaaacgaatgtctaaaagtgtcccagcattcctgcaagatgaggtgagtggatctgtgatgagtgtctattcgggagacttcggaaacctggaggtgaaaggtaacatccagttcgccatcgaatatgtcgagagtctcaaggaattacatgtgtttgtggcccagtgcaaggacttggccgccgcagacgtaaaaaaacaaagaagcgatccatacgtgaaagcttacctgcttccagacaagggcaaaatgggtaaaaagaaaacacttgtggtcaagaaaacgcttaaccctgtctataacgagattctgcgatataagatcgagaagcagatccttaagacccaaaagttgaacctgtctatttggcatcgcgataccttcaagagaaacagtttcctcggtgaagttgagcttgacctggaaacatgggattgggataataaacagaacaagcagctccggtggtaccctttgaagcgcaaaaccgctccagtggccctggaagctgagaatcgcggggaaatgaaactggccctccagtacgttcctgaacctgtcccaggtaaaaagttgcctaccactggggaagtccatatatgggttaaggagtgcctcgatctgcccctgcttcgtgggagccatcttaactcttttgtgaagtgtaccattttgcccgacacaagtcgaaaatcacgccaaaaaacaagagctgtcggtaaaaccaccaaccctatttttaatcacactatggtgtacgatggtttccgcccagaggatctcatggaggcctgtgttgagctcaccgtctgggatcactataagctcaccaaccagtttctgggaggactgagaatcggattcggcaccggcaaaagctacggaacagaagtcgattggatggactccacttccgaggaggtggctctgtgggagaagatggtcaattcacctaacacctggatagaggcgaccctccctctccgcatgctcctgattgctaaaatctcgaaatag

SEQ ID NO: 136936 - DNA, 213 bp, synthetic construct
  misc_feature 1..213: note = Description of Artificial Sequence: Synthetic coding sequence
  source 1..213: mol_type = other DNA
atgagtaaatccgtccccgctttccttcaggatgagtccgacgacagagaaaccgataccgcctctgaaagctcgtatcagctcagccggcataagaagtccccatcaagtttgacaaatttgtcctcctcctccggaatgacctctcttagttccgtgagcggaagtgttatgtcagtgtattccggggatttcgggaacctggaggtctag

SEQ ID NO: 136937 - DNA, 1011 bp, synthetic construct
  misc_feature 1..1011: note = Description of Artificial Sequence: Synthetic coding sequence
  source 1..1011: mol_type = other DNA
atgagcaagagcgtacccgcctttcttcaggacgaagtgtccggcagtgtgatgtcggtgtactctggggactttggcaacctggaagtgaagggcaacatacagttcgctatcgaatatgtggaaagcttaaaagagctgcacgtcttcgttgcacagtgcaaagatctggcagccgccgacgttaagaaacagcgctccgacccttacgtcaaagcttatcttctgccggacaagggcaaaatgggaaaaaaaaaaacgctcgtggtgaaaaaaacactgaatcctgtatataacgagatcttaaggtataagatagagaaacagattctcaaaacccagaaactgaacctctcgatttggcatcgcgatacattcaagcgaaactccttcctaggcgaagttgagctggatctcgagacttgggattgggataacaagcaaaacaaacagctcaggtggtaccctttgaaaaggaagactgcccccgttgctcttgaggccgagaacagaggcgaaatgaagttagctctacagtacgtgcccgagcccgtgcccggaaagaagctgccgactaccggagaagtgcacatctgggttaaagaatgtctggacctgcctctcttacgcggatcacatttgaattcatttgtaaaatgcacaatattgccagacacttcccgtaagagcagacagaagacacgcgccgtcggaaaaacaactaatccaatcttcaatcacacaatggtatatgatgggttccgccccgaggacttaatggaagcatgtgtggaactgaccgtctgggaccattataaactaactaatcagtttctgggaggactccggataggcttcggaaccggaaaatcatatggcactgaggtcgactggatggattcaactagtgaggaagttgccctgtgggaaaaaatggtgaactctccgaacacctggatcgaagccacactgcccttgcgcatgctcctcatcgccaagattagcaaatag

SEQ ID NO: 136938 - DNA, 2016 bp, synthetic construct
  misc_feature 1..2016: note = Description of Artificial Sequence: Synthetic coding sequence
  source 1..2016: mol_type = other DNA
atgtctgagctcctcgacctatcgtttctttcagaggaggaaaaagatctcatcctatccgttctccaacgggacgaggaagtgaggaaggccgatgaaaagagaatcaggcgcctaaagaatgagcttctggagattaaacgtaagggtgcaaagcgggggagccagcactactctgatagaacttgcgcaagatgtcaagagagtctggggcggctgtctcccaaaacaaatacatgtcggggctgtaatcacttggtctgccgagactgcaggattcaagagtctaacggaacgtggcgctgtaaagtgtgtgcaaaggagattgaactgaagaaggcaactggggattggttttacgaccagaaagtgaaccgattcgcttacagaacagggagtgaaatcatacgaatgtctttgcggcacaaacccgctgtgtcgaagagagagactgtgggccaaagcctcctccaccagacacagatgggggacatatggcctggcagaaagattattcaggaaaggcaaaaggaaccttcagtgttgtttgaagttcccaagctgaaatcggggaagtccgccctagaggctgaaagcgaaagtctggattccttcaccgccgatagcgactctacttcccgcagagattcccttgacaaatctggcttgttcccagagtggaagaagatgtccgctccaaaaagccaggttgaaaaggaaacacaacccggcggacagaacgtggtcttcgttgacgaaggtgagatgatcttcaaaaaaaacacgcggaagatactgagaccgagcgagtataccaagagtgtgatcgatctaagacctgaagacgtggtacatgagtccggatctcttggtgatcggagcaaatcagtacctggcctcaacgtggatatggaagaggaggaagaggaagaggacatcgaccacctggttaagctgcacagacagaaactcgcgagaagctctatgcaatctggatcttccatgtccacgatcggcagcatgatgtccatctactccgaagccggagacttcggcaatatctttgttaccggtaggattgcattttctctaaagtacgaacagcaaacacagtccttagtcgtccacgtaaaagaatgccatcagttggcctacgcagatgaagccaagaagaggtcaaacccgtacgtgaagacatatctgctgcccgataagtcaagacagggaaagaggaagaccagtatcaagagagacacaattaaccctctttatgatgagactttgcggtatgaaattcccgagtccttactagcccagcggacactgcagttcagcgtgtggcatcatggaaggttcggccgaaacacttttcttggggaggcagagatccagatggattcttggaagcttgacaaaaaattagatcattgtctgccgctccacggaaaaatctctgctgaaagtcctactggtttgcccagccacaaaggggagttggtggtcagtctgaaatacatcccagcatctaagactcctgtgggcggagatcggaaaaaatccaagggaggcgagggcggagaactgcaagtctggattaaagaggccaagaacctcacagcagctaaggcgggcgggacctcagacagtttcgttaaggggtacctgctccctatgcggaacaaagctagcaagcggaagacccccgtgatgaagaagaccctgaatccacactacaatcacacgtttgtttataacggtgtgcggttagaggacctgcagcatatgtgtctggagttaaccgtctgggacagggaacctctggccagcaacgatttcttgggaggagtcaggctgggtgtcggcacgggaatctcaaatggcgaggtcgtggactggatggactccacgggggaggaggtgagcctctggcagaagatgagacaatacccgggatcctgggctgaaggtaccctgcagctgaggagcagcatggcgaaacagaagcttggcctttag

SEQ ID NO: 136939 - DNA, 2016 bp, synthetic construct
  misc_feature 1..2016: note = Description of Artificial Sequence: Synthetic coding sequence
  source 1..2016: mol_type = other DNA
atgagcgaactgctcgatttgtcattcctgtccgaggaagagaaggatctgatcctgtcagtcctgcaacgggacgaggaagtgcgaaaagccgacgaaaagaggattagacgcctaaagaatgagcttctcgagatcaagcgtaagggagctaagaggggaagccagcactactccgatcgaacttgtgcaagatgtcaagagtcattgggacggctgtctccaaagaccaatacatgcaggggctgcaatcacctagtgtgccgcgattgtcggatacaggaatcaaacggaacctggaggtgtaaggtctgtgcaaaagaaattgagttgaaaaaagccacaggcgattggttttacgatcagaaggttaacagatttgcatacaggacggggtccgagattatcaggatgagcctccggcataagcccgcagtatccaagcgagaaaccgtgggccagagtctcctgcaccagactcaaatgggcgacatttggccaggcaggaaaataatccaggaacgccagaaagaaccctccgtacttttcgaggtgcccaagctcaagagcggcaagagtgccctagaggctgaatccgagtcgttggattctttcacagccgactcggattcaacctctcgtcgcgactcacttgacaagagcggccttttccccgagtggaaaaaaatgagtgccccaaagtctcaagtcgaaaaggagactcagccaggcggccaaaatgtggtatttgtggacgagggagaaatgatctttaaaaagaatacaaggaaaatactccgaccgagtgaatacactaaatctgtgattgacctgcgaccagaggatgtagtccacgagagcggcagcctgggcgatagatcaaagtctgttcctggcctgaacgttgatatggaggaggaggaagaggaggaagacatcgatcacctggtcaagctgcatcgtcagaaactagccagatcaagtatgcaatctgggagtagcatgtcaacaatcggaagcatgatgagcatatattctgaggcaggcgattttggcaacatcttcgtgactggtcgtatcgcattctctttaaagtacgaacaacagacacaaagcttagtggttcacgtgaaggagtgtcaccagttagcatacgccgatgaagcaaagaagaggagcaacccatatgtcaagacttatctgctgccagataagtcccgacagggaaaacgaaaaacttcaataaaacgggacaccattaatccactgtacgatgaaactctaaggtacgagatacctgagtctctgctcgcgcagcgaaccctccagttctccgtatggcaccacgggagattcggacgtaatactttcctgggggaggccgagatccaaatggatagttggaaattagacaaaaagctggaccactgccttcccctccacggaaagatcagcgccgagagccccaccggtctcccttctcataagggggaactcgtcgtgtcactgaaatatatcccagccagcaagacacctgtgggcggagataggaaaaaatccaaaggtggcgaaggaggcgagctacaggtctggatcaaagaggctaagaatctcaccgccgctaaggctgggggaactagcgattcgttcgtgaagggttatctgctgcccatgcggaataaggcaagcaaaaggaagaccccagtaatgaagaaaacactcaatcctcactataatcataccttcgtgtataatggtgtgcgattggaagacttacagcacatgtgcctggaattgaccgtctgggaccgggagcccctcgcatccaatgatttcctgggaggagtgaggctgggggtgggcaccggcattagcaacggagaagtggttgattggatggattctacaggggaagaagtgtctctatggcagaaaatgaggcagtatcctggctcctgggctgagggcactctgcaactccgcagctcaatggccaagcaaaaacttgggttgtag

SEQ ID NO: 136940 - DNA, 1050 bp, synthetic construct
  misc_feature 1..1050: note = Description of Artificial Sequence: Synthetic coding sequence
  source 1..1050: mol_type = other DNA
atgagtgaactgctggatctgtccttcctttcagaagaagaaaaggatctgattctgtctgtgctgcagagagacgaagaggttaggaaagcagatgaaaagaggattcgccgacttaagaacgagcttctagaaattaaaaggaagggggccaaaagaggaagtcaacattactctgatcgaacatgtgctaggtgtcaggagagcctgggaagactctctccgaagacaaacacttgtagaggatgcaatcatctcgtgtgcagggactgccgtatccaagagagcaatggaacctggcgctgcaaggtctgcgcaaaggagatcgagctgaagaaggctactggcgactggttctatgatcagaaggtcaaccgattcgcttaccgtactggatccgaaattatacggatgtcactgcggcacaaaccagccgtgtcaaaaagagaaactgtcggtcagtcccttttacaccagacccagatgggagacatctggccaggtaggaaaatcattcaagaaagacaaaaagagccgagcgttctatttgaagttccaaaacttaaatcaggaaagtcagccctggaggcggagtccgaatctttggactcgtttacagcagatagcgactcgacaagtcgaagagactccctcgataaaagcggcttgttccctgagtggaaaaagatgtccgcacccaagtcacaggtcgaaaaggagacccagccaggcggccagaacgttgtgttcgtggacgagggtgaaatgatatttaagaagaacacaaggaaaattctaagaccctccgagtacacaaaatctgtcatcgatctgcggcctgaagatgtggtgcacgagagtggcagtctgggcgaccggtccaagagcgtccccgggctgaatgtagatatggaggaagaggaggaagaggaggacattgaccacctggtcaagctgcacagacagaaattggcccgctcttccatgcagtcaggctcaagtatggtgtcctcaattcggagcgtggtcacgggcatgctcggatactag

SEQ ID NO: 136941 - DNA, 2016 bp, synthetic construct
  misc_feature 1..2016: note = Description of Artificial Sequence: Synthetic coding sequence
  source 1..2016: mol_type = other DNA
atgtccgagctgctggatctctcgtttctgtccgaagaggaaaaggacctgatccttagcgttctccagagagacgaagaagtgcggaaagccgacgaaaaaagaattcgaaggctgaagaacgagctcctggaaattaagcgcaaaggtgccaagcgaggcagccagcactactctgaccgcacttgtgcgcggtgtcaggaatcactcggacgattatcccctaagaccaatacctgccgtgggtgcaaccatctggtttgcagagattgtagaatccaggagagtaatggcacatggcggtgcaaggtgtgtgccaaggaaattgagttgaagaaggcgactggcgactggttctacgatcagaaggtcaaccgcttcgcttaccggacagggagtgaaatcataaggatgtctttacgccacaagcctgctgtttccaaaagggaaacagtggggcagtcactgcttcatcagactcagatgggtgacatctggccagggcgcaagatcatccaagagcggcagaaagagccatctgttctgtttgaggttcctaaactgaagagtggcaaatctgctttggaggccgagagtgagtccctcgattctttcactgctgactcagattctacaagtagacgcgattccctggacaaaagcggcctctttcctgagtggaaaaagatgagcgcacccaaaagccaggttgagaaggagacacaaccaggaggccagaatgtggtgtttgtggacgaaggggaaatgatctttaaaaaaaatactagaaagattctgagaccatctgagtacacgaaaagcgtgatcgaccttagacctgaggacgtggtacacgaaagcggttccctgggagaccggagcaagtcagtgccggggctgaacgttgatatggaggaagaagaagaagaggaggatattgatcacctcgtgaaactgcacaggcagaagctggcccgaagctccatgcagagcgggtcctcaatgtcaacaatcggtagcatgatgtcaatttattctgaagctggcgactttgggaacatatttgtgactgggcggattgccttttccttgaaatatgaacagcagactcagtccctggtggtacatgtgaaggaatgccaccagctcgcttacgctgatgaggcaaagaagcgctcaaacccctatgttaagacttatctgctgccagataaatcaaggcagggaaaaagaaagacctcgataaaacgagataccattaaccccctgtacgacgagacccttcggtatgagatacctgagtctctgcttgcccaacggacactgcagttttcagtgtggcaccacggtcggtttggtcgcaatacctttctcggcgaagcagagatccagatggacagttggaagctagataaaaagctggaccactgtctaccattacatggaaaaatttcagccgagtcacctacaggactgccctcacacaaaggggaactcgtggtgagcttgaagtacattcctgctagtaagactccagttggtggtgatcgcaaaaagtccaagggcggagaagggggggagcttcaggtgtggattaaggaggccaagaacttgactgcagccaaagctggggggacatcagattcctttgtcaaaggatatctgctgccgatgcgcaacaaggcctctaagagaaagacacctgttatgaagaaaacactcaatccacattacaatcatacatttgtgtacaacggagtacgtcttgaggacttgcagcacatgtgtcttgaactgaccgtctgggatcgcgagcccctggcctctaatgactttctcggcggggtgcgcctcggagtggggactgggatttctaacggggaggtggtggactggatggattccacaggcgaagaggtcagtctttggcagaagatgaggcagtacccaggatcgtgggccgaggggaccctccagctcagatctagcatggctaagcagaaactggggctgtag

SEQ ID NO: 136942 - DNA, 2022 bp, synthetic construct
  misc_feature 1..2022: note = Description of Artificial Sequence: Synthetic coding sequence
  source 1..2022: mol_type = other DNA
atgagcgaactgcttgacctgtccttcttgagtgaggaagagaaggatcttatcctcagtgtactccagcgtgacgaggaggtccgaaaagccgacgagaagagaataagaagactaaagaatgaactcttggaaatcaagcggaaaggagctaaacgcggtagccagcactactctgataggacttgcgcaaggtgccaggaaagccttggacgactctctcctaaaaccaatacatgtcgaggctgcaaccacctggtatgtcgtgactgtcgcattcaagagagcaatgggacatggaggtgcaaggtctgcgccaaggaaattgagctgaaaaaagccactggtgactggttttacgaccagaaagttaatcgttttgcctatcgtaccggctcggagataatccggatgtctctgcgccacaagcccgccgtttcgaaacgggagacagtggggcagtcgttgctgcaccagacccagatgggtgacatttggccaggcagaaaaatcatccaggagcggcagaaggagccgtcttccgtactatttgaagtgccaaagcttaagagcggtaagagcgctttggaggccgaaagtgagtctctggactcatttacagccgacagcgattctacatcgagacgagattcacttgacaagagcggtttatttccagagtggaaaaagatgagtgcacccaaaagccaagtagagaaggaaacacagccaggtggccagaatgtggtgtttgtggacgaaggtgaaatgatcttcaagaagaataccaggaaaatcctgcggccaagcgaatatactaagagtgtaatcgaccttaggccagaggacgtggttcacgagagcggcagcctgggggatcgctcaaaatccgttcccggtctgaacgtggatatggttgaagaagaggaagaagaggaggatatcgaccacttagtcaagctccaccgccagaaattagcacggtctagcatgcagagtggcagctctatgagtaccatcggctccatgatgtcaatctattcagaggctggtgattttggcaacatcttcgtgactggccgaattgcattctccctcaagtacgagcagcaaacccaatcgctcgtggtccacgtcaaggagtgtcatcagctcgcatatgcagatgaggctaagaaacgcagcaatccatatgtcaagacttatctgcttccagacaaaagcaggcagggaaagaggaagacctcaattaagcgggacacgattaacccactatacgacgaaactctgcgttatgaaattcccgaaagcttactcgcacagaggactttacaattttcagtttggcaccacgggaggtttgggcggaacactttcctgggcgaggctgaaatccagatggatagctggaagctggacaaaaagctcgaccactgtcttccgctgcatggcaaaatatcagccgaatctcccactggcctgccaagtcataaaggcgagcttgtcgtatctcttaaatacatccctgcctctaagacacctgtgggcggagaccggaagaagagcaaaggaggcgagggaggggagctccaggtttggataaaggaagccaagaatctgaccgcggccaaggctggtggcacctctgacagctttgtaaagggttatctgctgcctatgcggaacaaggcatctaagcgaaagacacccgtcatgaaaaagactcttaaccctcattacaatcacacttttgtctataacggagtgaggctcgaagacttacaacacatgtgcctcgaactcactgtttgggacagagagccattggcttccaacgatttccttggcggggtgagattgggtgttggtaccgggatatcgaatggcgaggtggttgactggatggactccacaggggaggaagtgagcttgtggcagaagatgcgtcagtatcccgggtcctgggccgagggcacccttcaattgagatcttctatggcaaaacagaagctcggcctatag

SEQ ID NO: 136943 - DNA, 2016 bp, synthetic construct
  misc_feature 1..2016: note = Description of Artificial Sequence: Synthetic coding sequence
  source 1..2016: mol_type = other DNA
atgagtgagctgctggacctgtcttttctcagtgaagaagagaaggacctgatactcagtgtgctccagcgagacgaggaggtgcggaaggccgacgagaagagaatacgacgcctcaagaatgaactgctggagataaaaagaaaaggggctaaaagagggagccagcactactctgataggacatgcgctaggtgtcaggagtcattgggtagactgagtccaaagactaacacatgccgaggatgcaatcatctagtatgcagggattgccgcatccaagagtcaaacggcacttggagatgcaaagtatgtgcaaaagagattgagttaaaaaaggccaccggagactggttttacgaccaaaaggttaatcgatttgcatatcggactggaagtgaaatcattagaatgtcccttcgccataaacctgctgttagtaagagagagaccgtggggcaatcattgttacaccaaacacagatgggcgatatatggcccgggagaaagatcattcaagagagacagaaggagccgagcgtgcttttcgaagttcccaagctgaagtccggcaagagcgcattggaggcagagagcgaatccctggactcatttacggccgattccgattctacctcacgccgcgatagtttagataagtccggtctgtttcctgagtggaaaaagatgtctgcgccaaagtcccaggtggagaaggaaacccagccggggggccagaacgtggtgttcgtagatgaaggcgagatgatctttaagaaaaacacacgaaagatcctcaggccttccgaatatactaaaagcgtgattgacctcaggccagaggacgtggtgcacgaatctggatccctgggcgatcgcagcaaaagtgtgcccggtctgaatgtggatatggaggaggaagaggaggaagaagatatcgatcatctggtgaagctccatagacaaaagctggcccgttcctctatgcaaagcggctcctccatgagcactataggtagcatgatgagtatctactcagaggcaggtgacttcggtaacatatttgtaactggaagaattgctttcagtctgaaatacgaacagcaaacgcaaagtctcgtggtccacgtgaaggagtgccaccaactggcttacgctgacgaagccaaaaagagatccaatccttacgttaaaacgtacctcctgcccgacaagtctcggcaggggaagaggaagactagcataaagcgcgatacgatcaaccctctttacgatgagacactgcgctatgaaattccggaatccctcctggcacagaggaccctgcagttctcggtctggcatcacgggaggttcgggagaaacacctttctgggcgaggccgaaatacagatggattcctggaagctggacaaaaagcttgaccattgtcttcccttacatgggaaaatcagcgcggagtcgccgactggcttgccctctcacaagggagaactggtagtctccttaaagtacattcctgcctcgaaaactcccgtggggggcgaccgcaagaaaagcaaggggggagagggaggagaactgcaagtttggataaaagaagctaagaacctgacagccgctaaggccggaggtacctccgattccttcgtaaagggatacctgttaccaatgcgcaataaggctagcaaacgtaaaacccccgtcatgaaaaaaacccttaatccacactacaaccatacctttgtctataacggggttcgtctggaagatctacaacatatgtgtcttgaattgacagtgtgggaccgagaacctttggcttccaacgacttcctgggaggagttcggcttggggtcggaaccgggatcagtaatggcgaagttgttgattggatggattccacaggggaggaggtgtcactttggcagaagatgcggcaatatccagggtcctgggcggaggggacattgcaacttagaagctccatggcaaaacagaagttggggttgtag

SEQ ID NO: 136944 - DNA, 933 bp, synthetic construct
  misc_feature 1..933: note = Description of Artificial Sequence: Synthetic coding sequence
  source 1..933: mol_type = other DNA
atgcgccgtgccgcgctatggctgtggctctgcgccctagcactgagcttgcaacccgccctgccccagattgtcgcaacaaacctcccaccggaagatcaggatggaagtggcgatgattccgacaatttctcagggtcaggggctggagctttgcaagacatcaccctatctcaacagacacctagcacttggaaggacacccaactgttaacagccatacccacaagccctgaacctactggactggaagccacagcggcaagcactagtacccttccggctggcgaaggccccaaggaaggcgaggctgtggtgctgcctgaagtggagcctggcctgactgccagggagcaggaagcgaccccacgacctagggaaaccacccagttgcccactactcacctggcctccactacaacagccaccaccgcccaggaaccagctacctcacatcctcacagggatatgcaacccggtcatcacgagacgagcacacccgctggcccctcacaggctgacctgcacacacctcatactgaagatgggggcccctctgcgacggagagggccgccgaggatggggcctcctcacagctgccagccgccgagggctcgggggagcaggacttcactttcgagacctccggtgagaatacagctgttgtggcggtcgaacccgaccgcaggaatcaaagtcctgtggaccaaggagccaccggtgcatcccaggggctgttggatagaaaggaggtgctcggaggggtcatcgctggaggccttgtgggtctgatcttcgccgtctgcctagtaggtttcatgctgtatcgcatgaaaaaaaaagacgaagggagctactccctggaagagccgaaacaggccaacgggggagcataccagaaacccactaagcaggaggagttttacgcatag

SEQ ID NO: 136945 - DNA, 933 bp, synthetic construct
  misc_feature 1..933: note = Description of Artificial Sequence: Synthetic coding sequence
  source 1..933: mol_type = other DNA
atgaggagggcagccttgtggttatggctctgcgcgctggcattgagcctgcagcctgccctgcctcagatcgttgcgactaacctgccccctgaggaccaagacgggtcaggagatgactccgataactttagtgggtctggtgcaggcgccttacaggatatcacactttctcagcagacaccaagtacctggaaagacacccaactgctcacagcaatacctaccagcccagaacccacgggactggaggccaccgccgcctcgacaagcacattgcccgccggagagggtccaaaggaaggcgaggccgtggtactgccagaggtcgagcccgggcttactgccagagagcaggaagccacacctcgaccccgggagaccacccagttgcccacgacccatttggcttccaccacaaccgctacaacagctcaggaacccgccacaagccatccccaccgcgatatgcagccaggccaccacgaaacttctacacctgctggcccatcccaggcagatctgcacactccacataccgaggacgggggtccatccgccactgaaagggcagcagaagatggagcatcctctcagttacccgcagccgaagggtccggagagcaggactttacgtttgaaactagcggtgagaacacagctgtggtggccgtggaacctgaccgacgcaaccagtccccagtagatcagggagctaccggggccagccaaggacttctggaccggaaagaggtccttgggggcgtgatcgcaggaggactggtgggccttatctttgcggtgtgccttgttgggttcatgctgtatcgtatgaagaaaaaggatgaagggtcgtatagcctcgaggagccgaagcaggccaacggaggagcataccagaagccgacgaagcaggaggaattctatgcctag

SEQ ID NO: 136946 - DNA, 606 bp, synthetic construct
  misc_feature 1..606: note = Description of Artificial Sequence: Synthetic coding sequence
  source 1..606: mol_type = other DNA
atgaggagggcgtggatccttctaactcttggcctggtggcatgcgttagcgccgaaagtagagccgaactcactagcgataaggacatgtacctagacaattcttcaatcgaggaagccagcggagtttaccctattgatgacgatgactatgctagtgcctccggttctggggctgatgaggatgtcgaatccccagagcttactacaagtaggcccctgcctaagatactgttgacctctgcagccccaaaagtggaaaccaccacgcttaatatccagaataagatacccgcccaaacaaaaagcccagaggagaccgataaggagaaagtgcacctctcagattctgaacggaagatggaccccgctgaagaagatacaaacgtctacacagagaaacattccgattcactattcaagcgcacagaggtgctcgccgctgtcattgctgggggggtgataggcttcctctttgcaatttttctcattctgttactggtttaccgcatgcgcaagaaggatgagggttcttatgacctgggggagcggaagcccagctctgctgcatatcagaaggcccccactaaggaattctacgcatag

SEQ ID NO: 136947 - DNA, 498 bp, synthetic construct
  misc_feature 1..498: note = Description of Artificial Sequence: Synthetic coding sequence
  source 1..498: mol_type = other DNA
atgcgccgcgcctggattctgctgaccctgggactggttgcttgtgttagcgctgagagcgttcgcgccgatgaggatgtggagtcaccggagctaacgaccagtcgtccattaccaaaaattttactcactagcgctgcccccaaggtggaaaccaccacacttaatatccagaataagattccggcacagacaaagtcccccgaggaaacagataaggaaaaagtgcacttgtctgacagtgaacgaaaaatggatccagcggaggaggataccaacgtctacacagaaaaacattctgactctctcttcaaacgaactgaggtgctcgcagcagtcatcgctggcggagtgatcggtttcttgttcgcaatcttcttgattttgctgctagtgtatcggatgagaaaaaaggatgaaggctcatacgacctcggcgaaagaaagcccagtagcgcggcataccagaaggcccccactaaggaattctacgcatag

SEQ ID NO: 136948 - DNA, 519 bp, synthetic construct
  misc_feature 1..519: note = Description of Artificial Sequence: Synthetic coding sequence
  source 1..519: mol_type = other DNA
atgtacctcgacaactcctccattgaagaggcctccggcgtgtaccctattgacgacgacgattacgcctctgcctccggaagtggagccgacgaggatgtggagagtcctgagcttaccacaagtagacccctgcctaaaattctgctgaccagcgccgcacctaaggtggaaaccaccactttgaacatccaaaataaaatccctgcacagaccaaaagtcccgaagaaacggacaaggaaaaggtccatctgagtgacagcgagagaaagatggaccccgccgaggaagatacaaatgtgtatacagaaaagcatagtgattccctgttcaagagaacagaggtcctggcggccgtaatcgctgggggggtgatcggattcctgttcgccatcttcttgatactgctactcgtgtatagaatgcggaagaaggatgaaggttcttacgatttgggtgagcggaagccgtcctccgcagcctatcaaaaggcccctacgaaggaattttatgcgtag

SEQ ID NO: 136949 - DNA, 519 bp, synthetic construct
  misc_feature 1..519: note = Description of Artificial Sequence: Synthetic coding sequence
  source 1..519: mol_type = other DNA
atgtaccttgataactcctcaatcgaagaggcttccggtgtttaccccatcgatgacgatgattatgcctccgcaagcggatcaggcgccgatgaggatgttgagtccccagagctgacaacctccaggccgctgccaaaaattctactgacttcagccgctcctaaggtcgagaccaccacacttaacatccagaacaaaattccagctcagacaaagtctccggaggagacggacaaggaaaaggtgcacctcagcgactccgaaaggaagatggacccggccgaggaggacacaaacgtttacaccgaaaaacattccgactctttatttaaacgcacagaggtgttggctgcagtgatcgcaggcggggttataggattcctattcgctattttcctgatattgcttctcgtctatcgaatgaggaagaaagacgaagggtcttacgaccttggcgagcgcaagccctcgtctgcggcataccagaaggcccctacaaaggaattctatgcctag

SEQ ID NO: 136950 - DNA, 606 bp, synthetic construct
  misc_feature 1..606: note = Description of Artificial Sequence: Synthetic coding sequence
  source 1..606: mol_type = other DNA
atgcgcagggcatggatcctgttgaccctggggctagtcgcttgcgtatcagccgagagcagagccgagttaacctccgataaggatatgtacctggacaattccagcattgaagaggcctccggcgtgtatccaattgacgatgatgactatgcctcagcgagcggatccggtgccgacgaggatgttgagtcaccggaattaaccacatcacgaccacttccgaagatacttctgacctccgctgcacctaaagtcgagacaacaaccttaaacatccagaacaagattccagcacagactaaaagcccggaggaaacggacaaggagaaagtccatctgagtgatagcgagcgcaagatggaccccgccgaagaggacactaatgtctacactgagaaacatagtgactcactgtttaaacgcactgaggtactggcagccgtcattgctgggggagttatcggcttcctcttcgcaatcttcctgatcttactgctggtctataggatgagaaagaaagatgaaggatcctatgacctgggagagaggaagccatcctccgccgcttaccaaaaagctccaactaaggaattttacgcatag

SEQ ID NO: 136951 - DNA, 576 bp, synthetic construct
  misc_feature 1..576: note = Description of Artificial Sequence: Synthetic coding sequence
  source 1..576: mol_type = other DNA
atgcgcgtagcatgtgtatccgccgaatctagagctgaactgacatccgacaaagatatgtatctggataactcaagcatcgaagaggccagtggggtatatcccatcgatgacgatgactatgctagcgccagcgggagtggggccgacgaagatgtcgagagtcccgagctgaccacatccaggcccctgcctaagattctgttaacttcggccgcgcctaaggtagagacaacaaccctaaatatccaaaacaaaataccggctcagacaaagtctcctgaggagacggacaaggagaaagtgcatttgtcagactcagagagaaaaatggaccccgctgaagaagatacaaatgtgtacaccgaaaagcactcggattcactttttaagagaaccgaagttctggctgcagtgatagctggcggtgttattggctttctgttcgccatattcttgattctacttttagtgtaccgaatgcgtaagaaggacgaaggcagctacgacctgggggaacggaaaccatcctcagcagcttatcagaaggcgcctacaaaagaattttacgcttag

SEQ ID NO: 136952 - DNA, 1155 bp, synthetic construct
  misc_feature 1..1155: note = Description of Artificial Sequence: Synthetic coding sequence
  source 1..1155: mol_type = other DNA
atggctatcgcatacctcggttcctcctgtcccagtcagccccccagctcccttgctctttcactgagccccaccccctccgacttcgaacaggagtccggcattgagacagcaatgcgtttcagcccagatgtagctctggcggtgagtaccacaccggctgtgctgccgaccacaaatatccagcccgtcggcaccccattcgaggagctgccctccgagcgcccaactctggaacccgcaacctcccccctggttgtgacagaggtcccggaagaaccttcacagagggccacgacggtaagtaccactatggccaccactgctgcaaccagtaccggtgaccccactgtcgctacagtgccagcgacagtcgccacggcaacaccctccacccccgctgccccaccgtttaccgcaacgactgccgtgattaggacgaccggtgtaagaagacttctacctctacctttgaccacggtggcaaccgcccgcgccacaaccccagaagctccaagtccccctacaaccgcagccgtgctggatacggaagcacctaccccaaggctggtatccaccgccacatcgcggcctagggccctgccacggcccgcgacgacccaagaacccgacattccagagcggagcaccttgcctctgggcaccactgccccagggcctacagaggttgctcagactcccactcccgagacgttcttaacgacaatcagggacgaacctgaggtgcctgtttccgggggccccagcggagatttcgagctaccagaggaggaaacaactcagccagacaccgccaatgaggtggtggccgtgggtggagctgctgctaaggcctcaagcccacctgggacattaccgaaaggagcccgacccggtccagggctgctggacaacgccatcgattctggatccagcgctgctcagcttcctcaaaagtccatactcgaaaggaaagaagtccttgtcgccgttatagtaggcggggtggtaggagctcttttcgcggcgtttttggtcacccttctaatataccgaatgaagaagaaagatgaaggaagttacaccttggaagagcctaaacaggcgtctgtcacctaccagaagcctgacaagcaggaggagttctatgcttag

SEQ ID NO: 136953 - DNA, 1329 bp, synthetic construct
  misc_feature 1..1329: note = Description of Artificial Sequence: Synthetic coding sequence
  source 1..1329: mol_type = other DNA
atgaagccgggtccaccacaccgtgccggcgctgctcatggcgccggtgcaggtgcaggagctgctgctgggcctggggctcgcgggctattactgcctcctctgctactgctactcctcgcaggaagggccgccggggctcagcggtggcgctcggaaaactttgagaggccagtcgacctggaagggtccggggacgatgacagcttccccgatgatgagctggacgatctttacagtggctcaggaagcggctacttcgagcaagagtccggaatcgaaactgccatgagattttcccccgatgtcgcactggccgtttctactaccccagccgtgttgcctacaacaaacattcaacccgtggggacccctttcgaggaattgccttccgagaggccaacccttgagccagcaacttcccccctggtggtgacggaggttccagaagaaccatctcagagggcaactaccgtgtcaactacaatggcaacaactgccgcaacatctaccggtgaccctactgtagccacagttcctgctaccgttgccacggccaccccatctacacctgcggcccctccgtttaccgccactaccgccgttatccggaccactggtgtacggagactgctgcccctcccattaactacggttgcgactgcgagagccactactcccgaagcacccagtccaccaacaaccgcagctgtgctggatacagaagccccaactccccgcctggtctctaccgccacctcaaggcctcgagctctgcctcgacctgccaccacccaggaaccggatattccagaaagatctacactcccacttggcactactgcgccgggccccaccgaggttgcccaaacaccaacccctgagactttcctaactaccattcgcgacgagcccgaggtgcccgtaagcggcggcccatctggggacttcgagctccccgaagaggaaactacccagcccgacactgctaatgaggtggttgccgtggggggagccgcggcaaaggcatcctcaccccccggtactctgcccaagggcgcccgacctggaccaggtctgctggacaacgccatagacagcggaagcagcgccgcccagttgccacagaagagtatccttgagcgtaaggaagtcctcgtcgcagtgatcgtagggggtgtcgtgggggccctgtttgccgctttccttgtgacactcctgatctatcgaatgaagaagaaggatgaaggatcctatacgctcgaggaacccaaacaagcttctgtgacataccagaagcccgataagcaggaggagttttatgcctag

SEQ ID NO: 136954 - DNA, 597 bp, synthetic construct
  misc_feature 1..597: note = Description of Artificial Sequence: Synthetic coding sequence
  source 1..597: mol_type = other DNA
atggcacccgccaggctgttcgcccttctgttattttttgtcggcggcgttgctgagagtattagggaaacagaggtcatcgatccacaggatttgctggagggtcggtacttttccggagccctgcccgatgatgaagacgtggtgggacccgggcaggagagcgacgacttcgagctttccgggtctggggacttagacgacctggaggacagcatgataggcccagaagtggtgcacccccttgtacccttggataatcatataccggagcgagctggctcaggcagccaggtccctacagaaccaaagaagctagaagagaatgaggtgataccaaaaagaatttctcccgtggaggaatctgaggacgtttctaacaaggtgtctatgtcttccaccgtgcagggttccaatatcttcgagagaaccgaggtactggccgcgctgatcgtcggtggtatcgtgggcatcctttttgctgtgttcctgatacttttgctgatgtatcgcatgaagaagaaagacgagggcagctacgatctcggaaaaaaaccaatctataagaaagccccaacaaacgagttttatgcctag

SEQ ID NO: 136955 - DNA, 381 bp, synthetic construct
  misc_feature 1..381: note = Description of Artificial Sequence: Synthetic coding sequence
  source 1..381: mol_type = other DNA
atgatcggtcccgaggtggtccatcctctcgtacctctcgataaccatatccccgagagagcaggatccgggtctcaggtcccgacagagcccaagaaactggaggagaatgaagtcatccctaagcgaatttctccagtggaggagagtgaagatgtgagcaacaaggtgagcatgtcctccaccgtgcagggctctaatatctttgagcggaccgaggtgttggccgccctcatagtggggggcatagtcggtattctcttcgcagtgttcctgattttgctgttgatgtatcgaatgaaaaaaaaggacgaagggagttacgaccttggtaaaaaaccaatatataaaaaggcccctacaaatgagttttacgcctag

SEQ ID NO: 136956 - DNA, 1851 bp, synthetic construct
  misc_feature 1..1851: note = Description of Artificial Sequence: Synthetic coding sequence
  source 1..1851: mol_type = other DNA
atgttccgtacggccgtgatgatggccgcaagtctcgctctgacaggcgcagtcgtggcccacgcttattaccttaaacatcagttctaccctactgtcgtctatcttacaaagtcgtctcccagtatggctgtgctgtacattcaggccttcgtactcgtgtttctgctgggaaaggtgatgggtaaagtgttcttcggacagctgagagccgcggagatggaacacctgttagagcgctcatggtacgcagttaccgaaacgtgcttagcctttactgtcttccgcgacgattttagcccacggtttgtggctctgtttacgcttctcctcttcctcaagtgtttccactggcttgccgaagaccgcgttgactttatggagcggtctccaaacatttcttggctgtttcactgccgtattgtaagtctgatgtttctgttaggaatcttggactttctcttcgtgagccacgcctatcacagcattctcacacgaggcgcctcagtgcagctagttttcggcttcgagtatgcaatattgatgaccatggtgctgaccattttcatcaaatacgtgttgcactctgtggatctgcagtcggagaatccatgggacaataaggctgtgtacatgttatacacagaactcttcacaggcttcatcaaggtcctcctgtacatggcatttatgacaatcatgattaaggtacacactttcccgttgtttgcaatacggcctatgtatctggcaatgaggcagttcaagaaggccgtaaccgacgccatcatgtccaggcgcgccatcagaaacatgaacaccctctatccagatgcgactccagaagagctgcaggctatggataatgtttgcatcatctgtcgcgaggagatggtgactggggctaagagactcccctgcaatcacatttttcataccagctgtctaagatcatggtttcagcgccaacagacatgcccaacttgtcgcatggatgtgctccgtgcctctctgccagcacagtcaccaccacctccagaacccgccgaccaggggccaccccccgccccacacccccctccacttctgcctcaacctcctaacttcccccaggggctgcttcctccctttccaccagggatgttcccactttggcctcccatgggcccgttcccacccgtgcccccgccaccatctagcggtgaagcggtggcccctcccagcaccagcgctgctctcagccgacccagtggggcagccacaaccacagccgccggcacctccgcaactgccgccagtgctacggctagcggacctgggagcggtagcgcccctgaggccggcccggcccccggttttccttttcccccaccatggatgggcatgcctctgccccctccgtttgccttcccacctatgcctgtaccaccagccggcttcgctggattgacccctgaagaactacgggccttggagggccacgaacggcaacacctcgaagcgagactccagtccttaaggaacattcataccctattggatgccgctatgctccaaatcaaccaatatctcactgtcctggcgtcgctgggaccccctaggcctgccaccagtgtcaactccacagaagagaccgccactacagtcgtcgccgcagctagctccacgtccattccgagcagtgaagctaccacccccacccccggcgcctcccctcccgcccctgagatggagaggccaccggcccctgaatcagtcgggaccgaagagatgccagaggatggtgaacctgacgccgcagaactccggaggcggcgcctgcagaaactggagagtccagttgcccattag

SEQ ID NO: 136957 - DNA, 1698 bp, synthetic construct
  misc_feature 1..1698: note = Description of Artificial Sequence: Synthetic coding sequence
  source 1..1698: mol_type = other DNA
atgtttcgcactgctgtgatgatggccgcgtcattggccttgactggcgcagtggtggctcacgcctattatttaaagcaccagttctaccccacagtggtttacctgacgaagtcctccccttccatggccgtgctctacattcaggccttcgtattggttttccttctggggaaagtaatgggcaaagtattcttcggccagctgagagccgccgaaatggagcatctgctggagagaagctggtatgcagtcactgagacgtgtctcgcttttacggtttttcgggatgatttcagtcctcgctttgtggccctcttcacactcctgctttttctgaagtgtttccattggcttgcagaggatagggtagatttctacgccatcctcatgacaatggtactcactatttttatcaagtatgtactgcacagcgtcgatttacaatcagagaatccttgggataataaggcggtgtatatgctttacacagaactgtttactggctttattaaggtgctcctgtatatggcattcatgaccattatgattaaggttcatacttttcccctcttcgccattaggccgatgtatttagctatgcgccagtttaaaaaggcagtgactgacgccatcatgagtagacgcgccattcgtaacatgaacacgttgtatccagacgcgaccccagaggagttgcaagccatggacaatgtgtgtatcatctgtagggaggaaatggtgacaggggctaaacgcttgccatgcaaccatatttttcacacttcttgcctcaggtcatggttccagcggcagcagacgtgccccacgtgtcggatggatgtgctgcgcgctagcctcccggcccaaagcccccctcctccagaaccagcagatcagggccccccgcccgcgccccacccaccccctcttctgccacagccccccaattttccccagggattgctccctcccttcccccccggaatgttccccctttggcctcccatggggccattcccacccgttccccctccacctagttcaggggaggccgtagctccaccatctactagcgctgccctctcgcggccatccggggcagccactaccacagcggctgggacgtcggcaactgccgccagtgccactgcctctggcccaggctcaggctctgctccagaggctggccccgctccaggatttccctttccgcccccatggatgggaatgcccctccccccaccattcgccttcccaccaatgcctgttccccccgctggatttgccggtctaacccctgaggagcttagagcgctcgaaggccatgaacgacagcacctggaagccagactccaatcactccggaatatccataccctgctggatgcagccatgctgcaaatcaaccaatatctgaccgtacttgcatctctgggaccaccgcggccagcaacctccgttaatagcaccgaggaaacagctacaacggtagtcgcagccgcaagttctacatctatcccatcttccgaggccaccacgcccactccaggcgcttcccctcccgcccccgaaatggaaaggcccccggccccagagagcgtaggaacggaggagatgcccgaggacggtgagccagatgctgctgaactgcgcagaagacggctgcagaaacttgagagtccagtggcacactag

SEQ ID NO: 136958 - DNA, 1854 bp, synthetic construct
  misc_feature 1..1854: note = Description of Artificial Sequence: Synthetic coding sequence
  source 1..1854: mol_type = other DNA
atgttccggactgctgtgatgatggcagcttccctagccttgactggggcagtcgtagcacacgcttactatctgaagcaccagttttatcctactgtggtatacttgactaagtctagcccctctatggctgtcctgtacatccaggcctttgttctggtgttcttgttgggtaaggtgatgggcaaggtcttcttcggccagctcagggctgcagagatggaacatctgctcgaaagatcctggtacgcagtgactgagacctgcctggcctttactgtgtttagagatgactttagcccacgatttgtcgcattgttcacgttgctactctttctcaagtgtttccattggctggcagaagaccgtgtagatttcatggagcgttcacctaatatcagctggctgttccattgccgtatcgtgtcactcatgtttctcctgggcatcctcgatttcctgtttgttagtcatgcgtaccactcgatcctaacccgcggagcctccgtgcaactggtgtttggcttcgaatacgcaatcttgatgaccatggtgttgacaatctttatcaagtatgtgctacacagtgtagacctgcagagtgagaacccctgggacaataaggccgtatacatgctgtatacagaattgttcaccggcttcattaaggtgctgctatatatggcgtttatgacgataatgattaaagttcacaccttcccattatttgccattaggcccatgtatctggctatgaggcagttcaagaaagccgtgacggacgctatcatgtcccggcgagctatacgcaacatgaacactctgtaccccgacgcgacacctgaagaactgcaggccatggacaacgtttgcattatatgccgagaggaaatggttacgggcgccaaaaggctgccctgtaaccatatcttccacacctcttgcctgaggagctggtttcagaggcagcagacttgcccaacctgccgcatggacgtgctgagggcgtctttgcctgctcaatcaccccctccccccgagcctgcagaccagggtccaccacctgccccacaccccccacccctgttgccccaaccacctaattttcctcaaggcctgctcccgccctttccccctggtatgtttcccctgtggccccccatgggaccctttcctcccgtgccaccacctccgagctccggggaagccgtcgcccccccctcaactagtgccgccgccctgagcaggccgagcggcgccgcgactactaccgctgcagggaccagcgccacagccgcctcggccaccgcctctgggcccgggagtggcagcgccccagaggccggccctgcgccagggtttccgttccctcccccgtggatggggatgcccctaccaccccccttcgcctttccccccatgcccgtacccccagccggtttcgccggcctgacacctgaggagttgcgtgcattggagggacatgagcgtcagcatctggaggcccggctccagtcgttaagaaacatacacacactgctcgatgccgccatgttacagatcaaccaatatctaactgtgctcgcgagtctcggacctccccggccggctacttcagtgaattctaccgaagaaacagcaacaactgttgtggcggctgccagcagtacaagcatcccctcctctgaggccacgactcctacgccgggggcaagcccccctgcgcctgagatggagcgaccacccgcaccagaaagtgtgggaacagaagagatgccagaagacggagaacccgacgccgcagaactccgtcgaaggcggctccagaaactggaaagtcccgtggcacactag

SEQ ID NO: 136959 - DNA, 1890 bp, synthetic construct
  misc_feature 1..1890: note = Description of Artificial Sequence: Synthetic coding sequence
  source 1..1890: mol_type = other DNA
atgttcaggacggctgtgatgatggcagcatctctggcgctcaccggagcagtggttgcccacgcatattatttgaaacaccagttttatcctacagtcgtctacctgaccaaatcttcgccatcaatggccgtactctacatccaggccttcgtcctcgtcttccttctcggtaaagtgatgggcaaagtattctttggccagttgagagctgccgagatggagcacctcctggagcgctcctggtatgctgtcacagaaacctgtctggcgttcacagtttttcgcgacgatttttcaccacgcttcgtcgcattatttactctgttactgttcttaaaatgtttccactggctcgcagaggatcgggtagattttatggaaagatcaccgaatatatcatggctgtttcactgtcgcattgtctcactaatgttcctgctgggaatcctcgatttcttgttcgtgtcccacgcctatcatagtatcttgacccgcggcgcttccgtgcaactcgttttcggttttgagtatgcgatcctgatgaccatggtgctgacaatctttatcaagtacgtcctgcattctgtggacctgcagtctgaaaatccttgggacaacaaggccgtgtatatgctatacacagagctgtttacgggatttattaaggttcttctgtatatggccttcatgacaataatgattaaggtccacacttttcccctgttcgccataaggcccatgtacctggcgatgcgccagttcaagaaagccgttaccgacgctatcatgagtcgacgtgcaatcaggaatatgaacacactgtaccctgacgccactcctgaagaattgcaagctatggacaacgtgtgtattatctgtagagaagagatggtcacaggagctaagcgcctcccgtgcaaccacatctttcatacgtcctgtctgagaagctggtttcagagacaacagacttgtcccacttgccgtatggatgtgctgagagcttccctgccggcgcaaagtcctcctccacccgaacccgctgatcagggcccccccccagctccccatccaccccctttactgccccagccaccaaactttccccagggtctgcttcctcccttcccacctggaatgtttcctctctggcccccaatgggtccctttcctcccgtgcctcccccaccatccagcggcgaggccgtcgcacccccttcaacctcagccgctgccctgagccggccaagtggtgcagccactaccacagcagctggcacctcagctaccgcggcatctgccaccgccagcggtcccggttctgggagcgcacccgaagccggacccgcccccggtttccctttcccccctccttggatggggatgcccctgccaccaccatttgcatttccccccatgcctgtccctccagccggattcgcaggcttgacccctgaggagctcagagcattggagggacacgagagacaacacttggaggcacgcttgcaatccttgcggaacatccacaccctcttagatgcggcaatgttgcagatcaatcaatacctgacagttttggcttcgcttggcccaccgggcctgcccctccagtccacccccctgcgtcgcctccctttgcaactcctcctcctgcctcccccaccggcttccctggcacagcgcccccgcccacagccccaagaacctccccatcagccgcttaagtggaaggggctgcagctccttagccagtgggcgcagaggaggtgccttaggatggaatcccccatgcagcagtcctcagccggtgctgcatgtaggagctggtccctgcttctccccaccgatacggcccccgcacagcctcagcctcttttgttctag

SEQ ID NO: 136960 - DNA, 1851 bp, synthetic construct
  misc_feature 1..1851: note = Description of Artificial Sequence: Synthetic coding sequence
  source 1..1851: mol_type = other DNA
atgtttaggaccgctgttatgatggcagccagccttgctctcacaggagcagtggtggctcacgcctactacctgaagcaccagttttaccccacagttgtgtacctgacgaagtcatcacccagcatggctgtgctgtacattcaagcctttgtacttgtctttctcctggggaaagtgatggggaaagttttctttggacagcttagggccgcagaaatggagcatttactcgagaggtcctggtatgccgtgaccgagacgtgcctggctttcacggtgttccgggacgatttctctcccagattcgtggcactcttcacattactgctgttcctgaagtgtttccattggctggcagaagatagagtggattttatggaacgatcaccaaatatctcctggttgttccattgtaggattgtcagtctgatgtttctgctaggcatcctggatttcctgttcgtcagccacgcttaccactctatcctcacgcggggtgcgtcggttcagctggtgttcggattcgagtatgccattctgatgaccatggtgctgaccatttttatcaagtatgtcttacattcggtcgacctgcagtccgaaaacccctgggacaacaaagccgtgtacatgttatataccgagctctttaccgggttcattaaagtcctcctttacatggcatttatgaccatcatgatcaaggtgcacaccttcccccttttcgcaattcggcctatgtacctagccatgaggcagttcaaaaaagctgttaccgacgccatcatgagccggcgagccatcaggaatatgaatacactctaccctgacgctaccccagaagaactacaggccatggacaatgtctgtataatatgtagggaggagatggtgactggcgccaagaggctgccttgtaaccacatttttcacaccagctgccttaggagttggtttcagaggcaacagacttgccctacttgccggatggatgtgctgagggcaagtctgcctgcccagtcgcctcctccacccgagccagccgatcagggcccccctcctgcgccacaccccccgcccctgctgccccaaccacccaacttccctcaaggcttgctacccccattccccccaggcatgttcccactgtggcctccaatgggcccctttcctcccgtgcctccaccaccctcatctggggaagctgttgcccctccaagtaccagcgcagccttaagtcggccctccggagccgctactacaactgctgccggaacgagtgccaccgccgctagcgccacagcatcggggcctggcagtgggtccgcacccgaagctggaccggcaccagggttccctttcccaccaccctggatgggcatgccgctgcctccccctttcgcatttccacctatgccagtgcccccagcgggttttgcaggattaacccccgaggaactgcgcgcccttgagggtcatgaacgccagcacctcgaggccaggctacagagcctgcgcaatattcataccctactggacgcagctatgctgcaaattaaccaatatcttaccgtcttagcttcactaggcccacccaggcctgcaaccagcgtgaatagtacagaggagaccgctaccaccgtggtagctgccgcctcaagcacctccataccttcgtctgaagctaccacccccacccctggggcttcaccaccagcccccgagatggaaaggccaccggctccggagagtgtaggtaccgaggagatgcccgaggatggagagcccgacgccgcagaattgagaaggcgcaggctgcagaagctagagagtcccgttgcccactag

SEQ ID NO: 136961 - DNA, 1191 bp, synthetic construct
  misc_feature 1..1191: note = Description of Artificial Sequence: Synthetic coding sequence
  source 1..1191: mol_type = other DNA
atgtccgtcgccttcgcctcagctcgtccacgcggtaaaggtgaggtgacacagcaaactatccagaaaatgctcgacgaaaatcatcaccttatccagtgtattttggaatatcaatctaagggtaaaaccgccgagtgtacccagtatcagcagatcctccaccgtaacctcgtttacctagcaaccatcgccgatagcaatcagaatatgcaatctctcctgcctgcaccccctacacaaaatatgaatctgggtcccggtgctctgacacagtcgggctctagtcagggactccattcacagggcagcctgagtgacgcaatttcaaccggcctgccacccagtagcctcctgcaaggccagataggcaacggcccatctcacgtttctatgcagcaaactgccccgaacactctccccaccacatccatgagtatttcaggacccgggtacagccatgcaggacccgccagccaaggtgtccccatgcagggacagggtaccatcggaaactatgtgtcccgcactaatattaatatgcagagcaatccagtgtctatgatgcagcagcaggccgccacctcccattacagttcggcacaggggggcagccaacactatcagggacagagcagcatcgccatgatggggcagggatctcaaggttcttccatgatgggtcagagaccaatggctccttacaggccttcccagcaaggaagttctcagcagtacctgggccaggaggagtactacggtgagcagtactcgcattcccagggagccgccgaacctatggggcaacagtactatcccgatggacatggggattacgcatatcaacagtccagctatacagagcagtcatatgatagatccttcgaggaatcgactcaacattactatgaaggggggaactcccaatactctcagcagcaggccggctaccagcaaggtgcagcccagcagcagacctactctcaacaacagtatccatcgcaacagtcctaccctggccagcaacagggctacgggtcggcacagggggcacctagccagtatcctgggtaccagcaagggcaggggcagcagtatggttcatatcgggccccgcagacagcccccagcgcacagcagcagcgcccatacggctacgagcaaggacagtatgggaattaccagcagtag

SEQ ID NO: 136962 - DNA, 1200 bp, synthetic construct
  misc_feature 1..1200: note = Description of Artificial Sequence: Synthetic coding sequence
  source 1..1200: mol_type = other DNA
atgcaaagcctttcaaccgaggcgaggtacgttccccgggtccctcagcacagggaccaaatttccccacggtctccccaacatggtggtcaaatctgcccgcggtctccattgcaccgtggacaaatatgtccccgctctccccccgccagacgatatcagcaaatcctgcacaggaacctcgtatacttagctacaatcgctgactcgaaccaaaatatgcagagcctcttgcctgcccccccaactcagaatatgaatctggggccgggagcgttgactcagagtgggtcgagccagggactccactcccagggctcactgagtgatgcaatcagcacaggcctgccaccctcttccctcctgcagggccagattggcaatggaccttctcacgtctcgatgcagcagactgcacccaacacactgcctaccacatccatgagcatctccggccccggatatagtcacgcagggccagcgtcgcagggcgtccccatgcagggtcaggggacaatcgggaactacgtgtccagaaccaatatcaatatgcagtctaatccagtgtctatgatgcagcagcaggctgccacatcacattacagcagtgcacagggaggctcacagcattaccaggggcagagcagtatagccatgatgggtcaaggcagtcagggtagctctatgatgggacaaagaccgatggcaccttatcgtccctctcagcaaggaagcagccagcagtacctgggccaagaagagtactacggagagcaatactctcattctcagggtgcagctgagcccatggggcaacaatattacccagatggtcacggggattacgcctaccagcagagcagctatacagagcagagctacgatcgtagctttgaagagagcacccagcattactatgaggggggcaattcgcagtatagccagcaacaggccggttaccagcagggcgctgcacagcaacagacttattcgcaacaacagtatccttctcagcagagctacccgggtcaacagcagggctatggcagcgcccagggagcacctagtcagtatcctgggtatcagcagggccagggacagcagtacgggtcttacagagcaccacaaactgcacctagcgcacagcagcagagaccatacggatacgagcagggtcaatacggcaactaccaacagtag

SEQ ID NO: 136963 - DNA, 1191 bp, synthetic construct
  misc_feature 1..1191: note = Description of Artificial Sequence: Synthetic coding sequence
  source 1..1191: mol_type = other DNA
atgtcagttgcgttcgcctcagctcggcctaggggcaagggggaagttacccagcagaccattcagaaaatgctcgatgaaaaccaccaccttattcagtgcattttagaataccagtccaaggggaaaactgctgaatgcacccaataccaacaaatcctgcaccggaacctagtgtacctggccacgatcgccgattcaaatcagaacatgcagtctctgctcccagccccgcccacccaaaatatgaacctgggcccgggagcactaacacaatcgggatcatcgcaagggctacactcacaggggtcgctgagtgacgctatttccacaggcctgcctccatcaagtcttctacagggtcaaatcgggaatggcccgtcccacgtgagtatgcagcaaacggccccaaacactcttcctaccacctctatgagcatttccgggcccggctactctcacgcaggccccgcatctcagggagtacctatgcagggacagggaacaatcgggaattacgtcagccgaacaaacataaatatgcagtcgaaccctgttagtatgatgcagcagcaggccgccacatcacactacagttccgcacagggcgggtcccagcattaccaggggcagtcatccattgctatgatgggccaggggtctcagggaagctccatgatggggcagaggcccatggccccctaccgtccttcgcagcagggttcatcacagcaatacctcgggcaggaggaatactacggcgaacagtactctcactcacagggagccgccgagcctatgggacagcaatattatccagatggtcatggagactatgcttatcaacagagttcatatacagaacaatcctacgacaggtctttcgaggagtctacccagcactattatgagggtgggaattcccagtactcacagcagcaggccggatatcagcagggagccgcccagcagcagacctactcacaacagcagtaccccagccaacagtcatatccaggccagcagcagggctacggtagcgcacagggggccccaagtcagtaccctggatatcagcagggccagggccagcaatacggttcttatcgagccccccaaacagcccctagcgctcaacaacagcggccctatggatatgaacaaggtcagtatgggaactaccagcagtag

SEQ ID NO: 136964 - DNA, 387 bp, synthetic construct
  misc_feature 1..387: note = Description of Artificial Sequence: Synthetic coding sequence
  source 1..387: mol_type = other DNA
atgcaatccctttcaacagaagctagatacgttccacgggtcccacagcatagagaccagatatcaccacggtcccctcagcatggggggcagatctgcccccgctctccactgcaccgcggacagatttgccctaggtctcccccagctcggagatatcagcagatactgcacagaaatctcgtctatctagctaccattgcagattctaatcaaaacatgcagtctctgctgcctgctccgcctacacagaatatgaatctgggacccggcgcacttactcagagtggttcttcacaggggctccattcccagggctccctgtctgacgctataagtactggtctgcctccctcatcccttctccagggccagatcggtaattag

SEQ ID NO: 136965 - DNA, 234 bp, synthetic construct
  misc_feature 1..234: note = Description of Artificial Sequence: Synthetic coding sequence
  source 1..234: mol_type = other DNA
atgtccgtcgccttcgtacccgactggctgagaggcaaggcagaagtcaaccaggagactattcagcgcctgctggaagagaacgatcaactaatacgctgtatcgtcgagtaccagaacaaggggcgcggcaacgagtgcgttcagtatcagcacgtcctccacaggaatctaatttatcttgcaactattgccgacgcctcaccgacatccacgagcaaggcgatggagtag

SEQ ID NO: 136966 - DNA, 234 bp, synthetic construct
  misc_feature 1..234: note = Description of Artificial Sequence: Synthetic coding sequence
  source 1..234: mol_type = other DNA
atgtccgtggccttcgttccagactggctcagaggcaaggctgaagtcaaccaagagacaatccagcggcttctggaggagaatgaccagctgatcagatgtatcgtggaatatcagaataaaggccggggcaatgagtgcgtccagtatcagcatgttctccacagaaacttgatctacttggccacaatcgcagatgcgtcacctacttccacaagcaaggcaatggagtag

SEQ ID NO: 136967 - DNA, 1164 bp, synthetic construct
  misc_feature 1..1164: note = Description of Artificial Sequence: Synthetic coding sequence
  source 1..1164: mol_type = other DNA
atgtccgtagcttttgccgcgccacggcaaaggggaaagggagaaatcacgcctgcagccattcaaaagatgctggatgacaacaatcatctgatacagtgcataatggattcccagaacaaggggaagaccagtgagtgcagccagtatcagcagatgctgcataccaatctggtgtacctggccactatcgcagacagcaatcagaatatgcagtctctgttgccagctcctccaactcaaaacatgcctatgggtcccggcgggatgaaccaatccggaccaccgccgcctccaaggtctcacaatatgccctctgacggcatggtcggaggaggccctcctgccccacacatgcagaatcagatgaacgggcaaatgcctggcccaaaccatatgccaatgcaggggcccgggccaaatcaattaaacatgacaaactcctcgatgaatatgcctagttcctcgcacggcagtatgggcgggtataatcactctgtgccttcttcacagtcaatgcccgtgcagaatcagatgaccatgagtcagggtcagcctatgggaaactacggcccaaggcccaatatgtccatgcagcccaaccagggccccatgatgcaccagcagcccccatcacagcaatacaatatgcctcagggaggcgggcagcattatcagggtcagcagccccccatggggatgatggggcaggtgaaccagggcaaccacatgatggggcaaagacagattccaccatacaggcctccgcagcaagggccaccccagcagtacagcggccaggaagattactacggagaccaatattcgcatggaggtcagggcccccccgaaggcatgaaccagcaatattaccccgatggtaacagtcaatacggccagcagcaagatgcataccagggacctccaccccagcaaggttaccctccgcagcagcagcagtatccaggtcagcaaggctacccgggtcagcagcagggttatggaccaagccaggggggccccggcccgcagtatccgaactacccacaggggcaaggccaacaatacgggggctatcgccctacccagcccggccctcctcagccccctcagcagaggccctacggttacgatcagggtcagtacggtaattaccaacagtag

SEQ ID NO: 136968 - DNA, 1257 bp, synthetic construct
  misc_feature 1..1257: note = Description of Artificial Sequence: Synthetic coding sequence
  source 1..1257: mol_type = other DNA
atgtctgtggctttcgccgccccacgccagaggggtaaaggagaaattacacctgcagctatacagaagatgttagacgacaacaatcacctaatacagtgtattatggactctcagaataagggtaagacttcagaatgctctcaatatcagcaaatgcttcacacaaacctggtttacctcgccacaattgctgattctaaccagaatatgcagtcgctgctgcccgctccccctacccagaacatgcccatgggacctggagggatgaaccagtcggggcctccacccccaccacgatctcacaacatgcctagcgacggaatggtcggcggtggccccccagccccccatatgcagaatcagatgaatggtcagatgcctgggccgaatcatatgcctatgcagggaccagggccgaatcagttaaacatgaccaacagttctatgaacatgccttcatccagtcatggcagcatgggaggatataaccatagcgtgcctagttcgcagagcatgcccgtgcagaaccaaatgaccatgtcacaagggcagcctatgggcaactacggcccccgccctaatatgtctatgcagcccaatcagggcccaatgatgcatcagcagccaccgtctcagcagtacaacatgccccagggcggcgggcagcactaccaggggcagcagcctcccatggggatgatgggacaggtcaaccagggaaatcatatgatgggacagagacaaatacctccatacaggccccctcagcaagggccgccccagcaatactctggacaggaagactattacggcgaccaatactcccacggtggtcagggaccccccgagggcatgaaccagcagtattaccctgacggtcataacgactatgggtaccagcaaccttcatacccagagcagggatatgatcggccttacgaggactccagccaacattattacgagggagggaacagtcagtacggccagcagcaggatgcctaccagggacccccccctcagcaaggataccctccacagcagcagcagtaccccgggcagcagggatacccaggacagcagcagggctatgggcctagccagggagggccgggaccgcagtatcccaattaccctcagggacaagggcagcaatacggaggatacagacccactcagcctgggcccccccagcctccgcaacagcggccatatggttatgatcaagggcagtatggtaattatcagcagtag

SEQ ID NO: 136969 - DNA, 1266 bp, synthetic construct
  misc_feature 1..1266: note = Description of Artificial Sequence: Synthetic coding sequence
  source 1..1266: mol_type = other DNA
ggcggaaatatgagtgtcgccttcgcggctccgagacagaggggaaaaggtgagatcacccccgccgctattcagaagatgctggacgacaataatcacttaattcagtgtattatggacagccagaacaaaggaaagacatctgagtgtagtcagtatcagcaaatgttgcataccaatctggtctatctcgctacaatcgctgacagtaaccagaatatgcagagcctactgcccgccccacctacacaaaatatgcctatgggacctggtgggatgaaccagagtggaccgccccctcctcctagatcacataacatgccgagcgatggtatggtgggtggcggacctcccgctcctcatatgcaaaatcagatgaacgggcagatgccaggccccaaccacatgcccatgcagggacctggccctaatcagctgaatatgactaatagtagcatgaacatgcctagctcaagccatgggagcatgggcggatataaccactctgtgcctagctcccagtctatgcctgtacaaaatcaaatgacgatgtctcaaggtcagcccatggggaactacggccctcgccctaacatgtccatgcagcccaaccaggggccaatgatgcaccagcaacctccatcacaacagtacaacatgccccaggggggcggccagcactaccagggccagcaacctcccatgggaatgatgggacaagttaaccaagggaatcacatgatggggcagcggcagatacctccctacagacccccacagcagggcccgccacagcagtactccggccaagaggattactacggcgaccagtactcccatggcggccagggcccccccgaggggatgaaccagcagtattatccagacggccacaacgactacggctaccagcagccaagttacccggaacaggggtatgatcgcccctatgaggattcttcccagcattactacgaagggggaaacagccagtatggacagcaacaagatgcttatcagggaccccctccacaacagggatatcccccccagcagcaacagtaccccggccagcagggctacccaggccaacaacaggggtacgggccgagccaggggggacctggtccgcaatacccaaactacccccaggggcagggtcagcaatatggaggctaccgtcccacgcagcccgggcctccgcaaccccctcagcagcggccctacgggtacgaccaaggacagtacgggaattaccagcaatag

SEQ ID NO: 136970 - DNA, 399 bp, synthetic construct
  misc_feature 1..399: note = Description of Artificial Sequence: Synthetic coding sequence
  source 1..399: mol_type = other DNA
atgaaccagcagtattaccctgacggtcacaatgactatggatatcagcagcctagctatccagagcagggttacgatcgaccttacgaggacagttctcagcattactatgaaggtggaaattctcagtatggccagcagcaggacgcctatcagggacctcctccacagcaaggctatccaccccagcagcagcagtatccagggcagcaggggtatcccggacaacaacagggctacggcccgtctcagggcggaccagggccacagtaccccaattatccacagggccaaggccaacagtatggtggataccgacctacacagcctggaccaccccagcccccccaacaacggccctacgggtacgaccaaaacagcaggtggacagtttgttag

SEQ ID NO: 136971 - DNA, 1011 bp, synthetic construct
  misc_feature 1..1011: note = Description of Artificial Sequence: Synthetic coding sequence
  source 1..1011: mol_type = other DNA
atgcctatggggccggggggaatgaatcagtcaggtccacctccacccccccggtcccataacatgccttctgatggaatggtgggtggaggccctccagctcctcacatgcagaatcagatgaacggtcagatgcctgggcccaaccatatgccaatgcagggcccaggccccaatcagctgaatatgaccaactcttcaatgaatatgccgtctagcagtcacggatctatgggcgggtataaccattccgttccatcgagccagtcaatgcctgtgcaaaaccaaatgacaatgtcacaggggcagcctatgggaaactacggcccacggcccaacatgtctatgcagccgaatcaaggccccatgatgcaccagcaacccccctctcagcagtacaatatgccccaggggggaggccaacattaccaggggcagcagcccccgatgggaatgatggggcaggtgaatcagggcaaccatatgatggggcaaagacaaatcccaccttatcgcccgccacagcagggtcctccgcaacagtactctggtcaggaggattactatggcgaccaatacagtcacggcggccaaggccccccagaaggaatgaaccagcaatactaccccgacggacacaacgactacggctaccaacagccatcatatccggaacaaggctatgaccgtccttacgaggactcgtcacaacactactacgaaggcggaaactctcagtacggacaacagcaggatgcgtaccagggacctccccctcagcaaggttaccctccacagcagcagcagtacccgggtcaacagggctatcctggacaacaacagggctacgggccaagccagggaggccccggcccccagtatcccaattacccacaaggccagggccagcagtatggagggtaccggccaactcagcctggtcccccacaacccccccagcagcggccatatggatacgatcaaggccaatacggcaattaccagcaatag

SEQ ID NO: 136972 - DNA, 1188 bp, synthetic construct
  misc_feature 1..1188: note = Description of Artificial Sequence: Synthetic coding sequence
  source 1..1188: mol_type = other DNA
atgctggatgataacaatcacctgatacagtgtatcatggactctcagaacaaaggtaagaccagcgaatgcagtcagtaccagcagatgttgcacaccaatttggtatacctggccaccatagcagacagtaatcagaacatgcagtccttactgcccgctcccccaacccagaatatgcccatggggccagggggtatgaaccaaagtggaccccctcccccaccgcgtagccataacatgccctccgatgggatggtaggagggggacctccagcgccacacatgcagaatcagatgaacggtcagatgcccggtccgaaccacatgccgatgcagggtccggggcccaaccaactcaatatgacaaactcatctatgaatatgccctctagctctcacgggtccatggggggctacaaccatagcgtcccttcctcacaatctatgcctgtccagaatcagatgacaatgtcccaaggccaacccatggggaactacgggccaaggcctaacatgagcatgcagccgaatcaagggccgatgatgcatcagcagccgccctcccagcagtacaacatgccccagggaggcggacagcactaccagggtcaacagcctcctatgggcatgatgggacaagtgaaccagggcaatcatatgatggggcagagacagattcctccataccggcctccccagcagggtccgccgcagcagtactctgggcaggaggactactacggcgatcaatactcccacggcggacagggcccccctgaggggatgaatcagcagtattatccggatggacataatgactatggctaccagcagccgagttacccggaacaggggtatgatcgcccctatgaagattcatcccagcactactacgaaggcggcaactcgcaatacggacagcagcaggacgcctatcaggggcctcctccgcaacaggggtatcctcctcaacagcagcagtaccctggacagcagggttaccctggacaacagcaaggctacggccctagtcagggcggtccaggacctcagtatcccaattacccccagggacaggggcagcaatacggtggatatcggccaactcagcctggccccccccagccgccacagcagaggccctacggatatgaccaaggccagtacgggaactaccagcagtag

SEQ ID NO: 136973 - DNA, 1008 bp, synthetic construct
  misc_feature 1..1008: note = Description of Artificial Sequence: Synthetic coding sequence
  source 1..1008: mol_type = other DNA
atgcttcataccaacctggtttacctggcgaccatagcagactctaaccaaaacatgcaaagcctccttccagccccccctacccagaatatgcccatgggccctggcgggatgaatcaatctggaccccctcctccacctcgatctcacaacatgcctagcgatggcatggtggggggaggtccacctgctcctcacatgcagaaccagatgaacggacagatgcctggcccaaatcacatgcctatgcagggtcctgggccgaaccagctcaatatgactaattccagcatgaatatgcccagctcatcccacggctctatgggcggctataatcattctgtaccatcctcccagtccatgcccgtgcagaatcaaatgaccatgtctcagggccaacctatgggcaattatggtccccgtcccaatatgtccatgcagcctaaccagggaccgatgatgcaccagcagccacccagtcaacagtacaacatgcctcagggcggcggccagcactaccagggacagcaaccccccatgggcatgatgggccaggtaaaccaaggaaatcatatgatggggcagaggcagatccccccatatcggcctccacaacaaggcccccctcagcagtactcagggcaggaggattactatggggatcagtacagccacggaggtcagggaccccccgaaggcatgaatcagcagtactatccagacggtaattctcagtacggacagcagcaggacgcttaccagggtcctccaccccagcaggggtatcctccacagcagcagcagtaccccgggcaacaggggtaccctggacagcagcaaggatatggccctagccagggtggacctgggcctcagtaccccaactacccccaagggcagggacagcagtatggaggctacaggcctacccagccaggacctcctcagcctccacaacagcggccctatgggtacgaccagggccagtacggtaattatcagcagtag

SEQ ID NO: 136974 - DNA, 1008 bp, synthetic construct
  misc_feature 1..1008: note = Description of Artificial Sequence: Synthetic coding sequence
  source 1..1008: mol_type = other DNA
atgctccatacaaatctggtgtatctcgctacgatcgctgattcaaaccagaatatgcagtctctgctacctgctccacccacccagaacatgcctatgggccctggcggtatgaaccagtccgggccacctcctccacccagaagccataacatgccttccgatggaatggtggggggtggtccgcccgctccacacatgcagaatcagatgaatggacagatgcccggccctaaccatatgcctatgcagggtccaggtcctaatcagctgaacatgaccaactcatcgatgaacatgccctccagctctcacgggtctatgggtggatataatcactctgtgccgagcagccagtctatgccagtccagaatcaaatgactatgagccagggtcaacccatgggcaactatggcccacgcccaaatatgtccatgcagcccaaccagggtccaatgatgcaccaacaaccgccatcccagcaatacaatatgcctcaaggaggaggccagcactaccaaggacagcaaccgccaatgggcatgatgggccaggtgaatcaaggcaaccacatgatgggccagcggcagatacctccgtaccgaccccctcagcaaggtcccccccagcagtactcagggcaagaggactactatggcgaccaatatagccatgggggccagggcccgccagagggaatgaatcagcagtattaccctgatggaaactcccaatacggtcagcagcaggacgcctatcagggccctcccccacaacaggggtatccaccgcagcagcaacaatacccaggacagcaaggctatcccggacagcagcaaggttatggcccaagccagggcggccctggaccccagtatcccaactacccgcagggccagggacaacaatacgggggctatcgacccacccaaccaggccccccccagcctccccaacagcggccatacggctatgaccagggccaatacggtaactatcagcagtag

SEQ ID NO: 136975 - DNA, 567 bp, synthetic construct
  misc_feature 1..567: note = Description of Artificial Sequence: Synthetic coding sequence
  source 1..567: mol_type = other DNA
atgaatggggacgataccttcgcaaagcggccacgggacgacgctaaagcgtccgagaagcggtcaaaggcttttgacgatatagctacatacttcagcaagaaagagtggaaaaaaatgaagtatagtgagaagatctcttacgtgtatatgaagagaaattataaggccatgaccaaactcggcttcaaggtcaccctcccccctttcatgtgcaataagcaggcgaccgattttcagggaaatgactttgacaacgatcataacagaaggatccaggttgaacacccacagatgacttttggaagactacacaggattattcccaagattatgcccaaaaaacccgcagaagacgagaatgactctaaaggagtgtccgaggcttccggacctcagaacgacggtaaacagttgcacccacccggcaaagccaatataagcgagaagatcaacaaaaggtccgggccaaagcgaggtaaacatgcctggacacatcggctgcgggagaggaagcaactggttatctatgaggagatcagcgaccccgaagaagatgacgaatag

SEQ ID NO: 136976 - DNA, 672 bp, synthetic construct
  misc_feature 1..672: note = Description of Artificial Sequence: Synthetic coding sequence
  source 1..672: mol_type = other DNA
atgaacggtgacgatgccttcgcaagacgcccaacagtgggggctcagatccccgaaaagatccaaaaagcctttgatgacatcgctaagtactttagtaaggaagagtgggaaaaaatgaaagcttcagaaaaaattttctatgtctatatgaaacgaaaatatgaggctatgacaaagctcggattcaaagccacacttccacctttcatgtgtaataaacgagccgaggatttccaagggaacgacctggacaatgatccaaatcggggaaaccaggtcgaaaggccgcagatgacgttcggcaggctgcagggcatttcgcccaagatcatgcctaagaaaccggccgaagaaggcaacgactcagaggaggtgcccgaagcctcagggccacaaaatgacggaaaagaactgtgtcctcctggtaagcccacaacatcggaaaaaatccatgaaagatcaggaaaccgcgaagctcaggagaaggaggaacgccggggcaccgcccatcgctggagttctcagaatacccataatatagggagatttagtctgagtacttctatgggcgcggtgcacggaacaccgaagaccattactcataaccgtgatcctaagggggggaatatgcctggacctaccgattgcgttagagagaattcgtggtag

SEQ ID NO: 136977 - DNA, 567 bp, synthetic construct
  misc_feature 1..567: note = Description of Artificial Sequence: Synthetic coding sequence
  source 1..567: mol_type = other DNA
atgaatggcgatgacgccttcgcacgccgaccaacagttggcgcccagatcccggagaaaatccaaaaagctttcgatgatattgcaaagtatttttccaaagaggaatgggagaagatgaaagcctctgagaagatcttttatgtgtatatgaaacgcaagtatgaagccatgactaagctgggattcaaggccacgttgccaccctttatgtgtaataagcgcgctgaggacttccaggggaatgacctggacaatgacccaaatcggggtaaccaggtagagcggccccagatgacattcgggaggcttcagggcatatcaccaaagatcatgcccaagaagcctgccgaggaaggcaatgactccgaggaggtccctgaggcaagcggcccgcagaatgatgggaaggaattgtgtccacctgggaaacccacaaccagcgaaaagattcatgagaggtccggcccaaagagaggtgaacatgcttggacccatcggctccgcgaacggaagcagctggtaatctacgaagagatctccgatcccgaagaggatgacgagtag

SEQ ID NO: 136978 - DNA, 567 bp, synthetic construct
  misc_feature 1..567: note = Description of Artificial Sequence: Synthetic coding sequence
  source 1..567: mol_type = other DNA
atgaatggagatgatacattcgccagacgcccaaccgtcggtgcacaaatccctgagaagatccagaaagcctttgatgatattgctaagtacttttccaaggaggaatgggaaaagatgaaggtatctgagaagatcgtatacgtttatatgaaacgaaagtacgaggccatgaccaagctgggcttcaaagccattttgccaagctttatgcgtaacaaaagagtgactgattttcagggtaatgactttgataatgatcccaataggggcaatcaggtccagcgcccccagatgacattcggtcgactccagggaatcttcccaaagattatgccaaagaagcctgccgaagaaggtaatgttagcaaggaggtgccagaggcgagcggacctcagaacgatggaaaacagctttgtcctcccgggaaacctaccacatcagagaaaatcaatatgatctccgggcccaagaggggggaacatgcatggacgcaccgtctgagggaaagaaagcaactggtcatttacgaagagatatcagaccccgaggaggacgatgagtag

SEQ ID NO: 136979 - DNA, 513 bp, synthetic construct
  misc_feature 1..513: note = Description of Artificial Sequence: Synthetic coding sequence
  source 1..513: mol_type = other DNA
atgaacggggatgacacgttcgctaggaggcccactgtgggcgcccagatccccgaaaagattcagaaggccttcgatgacattgcaaagtatttttctaaggaggaatgggagaagatgaaagtgagcgaaaaaatagtatacgtctacatgaagcgtaagtacgaagccatgacaaagctgggttttaaagcaattcttccgagttttatgcgaaacaagagggttaccgatttccagggaaacgactttgataacgaccccaatagaggtaaccaggtacagaggccccagatgacatttggaagattgcaaggaattttccccaagatcatgccgaaaaagcccgccgaggaaggcaatgtgtccaaggaagtgccagaggctagcggccctcagaacgacggcaagcagctctgccccccagggaaaccaacaacttcggagaaaattaatatgatcagcggtgtgctgcagaggtattgtcggtttggtagccggcccctgcagtag

SEQ ID NO: 136980 - DNA, 303 bp, synthetic construct
  misc_feature 1..303: note = Description of Artificial Sequence: Synthetic coding sequence
  source 1..303: mol_type = other DNA
atgtactccctgtcagtgcagcgaccccagatgacatttggtaggttacagggtatatttcctaagattatgccaaagaagccggctgaggaggggaatgtatctaaagaagtcccagaagcatctggaccccagaacgatgggaagcagctgtgtcctccaggcaaacccactaccagcgaaaaaattaatatgatatcaggaccgaaaagaggcgagcacgcttggacgcaccggctgagggagaggaaacagttagtcatctacgaagaaatcagtgacccagaagaggacgacgagtag

SEQ ID NO: 136981 - DNA, 462 bp, synthetic construct
  misc_feature 1..462: note = Description of Artificial Sequence: Synthetic coding sequence
  source 1..462: mol_type = other DNA
atgaatggggacgatgcttttgcaaggcgaccccgagatgacgcgcagatctctgagaagctcagaaaagctttcgacgacatcgcaaagtacttctctaagaaagagtgggaaaaaatgaaatctagtgagaagatagtctacgtgtatatgaagctaaattacgaggttatgaccaaactaggatttaaggtgacccttccaccttttatgagatccaagcgagctgcagattttcacgggaatgacttcggcaatgatcgtaaccataggaatcaggtggaacggccgcaaatgaccttcgggtctctgcaacgaatttttcccaaagaccctaaagggggtaatatgccaggccccaccgactgcgttcgtgagtcatcttggtggttcatgaagcgctctgccacactgcggaagatgacatctaacagccccagagggtatgacacttgtccctag

SEQ ID NO: 136982 - DNA, 567 bp, synthetic construct
  misc_feature 1..567: note = Description of Artificial Sequence: Synthetic coding sequence
  source 1..567: mol_type = other DNA
atgaacggagatgacgcgtttgcgaggcgaccacgggacgacgcccagatttctgaaaaactgagaaaggcgtttgacgacatcgccaaatacttttccaagaaagagtgggagaaaatgaagtcctcagagaagatcgtatacgtctacatgaagttgaactatgaggtcatgactaagctgggcttcaaggtcactcttccccctttcatgcgctctaaaagggccgctgatttccacggtaacgattttggaaacgataggaaccatagaaaccaggttgagcgcccccaaatgacatttgggagtctgcaacgaatattccccaaaattatgccgaagaagccagccgaagaagaaaacggtttgaaagaggtccctgaggcttctgggccccagaacgatgggaaacaactctgccccccaggcaacccctccactctggagaaaatcaacaaaacatcaggtcctaagcggggcaaacacgcctggacgcacaggttgcgcgaacggaagcagctggtcgtgtacgaagagatttccgaccctgaggaggacgatgaatag

SEQ ID NO: 136983 - DNA, 1992 bp, synthetic construct
  misc_feature 1..1992: note = Description of Artificial Sequence: Synthetic coding sequence
  source 1..1992: mol_type = other DNA
atggggcctctgcgtgagagtaaaaaagagcatcgggtccagcaccacgacaaggagatcagccggtctaggatcccacgtctcatactccggccccatatgccgcagcaacagcacaaagtgagccctgctagtgagagccccttttccgaagaggagtctagggaattcaacccttccagcagtggaagatcagctagaacagtctcatctaactccttctgctctgatgatactggctgcccttcctcccagtctgttagtcccgttaagaccccttccgacgctggtaattcccccatcggtttctgcccaggctccgatgagggcttcacgcgaaagaagtgtacaataggcatggtgggggaagggtcgatccagtccagccggtacaagaaagagtccaaaagcgggctggtgaaacccgggagtgaggctgacttctcctcctcatcatctactggcagtatcagtgcacccgaggtgcacatgtccacagctgggtccaagagatcttctagctctcggaatagaggaccccacggcaggtcaaatggcgcctccagtcacaagccaggtagtagcccatccagtccccgcgagaaagacctgctcagtatgctttgtagaaatcagttgtctcccgtgaacatccaccccagttacgccccaagctcaccaagctcctctaacagcggcagctataagggaagtgattgctcccctattatgcggaggtctggacgctacatgagttgcggagaaaaccatggcgttcgaccccccaatcctgagcagtacttgacccctctgcagcagaaagaggttaccgttaggcacttgaagaccaaactgaaagagtctgagcgcagactccatgaaagagagagcgaaattgtggagttgaagtcgcagttggcgagaatgcgtgaggattggatcgaagaggaatgccatcgtgtggaggcgcaactggccctcaaggaggcccgcaaggagatcaaacagttaaagcaagtgatcgagacaatgcggagttcactagctgataaggacaaaggtatacaaaagtatttcgttgatattaatatccaaaataagaagctagagagtctacttcagagcatggagatggcccacagtggttccctgcgagatgaactttgtttggactttccatgtgatagccccgaaaagtccctgaccctcaatccgccgctggacactatggccgatggcctgtccctggaggagcaggtcacgggcgagggtgctgaccgggaattgctggtgggcgacagcattgccaactcgaccgacctttttgacgagattgttacggccacgaccaccgagagcggtgatctggagctagtacatagtacccccggagccaatgtcctggaacttctacctatcgtcatgggtcaagaggaagggagcgtggtggtcgaacgtgccgtgcagaccgatgtggtgccttactcacccgctatctcagaactgattcagtccgttctgcagaaactgcaagacccttgtccatcgagcctggcctcaccagatgagagtgaaccggactctatggaaagcttccccgaatcattatccgcgcttgtggttgacctcacgccgaggaatccaaatagtgccatactcttatcacctgtcgaaacaccttacgcaaatgtggatgccgaagttcatgccaataggctgatgagggagctcgactttgccgcctgcgtcgaggagagactggacggcgtcatccctctggccagagggggagtggtgcgccagtactggagcagcagcttcctagtcgatcttctcgcggtagcagcccccgttgtcccaactgtcctgtgggcattttcgacacaacgtgggggcacagatcccgtgtacaatatcggagccttgctgaggggatgctgtgtggtagccctgcactccctgcgccgcaccgccttcagaatcaagacttag

SEQ ID NO: 136984 - DNA, 1983 bp, synthetic construct
  misc_feature 1..1983: note = Description of Artificial Sequence: Synthetic coding sequence
  source 1..1983: mol_type = other DNA
atgtccaatttcgagaaagagcaccgcgtgcagcaccacgacaaagaaattagtcgctctcggattcctcggctgattctgcggccacatatgccacagcagcagcacaaagtgtcaccagcaagcgagtcacccttcagtgaagaggaatcaagggaattcaacccttcttcaagtgggcgcagtgcacggacagtcagcagcaactctttttgttctgatgacactgggtgcccttcttctcagtcggtgtctccggtgaagaccccctcggacgctggtaattcccccatcggcttttgtcctgggtcagatgagggcttcacaagaaaaaaatgtaccatcgggatggtgggtgaagggagcatacaatcaagtcgctataagaaagagtcaaaatcgggcttggtgaagccaggatctgaagctgacttctcctcctcaagtagtactggctcgataagcgcccctgaagtgcatatgtccactgcagggagcaagaggtcttcgtcttcacgtaaccgaggcccacacggccggtcaaatggcgcctcatcccacaagccgggcagtagcccttctagtcccagagagaaggacttgctgtcaatgctgtgcaggaaccaactgagccccgtcaatatccatccttcttatgcaccatcctctcccagcagcagcaactcaggctcttacaagggtagcgactgctcccccattatgcgacggagtggacgctacatgtcatgcggggaaaatcacggagttcgcccccccaacccggagcaatacctgactccactccaacagaaggaggtgacagtcagacacctcaagactaagctgaaggaaagcgagcgccgcctacatgaacgcgagagtgagatcgtggaactaaagagccagctcgctcgcatgagggaggattggatcgaagaggaatgtcatagggtagaagcccagctggcccttaaagaagccagaaaggagattaagcagctgaaacaggtgattgagacaatgaggtcttctctcgctgacaaggacaaaggaatccagaagtattttgtggacatcaatatccaaaataagaagctcgagtccctgctccagtccatggaaatggcccattccgggtccttgcgcgatgaattgtgcttggactttccttgtgactcacctgaaaaatctcttaccctgaatccccctctcgatacaatggccgacggcctgtccctggaggagcaggtaacaggggagggagctgaccgggagctgctagtaggagacagcattgccaacagtaccgatttgtttgatgagatcgtgacggccaccactactgaatctggagacctggaactcgtacattccacccccggcgcgaacgttctggagcttctgccaatcgtgatggggcaggaagagggttctgtggtagtggaacgggctgttcagactgatgttgttccgtactcccccgccatcagcgaactgatacagtccgtgctccaaaaattgcaggacccttgcccgtccagcctcgccagtcctgacgagagcgagccagatagtatggaatcgtttcctgagagtctgtccgccttagttgttgacctgacacctcggaatccaaactccgccattctcttatcccctgttgagacaccttacgcaaacgtagatgcggaagtgcatgctaatcgcttgatgcgggagttggacttcgcagcttgcgtggaggaacgactggatggtgttatccctcttgcacgagggggagtggttaggcagtactggtccagctctttcttggtggacctcctggcagtggccgcacccgtagtgcctaccgttctctgggccttctctacccagcggggggggacggaccccgtctataatataggcgctctgctgcggggctgctgtgtagtggcgctgcacagcctcaggaggaccgcatttagaatcaagacctag

SEQ ID NO: 136985 - DNA, 1635 bp, synthetic construct
  misc_feature 1..1635: note = Description of Artificial Sequence: Synthetic coding sequence
  source 1..1635: mol_type = other DNA
atggttggcgaaggttctattcaatctagccggtacaaaaaggaaagcaaaagtggcctcgtgaaaccaggctcggaggccgatttttcatcgtcgtcttccacggggtccatctctgcccctgaagtccatatgtctactgctgggtctaagcgctcatcctcatctcggaatcggggcccacacggaaggtccaacggagcctcttctcacaaacctggctccagcccttccagtcccagagaaaaggacctacttagtatgttatgtaggaaccaactgtctcctgtgaacattcacccttcctacgcaccaagctctccatcctcttccaatagtgggagctataaaggctcagattgcagccccattatgcggcgatctgggcgctacatgtcgtgtggagagaatcatggggtgaggccccccaatcctgagcagtatctcactcccctccaacagaaggaagtaaccgtacggcacctgaagaccaagctcaaagagtcggagcgccgcctgcatgagcgggaatccgagatcgtcgagctgaagagccaactggcgaggatgagagaggattggattgaggaagaatgtcatcgggtggaagcccagctagcactgaaagaggccaggaaggagataaagcaacttaaacaggttatagagacgatgcgatccagcctcgccgacaaagacaagggcatccagaaatactttgtagacatcaatattcagaacaagaagctggaatcactcctgcagtctatggaaatggctcatagcggtagcctgagggacgaactgtgcctggattttccctgcgactctccggagaaatcactcacacttaacccccctctagacacgatggctgacggcctatctcttgaggagcaggtgactggggaaggggccgatagagagctccttgtgggcgactccattgcaaattctaccgaccttttcgatgagatcgtcaccgccactactacagagtcaggagatcttgagctggtacattcgacacccggtgcaaacgtcctggagctgctgccaatcgtaatggggcaggaggaaggatctgtcgttgttgagcgggctgtgcaaacggatgtagtgccttacagtcccgccatatcggagctcattcagagcgtgctgcagaagctgcaggacccctgccccagctcactcgcatcgcctgacgaatccgagccagactcaatggagagtttccccgagtctctgagtgccctggttgttgatctaacaccacggaaccctaactccgcgattctcctgagtcccgtagaaacaccatacgctaacgtcgatgcggaggttcacgctaaccgcctcatgcgagaactagacttcgcagcatgtgtggaggagcggctggatggcgtgattcctttagcacggggcggagtagtgaggcagtactggagttccagcttcctcgttgatctgctggcggtggccgcgccagtggtgccaaccgttttgtgggccttctccacgcagcggggcggtactgatcccgtttacaatatcggggccctgctacgcggatgttgtgtggtggcgctccatagcctgcgccgaaccgcctttcggatcaaaacatag

SEQ ID NO: 136986 - DNA, 1992 bp, synthetic construct
  misc_feature 1..1992: note = Description of Artificial Sequence: Synthetic coding sequence
  source 1..1992: mol_type = other DNA
atgggcccactacgggaaagcaaaaaggaacatcgcgtccagcaccatgataaggaaatctctcgctcacgcatcccaaggttgatcctcagaccccatatgccacagcagcagcataaggtgagtccagcttcggagtcacctttcagcgaagaagagtcacgggagtttaatcctagctcctctgggcgctcagctcggacagtgagttccaattcgttttgcagcgatgataccggctgcccatcttcacagagtgtgagtcccgtgaaaacaccatccgatgccggcaattctccaatcggcttttgccctggctctgacgaagggttcacacggaaaaaatgtactatcggaatggtgggggagggatccatccagtctagccgctataaaaaggaatccaagtcagggctggtgaaacccggcagcgaggcagacttctcatcgtcttcatctactggcagcatctccgcacctgaggttcatatgagcaccgctggatccaagaggagctctagtagtcggaacagaggcccacacggccgctcaaacggcgcctcaagccacaagcccggtagtagcccctcctcccccagggagaaggaccttctgagcatgctctgcagaaaccaactgtctcctgtgaacattcacccctcctacgcccctagttctccttccagttctaacagcgggagttacaagggatcggactgcagtccaattatgagaaggagtggtcggtacatgtcttgtggagaaaaccatggagttcgaccacccaacccagagcaatacctaactcccctgcagcagaaagaagttacagtgcgtcatttgaagactaagttgaaagagtcagagcggaggcttcatgaacgggagagcgagatcgtcgagcttaagtcacaactggccagaatgcgcgaagattggatcgaggaggagtgccaccgcgttgaagctcaacttgctctgaaagaagctaggaaggaaatcaagcaattgaagcaagtgatcgaaactatgcggagctctctcgctgacaaggacaagggcattcagaagtactttgttgatattaatattcagaataagaaactggaaagcctgctgcaaagtatggagatggcacacagcggcagcttgagggatgagctgtgtttggacttcccctgcgactccccagagaaaagcttgaccctcaatccccctctagacacaatggcagatggactgtctctggaggagcaggttactggggagggggcagatagagaactcctcgtcggggatagcattgcgaattccacggatctgttcgacgagattgtcactgccacaaccacagagtcaggcgatctggaactggttcactcaacacctggcgctaacgtgcttgagctactgccaattgtgatgggccaggaagaagggtcagtggtagtggaacgcgcagtgcagactgacgtcgtaccctacagccctgccatcagtgagttaatccagagcgtcttacagaaactgcaggatccctgccccagtagtttggcctctcccgatgaatctgaacctgactccatggagtcgtttcccgaatctctctccgccctagtggttgacctgaccccacggaatcccaattccgccatactgctcagtccagttgagaccccatacgctaacgtcgatgccgaggtccacgctaaccggctcatgagggaattggacttcgcagcatgtgtcgaggaacgcttagatggggtcattcctctagcccgtggaggtgttgttagacagtattggagctctagcttccttgtcgatttgttggctgtggcagcaccagtggtgccaaccgttctctgggcatttagcacacagagggggggtaccgatcctgtatacaacatcggggctctcctccgcggatgttgtgtggtagcgctgcattcactgcggagaacagccttccggataaagacttag

SEQ ID NO: 136987 - DNA, 1989 bp, synthetic construct
  misc_feature 1..1989: note = Description of Artificial Sequence: Synthetic coding sequence
  source 1..1989: mol_type = other DNA
atggggccactcagggaaagtaaggagcatcgggtacagcaccacgacaaggagatatcaagatcacgaatcccaagactcattcttcgtccacacatgccacagcagcagcacaaggtgtcgccagctagcgaaagccccttcagtgaagaggaaagtagggaatttaaccctagtagttccggccggagcgcccggacagtgagctcaaactcattttgtagcgatgacaccggatgtccaagtagccaatccgtgagcccggtcaaaaccccgagcgacgcagggaatagtccgataggattctgccccggttcagatgaaggctttacgagaaagaaatgcacaatcggtatggtgggggaggggagcatccagtcctctagatataaaaaagaatcaaaaagcgggcttgtaaagccaggctcagaggctgacttctcctcaagcagctccaccggctccatcagcgcccctgaggtccacatgagcactgcgggcagtaaacgatcctcctcaagtagaaatcggggcccgcacggccggtctaacggcgcatcttcccataaacccggcagctccccgtcctcccccagagagaaggacctgctgtctatgctgtgtaggaaccagctctcacccgtgaacatccacccctcctacgctccctccagtcctagctcatccaactctgggagttacaaaggctctgactgttcaccaatcatgcgaagatccggtagatacatgtcctgtggtgaaaaccacggcgtgcgcccacctaatccggagcagtatctgacacccctgcagcaaaaggaggttacagtcaggcatttgaagactaaactgaaggaaagcgagagacgtctgcacgaaagagagtcagagatcgtggagctgaaatctcagctggccaggatgagggaggattggatcgaggaagagtgtcaccgagtggaggctcagctggctctgaaagaagcgaggaaagagataaagcagctgaagcaagtgattgagaccatgcgaagtagtcttgccgataaagacaagggaatccagaagtatttcgtggacatcaatatccagaataagaaactggaatccctgctgcaatctatggagatggcccactctggcagcctcagggatgagctttgtttggacttcccttgtgattcccccgagaaaagcttaacgcttaatcccccattagacaccatggcggatggactcagtttggaggagcaggtgaccggggagggggccgatcgggagctgcttgtcggggactccatcgcgaattcaaccgatctgttcgacgaaatcgtcacagctaccaccactgagagtggtgacctagaattggtgcacagcacccctggggccaatgtcctggagttgctgccaatcgtgatgggccaggaggaaggttccgtcgtggtcgaacgggcagtgcagaccgacgttgtaccatattcgcctgcgatcagtgagctgatacagtcggtactccagaagcttcaggatccctgtccatcaagcctcgcttccccagatgaatccgagcctgacagcatggagagttttccggaatccttaagcgccttggtcgttgatctgaccccacggaaccctaacagcgccattctgctgtctcctgtggaaactccatatgccaatgtggacgctgaagtgcacgctaaccggttaatgcgggaactggactttgcagcctgtgtagaagagcgtctcgacggcgtcatccctctggcgcgcgggggcgttgtgcgacaatattggtcttcaagctttcttgtcgacttactggctgttgcagcacctgtggtaccaacggtgctgtgggcttttagcacgcagcgcggcggaaccgacccagtgtacaacattggagctctgctcagaggatgttgcgtcgttgcactgcactctctccggaggacagcgttccgaataaaaacatag

SEQ ID NO: 136988 - DNA, 1992 bp, synthetic construct
  misc_feature 1..1992: note = Description of Artificial Sequence: Synthetic coding sequence
  source 1..1992: mol_type = other DNA
atgggcccattacgggaatccaagaaagagcatagggtgcagcatcacgacaaagagataagcaggtcacggattccccggcttattcttcggccccacatgccccagcagcaacataaggtgtcgcctgcctcagagtccccgttcagtgaagaggaatccagggagtttaacccttcctcatctggcaggagcgcccgaaccgtttcctccaattcattttgtagtgatgatacgggttgtcctagtagccagagcgtctcaccagtgaaaactcctagtgatgccgggaattctccaatcggtttctgtccaggctctgatgagggtttcaccagaaaaaagtgcacaatcgggatggtgggagaaggctctatccagagttctcggtataaaaaggaatcgaaatcaggactggtgaaacctggcagtgaagcggacttcagtagtagctccagtactgggagcatctccgctccagaggtgcacatgagtactgcgggcagcaaacggagctcctcctcaagaaacaggggcccacacggccggtctaatggagcgtcatctcataaacctggctcgagcccaagttcgccccgcgagaaggatctgctcagcatgctctgccgcaaccagttatcgcctgtgaacatccatccgtcttatgccccttcttcgccgtcctcttccaactctggcagttacaaggggagcgattgttcccccataatgcgccgtagtggtcggtacatgtcatgcggcgaaaatcatggcgttcgaccccccaaccccgaacagtacttgacccctcttcagcagaaagaggttaccgtcaggcacttgaagactaaactgaaggaaagtgagcggagactacatgagagggaatcggagatcgtggaattgaaatcccaactggcaagaatgagagaggactggatagaggaggagtgccaccgggttgaggcacaactcgcactaaaggaagctaggaaagagatcaaacaactgaagcaggttattgagactatgcgttcctcccttgcagacaaagataaaggcattcagaaatattttgtcgacatcaacattcagaataagaaactggaaagcctccttcagtccatggagatggcccatagtgggagcctcagagatgagttgtgccttgattttccttgtgacagccctgaaaaatcactgacactgaatccgccactggacacaatggctgatgggctttcactagaggagcaggttaccggagagggagccgatcgtgaactcttggtaggggacagcattgccaattccaccgatctgttcgacgagatagtaacagcaaccactaccgagtctggagatcttgagttggtgcattctacaccaggtgctaacgttctggagctgcttccaatagttatggggcaggaagaggggtccgtggtggtggagcgggctgttcaaactgacgtcgtgccatatagccccgctatatctgaactgattcaaagtgtgcttcagaagctccaggatccttgcccttccagcctggcttcacctgacgaatcggaacctgactccatggaatcattccccgagagcctttccgctctcgtagtggaccttaccccccgcaacccgaactctgcgattctgctgtcgccagtcgagaccccttacgctaacgttgatgccgaagttcatgctaaccgcctcatgcgcgagctggattttgccgcgtgcgtagaagaacgtttagacggagtgatccctctggcccggggaggggtggtgaggcaatactggagctcatccttcctggttgatctactggcagtggccgcccccgtcgttcccacggtcctctgggcgttctccacacagagagggggcactgatcctgtatacaacatcggcgccttgctacgcggctgctgtgttgtcgccctgcatagcctacgccggactgcttttcggatcaagacatag

SEQ ID NO: 136989 - DNA, 1992 bp, synthetic construct
  misc_feature 1..1992: note = Description of Artificial Sequence: Synthetic coding sequence
  source 1..1992: mol_type = other DNA
atggggcctctgcgagagagcaaaaaagaacatcgggtacagcaccatgataaagagatatcccgctcccgcattccccgtcttattctccgcccacacatgcctcaacagcagcacaaagtgagtccagcatccgaatctccgttttctgaggaggaaagccgggagtttaacccatcctcctccggacgcagcgcaagaaccgtatccagcaattcgttctgctctgatgacacaggatgtcctagcagccaatccgttagccccgtaaagacccccagcgacgcaggtaatagcccaattggcttttgcccaggatccgacgagggttttacccggaaaaagtgtactatcgggatggtgggggagggctcaatacagtcctctcgctataaaaaagagagcaagagtggcttggtgaagccaggctctgaggctgacttttcctcttcatcttccaccggttcaatcagtgccccagaggtccacatgtccacagcagggtccaaaagaagcagctccagccgaaatagagggccacacgggagatctaatggtgcaagttcgcataaacctggatccagccctagcagtcctcgggaaaaagatcttctgtccatgctatgcagaaatcagttaagccccgtcaacattcatccctcatacgctccatcatctccttcctcatcgaactccggttcctataaaggctctgattgtagtccaataatgagacgtagtggccgctatatgtcgtgtggtgaaaatcacggagtgcgcccacccaatccagaacagtacctaacgcccctccagcagaaagaggtaactgtgagacacctgaaaacgaagctgaaagagtcagagcggagactccatgagcgggaatctgagatcgtcgaacttaaatctcagcttgcccggatgcgagaggactggatcgaggaagaatgccacagagttgaagcgcagctggctttgaaagaagccaggaaagagataaagcagttgaagcaggtaatcgaaaccatgaggagctccttggcagataaagataaagggattcagaagtactttgtcgacattaatattcaaaacaaaaaattggagagccttctccagtcaatggagatggcgcactcaggctctctgagagatgagttgtgcctagacttcccctgcgactcccccgaaaagtccttaaccctcaatccaccccttgataccatggccgacggccttagtctggaagaacaggtgacgggggagggggcagacagagaactgctggttggggattcaatcgccaattccactgacctgtttgatgagattgtgaccgctaccactaccgagagcggggatctggagctcgtccacagcacgccaggggccaatgttcttgaactactgcccatagtcatgggacaggaggagggatccgttgtggtcgaacgcgccgtccaaactgacgtggtcccctactcacccgccataagcgagttaatccagtcagtcctacagaaactgcaagacccatgcccgtccagcctggcttctccagatgagtcggaacctgacagtatggagtcgtttcccgaaagtctgagtgccctcgtcgtagatttaaccccgcgaaatcctaactccgcgattctgctgtcacctgtggaaacaccgtacgccaacgtagatgcagaggtgcacgccaaccgcctcatgcgagaactggactttgctgcgtgcgtggaggagagactggatggtgtgatacccctagcccgcggcggagttgtccgccagtactggtcttcatcctttctcgttgacctccttgctgtcgctgcccccgttgtgccaaccgtcctctgggctttctctacccaaaggggaggaaccgaccctgtttacaatatcggagcccttctcagggggtgctgtgtggtcgccctgcattcccttcgtaggactgcctttagaataaaaacctag

SEQ ID NO: 136990 - DNA, 1992 bp, synthetic construct
  misc_feature 1..1992: note = Description of Artificial Sequence: Synthetic coding sequence
  source 1..1992: mol_type = other DNA
atgggaccactccgggagtcaaaaaaggaacacagagtgcagcatcatgataaggaaatctcaaggtcacggatcccgagactgatcctgcgtccccatatgccccaacagcaacataaagtgagcccagccagtgagagtcccttcagcgaggaggaatcaagagagtttaacccttcttcatctgggcgcagcgctcggactgtgtcttcgaactctttctgttccgacgacaccggctgccctagttctcagagcgtttccccggtcaagactccctctgacgccggcaacagtcctattgggttttgccctggatctgacgagggcttcacgaggaaaaaatgcaccattgggatggtcggcgaagggagcattcagtcgagtaggtataagaaggaatctaagagcggactggtgaagccaggctcagaggcagacttttcatcaagttccagcaccgggagtatttcggcaccggaggtgcacatgtcaaccgccggtagcaagcgatcttccagttcgagaaacaggggtccccacggcagaagcaacggcgcctcctcacacaaaccgggcagcagcccgtcttcccctcgcgagaaagatttgctatctatgctttgtcgaaatcagctcagtcccgtgaatattcatccttcttacgctccgagcagcccttccagtagtaatagcggcagctataaaggcagtgattgctccccaataatgaggagatccggtcggtatatgtcttgcggggagaatcatggcgttcggccccctaatccagagcagtacctgactcctctgcagcaaaaggaggtaaccgttagacacctgaagaccaaactgaaagaatcagaacggaggttgcatgagcgcgaatctgagatagtcgaattgaagtctcaactggctcgcatgcgagaggactggatcgaggaggaatgtcatcgcgtggaagcacagttggcccttaaggaggcacgaaaggagataaagcagttaaaacaagtgatcgagacgatgcgatcttccctggcagataaagataaagggattcagaagtacttcgtggacattaatatacaaaataaaaaactcgagtctctgcttcaatctatggagatggcccactccggaagcttaagggatgagctgtgcctcgactttccatgtgatagtcctgaaaaatccctgactcttaatccacctctcgataccatggcggacgggctgtccctcgaggaacaggtcacaggagaaggagcagaccgggagctgctcgttggagattccatagcgaacagtaccgacctcttcgatgagattgtgactgcaaccaccacggaaagtggggacctcgagctggtgcatagcacaccaggcgccaacgtgctggagctactgcccattgtcatgggtcaggaggagggctctgtggtagtcgagagagcagtgcaaaccgatgttgtcccgtatagcccagcgatatccgaactgatccaaagcgttctccaaaagctgcaagacccctgtccatcgtcacttgcctcccccgacgagtcggagccagatagcatggaatcattccccgagtcactgtcggccctggtcgtggatctgacgcctcgaaatcccaacagtgcaattctgctctcgccggtggagaccccttacgccaatgttgatgctgaagttcacgccaaccggcttatgagggagctagacttcgccgcatgcgtcgaggagaggttggatggcgtcattccactggctagaggcggtgttgtccgccagtattggagctcctcgttcctggtcgacctgctggcggtggccgccccggtggtaccaacagttctctgggcgttttccacacagcgaggtggcacggaccctgtgtataacattggagcacttttgcgaggctgctgcgtcgtcgctttgcattcactgagaagaactgccttccgaataaagacttag

SEQ ID NO: 136991 - DNA, 1989 bp, synthetic construct
  misc_feature 1..1989: note = Description of Artificial Sequence: Synthetic coding sequence
  source 1..1989: mol_type = other DNA
atggggccacttagggagagcaaggagcacagggtgcagcatcacgacaaggagatatcccggagtaggatacctcgactgatactgcggccccacatgcctcaacagcaacataaggtaagcccagcaagcgagtcccctttcagcgaggaagaatccagggagtttaaccccagcagcagcgggcgcagtgctagaaccgtgagctcgaacagtttctgttctgacgatacgggctgcccatctagccagagcgttagccccgtgaagactcccagtgacgccggcaattctcccattgggttctgcccgggtagtgacgaaggtttcacgcggaaaaaatgtaccataggaatggttggtgagggatccattcagtcctcacgttacaagaaggagagcaagtcaggtctcgtgaaacccgggtcagaggcagatttctctagtagttcatccaccgggtctatatcggcccccgaagtgcacatgtcaaccgcaggatcaaagcggtcatcctcttctaggaaccggggcccccatggaagatcaaacggcgcttccagccacaagccgggaagctcgccgtcgtcccccagggagaaggacttgctgagcatgttgtgcaggaatcagctgagcccagtgaacattcaccccagctatgccccctcaagtcccagctcttctaatagcggaagctataagggctccgactgtagccctataatgaggcgaagcggccgttacatgtcatgtggagaaaatcatggggttagacctccaaaccctgaacaatacctaacgcctctgcagcagaaggaggttaccgtgcggcatctgaagacgaaactcaaagaaagcgaaaggcgccttcatgagcgagagagcgaaatcgtggagctcaaaagccagctggccaggatgcgagaagattggatcgaagaggaatgccatagagtagaagcacagctcgcactgaaggaagcacggaaggagatcaagcagctgaagcaggtgattgaaaccatgcgaagcagtctggccgacaaagataagggcattcagaagtatttcgtcgacattaacatccaaaataaaaagcttgagagcctgctgcaatccatggaaatggcacacagcgggtccctaagagatgagctctgtctggacttcccctgtgacagccccgagaagtcattaactctgaaccctcccctggacaccatggcagacggcctgagtctggaagaacaggttactggagagggggctgaccgagagctgttggtgggtgatagcatcgctaacagcacagatctctttgatgagattgtgactgcaacaaccacagagtctggcgacttggagctcgttcactcgactccaggcgctaatgtgctggagctgcttcccatagtgatgggtcaggaagagggatctgtggtggtcgagcgagctgtccagactgatgtagtgccttatagccctgctataagcgagctgatacagagtgtgctgcagaagttacaagatccttgcccaagctcgctcgcttcgccggatgagtcagaaccagattccatggaatctttcccagagtcactgtctgcccttgtggtcgacctcacaccaagaaatcccaactctgccattctgctgtcacccgtcgaaacaccgtacgccaatgtcgacgcagaggtgcatgccaacaggctgatgagagagcttgacttcgcggcctgtgtggaagaaagactcgacggggtgatacccctggcccgggggggtgtggttaggcagtattggtcaagtagcttcctcgtcgatctgctcgctgtggccgctcctgtggtacccactgtcctgtgggctttcagcacccagcgggggggcaccgaccccgtgtataatatcggtgctctcctgcgcggctgctgtgtagtcgccctgcactcgcttagacggacagcgtttagaattaagacttag

SEQ ID NO: 136992 - DNA, 414 bp, synthetic construct
  misc_feature 1..414: note = Description of Artificial Sequence: Synthetic coding sequence
  source 1..414: mol_type = other DNA
atgggaccactgcgggagtctaaaaaagaacatagagttcaacaccacgacaaggagatcagcagatcacgtatccctaggctcatactgagaccacacatgcctcagcaacaacacaaggtgtcccccgcatcggagagcccgttttctgaagaggaatcacgagaattcaacccttccagcagtggtcggtccgcacgcaccgtgtcaagtaattcattttgcagcgatgacacaggctgtccatcctcacagtctgtgtctcccgtcaaaactccgtcggatgctggcaacagccccattggtttctgcccaggtagcgatgaggggttcaccagaaagaagtgtacaatcgggatggtgggtgagggctctatccagagctctcgttataagaaagaatcaaagagctag

SEQ ID NO: 136993 - DNA, 231 bp, synthetic construct
  misc_feature 1..231: note = Description of Artificial Sequence: Synthetic coding sequence
  source 1..231: mol_type = other DNA
atgggcccgctgagggaatctaaaaaggagcacagagtgcagcatcacgacaaggaaatttccagaagtcggatcccaaggttaatattaaggccacacatgccccagcagcagcacaaagtctctccagcttccgagtcgcccttttccgaagaagaatctagagaattcaatcctagtagctcaggccgctcggcgagaaccgtttcctccaactctttctgcagctag

SEQ ID NO: 136994 - DNA, 222 bp, synthetic construct
  misc_feature 1..222: note = Description of Artificial Sequence: Synthetic coding sequence
  source 1..222: mol_type = other DNA
atgggtcccttgcgggagtctaaaaaagaacatagagtgcagcatcatgacaaggaaatctctaggtcaaggatcccccgcctcatcttaaggccacatatgccacaacagcagcacaaggtcagtccagcatccgagtcccctttctcagaagaggagtctcgggaatttaacccttcaagcagcgggagaagcgctcggacagtgtcatctaactcttag

SEQ ID NO: 136995 - DNA, 378 bp, synthetic construct
  misc_feature 1..378: note = Description of Artificial Sequence: Synthetic coding sequence
  source 1..378: mol_type = other DNA
atggtgggtgaaggatccatccagtcctcccggtacaaaaaggagtcaaagtcaggtctggttaagcctgggagcgaggcagattttagctcctccagttccacgggctcaatctccgcccctgaggtgcatatgagcaccgctggcagcaagcggagctcctcaagcagaaatagagggccccatggccggtccaacggggcctcgtctcacaagccagggtcatcaccctcgagccccagagagaaggacttactcagtatgctatgtagaaaccaactaagtcccgtgaatatacatcccagttatgcccccagctcccccagctcatcgaacagcggatcctataagggctcggattgtagccctatcatgtag

SEQ ID NO: 136996 - DNA, 1635 bp, synthetic construct
  misc_feature 1..1635: note = Description of Artificial Sequence: Synthetic coding sequence
  source 1..1635: mol_type = other DNA
atggtgggtgagggctcgatacagagctcacgttacaaaaaagaatcaaagagcggccttgtgaaaccgggatccgaagcagacttttcttcaagttctagtacagggtccatctcggctcccgaggtacatatgtctactgctggaagcaagcggagttcctcatctagaaaccgggggccccacggaagaagcaacggagcatcgagccacaaaccaggctcgagccccagcagcccgcgcgagaaagacctcctgtccatgctgtgcaggaatcagttgagcccagtcaatatacacccatcttacgccccctcctccccctcatctagcaattcgggatcctacaaaggaagcgactgctctcccataatgagacggagtggccggtacatgtcctgtggggaaaatcacggcgtcaggcctcccaatcctgagcaataccttactccactccagcagaaggaagtcaccgtacgtcacctcaagactaagctgaaggaatccgagcggaggctgcatgagcgggagagtgagatcgtggaattgaagagtcaactcgcaagaatgagggaagactggatcgaggaggagtgtcacagagtggaagcccagctggctctaaaagaagctaggaaggagatcaagcaattgaaacaagtgatcgagacgatgcgctcttccctcgcagacaaagacaaaggcattcagaagtatttcgtggacatcaatatccaaaataagaagttggaatctctcttacaatcaatggaaatggctcactctggaagcttaagagatgaactttgtttagactttccctgcgatagcccggaaaagagcctcaccctcaatccaccactggatactatggctgatggccttagccttgaggaacaggttacgggtgaaggtgctgatcgagagcttctggttggcgactccattgctaactcgacggacctgttcgatgaaatagtgacagccaccacaaccgaatccggcgacctggagttagtgcactctacccctggcgccaatgtgttggagctactacccatcgtcatgggacaggaagaaggcagcgttgtcgtcgagcgcgccgtacagacggatgtcgtgccatactcgcctgcaatctctgagcttatccaatctgttctgcaaaaactgcaggatccctgccctagctcattagcctcccccgatgaatcggagcctgatagtatggagtctttcccagaatccctgtccgcactagtggtggacctcactcctcgtaatccaaactcagccatcctgctgagccccgtggaaacgccatacgcaaatgtcgatgcagaggtccacgccaatcgtctgatgcgtgagttggacttcgccgcttgcgtggaagagagactggatggtgtcattccgttagctcgggggggcgtagtgaggcaatactggtcatccagctttctggtagatctgctcgcagtcgcagcccccgtggtgcctaccgttctgtgggcattcagtacacaacgtgggggcactgacccagtctacaacatcggcgccctgctccgggggtgttgtgtcgttgcacttcacagcttgagacggactgcctttcgtattaaaacgtag

SEQ ID NO: 136997 - DNA, 243 bp, synthetic construct
  misc_feature 1..243: note = Description of Artificial Sequence: Synthetic coding sequence
  source 1..243: mol_type = other DNA
atggtgggggagggatcaatccaatcatcacgctacaaaaaagagtctaaatctggactggtgaaaccagggtccgaagcagatttctcatcttcatcaagcactgggagcatcagtgccccagaggtccacatgtctaccgccggctcaaagagaagcagttcttctcgcaacagaggcccccacgggcgatctaacggcgccagcagtcataagccgggtagttctccctcgtctccttag

SEQ ID NO: 136998 - DNA, 1989 bp, synthetic construct
  misc_feature 1..1989: note = Description of Artificial Sequence: Synthetic coding sequence
  source 1..1989: mol_type = other DNA
atgggaccattgagagagtccaaggaacatagggttcaacatcatgataaggagattagccgctctaggatcccacggttgatcttgcgcccacacatgcctcaacagcagcataaggtctcaccggcgtccgaatcacccttcagtgaagaagaaagtagagaatttaacccgagttccagcggacgatcagcacggaccgtatccagcaactccttttgttctgacgatacgggatgtccaagctcccaatccgtgtccccggtcaaaacccctagcgatgccggcaactcccccatcggtttttgcccaggaagcgacgagggttttactcggaagaagtgtacaataggaatggttggagaggggagtatccaaagctctcggtacaaaaaggaatcaaaatctggactggtgaaacctggaagtgaggcggacttctcaagctcatcatcgacgggctcgatctctgccccagaagtgcatatgagcactgccggtagcaagcgatcttcaagttctcgaaataggggcccgcacggtagatctaatggggcttcttcacacaagccaggcagcagcccatcctccccacgagaaaaggatctgctatcgatgttgtgtaggaatcagttgtcaccggtgaatattcatccgtcatacgcccctagtagccccagcagctcaaactcgggcagctacaaaggttccgactgttcacccattatgagaaggtcagggagatatatgagctgcggcgagaatcacggcgtgcggcccccaaaccccgagcagtacctaacccctcttcagcagaaagaagtaaccgtgcgacatctgaagacaaagctgaaagagtctgaacgtcggctccatgaacgagagtcggaaattgtcgaacttaaatcccagttggcccgaatgcgggaagactggatagaggaggagtgccacagggttgaggcacagttagccctgaaggaagccaggaaggagatcaaacagctcaagcaggtgattgagaccatgcgctcatcgctggctgataaggacaagggcattcagaaatacttcgtggatataaatatccagaacaagaaacttgaatctctgctccaatcaatggagatggcacattccggctctctgagggacgaactatgccttgattttccttgcgatagccctgagaagtcactcacgctcaaccctccgctggatactatggcggatggactctctctggaggaacaggtgaccggcgaaggcgccgatagggaactgctcgttggcgactcaatagctaattctaccgatctgttcgacgagatcgtgaccgcgaccaccacggagtcaggggatcttgaactggttcactccacacctggcgcaaacgtcctggaactgcttcctatagtaatggggcaggaagagggttctgtggtggtcgagagagcagtccaaaccgacgtcgttccttacagtccagccatctcagagcttatccagagtgtgctgcagaagttgcaggacccgtgcccatccagcctggctagccccgatgaaagtgagcccgacagcatggagagctttccggaatccttgtccgcgctggtggtcgatttaaccccccgcaatccaaatagcgccattcttctttcaccagtcgagaccccatacgccaatgtcgatgccgaagtccatgccaatcgtctcatgcgtgagctggatttcgctgcatgcgttgaggagaggttggacggagtgatccccctagccaggggcggggtagtgagacagtactggagttctagtttcctggtggacctgctggcggttgccgcaccagttgtgcccaccgtcttatgggcattttccacccaacggggaggcacggatcccgtatataatattggagctctgcttcgtggttgctgtgtggtggctctgcattctctgaggcgaaccgcattccggatcaaaacatag

SEQ ID NO: 136999 - DNA, 288 bp, synthetic construct
  misc_feature 1..288: note = Description of Artificial Sequence: Synthetic coding sequence
  source 1..288: mol_type = other DNA
atggggccactgagggagagcaagaaagaacatcgcgtacaacaccatgacaaagaaatttccaggagtcggatacctaggctcatcctccgcccccatatgccacaacagcagcacaaggtttctcccgcctcagaaagtccatttagtgaggaagaatctcgcgagtttaatccaagctcctccggacgcagcgcccggacagtctcctccaatagcttttgcagcgacgacacgggttgtccatcttcccaaagtgtgagtcccgtcaagacgccgagtgattag

SEQ ID NO: 137000 - DNA, 615 bp, synthetic construct
  misc_feature 1..615: note = Description of Artificial Sequence: Synthetic coding sequence
  source 1..615: mol_type = other DNA
atgggcccattgcgggagtcgaaagaacatcgcgtgcagcaccacgataaggagatatcacgcagccgaattccacgccttatactgagaccccacatgccccagcagcagcacaaagtctctccagcaagtgagtcaccattttctgaggaagaatctagagaattcaatcctagcagctctgggagaagcgcccggacagtgtccagtaattctttctgctccgatgatacgggatgccctagtagccagtccgtcagccctgtgaagaccccaagtgacgctggcaactctcccatcggcttttgccccggctccgacgaagggttcactcggaagaaatgtaccattggcatggtcggggaggggtcgatacagtcctctcgatataagaaagagtctaagtctggcttagtgaaaccagggtctgaggccgatttctctagctcgtcctcaactgggagcatatccgccccagaagtgcatatgtctactgccggctctaagcgaagttcaagcagcaggaacagaggaccccacgggcggtctaacggtgccagcagccacaaacctgggagtagcccatcctctcctcgggagaaggacctattgtag

SEQ ID NO: 137001 - DNA, 108 bp, synthetic construct
  misc_feature 1..108: note = Description of Artificial Sequence: Synthetic coding sequence
  source 1..108: mol_type = other DNA
atggttggagaaggaagtatacagtcttcccgatataagaaggaatccaagagtggattagtcaaaccgggctctgaggctgatttcagttccagttcttctacgtag

SEQ ID NO: 137002 - DNA, 105 bp, synthetic construct
  misc_feature 1..105: note = Description of Artificial Sequence: Synthetic coding sequence
  source 1..105: mol_type = other DNA
atggtcggcgaggggtccattcagtcgtctcggtacaaaaaggagtctaagtctggcctagtgaaacctggctccgaggccgacttctctagctccagttcttag

SEQ ID NO: 137003 - DNA, 243 bp, synthetic construct
  misc_feature 1..243: note = Description of Artificial Sequence: Synthetic coding sequence
  source 1..243: mol_type = other DNA
atggtcggtgaaggctcaattcaatcctccaggtataagaaggagagtaaatcaggtctggtcaaacctggttccgaagccgatttcagttccagctcttccacaggctccatttctgccccagaagtgcacatgagcacggcaggctccaaacgttcctcttccagcaggaatcgtgggccacatggacggtccaacggagcaagttcccataagccaggctccagcccaagcagtccatag

SEQ ID NO: 137004 - DNA, 1788 bp, synthetic construct
  misc_feature 1..1788: note = Description of Artificial Sequence: Synthetic coding sequence
  source 1..1788: mol_type = other DNA
atggggcctttctgggcgagaaaggatgacaccggatgcccctcatcccagtcggtcagtcccgtgaagactccctctgatgctggcaactctcccatcgggttttgccctggcagcgatgaggggtttactcgcaagaaatgtacaatcggaatggtgggagaaggttccatccaatcttcccggtacaagaaggagtctaaatctggtctggttaagcccggctcagaggccgacttcagttcctctagcagtactggcagcattagcgcacctgaggtacacatgagcactgccggttctaagcgatcctccagttctcgtaaccgtgggccccatggacgctctaatggagcctcatcccacaagcccggcagcagcccctcatcccccagagaaaaggacctacttagcatgttatgcagaaatcaactatcaccggtgaatatccacccatcctacgcgccgtcttctccttccagctccaatagcgggtcctataagggaagtgactgcagtcctattatgaggcggagcggaagatacatgagctgcggcgaaaaccacggagtccggcctcctaaccccgagcagtacctaaccccgttgcagcaaaaggaagtgacggtgcgacatctaaagaccaagttaaaagaaagtgagcggcgccttcacgaaagagaatctgagattgtggagctgaaaagccagctggcacggatgagggaagactggatcgaggaagaatgtcaccgggtggaggcccagcttgccttaaaggaagctcgcaaggaaataaaacagttgaagcaggtgattgaaacaatgagatccagtttggctgacaaggacaagggaatacagaagtattttgtggatattaacatccagaacaaaaaattggagagcctactgcagtccatggaaatggcccacagcggcagcttgcgggatgaattatgccttgactttccctgcgattctcccgaaaagtcgctcactctgaatccacctctggataccatggccgacgggctgtctcttgaagaacaggtgactggggaaggtgccgatagggagcttctggtgggtgacagtattgccaattccaccgatctgtttgatgaaattgtgacggcaaccacaacggagagtggtgatttagaactggttcacagcacccccggcgccaacgtgttagaactcctgcccatcgttatgggtcaggaagagggatctgtggtggtggaacgcgcggtccaaacagacgtggtgccctactcacccgccatttcggagctaatacaaagcgtcttacagaagctccaagatccttgtccatcctctttggctagtccagacgagagcgaacctgactctatggaatctttcccagaaagcctgagcgcgctggttgttgacctaacccctcgcaatcctaacagcgcgatcctcctcagcccagttgagactccatacgccaatgtggatgcggaggtccatgccaataggttgatgcgagaactcgacttcgcagcttgcgttgaggagaggctcgatggagtgatacccctagccagaggtggagtggtgcgtcagtactggtcctccagctttttggttgaccttctggcagtggcagcgcctgttgtccccacagtgttgtgggctttttcaacccagagaggcgggacagaccctgtctacaacatcggtgcactccttcgcggttgttgcgttgtcgcgctgcatagcctgcgtcgtacagcttttagaattaaaacttag

SEQ ID NO: 137005 - DNA, 1635 bp, synthetic construct
  misc_feature 1..1635: note = Description of Artificial Sequence: Synthetic coding sequence
  source 1..1635: mol_type = other DNA
atggtgggcgaaggctccatccagagctcccgctacaaaaaggagagcaaatctgggctggtgaaacccggctccgaagcagacttttcgagttcttctagtactggcagcatatccgcacccgaggtccatatgtcaactgcgggatccaaaaggtcttcctcatcccgcaatcgcggcccccatggaagatccaatggagctagctcgcacaaaccaggtagcagcccatcttcccctcgggaaaaagacctgctctccatgctgtgtcggaaccagctgagccctgtgaacattcatccgtcctatgctccatctagcccctcttcatctaactccggctcttacaaaggcagtgactgttccccaatcatgcgtagaagcggccgttacatgagttgcggcgagaaccatggagtgcgaccacctaacccagagcagtacctgacccccctgcagcaaaaggaagtgaccgtgcgacacctgaagacgaagctgaaagagagtgagcgaaggctccacgaaagagaatctgaaatagtggagttaaaaagccagttagcacgaatgcgggaggactggattgaagaggaatgtcacagagtcgaggcacagttagccttgaaggaggctagaaaggaaatcaagcagctcaagcaagtaatcgagacaatgcggagctccctagcagataaggataagggcatccaaaaatatttcgtggacatcaatatacagaataaaaagctcgaaagtctgctgcagagtatggaaatggcacatagcggcagccttagagacgagctgtgcctggatttcccttgcgatagccccgagaaatcactgaccctgaacccccctctggacactatggcagacggcctgtcactcgaagagcaggtgacaggcgaaggagcagacagggaactcctagtgggtgactctatagccaattcaaccgacctcttcgatgagatcgttacagccaccacaactgagtcgggggatctggaactggtccattccacacctggggctaacgtgcttgagcttctccccattgtcatgggtcaggaagaaggcagtgtagtagtggagagggcagtccaaacagacgtagtgccttacagcccagccatcagtgaattaatacagagcgtgcttcagaagctgcaggacccctgtccttccagccttgcctcacctgacgaatccgagcctgacagcatggagagttttcccgagtctctatcagccctggtggtcgaccttacgccaagaaatcccaacagtgcaattctcctttcccctgtggagacgccctatgcaaatgtcgatgctgaggttcacgctaatcggttaatgcgggagctcgatttcgccgcatgcgttgaggagaggctcgacggggtgatcccactcgcccggggcggggtggtgcgacagtactggagcagtagtttcttggtcgatttgcttgcagtcgctgcccccgtggtgcccactgtcctgtgggctttctcaactcaacgcggtggcacagaccctgtctacaacattggagcactccttaggggttgttgcgtagtagctttgcacagcttgcgtagaaccgcctttaggataaagacttag

SEQ ID NO: 137006 - DNA, 1992 bp, synthetic construct
  misc_feature 1..1992: note = Description of Artificial Sequence: Synthetic coding sequence
  source 1..1992: mol_type = other DNA
atgggccctcttagggagtctaaaaaagaacatagggttcaacaccacgataaagaaatttcacggtcaagaatcccgcggcttattctgcggccgcacatgccccagcagcagcataaagtgtcgccagcctcagagtcaccgtttagcgaagaagaaagtagggagttcaatcccagcagttccggtaggtctgcacgcaccgtttcatctaactctttttgttctgacgacaccggttgtccttcatcccagtctgtgagtcccgtgaaaactccatccgacgcgggcaactctcccattgggttctgcccagggagtgatgaaggatttacacggaagaagtgcacaatcgggatggtgggcgaaggttcaatacagtcttctagatataagaaggaatccaagagtgggctcgtcaaacccgggtccgaggctgatttctctagcagcagctcaactggcagcataagcgctcccgaggtgcacatgtccacagccggaagcaaacgctcgagctccagccgcaacaggggaccacacggcagatctaatggagcttcgtcgcacaaacctggtagctctccctcctcgcctcgcgagaaagacctactaagcatgctctgtagaaaccagctgagtcccgttaacatccatcctagctatgcacccagcagtccctctagttccaattctggatcatacaagggttccgactgttcccctatcatgaggagatccggccgctatatgtcatgcggagagaaccacggcgtgaggccccccaatcctgaacagtacctgacccctctgcagcagaaggaagttacagtgcggcacttaaagacgaaattgaaggagtcggagcggaggctccacgaacgagagagcgagatcgtggagctcaaatctcaattggcccgtatgagggaggattggatcgaggaggagtgccatcgagttgaagcacagctcgccctgaaggaagctcgaaaagagattaaacagctaaagcaggtgattgaaaccatgcgctccagcctggccgataaggacaagggcatccagaaatactttgtcgacatcaatatccagaacaaaaaactggaaagcctgctgcaatccatggaaatggctcactctggatcacttagagacgagctctgtctagatttcccatgcgattccccagagaaaagtctcaccctgaaccctcccctggacaccatggccgacggcctaagcctggaggaacaggtcactggcgaaggagccgatcgtgagctgcttgtgggagactctattgcaaactcgaccgatcttttcgacgaaattgtgacagccactacaacagagtctggcgacctggagctcgtgcattccacaccaggcgctaatgttctggaactcctccccattgttatggggcaggaggaaggctctgtggttgtggaaagagctgttcagacggacgtggtaccctacagcccggcaatatctgaactgatccaaagcgtgttacagaagcttcaggacccctgccctagttccctcgcctcccctgatgagagtgaacctgattccatggagagtttcccagagtctctttcagcactggttgtcgatctaaccccacgcaatcccaattcggcaatcctactatcccccgtagagactccatacgcaaatgttgacgctgaggtgcatgccaaccgcctgatgcgtgagctagactttgctgcctgcgtagaggaacgactcgacggcgttatccctctggctcggggcggggttgtgaggcagtactggagctcttcctttttggtggacctgctggcagtagccgcgcctgttgtccccacagtgctgtgggcgtttagtacgcagagagggggcacagatccagtgtataacattggcgctctgttacggggatgctgtgtggtagcgctgcatagcctgagacgcaccgcatttcgcattaagacatag

SEQ ID NO: 137007 - DNA, 489 bp, synthetic construct
  misc_feature 1..489: note = Description of Artificial Sequence: Synthetic coding sequence
  source 1..489: mol_type = other DNA
atgggcccactacgggaatctaaggagcatcgagtgcagcaccacgataaagagatttcgcgctcacgcattccgcggctcatactccggccacatatgccacagcagcaacataaggtgtcgcccgcctcagagagcccattctcagaggaggagtcaagagagttcaatcctagcagctccggccgttccgcgcgcacagtttcctctaatagcttctgctccgacgatacggggtgcccctcgtcccagtctgtctcccctgtgaagactccatcagacgcaggcaatagccctatcgggttttgccctggtagcgacgaaggttttaccagaaagaaatgtactattggcatggttggggaggggtcaatccaatcatctagatacaagaaagagtccaaatccggcctagtgaagcccgggtccgaagctgatttctcgagttccagttctacaggcagcatcagtgcccccgaggtccattag

SEQ ID NO: 137008 - DNA, 1989 bp, synthetic construct
  misc_feature 1..1989: note = Description of Artificial Sequence: Synthetic coding sequence
  source 1..1989: mol_type = other DNA
atgggacccctgcgtgagtctaaagagcatcgtgtccagcatcacgataaagaaatatcccgcagtcgaattcctaggctcatactgcgcccccatatgccacagcagcaacataaagtgtctccggcgagcgaaagcccattttctgaggaggaatctcgagaatttaacccttcttccagcggccgctccgcgagaacggtgtcgtccaactctttttgctcagacgacaccggctgtccatcgtcccagagcgtgagcccggtaaagacacccagcgacgctggaaatagccccatcggcttttgcccagggtcagacgagggttttacacgaaagaagtgtactataggcatggtcggtgagggcagcatccaaagttcccgctacaagaaagaatcaaaaagcgggctggttaagcctggctcagaagccgattttagctccagctcctccacgggatctattagtgccccagaggtccacatgtccaccgcagggtctaaaagatcaagttcgtctaggaatagaggaccccacggccgttccaacggggcaagctcccacaagcccggctcttccccctcatctccacgcgaaaaggacctgttgagcatgctttgccggaaccagctcagcccagtaaacatccatccttcttacgcacccagctctccttcaagttccaactctggatcctacaagggatccgactgctcccccatcatgcgacgctctgggaggtatatgagttgcggcgagaatcatggtgtgaggcctcccaaccccgagcagtacctcacgccactacagcaaaaggaagtgactgtcaggcatctgaagacaaaacttaaggagagtgagagacggttgcacgagagagagagcgaaatcgtggagttgaagtcacagctcgcccgaatgagagaagattggattgaggaagagtgccaccgggtagaagcacagctggcactgaaggaagctcgcaaagaaatcaaacagctcaaacaagttatcgagacaatgcgctcgtccttggccgacaaagataaaggtatccagaagtacttcgtcgatatcaatatacaaaataagaaactggaatcactgttgcagtcaatggaaatggcccactcaggtagcctccgcgacgaactgtgtttagactttccctgcgacagcccagagaagtctcttacgctcaatcctcctcttgataccatggcggatggactctcattagaggaacaggtgacgggtgaaggcgcagaccgggagctcctcgtaggagacagcatcgccaatagcacggatttatttgacgagatcgtcacggctactactacggagagcggtgacttggaactggttcacagcacaccaggggcaaacgttctagagctgttgccgatcgtgatgggtcaggaggagggctccgtggtggtggagcgggccgtgcagacggacgtggtgccttacagccccgccatcagtgaactgatacaaagcgtgctgcaaaagctacaggacccttgtccatccagtctagccagccctgatgaatcagaacccgactctatggagtcctttcctgagtctctgtctgctttagtggtcgacctgactcccagaaaccctaactccgcaatcctcctgagccctgtcgaaacaccctacgcaaacgtggatgccgaggtgcacgcgaatcggttaatgcgcgagctggatttcgcggcttgtgtcgaggagagattggacggtgtcatccctctcgcccggggaggcgtcgtcagacagtactggtccagctcattcttggtcgatctgctggctgtggcagcccctgtggtccccaccgtgctctgggccttcagcactcagcgcggtgggacagatccggtttacaacattggggccctgttacgcgggtgctgtgtggttgccctccacagcctgcgacgaaccgcatttcgaatcaagacatag

SEQ ID NO: 137009 - DNA, 315 bp, synthetic construct
  misc_feature 1..315: note = Description of Artificial Sequence: Synthetic coding sequence
  source 1..315: mol_type = other DNA
atgggacccttgagggagagcaaggaacaccgtgtgcaacatcatgataaggagatttcaaggagtaggatcccccggctgattctacgaccgcacatgccacagcaacagcacaaagtgagtcccgctagcgaatcccctttcagtgaggaggaatctagggagttcaatcccagctcttccggacggtcagctcggaccgtaagtagtaactctttctgctccgatgacaccgggtgccctagcagccagtccgtcagccccgtgaagacaccgtcagatgcgggcaactcccctattggcttctgcccctag

SEQ ID NO: 137010 - DNA, 456 bp, synthetic construct
  misc_feature 1..456: note = Description of Artificial Sequence: Synthetic coding sequence
  source 1..456: mol_type = other DNA
atggggccgctcagagagtccaagaaagagcatcgagtccagcaccacgataaggagatttcccgtagccggattccccggttaattttgcgcccccacatgccacagcagcagcacaaagtcagccctgcaagtgaatcccccttttcagaagaagagagcagggaattcaacccgagttcaagcggcagaagcgccaggaccgtatcctcaaactcgttttgtagcgacgataccggttgcccttcttcccaatctgtatcacctgtcaagacaccatctgacgccggtaactcaccaatcggcttctgtccgggttctgatgaggggtttacgcggaaaaagtgtaccatcggcatggttggtgagggctccatccagagctctcgttacaagaaagaaagcaaaagcggccttgtcaaaccggggagtgaggcggatttctctagctcctag

SEQ ID NO: 137011 - DNA, 231 bp, synthetic construct
  misc_feature 1..231: note = Description of Artificial Sequence: Synthetic coding sequence
  source 1..231: mol_type = other DNA
atgggaccgctgcgggaaagtaaaaaggaacacagagtacagcatcacgataaagagataagtcggagtcggatcccccgtctgatactacgcccacatatgccgcagcagcagcacaaggtgagccctgcctccgaaagccctttctctgaagaagagagcagggaattcaaccccagtagctctggtaggtccgctaggactgtttcaagtaatagcttctgcagctag

SEQ ID NO: 137012 - DNA, 1617 bp, synthetic construct
  misc_feature 1..1617: note = Description of Artificial Sequence: Synthetic coding sequence
  source 1..1617: mol_type = other DNA
atgccaggcagcggtcccagcgaacggatgacatggcctggccccgccctgagcgccggccctcctacacgcccactgtcgagcgcccctggaatacccccaatcccccccctcacccgcacgcacagtctgatggccatgagcctccccggatcgagacgcaccagtgccggctctcggagacgaacaagccccccagtttcggtgagagatgcttacggaacttcgtcacttagcagttcttcaaatagtggaagttataaagggagcgattccagtccaaccccccggaggtccatgaagtatactttgtgcagcgataaccacgggattaaaccaccgacacctgaacaatatttgacgcctctccaacaaaaagaagtgtgtatcaggcatctaaaagcgcgcctaaaagatacgcaggaccgacttcaggacagagacactgaaatagacgacttaaaaacacagctgagccggatgcaggaggattggatcgaggaggaatgtcaccgtgtggaggcccagctcgccctgaaagaagccaggaaagagattaaacagcttaaacaggtcattgacactgtgaaaaataatctgatcgataaagataaaggattgcaaaagtacttcgtggacattaacatccagaacaagaaattggaaaccctgcttcattccatggaagtcgcccaaaatgggatggccaaagaagacgggaccggggaatcagcgggcggctcaccagcaagatctttaacacggtcctctacctatactaagctgtcagaccccgctgtatgcggagataggcagcccggtgatccaagctctggctccgcagaggacggcgccgacagtgggttcgctgccgccgacgacaccctgtcacgcacagatgcgcttgaggcaagtagcctactaagttctggagtggactgtggcacggaagaaacctcactgcactcctcctttggactggggccaaggttccccgcctccaatacctatgagaagttgttgtgcggaatggaggccggggtacaggctagttgcatgcaagagcgcgctattcagaccgattttgtgcagtaccaaccagacttagacacaattctggagaaagtgacccaggcgcaagtctgcggcacagatcctgaatcaggggaccggtgccccgaactcgatgcccacccatcaggcccaagggacccaaactccgccgtggtcgttaccgtgggagacgaactggaggctcccgagcccattacccggggacctacgcctcagcggcccggagctaatccgaaccctggacagtccgtcagtgtagtgtgtcccatggaggaggaggaagaagccgccgtggccgaaaaggaaccaaaatcgtattggagccgccactatatcgtggacctgctggcagtggtcgtaccagctgtgcccacagtggcctggctgtgccggtctcagcggaggcagggccagcccatctacaacatctcttcacttctcaggggctgttgtaccgtagccctccattctattcgcagaatatcatgtcgcagtctgagccagccaagtccatcaccagccggcgggggaagccagctgtag

SEQ ID NO: 137013 - DNA, 1485 bp, synthetic construct
  misc_feature 1..1485: note = Description of Artificial Sequence: Synthetic coding sequence
  source 1..1485: mol_type = other DNA
atggcaatgtctctccctggttcacggaggacatctgcagggagtagacggagaaccagccctcctgtatctgtaagggatgcatacgggacgtcatcgctctccagctcatctaatagcggcagctacaaggggagcgactcttctccaaccccccgcaggagcatgaaatacaccctgtgctccgataatcacgggatcaagccaccaacgcctgaacagtatctgacccctcttcagcagaaagaagtgtgcatccggcacttaaaagctaggcttaaggatactcaggaccgcttgcaggatcgtgatacagaaatcgacgacctgaagacgcagcttagtcgcatgcaagaggactggatcgaggaggaatgccaccgggtggaggcccagttagctttaaaagaagccagaaaggaaatcaaacaactgaaacaggtgatcgacactgtaaaaaacaacctgatcgataaagataaaggactgcagaagtacttcgtagatattaatatacaaaacaaaaagctggagacactgctacactccatggaggtagctcagaatggtatggccaaagaagatggcacaggtgaatcagccggtggtagcccggcacggtcactgaccaggtcatctacctatacaaagctcagtgatcctgctgtgtgtggagaccgtcagcccggcgatcccagcagcggatcggccgaggacggtgctgattccggattcgccgccgctgacgacactctgtcccgcactgatgctctggaggcctcatcgttgctttcgtctggtgtggactgtggcacggaggaaaccagtctgcacagcagttttggcttgggcccccggtttccggctagtaatacctacgagaagttgctgtgtggaatggaagcaggagtgcaggcttcctgcatgcaggagcgggccatccagactgacttcgtgcaataccagccagacctggacacaatcctcgaaaaagtgacacaggcgcaggtgtgtggaacggatccagagagcggtgacaggtgtccagaattggacgctcatccttcgggccctagggacccaaattccgccgtcgtggtcacagtgggcgacgagttggaagcccccgagccaatcacgaggggaccaactccccaacggcctggtgctaacccaaatccaggtcagtctgtcagcgtggtctgtccaatggaggaagaagaggaggctgctgtggctgagaaggagccaaagtcgtactggtctcgacactatattgtcgacttactggctgtcgtagtgcccgccgtgcccacagtcgcttggctgtgtcgatcgcaaaggaggcagggacagcctatttataatataagcagcctgttgagaggctgctgtacagtggcattgcattcaattaggcgcatttcgtgcaggagtctatcacagccctctccttcccctgccggagggggaagccaactgtag

SEQ ID NO: 137014 - DNA, 864 bp, synthetic construct
  misc_feature 1..864: note = Description of Artificial Sequence: Synthetic coding sequence
  source 1..864: mol_type = other DNA
atgaaagacagactggcggaattgctggacctgtctaaacaatatgatcagcagtttcccgacggcgacgacgaatttgatagcccacatgaagatatagtttttgaaaccgaccacatactggaaagcctctatagggacattcgagacatacaggatgaaaatcaactgctcgtggccgacgtgaagcgattggggaaacaaaatgcacggtttctcacatcaatgcgaaggctgagcagcattaagcgggacacgaattctatagccaaggcaatcaaagcccgtggcgaggtcattcactgcaagctgagagccatgaaggagctttcagaggcagctgaggctcagcatggcccccattcagcagtggcaaggatttctcgggcccaatacaatgctttgactcttactttccaacgcgccatgcacgactacaaccaggctgaaatgaagcagagagacaactgcaagattagaattcagaggcagttggaaattatgggcaaggaagtctcaggagatcagatagaagatatgtttgaacagggaaagtgggatgtcttttcggagaacctgcttgcagatgtgaagggagcaagagccgctctgaacgagatcgagtcgcgccacagggaactcctgaggctcgagagtaggattcgcgatgtgcatgagctatttttgcagatggctgtcctggtagagaagcaggcggacaccctgaacgtgattgaattaaacgtccagaagactgttgactataccgggcaggccaaggcacaggtgcggaaagcagttcagtatgaggagaaaaatccttgtagaactctctgctgcttctgttgcccctgtctaaaatag

SEQ ID NO: 137015 - DNA, 615 bp, synthetic construct
  misc_feature 1..615: note = Description of Artificial Sequence: Synthetic coding sequence
  source 1..615: mol_type = other DNA
atggccctggtgagcggtataagcttagaccctgaagcggccataggtgtaacgaaacggccgcctcctaaatgggtagatggggtggatgaaattcagtatgacgttggccgaatcaagcaaaaaatgaaggagctggcgtctctgcacgacaagcacctgaaccggccaactcttgacgacagctccgaggaagagcatgctatagaaataaccacgcaggaaattacccaactatttcatcgctgtcagagggctgtgcaagctcttccttctagggcaagagcatgtagcgaacaagagggccgtctgctgggcaacgtcgtcgcctccctcgcccaggctctccaggagctctctacgagctttcgacacgctcaatctggatatctgaagcggatgaagaaccgggaggagagatcacagcactttttcgacacgtctgttccactgatggatgatggggatgataatacactgtaccatcgcgggttcacagaggaccagctcgtcctggtggaacagaacactctgatggtggaggaaagggaacgtgaaatcaggcagatcgtgcagtctatctccgaccttaatgaaattttccgagatttgtag

SEQ ID NO: 137016 - DNA, 927 bp, synthetic construct
  misc_feature 1..927: note = Description of Artificial Sequence: Synthetic coding sequence
  source 1..927: mol_type = other DNA
atggcgacccggcgtctaaccgatgcatttttgctgttaaggaataacagcatccagaacagacagctcctggctgaacaggagctcgacgagctggcagacgaccggatggcacttgtgagcggcatcagtctggaccccgaggctgctataggcgtgacaaagcggcctccacccaagtgggtggacggagtagacgaaatccagtatgatgtgggcaggatcaaacagaagatgaaggaactggcctccctccacgataaacatctcaatcgacccaccctggacgacagttctgaggaagaacatgcgatcgagataaccacccaggagattacacaactcttccacagatgccagagagctgttcaggcactccccagtcgagcgagagcctgtagcgaacaggaaggacgattgcttggcaacgtggttgctagcttggctcaggccctgcaagagctgtctacatcatttcgtcatgctcagagtggatatctgaaacggatgaaaaacagggaggagagatcccagcacttcttcgatacaagtgtgccactcatggatgatggggacgacaacaccctgtaccacagaggctttaccgaagaccagctggttctggtggagcagaacaccctgatggtagaggagagggagagggagattcgccaaatcgtgcagtccatctctgacctgaacgaaatcttcagggatctgggggcaatgatcgtagaacaggggaccgtgttggaccgcattgattacaatgtggaacagagttgtattaagacagaggatggcctgaagcagctgcataaggccgaacagtaccaaaagaagaatagaaaaatgcttgtgattctgatcctctttgtgattattattgtgctaatcgtcgtcttggtgggtgttaagtcacgttag

SEQ ID NO: 137017 - DNA, 966 bp, synthetic construct
  misc_feature 1..966: note = Description of Artificial Sequence: Synthetic coding sequence
  source 1..966: mol_type = other DNA
atggccactcgccgtcttaccgatgcattcctattgcttcgcaataactctatccaaaaccggcagctattagctgaacaggtcagtagccacatcacctcaagcccacttcactcgcgatctatcgccgcactcgctgacgatcgtatggccctcgtgtcggggattagtctcgatccggaggcagcaataggggtcacaaagcgaccgccaccaaaatgggtggacggcgtagatgagattcagtatgatgtggggaggatcaaacaaaagatgaaagagctggcttcactacacgataaacacctcaaccgacccacactagacgattcctcagaggaggaacatgccatcgagattacaacacaggagattacccagctgtttcacaggtgtcagcgggctgtgcaggccctcccatcgagggccagagcttgtagtgagcaggagggccggctgctgggaaatgtagtggcctccctggcacaggcactccaggagctgagcacctcctttaggcatgcgcagtcaggctacctgaagcggatgaaaaatcgcgaagagcggtctcagcacttttttgatacctcagtccccctgatggacgacggcgacgataacaccttgtaccacaggggctttactgaggaccaactggtgctggtggaacagaacacactcatggtggaagaacgagagagagaaattaggcagattgtccaatctatctccgacttaaacgagattttcagagatttaggggccatgatagtggagcaggggacagtcttagacaggatagactacaacgtcgaacaatcctgcattaagacggaagacggcctgaagcagctgcataaagccgagcagtatcagaaaaagaacagaaagatgctggtgatcctgatcttgtttgtcataattattgtgctaatcgtggtcctggtgggagtgaaatctaggtag

SEQ ID NO: 137018 - DNA, 756 bp, synthetic construct
  misc_feature 1..756: note = Description of Artificial Sequence: Synthetic coding sequence
  source 1..756: mol_type = other DNA
atggctttggtttctgggatatcactcgatccagaggcagcaattggcgtaactaaacgcccaccacccaagtgggtggacggagtggacgaaattcagtatgatgtgggtagaatcaagcagaagatgaaggaactcgcttctctccacgataaacacctgaatcggcccactcttgacgactcaagcgaagaggaacacgctatagaaattactacgcaagagattacccagctctttcatcgatgtcaaagggccgtgcaggcgctacctagcagagctcgcgcctgtagcgagcaggaagggagattactcggcaacgtggtcgctagcttggcccaggccctgcaggaactgtctactagttttcgccatgcccagtccgggtacctcaagcgcatgaaaaatagagaggaacgctcgcagcatttcttcgataccagcgttcccttgatggatgatggcgacgacaatactctgtatcaccggggttttaccgaagaccagttagtgctcgtagagcagaacaccctaatggtggaagagcgggagcgcgaaatccggcagattgtgcagtccatctctgatcttaacgaaatctttcgagacctaggggccatgattgtggaacagggtactgtacttgaccgcattgactacaacgtagaacagtcttgtattaagaccgaggatggactgaagcagctccataaagccgaacagtaccagaagaagaaccggaaaatgttggtgtag

SEQ ID NO: 137019 - DNA, 927 bp, synthetic construct
  misc_feature 1..927: note = Description of Artificial Sequence: Synthetic coding sequence
  source 1..927: mol_type = other DNA
atggctactcgccgtctgaccgatgcctttctcctgctgcgcaataattctattcagaataggcagctactagccgaacagcagctgtctaaactggctgacgacaggatggcactcgtttcaggaataagcttggatccagaagccgccatcggggtgaccaaaaggccccccccaaagtgggttgatggggtcgacgagattcagtacgatgttgggcgtatcaagcaaaaaatgaaggaactcgccagcctgcatgataaacacctcaaccgacctactctggatgatagcagcgaagaggagcacgctatcgaaattaccactcaggagataacccagctttttcatcgctgccagcgcgctgtccaggccttgccaagtcgagctcgagcatgctcggagcaggagggtcggcttcttggtaatgtcgtcgcctctctcgcccaggcattgcaggaattaagcacctcgttccgccatgctcaaagcggatatttaaaacgtatgaagaacagggaggagcgcagccagcattttttcgacacttctgtcccactaatggatgacggcgacgataacacattatatcatcgcggatttaccgaagaccaattagtgttagttgaacaaaacacattgatggtggaagaaagagagagagagattcgtcagatagtgcagagcatatctgatcttaatgagatcttcagggacctaggggccatgatcgtcgaacaagggacagtcctagatcgtattgattataatgtcgaacagtcatgcatcaagacagaagatggcctgaaacagctccataaggcggagcagtaccagaagaagaacagaaaaatgctagttatcctgatcctgtttgtcatcataatcgtgctgatagtggtcctggttggtgtcaagtctagatag

SEQ ID NO: 137020 - DNA, 978 bp, synthetic construct
  misc_feature 1..978: note = Description of Artificial Sequence: Synthetic coding sequence
  source 1..978: mol_type = other DNA
atggcaacacgccggctcactgacgcattcttactgctccgcaataactccattcagaataggcaactgctcgccgagcaggtctcttcgcacataacttcttctccactccactccaggagtatcgccgcagctcttgatgaattagccgacgatagaatggcactggtttcagggattagcttggatcccgaagccgctataggtgtcactaagcgcccacccccgaagtgggtcgacggggtagatgagatacagtacgacgttggcaggataaagcaaaaaatgaaagaactcgcttcgcttcacgacaaacacctgaaccggccaaccttagacgactctagcgaggaggaacatgcaatagagataaccacccaggaaatcacgcagctgtttcacaggtgtcagagggctgtccaggcgctgccttccagagccagggcctgcagcgagcaggagggccggttgctcggcaacgtagttgcttcccttgcccaggccctacaggagctgagcacaagtttccggcacgctcagagcggttatctcaagagaatgaaaaatagggaggagcgctcccagcatttctttgacacctccgtgcctctgatggatgatggagatgacaatactttgtatcacaggggctttacagaagaccagctggtgctcgtggagcagaatacactgatggtggaggagcgggagcgcgaaatcaggcaaattgtgcaaagtatttccgaccttaacgagatcttccgtgatctgggcgcaatgatcgtggagcagggtacggtgctagatcgtatcgattataatgtggagcaatcctgcattaaaaccgaggatggactcaaacagctacataaggccgagcagtatcagaagaaaaataggaaaatgctcgtaatcctgatcttatttgtcatcatcattgtgctaattgtggttctggtgggcgtgaaatcccggtag

SEQ ID NO: 137021 - DNA, 915 bp, synthetic construct
  misc_feature 1..915: note = Description of Artificial Sequence: Synthetic coding sequence
  source 1..915: mol_type = other DNA
atggctacccgtcgtctgaccgacgctttcttactgctgcgcaacaactctatccagaacaggcaattactggctgagcagctcgccgatgaccgcatggccctcgtgagtggtatttcgttggacccagaggccgcgattggtgttacaaagagacctccacctaagtgggttgacggcgtcgacgagatccagtatgacgtcggtcgcattaagcagaagatgaaggaacttgcttccctgcacgacaaacacttaaaccggcctactcttgatgactctagtgaggaggaacacgcgatcgagattaccacccaggaaatcacacaactgtttcatcgctgccaacgggcagtgcaggccctgccttcacgcgcgcgcgcctgtagcgagcaagaaggtcgtctgctgggcaatgtagtggctagcctggcgcaggccctccaagagctgagcacctcttttcgccacgctcagagcggatatttgaaacggatgaagaatagggaagagagatcccagcacttctttgacacgagcgtccctctcatggatgatggggatgacaacacactgtaccacaggggtttcacagaggatcagcttgttttggtggaacagaatactttaatggtagaggaacgcgaacgcgagattcgtcagatcgtgcagagcatcagcgatctgaacgaaatttttcgggacttgggcgccatgatcgtggaacagggcacggtgctcgatcgcattgactataatgtcgagcagtcttgcatcaagacagaagatgggctgaaacagcttcacaaggccgaacagtatcagaagaagaatcgcaagatgctggtcattctcatcctgttcgtaatcataatagttctaattgtggtcctggtaggagtcaagtcacgctag

SEQ ID NO: 137022 - DNA, 819 bp, synthetic construct
  misc_feature 1..819: note = Description of Artificial Sequence: Synthetic coding sequence
  source 1..819: mol_type = other DNA
atggctctggtgtcaggtatctctctggaccccgaagctgctattggagttaccaagagacctcctcccaagtgggtggatggtgtcgacgagatccagtacgacgtgggaagaattaaacaaaagatgaaagaattagcttctctgcacgataaacacctcaaccgacccacgctggacgacagttctgaggaggaacacgcaatcgagatcacaactcaagaaattacccaactctttcatcgctgccagcgggccgtgcaagcacttccaagcagggctcgggcctgcagcgaacaggagggaagactcttaggtaatgtggtcgcatctctggctcaggctcttcaggagctgagcacttctttcagacacgcacagtctggctatctgaagaggatgaaaaatagagaggaaaggtcacagcacttcttcgacacatcggtgcctttaatggacgacggagacgataacacgctgtatcaccgcggattcacagaagatcaattagtgcttgtagaacagaacaccctcatggtggaggaacgtgaacgcgaaatccgacagattgttcagagtattagtgacctcaacgagattttccgagatctcggagccatgatcgtcgagcagggcacagtgctagaccgcatcgattacaatgtagagcagagctgcattaagaccgaggacggtctcaaacaactgcataaagctgaacagtatcaaaaaaagaatcgaaagatgctggtgattcttatacttttcgtgatcatcatcgtcctgatcgtcgtcctggtcggtgtgaaatccagatag

SEQ ID NO: 137023 - DNA, 978 bp, synthetic construct
  misc_feature 1..978: note = Description of Artificial Sequence: Synthetic coding sequence
  source 1..978: mol_type = other DNA
atggctacaagacgtctcacagacgccttccttttactgcgtaacaactctattcagaacagacaattgctggccgaacaggtttcaagccatatcacctcctctcctctccacagccggagtatcgcggccgaacttgatgagttagccgatgataggatggcgctagtgagcggaatttccctggatcccgaggctgctatcggcgttactaaacggccacctcccaagtgggtggacggggtggatgaaattcagtatgatgtcggtaggatcaagcaaaaaatgaaggagctcgcgagcctgcatgataaacacctcaaccgaccgaccctggacgactcctctgaggaagagcacgcgatagagattacaacccaagagattacccagctgttccatagatgtcagcgcgctgtccaagctctgccatctcgcgcaagagcatgttccgagcaagaaggacggctcctcgggaacgttgtggcctccctcgctcaggccttgcaggagctcagtactagctttcggcatgcccaatccggttacctgaagagaatgaaaaaccgagaagaacgctcacagcatttttttgataccagcgtgccgctgatggacgacggagacgacaacacgctttatcaccgtgggttcactgaagaccagcttgttcttgttgaacagaacacgttaatggtcgaagaaagggagagagaaattagacagattgtgcaatcaatcagtgacttgaacgaaattttccgcgatctcggcgcgatgatcgtggaacagggtactgtcctggatcgtatcgattataacgtggagcagagctgcatcaagaccgaggatggcttgaagcagctgcataaggctgaacagtaccagaagaaaaataggaaaatgttggtgatcctcattctatttgtgatcattattgtgcttatagtggtccttgtgggcgtgaagtcaaggtag

SEQ ID NO: 137024 - DNA, 366 bp, synthetic construct
  misc_feature 1..366: note = Description of Artificial Sequence: Synthetic coding sequence
  source 1..366: mol_type = other DNA
atggcacttgtaagcggcatctccctggatccggaggccgctatcggcgtgacaaaacgtccccctccaaaatgggtggatggcgtagacgagattcaatacgacgtgggccggatcaaacaaaagatgaaagaactcgcaagccttcacgacaagcacttgaaccggcctacactggatgattcttctgaggaggaacacgcaattgagatcaccacccaggagatcactcagctgtttcacagatgccagcgcgcggttcaggcactacccagtcgggcccgggcatgcagcgagcaggagggccggctcctcggcaacgtggtcgcctccctggctcaggcccttcaggaactcagcacgtag

SEQ ID NO: 137025 - DNA, 420 bp, synthetic construct
  misc_feature 1..420: note = Description of Artificial Sequence: Synthetic coding sequence
  source 1..420: mol_type = other DNA
atgaaaaacagagaggagcggagccaacattttttcgacaccagcgtgccattgatggatgacggagatgacaacaccctataccacagggggttcaccgaggaccagttggtgctggtcgagcagaataccctgatggtggaagagcgggagagagaaatccgtcagatcgtgcagtcgatatcagatctcaacgaaatcttcagggatctgggcgcaatgatcgtcgagcagggaaccgtgcttgaccgcattgactacaacgtcgagcaatcatgtatcaagactgaggacggactgaagcagctccacaaagccgagcagtatcagaaaaaaaacagaaagatgcttgtgatcctgatcctattcgtaatcattatcgttcttatagtggtattggtgggcgtgaagagtcgatag

SEQ ID NO: 137026 - DNA, 660 bp, synthetic construct
  misc_feature 1..660: note = Description of Artificial Sequence: Synthetic coding sequence
  source 1..660: mol_type = other DNA
ggaatttcactggatcctgaggcagccattggcgtgacaaaaagacccccccccaagtgggtggacggcgtggacgagattcagtacgatgtaggaagaataaagcaaaaaatgaaagagctagcctcactgcacgacaaacacctgaaccgaccgactctggacgactcctccgaggaagagcatgcaatagagattactactcaagaaattactcagctgtttcataggtgccagagggccgtgcaggcacttccatctagggcacgagcctgtagtgaacaggagggacgattactggggaatgttgtagcatcattagctcaggccttgcaggaattgagcacctccttcagacacgcccagagcggctacctcaagcggatgaagaacagagaagagcgatcccagcacttcttcgatactagcgtgcctctcatggatgatggggatgacaataccctatatcaccggggaacagtcttagatcgtatcgactataatgtcgagcagagctgcattaaaaccgaggatgggttaaagcagctgcacaaggccgaacaataccaaaaaaaaaacaggaagatgttggtgatacttattctgtttgtaattatcattgtgttaatagtggtgctggtcggggtcaagtctaggtag

SEQ ID NO: 137027 - DNA, 369 bp, synthetic construct
  misc_feature 1..369: note = Description of Artificial Sequence: Synthetic coding sequence
  source 1..369: mol_type = other DNA
atggccctggtgtccggtatcagcttggaccctgaggctgctataggggtcactaagcggcctcccccgaaatgggttgacggggtggatgagattcagtatgacgtgggacggattaaacagaaaatgaaggaattggctagcctgcacgacaagcaccttaatcgtcccacgctggatgactctagcgaggaagagcatgccatagagattaccacgcaagaaatcacacaactgttccatagatgtcaaagagctgtgcaggcccttccgtcccgggcccgggcctgcagcgagcaggaggggagactcctcgggaacgttgtagctagtcttgcacaggccctgcaagaactgtcaacttcttag

SEQ ID NO: 137028 - DNA, 609 bp, synthetic construct
  misc_feature 1..609: note = Description of Artificial Sequence: Synthetic coding sequence
  source 1..609: mol_type = other DNA
atggcgacaagaaggctgactgacgcttttctgctgctgaggaataactccattcagaataggcagctgctggcggagcaagagctggatgagctcgccgacgatcgcatggccctcgtgagtggcatctctttagaccctgaagcagctatcggagttaccaaacgccctcctcccaagtgggtggacggagtcgatgaaatacagtacgatgtggggaggatcaagcagaagatgaaagagctggcatccctccatgacaagcacttgaatcggccgacgttagacgattctagcgaagaagagcatgctatcgaaatcactacacaagaaatcacacaactctttcataggtgtcaaagagcagtacaggccctgccttctagggcccgtgcctgtagcgagcaagaagggagacttcttggcaatgtcgtcgcctctttggcccaagcccttcaggaattgagcacaagtttccgccacgcacagtccggatatctgaaacgaatgaaaaacagagaggagcgttcacagcattttttcgatacttcagtcccgcttatggatgacggtgacgataacacactgtatcataggcgaaccagttag

SEQ ID NO: 137029 - DNA, 909 bp, synthetic construct
  misc_feature 1..909: note = Description of Artificial Sequence: Synthetic coding sequence
  source 1..909: mol_type = other DNA
atgagcgaggacgaggaaaaggtgaaactgagaagattggagcctgcgatccagaagtttattaaaatcgttattccgacagacctggagagattgcgaaagcaccagatcaatatcgagaaatatcagcgatgtaggatctgggataagctgcatgaagagcatattaatgccggacgtactgtacaacagcttcggagtaacatcagagagatcgaaaagctgtgtctcaaggtacgtaaagacgatttggtcctcctgaaaaggatgatagaccccgtcaaggaggaggctagtgccgccacggccgagttccttcagctacacctagagtctgtggaggaacttaaaaagcagttcaacgatgaagaaaccctcctgcagccgcctttaacacgatctatgaccgtaggtggcgcattccacaccacagaggctgaggcatcctctcagtctttgacacaaatatacgcactgcctgaaattcctcaggaccaaaacgccgccgaatcctgggaaaccctagaagcagacctgattgagctgtcacaactcgtcacagacttctctctgctcgtgaactcacagcaggagaagatcgactcgattgctgatcacgtcaatagcgcagccgtaaacgtggaggagggcacaaagaacctgggcaaggccgccaaatataagctcgccgcactgcctgtggctggtgctctgattggcggcatggtgggcgggcctatcgggcttctggctggctttaaagtggccggaattgcagctgcgctcggcggcggcgttcttggcttcacgggcggtaaactgatccagaggaagaaacagaaaatgatggagaaactgacatctagttgcccagatctgcccagccagacagataagaaatgctcatag

SEQ ID NO: 137030 - DNA, 909 bp, synthetic construct
  misc_feature 1..909: note = Description of Artificial Sequence: Synthetic coding sequence
  source 1..909: mol_type = other DNA
atgagcgaggacgaggagaaagtgaagctgcgtaggttggagcctgccatccagaaattcattaagatcgtaatcccaaccgatctggagcggctgcgcaagcaccaaattaacatcgaaaagtatcagaggtgtcggatctgggacaaactccacgaggaacatattaacgccggccgcaccgtgcagcaactgagatcaaacatccgagagatcgaaaagctgtgtctaaaagtacgcaaagacgacctggttcttttgaagagaatgatcgatcccgtgaaagaagaagcatctgccgccactgccgagtttctccagcttcaccttgagtcagtagaagaactcaaaaagcaattcaatgacgaggaaaccctgctgcagccccctctcactaggagcatgacagtggggggggcattccatacaaccgaagctgaagccagctcccagtctctcacccaaatttatgccctacctgagatcccacaggaccagaacgccgcagaaagctgggaaacattagaagccgacttaatcgagctttctcaactggtcactgatttctctctcctcgtgaattcacagcaggaaaaaatcgactctatagccgatcatgttaacagcgccgcagtgaatgtagaggagggaactaaaaacctggggaaagcagcaaagtataaacttgcagctctccctgtggcaggggcgctgattggaggcatggtgggggggcccatcgggctcctggctggtttcaaggtggcgggcattgccgcagctcttggtggaggtgtattaggatttaccgggggcaagctgattcagcggaagaagcagaagatgatggagaagcttacttcatcctgccccgatctgccatctcagacggataagaagtgtagttag

SEQ ID NO: 137031 - DNA, 126 bp, synthetic construct
  misc_feature 1..126: note = Description of Artificial Sequence: Synthetic coding sequence
  source 1..126: mol_type = other DNA
atgagtgaggacgaggagaaggtaaaactgcgaaggttggaaccagcgatacagaaattcatcaagattgttattccgacggacctggagcgactgcgcaagcaccagattaacattgaaaagtag

SEQ ID NO: 137032 - DNA, 126 bp, synthetic construct
  misc_feature 1..126: note = Description of Artificial Sequence: Synthetic coding sequence
  source 1..126: mol_type = other DNA
atgtctgaagacgaggagaaggttaagcttagacggctcgagcccgcaatacagaaattcataaaaattgtgataccgaccgatttggaacgcctgcggaagcaccagatcaacattgagaagtag

SEQ ID NO: 137033 - DNA, 909 bp, synthetic construct
  misc_feature 1..909: note = Description of Artificial Sequence: Synthetic coding sequence
  source 1..909: mol_type = other DNA
atgtcggaggacgaagagaaagtgaagctgaggcggctggagccggctattcagaagttcataaagatcgtgatccccactgatctggagcgattgagaaaacatcagattaatatcgaaaagtatcagcgttgccggatctgggataaattgcatgaagagcatatcaatgcaggacgaaccgtacagcagctcagaagcaatatacgcgaaatagagaagctctgcttaaaagtacgaaaggacgatcttgtcctgctgaaacgaatgatagacccggtcaaagaggaagcctccgcggccacagctgagtttcttcaactgcatttggaatccgtggaagaactgaagaagcagttcaacgatgaagaaactctgctgcaaccacctctgacccgaagtatgactgttgggggcgcctttcacactactgaagccgaagcctcttcccagagtctcactcagatttacgcactgccagagatcccgcaggatcaaaatgccgctgagtcttgggaaactcttgaggctgacctgatcgaacttagtcagctggttacagatttcagcctgctagtcaatagccagcaggagaaaattgactctattgctgatcacgtgaacagtgccgccgtcaatgtggaggagggcacaaaaaatctcgggaaggccgctaaatacaagctagccgcgctccccgtggctggcgcactcataggcgggatggtcggtggtcccatcgggctcctcgccggatttaaggtggcggggatcgcagctgcactaggcggcggcgtgctgggctttacaggtggcaagctcatccaaagaaaaaagcagaagatgatggagaagcttactagctcctgtcctgatctgccatctcagacagataaaaagtgctcttag

SEQ ID NO: 137034 - DNA, 636 bp, synthetic construct
  misc_feature 1..636: note = Description of Artificial Sequence: Synthetic coding sequence
  source 1..636: mol_type = other DNA
atgagactgttcctgtggaatgcagttcttaccctcttcgttacatctctcatcggcgcactgatacctgagccagaggtgaagatcgaagtactacagaaaccttttatctgtcatcgaaaaactaaaggcggggatcttatgcttgtgcactacgagggttatctggagaaagacggcagtctgtttcactctacgcacaaacacaacaacggacagcctatctggtttacactgggtattctggaagctctgaaggggtgggatcagggactgaaaggaatgtgcgtgggggaaaagaggaagctgattattccgccagcccttggatacggcaaagagggcaaaggaaaaatcccacctgaatccactctcattttcaacattgaccttctcgaaataaggaatggaccaagaagtcacgagtcctttcaagagatggatttaaatgatgactggaagttgtccaaggatgaagtaaaggcttatctgaagaaagagttcgaaaagcacggcgcagtggtcaacgaatctcatcacgacgctcttgtcgaggacatctttgacaaggaggacgaggataaggatggatttataagtgcacgggaatttacctacaagcacgatgaattgtag

SEQ ID NO: 137035 - DNA, 783 bp, synthetic construct
  misc_feature 1..783: note = Description of Artificial Sequence: Synthetic coding sequence
  source 1..783: mol_type = other DNA
atgaaagatcggacccaggagctccgcacagccaaggacagtgacgatgacgatgatgttgctgtgactgtggatagggataggtttatggatgaatttttcgagcaggtagaagagatcaggggtttcattgataagatcgcagaaaatgtggaagaggtaaagcgcaaacattccgccattcttgcttcccctaatcctgacgaaaagactaaagaagagctcgaagagctgatgagcgatatcaagaagactgccaacaaggtccggtcaaaactgaaatctatcgaacagagcatcgaacaggaggaagggctgaacagatcttctgctgacctacggatccgcaagacacaacattcgactctatcacgtaaatttgttgaggtgatgtccgagtataacgctacacagagtgactaccgggagcgctgcaaaggccgaatccaacggcagttggaaatcacaggaagaactaccacgtctgaggaactggaagacatgctggagtccggaaaccctgctattttcgcctctggcatcatcatggattcaagcatctctaagcaagcgctgtctgagatcgagactagacattccgagataataaagctggagaactcaatacgggaactccacgacatgtttatggatatggcaatgctggttgaaagccagccccagggggcctttctgaagtcttgtcccgaaccacagcctaacccagaagaaggggctctttggtcatcaggggcacccggtccagccggtagagacgactag

SEQ ID NO: 137036 - DNA, 516 bp, synthetic construct
  misc_feature 1..516: note = Description of Artificial Sequence: Synthetic coding sequence
  source 1..516: mol_type = other DNA
atgaaggacagaacacaagagctgaggactgccaaggactctgacgatgatgatgacgtcgcagtcacagtggatagagacaggttcatggacgagttctttgaacaagtcgaggtaatgagtgagtacaacgccacccagagtgactaccgagagcgctgcaagggacgaatccagcggcagctggaaatcacaggtaggaccacaaccagcgaggagcttgaggatatgcttgaatctggtaaccccgccattttcgctagcggcatcattatggacagttccatcagcaagcaagctctgtctgaaatagaaacaaggcactcggagattattaagttggagatagaatacaatgtagagcatgccgttgactatgtagagagagccgtgtccgacaccaagaaagccgtgaaatatcaaagtaaagccagaaggaagaaaatcatgattataatctgctgtgtaatattaggtattgtcattgcttccacagttggaggcatctttgcatag

SEQ ID NO: 137037 - DNA, 756 bp, synthetic construct
  misc_feature 1..756: note = Description of Artificial Sequence: Synthetic coding sequence
  source 1..756: mol_type = other DNA
atgaaggatcgcacccaagagctccgtactgctaaagattcagatgatgatgacgacgtggcagtgaccgtggacagggacaggtttatggacgagttttttgagcaggtggaggagattcgtgggtttatagataagattgccgaaaacgtggaggaggtaaagagaaagcattcggccatccttgcctcccccaaccctgacgaaaagacaaaagaagaacttgaggaactgatgtccgacataaagaagacagcaaataaggtgcggtccaagctgaaatcgatcgagcagtccatcgaacaagaagagggactcaatcggtctagcgctgacctaagaatccgcaaaactcagcacagcaccctgagccgcaagttcgttgaagtaatgtcagaatacaacgcaacgcaatctgactatagggaacggtgtaaggggaggatccagagacagctggaaattaccggtcggaccactacatcagaggaactcgaagacatgctggaatccgggaaccccgccatcttcgcctctgggatcattatggattcaagcattagcaagcaggcattgtccgagatcgaaacccgccactctgagattatcaagctcgagaatagtatcagagaactgcacgatatgttcatggacatggctatgctcgttgagtctcaaaccatgtggcgcggtccatgcctaacaccccgacgccccagctcgactagagcacgacgtgccgggcgcaagtcctag

SEQ ID NO: 137038 - DNA, 1053 bp, synthetic construct
  misc_feature 1..1053: note = Description of Artificial Sequence: Synthetic coding sequence
  source 1..1053: mol_type = other DNA
atgtttataaaaggcagagctccgcgagctcctcctagggagaggaggcgcgccacccgcggcggactgcggcaggtcgtcgccccacccagagctcttgggtcaacaagtcggccccactttaggcgcgcaagcgtttgtagacgcagatgtcgtaaatctgggggcctcctcgctgcctccagaaagatggcggccgctgccgtaaacggggctgcaggattctcctcttcgggcccagctgctacaagcggagcggtcctgcaggccgcgaccggcatgtacgagcagcttaaaggtgaatggaaccgaaagagcccaaacctcagcaaatgcggagaagagctcgggaggctgaagctggtacttctcgagttgaatttcctgccaactacaggtaccaagctaacgaagcagcagctcattctggccagagacattcttgaaattggtgcgcagtggagtatcctcaggaaggatataccatctttcgaacggtatatggcacaactcaagtgttactatttcgattacaaagaacagctcccagaaagcgcctacatgcaccagttgctcggcctcaacttgctgtttttgcttagtcagaatcgcgtggcagagtttcatacagagctggaaaggttgcctgccaaagatatccagaccaacgtatacatcaaacaccccgtttctctggaacagtacctcatggaaggttcctacaacaaagtgttcctcgccaaaggcaacatcccagccgagagttatacgtttttcatcgatattctcctggacaccattcgggacgagatcgccgggtgcatagagaaagcctacgagaaaatactgtttaccgaggctactcggatattgttcttcaatactccaaagaagatgaccgactatgccaagaaacggggctgggttctcggcccaaacaattactacagtttcgcctcacagcaacagaagcccgaggatacaacgatcccctccactgagttggccaagcaggtcatagaatacgcccggcagctcgaaatgattgtctag

SEQ ID NO: 137039 - DNA, 864 bp, synthetic construct
  misc_feature 1..864: note = Description of Artificial Sequence: Synthetic coding sequence
  source 1..864: mol_type = other DNA
atgcgcgacagactgcccgatctcaccgcctgcagaaagaatgacgatggggacacagttgtagtagtcgaaaaggaccatttcatggatgacttctttcatcaagtggaggagatcagaaacagtatcgataaaattactcagtacgtcgaggaagtcaaaaaaaatcattctataattctaagcgcaccgaaccccgagggaaaaatcaaggaggaactggaggatctgaataaggagatcaaaaagacagctaataagataagggccaagcttaaggccatcgagcagagtttcgatcaggacgaaagcggcaatcgcacatccgtagatcttcgcatcagacggacccagcactcggtgctcagccgcaaattcgtagaggcgatggccgaatacaatgaagcccagacacttttccgcgagcggagtaagggccggattcaacgtcaattagagatcactggccgcacaactaccgacgacgaactggaggagatgctggaaagcggaaagccgtctatttttacgtccgacattatttcagattctcagattaccagacaagcattaaatgaaatcgaaagtcgccacaaagacattatgaaactcgagacgagtattcgcgaattacacgagatgttcatggatatggctatgtttgtcgagactcagggggaaatgatcaacaacattgaacggaatgtcatgaacgctaccgactatgtggaacacgctaaggaggaaactaaaaaggcaatcaagtaccagagcaaagcaaggcgcaagttaatgttcatcatcatatgcgtgatagtactgcttgtgattcttggcataatcctggcaacaacactgtcctag

SEQ ID NO: 137040 - DNA, 867 bp, synthetic construct
  misc_feature 1..867: note = Description of Artificial Sequence: Synthetic coding sequence
  source 1..867: mol_type = other DNA
atgcgagatcgcctgcccgatttgacagcttgccggaaaaatgacgacggtgataccgtggtggtcgtcgagaaggatcatttcatggatgacttttttcatcaagtagaggaaataagaaactctattgataagatcacgcaatacgttgaggaagtgaagaagaaccatagtatcattctgagcgcacccaatcccgagggcaagatcaaggaagaattggaggaccttaacaaggagattaaaaagaccgccaacaagattagagcaaagctcaaagccatagaacaatcattcgaccaggatgaatcgggcaaccgcacctccgtggatttgagaattagacgcactcaacactccgtgctctcgagaaaatttgtcgaagcaatggctgagtacaacgaggcgcaaaccctttttcgtgagcgatcgaagggccgcattcagagacaactggagataaccggacgcacaaccaccgatgatgaactggaggaaatgcttgaaagcggcaagcccagcatatttacatcggacatcatttcagatagccagattaccaggcaggcccttaacgagattgagagtagacataaggatattatgaaactcgagacatcaatccgtgagctgcacgaaatgttcatggacatggctatgttcgtggaaactcagggggaaatgatcaataatatcgaacgtaacgtcatgaatgccacggactacgttgaacatgccaaagaggagacaaaaaaggctatcaaataccagagtaaggcgagacggaagaagtggattatcatagctgtctccgtggttcttgtggccatcattgcacttattataggcttaagtgttgggaagtag

SEQ ID NO: 137041 - DNA, 777 bp, synthetic construct
  misc_feature 1..777: note = Description of Artificial Sequence: Synthetic coding sequence
  source 1..777: mol_type = other DNA
atggatgagttcttttccgagatagaagaaactcggctcaacatagacaagatatctgagcacgtcgaggaagcgaagaagctctactctattatattgagtgcacccattcctgaacccaagactaaggacgatctcgaacagttgaccactgaaataaagaaacgggcaaataatgtgcgcaacaaactcaagagcatggagaagcatatagaggaggacgaggttcgctcaagtgccgacctgaggatcaggaagagccagcatagcgtgctgtcccggaaatttgtcgaagtaatgaccaaatacaatgaggcccaggttgactttagagaaaggtccaagggaaggatacagagacagctggagatcactggcaagaagacaactgatgaagagctggaggaaatgctagagagcggcaatcccgccattttcacatcaggtatcattgactcgcaaatctccaaacaagccctctctgagatagaaggcagacataaagacatcgtcagattagaaagcagcatcaaagagctgcatgacatgttcatggatatcgccatgctcgtggagaaccaaggcgaaatgttggataatatcgaattgaatgttatgcacacagtcgatcacgtggagaaggctcgagatgaaactaagaaagccgtaaaatatcaatcccaggccaggaagaagttgataataattatagtcttggtggtggttctcctcgggatacttgctttaataatcggcttaagcgttgggcttaactag

SEQ ID NO: 137042 - DNA, 870 bp, synthetic construct
  misc_feature 1..870: note = Description of Artificial Sequence: Synthetic coding sequence
  source 1..870: mol_type = other DNA
atgaaggaccggctggagcaacttaaggccaaacagctaacccaggacgacgatactgacgccgtggaaatcgccatagacaacacagctttcatggatgagttttttagtgagattgaagagacccgactgaatattgacaagatttcagagcacgtcgaggaggctaaaaaactctactcaattatcctgagcgcaccaattccggagccgaagactaaagacgatttagagcagctgactactgagatcaagaaacgtgcaaataatgtccgcaataaactcaagtctatggaaaagcatattgaagaggacgaagtaagatcatctgccgatttgagaattagaaagtcacagcactctgttttgtcgaggaaattcgttgaggtcatgactaaatacaatgaggcccaggttgatttcagggaacgcagtaaagggcgaatccagcgccaacttgaaataacggggaagaaaaccaccgacgaagagctcgaagaaatgctcgagtctggaaacccagctatatttacctcagggattatcgacagccagatatccaagcaggccttatctgagatcgagggccgacacaaagatattgtccgtctggaatcgagtatcaaagagcttcacgatatgttcatggatatagccatgctcgtggagaatcagggcgaaatgctcgataacatcgagctcaacgtcatgcacaccgtcgatcatgtcgaaaaggcaagggacgaaaccaagaaagccgtgaagtatcagtcacaagcccggaaaaagctcattataatcatcgtgctggttgtggtcctgctggggatattagcgctgatcatcggtctgtccgtaggcctcaactag

SEQ ID NO: 137043 - DNA, 543 bp, synthetic construct
  misc_feature 1..543: note = Description of Artificial Sequence: Synthetic coding sequence
  source 1..543: mol_type = other DNA
atggaaaagcatatagaggaggacgaagtaagatcctctgcggacctaagaatcaggaagtcccagcacagtgtcctctcccgtaaattcgtcgaggtgatgacaaaatataacgaggctcaagtggatttccgggagcgaagcaaaggccgcatccaaaggcagctggaaatcaccggaaagaagaccaccgatgaggagctagaagagatgctggaaagcggaaaccccgcaatctttaccagtggcattattgacagtcagatctccaaacaggccctgagtgaaatcgagggccgtcacaaagatatcgtgcgccttgaatcctccataaaggaactccacgacatgttcatggacattgctatgttggtggagaaccagggatcaatgatcgatcggatagagaacaacatggatcagagtgtcggattcgtggagagagccgtggctgatacgaagaaagcagttaaataccagtctgaggcacgcaggaagttgattagtcttcagacaggagtggcaacattagtgttcaggtag

SEQ ID NO: 137044 - DNA, 834 bp, synthetic construct
  misc_feature 1..834: note = Description of Artificial Sequence: Synthetic coding sequence
  source 1..834: mol_type = other DNA
atgaaggatcgcctggaacagctcaaggcgaaacagctgactcaggatgacgatacagacgctgtcgagatcgcgattgataacacagcgtttatggatgagttttttagcgagattgaagagaccaggctcaatatcgacaagatcagtgagcatgtcgaggaagcaaaaaagctgtactccattatactgtctgcacccatcccagagccgaagacaaaggatgaccttgaacaacttaccactgaaataaaaaagagggctaacaatgtccggaataagcttaagtctatggagaagcatattgaggaggacgaggtgcggtctagcgccgacttaagaattagaaagagccagcatagcgtgctgagcaggaaattcgtcgaagtaatgacaaagtataatgaggcccaggtagactttagggaacggtccaaggggcggatccagaggcagttggagatcacagggaaaaaaactacagatgaggagctggaggaaatgctggagagtgggaacccagcaatctttacctccggcatcatcgattctcagatcagcaagcaggctctgtcggaaatcgagggccgtcacaaggatattgtcaggctagaatcttccatcaaggagcttcatgatatgttcatggacatcgccatgctggtcgaaaaccagggcgagatgctggataacattgagttgaatgtgatgcacacagtggaccacgtggaaaaagctagggatgagaccaagaaggcagtaaagtatcagtctcaggctagaaaaaaactaataagcctgcagacaggggtggcgactctcgtcttcaggtag

SEQ ID NO: 137045 - DNA, 231 bp, synthetic construct
  misc_feature 1..231: note = Description of Artificial Sequence: Synthetic coding sequence
  source 1..231: mol_type = other DNA
atgttcatggatatagccatgctagtggaaaaccagggtgaaatgcttgataacatcgagctcaacgtgatgcatacagtcgaccacgtggagaaggcgagggatgaaactaagaaggctgttaaatatcagtctcaggcccgcaagaaacttattatcataatcgtcctagtggtcgtgttgctcggcatactcgctctgatcatcggtttatctgtaggcctgaactag

SEQ ID NO: 137046 - DNA, 759 bp, synthetic construct
  misc_feature 1..759: note = Description of Artificial Sequence: Synthetic coding sequence
  source 1..759: mol_type = other DNA
atgaaagaccggcttgagcagctgaaggcaaaacagcttacccaggacgacgacaccgacgcggtagagatagccattgataatactgccttcatggatgagttcttctccgagattgaagaaaccaggctgaacattgataaaatctcggaacacgttgaggaagcaaagaaattgtattccatcattctctcggctcccatcccggaacctaaaaccaaagatgacctcgaacaactcacaacggagatcaagaagcgcgcgaacaacgtccggaataaactcaagagcatggagaagcatatcgaggaggacgaagtgagatcttcagctgacttgagaattaggaagagtcagcacagtgttctgtcccggaagtttgttgaagtgatgacaaagtataacgaggcccaagttgattttcgggaaaggagcaaagggcggattcagcgtcagctggagatcaccggcaagaagaccaccgatgaggagctggaggaaatgttggagagtggaaatccagctattttcacaagtgggatcatcgatagccagatctcaaagcaggccctgagcgagatagaggggcgccataaagatattgtgagactggagagctcaatcaaggagttacacgacatgtttatggatattgctatgttggtcgagaatcaaaagctaattatcatcattgtgcttgtcgtagttttgctcggcattctcgctttgatcatcggactatcggtgggtctgaattag

SEQ ID NO: 137047 - DNA, 894 bp, synthetic construct
  misc_feature 1..894: note = Description of Artificial Sequence: Synthetic coding sequence
  source 1..894: mol_type = other DNA
atgcgtgatagaacccacgaattgcgacagggggacgatagctcagacgaagaagacaaagagcgtgtcgccctcgtggtccacccagggacggccagacttggttcccctgacgaggagttttttcacaaagttcgcactatccggcaaaccatagtgaagttaggcaacaaagtccaggagctggagaagcagcaggtgaccatcctggccacacctttgccggaggagtcaatgaaacaagagcttcagaaccttcgagacgagatcaagcaactgggtcgggaaattcgtctccagctgaaggccatagagcctcaaaaggaagaggcagatgagaattacaatagcgtcaacactcggatgcgcaaaactcaacatggtgtgctgtcacagcaattcgtggagctgatcaacaagtgtaactccatgcaatctgagtaccgcgagaaaaacgtggaaagaataagaagacagctcaagattaccaacgctggtatggtgagcgatgaagagttggaacaaatgctcgattcagggcaatccgaagtctttgtgagtaatatactgaaagatacccaggtcactcgccaggctctcaacgaaatcagtgcccgtcatagcgaaatacagcagctcgagaggtcaattagggagcttcacgacatctttacttttttggccaccgaagtcgaaatgcagggagagatgatcaacagaatcgaaaaaaacattctttcctctgccgactacgttgagagagggcaggagcatgtgaagacagccctagaaaatcagaagaaggctcgcaaaaagaaggtcttaatcgcgatttgtgtgagcattaccgtagtgttgctcgccgtgataataggtgtgacagtggtgggttag

SEQ ID NO: 137048 - DNA, 888 bp, synthetic construct
  misc_feature 1..888: note = Description of Artificial Sequence: Synthetic coding sequence
  source 1..888: mol_type = other DNA
atgggcatgaccgcgcgcacaaagcgcactcgctccggatcgcgttggtggtgcacgagagccaggcacggatggggcgctcgaacgaggtcctcgtccacttctcccctgggtcatccccctcaagttaggaccattcgacaaacgatcgtgaagctgggcaacaaagtgcaggagctggaaaaacagcaggttacaattcttgctacccctctgcccgaggaatcaatgaagcaagagctgcagaatctacgggatgaaatcaaacaactggggcgagaaattagacttcagttgaaagctatcgagccccagaaggaggaggctgacgaaaattacaactctgtgaataccagaatgcgcaaaacacaacatggcgtgttgtcccaacagtttgttgaactcataaacaaatgcaattccatgcagagtgagtaccgagagaaaaacgtggaacggatcaggcggcagctcaaaatcacaaacgcaggtatggtctcagatgaagagttagaacaaatgttggatagcggacagagtgaggtgttcgtttcaaatatcctgaaagacacccaagttaccaggcaggcacttaatgaaatcagcgcccggcactctgagatccagcaacttgagagatcaatcagagaactgcacgacatttttactttcttagccacggaagtagagatgcagggggagatgatcaataggatcgaaaaaaatatcctctcctccgccgattatgtcgagcgcgggcaggagcatgtgaagactgctttagagaatcagaaaaaagcacgaaaaaaaaaggtgctcatagctatctgcgtaagtatcaccgtggtcctacttgccgtgataatcggggtcaccgtggtgggatag

SEQ ID NO: 137049 - DNA, 1068 bp, synthetic construct
  misc_feature 1..1068: note = Description of Artificial Sequence: Synthetic coding sequence
  source 1..1068: mol_type = other DNA
atgatccctaggaaacgctatggaagtaagaacacggatcagggggtctatttaggtctgtctaaaactcaagttctgtcgccagccactgccggcagctctagtagtgatatcgctcctctccccccaccagtgactctggtcccaccccccccggacacgatgtcctgccgagacaggacacaggaattcctcagcgcctgcaagtccctgcagacacgacagaatggtatacaaaccaacaagccggccctgcgcgcagtgcgccagagatccgaattcaccctgatggctaagagaattgggaaggatctgtctaataccttcgcgaagcttgagaagctcaccatcttagcgaaacgaaagtctctgttcgacgataaagctgtggaaatcgaggaattgacctacatcattaagcaggatataaacagtctgaataaacagatcgcccagctccaagatttcgtcagagccaaggggtcccaaagcggccgccatttgcagacccactctaataccattgtggtttctctccagagcaaactggccagcatgagcaatgacttcaaatctgtgcttgaggtcagaacagagaatttgaaacaacagaggtcgcggcgtgagcagttcagtcgagctcccgtgtcagctctgccactggcacccaaccatctgggcggcggggccgtcgttcttggcgcagagagccatgcgagcaaagacgtggcaatcgacatgatggattctcggacctctcagcaactccagctgattgatgagcaggacagttatatccagagcagggcggacacaatgcagaacattgaatccaccatcgtggagctcggatccatcttccagcagctggcccatatggtgaaggaacaggaagagaccatccaacgcattgatgaaaacgttcttggcgcgcagcttgacgttgaggccgctcactctgagatcttaaagtatttccagtccgtgaccagcaatagatggctgatggttaagattttcctgattctgattgtctttttcatcattttcgtggtcttcctggcatag

SEQ ID NO: 137050 - DNA, 966 bp, synthetic construct
  misc_feature 1..966: note = Description of Artificial Sequence: Synthetic coding sequence
  source 1..966: mol_type = other DNA
atgatcccccggaaacgctatggatctaaaaatacggaccagggagtctacctgggattgtctaagactcaggttttgtctcccgccaccgcgggatccagtagttccgatatcgcccccctcccacctcctgttacactcgtcccaccacctccagacacaatgagttgtcgcgacaggacgcaagagttcctttccgcttgtaaatctctgcagacccgccaaaatggcattcagacaaataaaccagcccttcgggccgtccgccaaagatctgagtttacgctgatggccaaacggatagggaaggacctatcaaataccttcgctaagttggaaaaattgacgatcttggccaaaagaaagagcctttttgacgataaagccgttgaaattgaagaactgacatacatcattaagcaggatatcaattctctgaacaagcagattgcccagctccaagactttgtgagggcaaagggctcacagtccggtaggcaccttcagactcacagtaacaccatcgtggtttcattgcaatccaaacttgcaagcatgtccaatgattttaaaagcgtattggaagttagaactgagaacttgaaacagcagcggtcgagaagggagcagttttcgcgagcccccgtctcagccttgccattggccccgaaccatctgggaggcggcgcggtcgtgctgggagcagaatcacacgcttccaaagatgtggctattgacatgatggattctagaacatcccagcaactacagctcatcgatgagcaagattcatacattcaatcacgcgcagatacaatgcagaatatagagtctactatagtggagctggggagcatattccaacaattagcccacatggtgaaggaacaggaagagactatacagtccgtactactgtttcctcttttgcccgcgttatctcctgggagcacgagaacctgctag

SEQ ID NO: 137051 - DNA, 906 bp, synthetic construct
  misc_feature 1..906: note = Description of Artificial Sequence: Synthetic coding sequence
  source 1..906: mol_type = other DNA
atgtcttgccgcgatcggactcaggaattccttagcgcttgcaagtcgctgcagacacgccagaatggaattcagaccaacaaacctgctctcagagctgttcgtcaaaggagcgaatttactctgatggccaagcgtattggcaaggaccttagcaatacgtttgccaaattggagaaactgactattctcgcaaagcgcaagagcctgttcgatgacaaggcagtggagatcgaagagcttacatatataatcaaacaggatatcaatagcttgaacaaacaaatagcccagcttcaagacttcgttcgcgctaaaggctctcagtctggacgccatctgcaaactcattctaataccattgtggtgagcttgcaaagcaaactggcctcgatgagcaatgacttcaaatctgtactggaggttcgcactgaaaatctaaagcagcaaaggtcacgtcgcgagcaattctcaagagcaccagttagtgccctgccgctggcccctaatcacctcggaggcggagctgtcgtactcggagctgaatctcatgcttccaaggacgtggccattgacatgatggattccaggacctcacagcagctacagcttattgatgagcaagactcctatatccaaagccgagccgacaccatgcagaacattgaaagcacaattgtggagcttgggtccatatttcagcagctggcccacatggttaaagagcaggaggagacgatccaacgaattgacgagaatgtgttgggtgcacagcttgatgtggaggctgcacactccgagatcttgaagtacttccagtcagtgacatcaaataggtggttgatggttaaaatttttttaattttgatcgtctttttcattattttcgtggtgttcctcgcctag

SEQ ID NO: 137052 - DNA, 780 bp, synthetic construct
  misc_feature 1..780: note = Description of Artificial Sequence: Synthetic coding sequence
  source 1..780: mol_type = other DNA
atggccaagcgcatagggaaggatctcagtaacacttttgccaaactggagaagctcacaattctcgcaaagcgtaagagtctctttgacgacaaagccgtggagatcgaggagctgacctacatcattaaacaagacataaacagtttgaataaacagatcgcccagctgcaggactttgtcagggccaagggatcacagagtgggaggcatctgcagacccactctaataccatagtggtcagtctgcaatcgaaactggcctccatgagcaacgattttaagtccgtgttggaagtgcgcacggagaacctaaagcagcagagatcacgcagagagcaattttctagggccccagtttccgcgttgccattggcaccaaatcatctgggaggaggtgctgtggtgctgggtgctgaaagtcatgcaagcaaagacgtcgccatcgacatgatggatagcaggaccagccaacagctgcagctgatcgatgaacaggactcctatatccaatctagggccgatacgatgcagaacatcgagagcaccattgtcgagttgggttccattttccaacagctagcacacatggtaaaggaacaggaagagaccattcagcgcattgacgagaatgtcctaggcgcacagttagacgtagaagcggctcactctgagattctgaagtactttcagagtgtgacatctaaccggtggttgatggtcaaaatttttttgattctcattgtgtttttcattatatttgtggtgttcctagcctag

SEQ ID NO: 137053 - DNA, 720 bp, synthetic construct
  misc_feature 1..720: note = Description of Artificial Sequence: Synthetic coding sequence
  source 1..720: mol_type = other DNA
atgtcttataccccgggagtggggggcgacccagcgcaactggcacaacgaatctcatccaatattcagaagatcactcagtgctccgtggagatacagcgaacattgaaccagctcggaacaccacaggactcacccgagttaaggcagcagctgcaacagaaacagcagtatacgaatcagctcgctaaggagaccgataagtacataaaggaattcggaagcctgcccaccactcctagcgagcagcggcaaagaaagattcagaaggaccggctggtcgctgaatttactacctccctgactaactttcagaaagtccagaggcaagctgcagaaagggagaaggagtttgtcgccagagtgagggcctcatctcgggtctccggcagctttccggaagattccagcaaggagagaaacctagtttcgtgggagtcacaaacccagccccaggtgcaggtgcaggacgaggagataactgaagatgacctgaggctgatacacgaaagggaatcctccataagacagctggaggcggacatcatggacattaacgaaatctttaaggatctgggcatgatgattcacgaacagggggatgtcatcgactcgatcgaagcaaacgttgaaaatgctgaagtgcatgtgcagcaggccaaccagcaactgtcgcgtgctgctgattatcagaaaaaggattcttgtatgttgatgtag

SEQ ID NO: 137054 - DNA, 786 bp, synthetic construct
  misc_feature 1..786: note = Description of Artificial Sequence: Synthetic coding sequence
  source 1..786: mol_type = other DNA
atgtcttatacgcctggcgtgggcggagatccggcccaactcgcgcagcgaatttcatctaatatccagaaaattacgcagtgcagtgttgaaattcaacgcacactgaatcaattgggcaccccccaggattctccggagttgagacagcaactgcagcagaagcagcagtacacaaaccagttggctaaagagacagacaagtacataaaggagtttggctctcttccaacaaccccctctgagcagaggcagagaaagatccagaaggaccggttagttgccgaatttactaccagcctgaccaactttcagaaagtgcagaggcaggccgccgagagagaaaaggagttcgttgctagagtccgagcatctagtcgcgtgtcaggctccttccccgaggattcatccaaagaacgcaatctggtgtcttgggaatcgcagacccaaccccaggtacaggtgcaagatgaggaaataacagaagacgatctgcgactgatccatgaacgggagagtagcattcggcaactcgaggctgacatcatggacattaacgagatattcaaggatttaggtatgatgatccacgagcagggtgatgtcatcgatagtatcgaggccaacgtagagaatgctgaagtccacgtccagcaggctaatcagcagttgagccgcgcagcagactaccaacgcaaaagtcgtaagactttgtgcattatcattcttattctggttattggagtcgccatcatatcactcatcatctggggcctgaaccactag

SEQ ID NO: 137055 - DNA, 786 bp, synthetic construct
  misc_feature 1..786: note = Description of Artificial Sequence: Synthetic coding sequence
  source 1..786: mol_type = other DNA
atgtcatacacgccgggggtgggtggcgatcctgcacagctggcccaacgcatcagctctaatatccagaaaatcacccagtgctctgtggagattcagcgtacgttgaatcagctggggacaccccaagattcccccgagctgaggcagcagctgcagcaaaagcagcaatatactaatcagcttgccaaagaaactgataaatatatcaaagaatttgggtcgctcccaacaactccgagcgaacagcgacaaaggaagatccagaaagacaggctggtggccgagtttactacctctctcacaaactttcagaaggtgcaacgtcaggcagcagagcgagaaaaggaatttgtcgcgcgagttagggctagctcccgcgtgtccggctcatttccagaagattctagtaaggaacgaaatctcgtctcctgggaatcacaaacacagccacaggtccaggtccaagacgaggagatcacagaagatgatctgcgcctgatacatgaaagagagtcgagtatccgtcagctggaggcggacatcatggatattaatgagatctttaaggacttgggcatgatgattcacgaacaaggggacgtcatcgactcgatagaggccaatgttgagaacgccgaggtgcatgtgcagcaggccaaccagcaactgagtcgggccgcagactatcagcgcaaatcacgtaagactctgtgtattatcatccttatactcgtaattggggttgctatcatcagtctgattatctggggactgaatcactag

SEQ ID NO: 137056 - DNA, 711 bp, synthetic construct
  misc_feature 1..711: note = Description of Artificial Sequence: Synthetic coding sequence
  source 1..711: mol_type = other DNA
atggcccccgacccctggttttccacatatgacagtacctgtcagatcgctcaggaaattgcagagaagatccagcaacgtaatcagtacgagcgaaagggcgagaaagcacctaagctgactgtgaccattcgggccctgctgcagaatctgaaggaaaaaattgcgcttctgaaagacttactcctgcgagcagttagcacacaccaaataacccagctcgagggggaccgacgacaaaaccttctcgatgacctagttaccagggagcgattactactggcaagtttcaaaaatgagggggccgagccagatctgattcggtcttctctcatgagtgaggaggccaaaagaggggcgcccaatccctggctattcgaagagccagaggagacgagaggcctcggttttgacgagatccggcagcaacagcagaaaattattcaagagcaggacgctggtctggacgccttgtcttccatcatcagcagacagaagcagatgggccaggagatcggaaacgaattagatgaacagaatgaaattatcgatgatctggcgaacctagtggagaatactgatgagaagctgagaaacgagacccgaagggtcaacatggtcgacaggaagtccgcctcttgcggtatgatcatggtcattcttcttctgctcgtggctatcgtggtggtcgctgtttggcctaccaactag

SEQ ID NO: 137057 - DNA, 1785 bp, synthetic construct
  misc_feature 1..1785: note = Description of Artificial Sequence: Synthetic coding sequence
  source 1..1785: mol_type = other DNA
atggcacctattggcctgaaagccgtggtgggagagaagattatgcacgatgtgattaagaaagtcaagaagaaaggcgaatggaaagtgctggtggttgaccaactctcgatgcgcatgcttagctcttgttgtaaaatgaccgatattatgacagaagggattacaatagtggaggatataaataagcggcgtgagcctttgccatcgcttgaggccgtatatctgataaccccctcagagaagtctgttcattctcttatttctgactttaaagacccacctacagcgaaatacagggctgctcacgtattcttcacagactcttgccccgatgccctatttaatgagctggtgaaaagtcgcgcagcgaaagtgatcaagactttaacggaaataaatattgccttcctgccttatgaaagtcaagtttacagcctagactcagctgattcatttcagtctttctactcccctcacaaagcccagatgaaaaatccaatactagaaaggcttgccgagcagatagcaactctgtgtgccacactcaaagagtacccagcagtacgctaccgaggcgagtacaaggataatgccctgctggcacagctgatacaggacaaattagacgcctataaggctgacgaccctactatgggggaaggccccgacaaggccagatcccagctgctaattcttgacaggggctttgatccctcctcacccgtgcttcatgagctgactttccaggccatgtcatacgatttgctaccaatcgagaatgacgtttataagtatgagaccagtggcatcggggaagctagagtcaaagaagtcctcctggatgaggatgatgatctctggatagctctccgccataagcatatcgctgaagtttctcaagaagtcactcgttcacttaaggacttcagcagctccaagagaatgaatacaggcgagaagaccaccatgagagatctttcacaaatgctcaaaaagatgccccagtaccagaaagagctgtccaaatactctacccacctgcaccttgcagaggactgcatgaaacactatcagggcaccgttgataagctgtgtagagtggagcaggacctggctatggggacagatgcagaaggcgagaagattaaggaccctatgagggccatcgtcccaatattgctggatgcgaatgtgagcacttacgacaagattcgcatcattcttctatacattttcctgaagaacggaataacagaagaaaatctgaacaagctgatccagcatgctcaaatcccgccagaagatagcgaaataattactaatatggcccacctaggagttccgatcgtgaccgactctactttgcgcagaaggagtaaacccgagcgaaaggagagaattagtgaacagacttaccaactgagccgatggactccaataataaaggacattatggaggataccatagaagacaagctcgacacgaaacactacccgtatattagcacgcggtcctcggcctcatttagcaccaccgccgtgtctgccaggtatggtcactggcataagaataaggctccaggcgagtataggtcaggcccacgcctcataatttttatcctgggcggtgtctcactgaatgagatgagatgcgcctatgaggttacccaggcgaatggcaaatgggaggtgctgataggctcaacccacatactcactccccagaaactgctagatactctgaagaaattaaacaaaaccgacgaggaaataagttcctag

SEQ ID NO: 137058 - DNA, 1674 bp, synthetic construct
  misc_feature 1..1674: note = Description of Artificial Sequence: Synthetic coding sequence
  source 1..1674: mol_type = other DNA
atgactgacatcatgacagagggaattaccatagtcgaagacattaacaagagaagagagccacttccctcacttgaggccgtgtacctaatcactccatcagaaaagtccgtccacagcctgatcagcgacttcaaggatccacccaccgcgaagtaccgcgccgctcacgtgttctttactgatagttgcccagacgcattgtttaatgaactggtcaaatcccgagctgccaaggtgataaagactctgactgagattaatatcgcgttcctcccttatgaatcgcaggtctatagtctcgatagcgcagattcatttcagtcgttttacagtccccataaagcacagatgaagaatccaatcctggagcggctagccgaacagattgccaccctgtgtgcaacactgaaggaatatccggccgtcaggtataggggcgagtataaagacaatgcactgctggctcagctgattcaagataagttggatgcttataaagccgatgatccgacaatgggggaaggccccgacaaagctagaagtcagcttctaatcctggaccgcggattcgacccgagcagccctgtcctgcacgaactcacattccaagcaatgagctacgatctccttccgattgaaaatgatgtctataagtacgaaacctccgggatcggggaggcacgtgttaaagaagttctcctcgacgaggatgatgacctgtggatcgccctccgtcacaaacatatcgccgaagtgagccaggaggtgactaggtcactaaaggacttctcatcctctaagcggatgaacacaggagagaagaccactatgagagatctaagccagatgttgaaaaagatgcctcagtaccagaaggagctaagtaagtattccactcacctgcatctggctgaagattgtatgaaacattatcagggcaccgtggataaactctgtcgagtggagcaggacctagccatgggaaccgacgctgagggcgagaagataaaggatccaatgcgcgccattgttcctatccttctggacgccaatgtgagcacctacgacaagattcggatcatccttctctatattttcttgaagaacggcattactgaggaaaacctgaataagctgattcagcatgcccaaattcctcctgaggatagtgaaatcatcacgaacatggctcatttgggtgtgccaatcgtgacagattctacactgaggaggagaagtaaacccgagcgaaaggaaaggattagcgaacagacataccagctcagtcggtggacgcctattattaaagatattatggaagatactatcgaggacaaacttgatacgaaacattacccttatattagcaccagatcttctgcgagcttcagcactaccgcagtgagcgccaggtacggccactggcacaagaacaaggcacccggtgagtaccgctctggccccaggcttattatcttcatcctgggaggagtcagtttgaatgagatgaggtgtgcttacgaggtcactcaggccaatggaaagtgggaggtgctcatcggtagtacccacatactgaccccgaccaagttcctaatggatctgcgccatcctgattttcgagaatcttctagagtgtcgttcgaggaccaggcgccaactatggaatag

SEQ ID NO: 137059 - DNA, 1308 bp, synthetic construct
  misc_feature 1..1308: note = Description of Artificial Sequence: Synthetic coding sequence
  source 1..1308: mol_type = other DNA
atggcgcccatcgggcttaaggcggtggtgggagagaagattatgcatgatgtgataaagaaagtgaagaaaaagggagagtggaaggtgctagtcgtcgatcagctgagtatgagaatgcttagcagttgctgtaagatgaccgacattatgaccgaggggcctgacaaggctcgctcccagttgcttatcctcgaccgcgggttcgatccatcctctcctgtgttgcacgagctgacgttccaggctatgagctatgatcttctgccaatcgaaaacgacgtgtataagtatgagacctccggcatcggcgaggcccgcgtgaaagaggtgctgctcgacgaagatgacgacttgtggatcgcgttaagacacaagcacatcgctgaggtctcccaggaggtgaccaggtccctaaaagatttcagcagctccaaaaggatgaacaccggagagaagacaacgatgagagatctcagtcagatgctcaagaaaatgccgcagtaccagaaggaactgtctaaatattccacccacctccatctggccgaggattgcatgaagcattatcagggcaccgtcgataaactctgtagggtagaacaagatctggcaatgggcaccgacgcggagggagagaagatcaaagatcctatgagggctatcgtgcccatcctgctagatgctaacgtgtcaacatatgacaaaatcaggatcatcctgctgtacatctttctgaaaaacggtatcaccgaggagaatctgaacaagcttatccagcatgcccagatccctcccgaggacagtgagatcatcaccaatatggcacacctgggcgttcccatagtaaccgattcgaccctgcggcggcgcagcaagcccgaacgcaaggagcgcattagcgagcaaacctaccaactgagtaggtggactccaatcattaaagacatcatggaagacaccattgaagacaaactcgatactaaacactatccttacatttccaccagaagttccgcatcttttagtaccacggccgtgagtgccaggtatggccattggcacaaaaataaggccccaggcgagtatcgcagtggcccaaggctcataatctttatactggggggcgtctctttaaatgagatgcggtgcgcttatgaagtcactcaggctaatggcaaatgggaggtgctcattggcagcacccatatcttaacccccacaaaatttctgatggacctgcggcaccctgactttagagaatctagtcgggttagtttcgaggaccaggctcccacaatggagtag

SEQ ID NO: 137060 - DNA, 1812 bp, synthetic construct
  misc_feature 1..1812: note = Description of Artificial Sequence: Synthetic coding sequence
  source 1..1812: mol_type = other DNA
atggcgccaattggcctgaaagctgtcgttggcgaaaagattatgcatgacgtgattaaaaaggtgaagaagaagggggagtggaaggtactggtcgtggatcagctgagcatgcggatgctatcatcatgctgtaagatgactgacatcatgacagagggtatcactatagtggaagatatcaacaaaagacgagagccccttccttccttagaggcagtgtacctcataacacccagcgaaaagtcggtccactcgctcatatccgatttcaaagatcctcccacggccaagtaccgcgctgcccacgtgttctttactgatagctgccctgatgccctgtttaacgaacttgtgaaatccagggccgccaaagtcatcaagactctaacggaaataaatatcgcatttttgccctatgagagccaggtttactctctggacagcgccgactctttccaatccttctactcccctcataaggcgcaaatgaagaatcccatacttgagcgcttagcagagcaaatagctacgctgtgcgcaaccctgaaagagtatccagccgttcgttataggggcgaatataaagataatgccttgttggcgcagctgatccaggacaaattagatgcctataaagcagacgatcctacaatgggtgagggacctgacaaagcgagatctcagttgttaatcctggataggggattcgatccatcatctcctgtgctgcacgaattaacatttcaggctatgtcatacgacctcctaccaatcgagaacgacgtttacaagtacgaaacgtctggtatcggcgaggcccgtgtcaaagaagttctcctcgatgaggacgacgatctatggatagccttaagacataagcatatcgcggaggtgagtcaggaggtgacaaggagtctgaaagacttttcttcaagcaagcgcatgaacaccggcgagaaaacaaccatgcgagatttgagccagatgctcaaaaagatgccacagtatcagaaggagctttccaaatactccacacatctgcatctcgcagaagattgcatgaagcactaccaaggcactgttgacaaattgtgtagggtagagcaagatctggcaatgggaacggatgcggagggagaaaaaataaaagaccctatgcgcgccattgtgccaatcctgctggacgctaacgtgtcgacttacgataaaattcgcatcatcttgctatacatctttcttaagaatggcatcactgaggaaaacctcaacaagctcatccagcatgctcagatccctcccgaggattccgagatcattactaacatggctcatctgggcgtgcctatagtgactgactcaaccctgagacgcaggtctaagccggaaagaaaggagcgcatcagtgagcagacctaccagctatcccgctggacccctattatcaaggatataatggaggacactattgaagacaaactcgataccaagcactacccatacattagcactaggtcatcagccagtttctcgaccacggccgtgtcggctaggtacggccactggcataagaataaagcccccggagagtaccggtccggccctcggctgatcatattcatccttgggggcgtttccctgaacgagatgaggtgtgcctacgaggtgacccaggctaacggcaagtgggaagttctcatcgggtctacccacattctgaccccaactaagtttcttatggacttacgacaccccgattttagagaaagctctcgcgtcagctttgaagaccaggctccaaccatggaatag

SEQ ID NO: 137061 - DNA, 1389 bp, synthetic construct
  misc_feature 1..1389: note = Description of Artificial Sequence: Synthetic coding sequence
  source 1..1389: mol_type = other DNA
atggcccctaccatccaaacacaagcccagagagaggatggccatcgttcaggcgtagtatgtcgagtcaagtactgcaactcactcccagacatacctttcgaccccaagtttatcacttacccgtttgatcaaaatcggtttgtgcagtataaggccacatcgctggagaaacagcataaacacgatcttctcaccgagccagacttgggggttacaatcgatcttattaaccctgatacgtacaggattgatcctaacgtgcttctagacccagccgacgagaagctactggaggaggaaatccaagcccctaccagctctaagcgctcacagcagcatgcaaaggtcgtaccctggatgcgtaagacagagtatatatctactgagtttaacagatatggcatttctaacgaaaaaccggaggttaaaataggcgtctctgtgaagcagcagtttacagaggaggaaatctacaaggatagggactcccagataactgcaatcgaaaagaccttcgaggatgcccagaagtcgatgtggattaacccatgtgcgcaggtcatttttgacagcgacccagccccgaaggacacatcaggtgcagcagcccttgaaatgatgtcacaggcgatgattcggggaatgatggatgaagaaggcaatcagtttgtagcctactttttgccagtcgaagaaaccctcaagaagcgcaaacgagaccaggaggaggaaatggactacgccccagacgatgtgtatgactacaagatagctagagagtacaactggaacgtcaaaaacaaagccagcaagggttatgaagagaattacttctttatttttagggaaggtgacggagtgtactacaacgagcttgaaacccgggttaggctctccaaaaggcgcgccaaggcaggcgtgcaatctgggactaacgccctgctcgtggtgaagcacagggatatgaacgaaaaagagctggaggcgcaagaggctagaaaggctcaattggagaaccacgagccagaagaggaggaggaggaggaaatggagacagaagaaaaggaggccggtggaagcgtgatgcttatcctgaggactatgcccacactcatgatgagaaccgaagatcgacccaaagtggccgtcacaatgattcaaaccgccgcagccatgggagtcgccagtggcgcaggcgcaacagcagcagctcccgtgcctagccctgtggccgctagtactcgtcccagacgcatggctgtgaagctgcagcttctgattcccgttaaactaattgtgaccgtcactgaatcgcagggcatccagggatggttccggcatcactattgtgaacagcagagcacctttcttgtagtgtgcctatag

SEQ ID NO: 137062 - DNA, 1197 bp, synthetic construct
  misc_feature 1..1197: note = Description of Artificial Sequence: Synthetic coding sequence
  source 1..1197: mol_type = other DNA
atgtgcatacgagtccacgtgtccatgtgtatgtgcatgtgtgttcacgtgtgcgtgcacctctgcatgcacgtctgcgccgtgtgcatgtgtgtttatgtgtgtgtgtgtgtgcacgtccacgtgtgcgcttctgtctgtgcctttgtatgtatgtgcgtctgcgtgtgtgtgtgtggttctgtgtgcgcattcgtgagcgtgcatgtctgcatgagggtgtacgtttgtgtttgtatctgcgtgcatctctacgtgtgcgtgtgcgtctgcttgtgtgcttgtgtatacgcctgcgtatgcatgtgtctgcgattgtgcgtgcggctgtgtgtgagtgtgtgtgcttgtgtgtacgcatgtatatgcatgtgcatatgtgtgcatgtgtcaatgtatgtctgtgcgagcgtctgcgcctgtgtgtgtgtctgcgtctgtgtgtgtgtatgtatgagagtgtgcgcccatcagtgcctccatgtgtgtatctgcgtgtacgtctgtgctagaatttgcgtttgtgcttgtgtctacgtttgtgtatgcatatctgtgtgtgcatgcgtctatgtatgtgtccacttatgcgtatgcgcgtgtgtgcatgcgtgcgtttgcgtttgcgcttgtgttcacctctgtgtgtgtgcctgcgcacacgttggggccactctggtatgtatttgtacctacacctgccctcgcccttcaatgttcgcccatggggggcgatggggagtagccgggaggcctcgccagcctatgtcccttggcgtccaggctcaggcccagcgggttattcacctgccccagagtgtgcaggccctgatcaaggattttcagggaaccccgacgttcacctacaaagctgcacatattttctttacagacacatgcccggaacctctcttctccgagctgggccggagcaggctggctaaggtggtaaagacgctgaaagaaatccatcttgcattcttgccctatgaagcacaagtgaggcctgggcttatactgggacgtggttggggttttgttactaaatgtccacttttcccgcagaaacagacactcagactgggtgccgtcgcccacacatgcaacccctctgccgtagggggccagggccgcaggatcacgtgggggcaggaattcgagactagcttaggcaccgaacaagatccggtgtcatag

SEQ ID NO: 137063 - DNA, 1773 bp, synthetic construct
  misc_feature 1..1773: note = Description of Artificial Sequence: Synthetic coding sequence
  source 1..1773: mol_type = other DNA
atggcccccagcggcctgaaggcagttgtgggagaaaagattctctctggggtcatccgcagtgtgaaaaaggatggagagtggaaggtactcatcatggaccacccctctatgcgaatcctgtcatcctgttgcaaaatgagcgacatcttagccgaaggcattaccatcgttgaagacattaacaaaaggcgagagcccattccttcgctcgaggccatttatctcctcagccccactgagaaggcattgatcaaagatttccagggaaccccaactttcacttataaggccgcgcacatatttttcaccgatacttgccccgagcctttgttttcggagctggggaggtcacggttggccaaggtggttaagactttaaaggagatccatctggcttttctgccttatgaggctcaggtattttctctggacgcaccacacagcacctataacctttactgtcctttcagagcagaggagcgcacgagacaactagaagtgctcgctcaacagatcgcaacgctctgtgccacactccaggagtatcccgcgatccggtatagaaaggggcccgaagacaccgcccagttagcccatgcagtactggcaaagctgaacgcgttcaaagcagacactccgtccctgggagaggggcccgagaaaacacgaagtcagttgctcatcatggaccgggccgcagatccagtatcacccttgctccacgaactgaccttccaagcaatggcctatgacttgctggacattgaacaggacacttatcggtatgagaccactgggctctcagaagctcgagagaaggctgtactcctcgacgaggacgatgacctttgggtggagctgcgacatatgcacatcgctgacgtgtcaaaaaaagtcactgaattgttgcgcaccttttgcgagtctaaacgattgacaaccgataaggcgaatattaaggatctgtcacaaatcctcaaaaagatgcctcaataccagaaggaactgaacaagtacagtacccacctacatcttgctgacgactgcatgaagcatttcaaagggagcgtggagaaactgtgtagtgtcgagcaagatctcgccatgggaagtgacgccgagggcgaaaagattaaagattcaatgaagttaatcgtccccgttctgcttgatgccgctgtgcctgcttatgacaagatccgagtactgctcctgtacatcctgcttcgaaacggtgtgtccgaagagaacttggcaaaactgatccagcatgccaatgtacaggcgcactcttcccttatccgcaatttggaacaactggggggcacagtcaccaatcccggagggtcaggtacatccagcagactagaaccaagggaaaggatggaacctacctaccaattgtcccggtggacaccggttataaaggacgttatggaggacgctgtggaagacagactggacaggaacctctggccattcgtgtctgatcctgccccaaccgcctcctcccaggcagccgtgagtgcacggttcggacactggcataagaacaaagctgggatcgaagcaagagccggtccgagacttattgtgtatgtcatggggggcgtagccatgtctgaaatgcgggccgcctacgaggttacacgcgctacagaaggaaaatgggaagtgctgatcggctcctctcatattttgacaccaaccaggttcctggatgatctcaaggcactggacaagaagctcgaggacattgctttaccttag

SEQ ID NO: 137064 - DNA, 1815 bp, synthetic construct
  misc_feature 1..1815: note = Description of Artificial Sequence: Synthetic coding sequence
  source 1..1815: mol_type = other DNA
atggcacctagtggactgaaagctgtcgtgggggaaaagattctgagcggtgtgatccggagcgtgaagaaagacggggaatggaaggtcctgattatggatcacccttctatgcgcatcctgtctagctgttgcaagatgtcagacattcttgcggagggtatcacaatagtggaggatataaacaaaaggagagagccaatcccatccttggaggccatttacctgctttccccaaccgaaaaggcccaggcacagagagtgatccatttgccccagtcagtccaagccctgatcaaagactttcaaggtacccccacatttacctataaggcagcacacattttcttcaccgacacgtgccccgagccactgtttagcgagctcggacgctcccgccttgcaaaggttgttaagaccctgaaagagatccaccttgcattcctcccttacgaggctcaggtcttttctttggatgcgccgcactcaacctataacctgtattgtcccttcagggccgaagagagaactaggcagctggaagttttggcccaacagatagccaccctttgcgcaaccctacaggagtatccagcaatccgatacaggaagggtcccgaggacacagcccagctggcacatgctgtactggccaagctgaacgcatttaaagcagacactccgtcactcggagagggtcctgagaagactcggtcacagctgctcatcatggacagagctgcagacccagtgagtcctttgctgcatgagctgaccttccaggccatggcctatgatcttttggacatcgagcaggatacttacagatacgagactactggtctgtccgaagcgagggaaaaagctgtgttacttgacgaagacgatgacctgtgggtggagctgcggcatatgcatattgcagacgtttcgaagaaagtaaccgagctgcttcgcactttttgtgaaagtaagagactgacaacagacaaggcaaacattaaagacctaagccagatcctaaaaaaaatgccgcagtatcaaaaagagttgaacaaatattctacacatttgcacctggcagacgactgcatgaaacacttcaaggggtcagtggaaaaactttgcagtgtcgaacaggacctcgcaatgggatcggatgcagagggggaaaaaataaaggattccatgaagctgatagtgcccgttttgttggatgcggccgttccagcctacgataaaatacgggtgcttttgctatacatcctcctgagaaatggcgtttccgaggagaaccttgcaaaactgatccagcacgccaatgttcaggctcatagctccctgatacgaaatctggaacagctgggtggaacagtcacgaatccgggcggatccgggacatcctcaagactggaaccccgggagcgaatggagccaacctaccaattaagtaggtggaccccggttatcaaggacgtgatggaagatgccgtcgaagaccggctggaccgaaacctctggcccttcgtgtcagatcccgcccctacggccagttcacaggcggccgtcagtgcccgatttggtcactggcacaagaacaaggcaggtatcgaagcaagagcaggccctagactaatagtctatgtgatggggggcgtagccatgtcagagatgagagctgcctacgaggtgactcgcgccaccgaaggcaagtgggaggtgctcataggcagtagccatattctgactcccacgcggttcctggatgatctaaaagcccttgacaagaaactggaggacattgctcttccctag

SEQ ID NO: 137065 - DNA, 1740 bp, synthetic construct
  misc_feature 1..1740: note = Description of Artificial Sequence: Synthetic coding sequence
  source 1..1740: mol_type = other DNA
atggccccttcaggtcttaaggccgttgtgggagaaaaaattctgtcgggagtcatccggagtgtgaaaaaggatggcgagtggaaggtgctcattatggaccatccctctatgagaatattgtcatcttgctgtaaaatgtcagatatcctagctgaagggattacaatcgtcgaggacataaataagcgcagggaacccattccatcattagaagccatttacctgctttctcctacagaaaaatcagtacaagcactgatcaaggactttcagggaaccccaacatttacttataaagccgctcatatattcttcactgacacttgccctgaacccctattctccgaactgggcaggagccggttggccaaagtggtcaaaaccctgaaagagatacacttggcctttctgccgtacgaagcccaggtgttttccctggacgcccctcattctacttataatttatactgtcccttccgtgccgaggagagaacacgacagttggaggttcttgctcaacaaatcgccacactgtgtgcaactctgcaggagtatcccgcaataaggtatagaaagggccccgaggataccgctcagctggcacatgcagtgctcgctaagttgaacgccttcaaggccgacacaccgagtctgggcgagggcccagagaaaactcggagtcagctattaatcatggaccgggctgctgatccggtcagtcccctcctacacgaactgacattccaggcaatggcttacgacttgctagatattgaacaggatacctacaggtacgaaacaactggcctgtccgaagcccgggagaaggccgtgctgctggatgaggatgacgatctgtgggtggagttacggcatatgcatatcgctgatgtctccaaaaaggtgaccgaattattacggacattctgtgagtcaaaacggctcaccaccgacaaagctaacataaaagaccttagccagattctgaaaaaaatgcctcagtaccagaaagagctaaataagtatagtacccacctgcacttggccgacgactgcatgaaacacttcaaggggtccgtggagaaattgtgctctgtcgagcaagatcttgcaatggggtccgatgccgagggcgagaaaatcaaagatagcatgaagctgatcgtacctgtccttctggatgccgcagtaccagcctacgacaagatcagggtgctgcttctttatattcttctgcggaacggggtgtcagaggagaacctcgccaagctgatccagcacgccaatgtgcaggcacacagctctcttatacgcaacctggagcagctgggcggaactgttactaaccctggtgggtctggaacctctagcagactggaaccccgggaacggatggagcccacatatcagctgagccgctggactccagttatcaaagatgtgatggaggatgctgtggaagaccgcttggatcgaaatctttggccattcgtttctgaccctgcacccacagcgtctagtcaagccgctgtctcagcacgtttcggccactggcacaaaaataaagccggcatcgaggccagggccgggccgaggctgatcgtatacgtgatgggcggggtggctatgtcagagatgcgggctgcttatgaagtcacccgtgccactgagggaagcggccgatgctctttggctcctcacaccagtagcccacgccctgcatcatggatgacctag

SEQ ID NO: 137066 - DNA, 2421 bp, synthetic construct
  misc_feature 1..2421: note = Description of Artificial Sequence: Synthetic coding sequence
  source 1..2421: mol_type = other DNA
atgcatggcaagtcaacagcagtgcttgagatggactattccattgtagacttcctcaccctgtgtgagactccttaccccaatgactttcaagaaccctacgctgtcgttgtactgctggaaaaggatctcgttttgatagatctcgcccagaacggctatccaatcttcgaaaacccctaccctttaagtattcacgagagccctgtgacgtgttgcgagtacttcgctgactgcccagtggatctcattcccgcgctatatagcgtaggtgccagacaaaaacgacagggatattccaagaaggaatggccaattaacggaggaaactgggggttgggcgctcagtcgtatcctgagatcattataacagggcatgcagacggcagtgtcaagttttgggatgcctccgccatcaccctgcaggtcctctataagctcaaaacctctaaggtgttcgagaagagcagaaataaagacgaccgccctaatactgacattgtggacgaagacccgtatgcaattcagattatctcttggtgccccgaatctcgtatgctgtgtatcgccggggtttctgctcacgttattatatatagattttctaaacaggaagttatcaccgaggtgattcctatgttagaggtccgcttgctgtatgaaatcaatgatgtggagacccccgaaggggaacaacccccaccattgcccacacccgtcggtggaagtaacccacagcctattccgccccagtcacatccttccacctccagctcaagctctgacggacttagagataatgttccctgcctgaaggtgaaaaactcccccctgaagcaatctcctggataccagacagagctagttatccaattggtgtgggtcggtggcgagcctccccagcaaattacgagtctcgctgtgaacagttcctatggtctcgtggtcttcggaaactgtaatggcatagctatggttgactatttacagaaggcggtacttcttaaccttggtaccattgaactgtacggcagtaatgacccgtatcggcgggagcccaggtctcccagaaagtccaggcagccatcgggagcagggctgtgcgatattagcgaaggcaccgtggtacctgaagacaggtgtaagtcacccacctctggcagctcaagtccgcataatagtgacgatgagcagaagatgaataatttcattgagaaggcgaaaatgtcacgcaaactcagcttacccactgacctgaaaccagatttggatgttaaggataattcctttagccggagcagaagctcctccgtcacgtcaattgataaggagtccagagaggctatatccgccctccacttttgcgagacatttacgaggaaaactgattcttccccctctccctgcctgtgggtggggacaaccctggggaccgtcctggtaatcgcccttaatctgccccccggaggtgagcagcggctgctgcaacccgttatcgtgtccccatccggtacaattctccgactgaaaggcgccatcctgaggatggcttttctggacactaccggatgcctgataccgcctgcatatgagccatggcgggaacataatgtcccggaggagaaggacgagaaggagaaactgaagaaacgccggcccgtgtcggtaagcccaagcagctcccaagagatctcggagaaccaatatgcggtcatctgtagcgaaaaacaagctaaggtgatcagcctccccacacagaactgtgcctataaacagaatattacagagaccagttttgtgctgaggggcgatattgtggccctttccaactctatttgtctcgcctgcttttgtgcaaatggtcatatcatgaccttctcgctgccctcactgaggccactgttagatgtgtactatcttcctctcaccaatatgagaattgcccgcacattttgctttacgaacaatggtcaggcattgtatctcgtcagcccgactgagattcagcgacttacttatagtcaagagacatgtgaaaacctgcaagaaatgcttggggagctgttcacacctgtagaaacaccggaagctccgaatcgcggcttctttaaggggctgtttggggggggtgcccagtcgcttgatagagaggaactattcggagaaagttcctcaggcaaggcttctcgatccctggcccaacatatccccgggccgggcgggatagaaggcgtcaaaggcgctgcttctggagtagtgggcgaactagcccgagcccggctcgcgcttgatgagagaggccaaaagctgggcgatctggaagagaggacagctgctatgctttcatcagcagagagtttcagcaagcacgcccatgaaatcatgttaaaatacaaggacaaaaaatggtaccaattttag

SEQ ID NO: 137067 - DNA, 3456 bp, synthetic construct
  misc_feature 1..3456: note = Description of Artificial Sequence: Synthetic coding sequence
  source 1..3456: mol_type = other DNA
atgagaaaatttaacattcgcaaggtgttggatggactcacagccggaagctcatctgcatctcagcagcagcagcagcagcaccctcctgggaaccgagaaccagaaatacaggaaaccctccagtccgaacacttccaactatgtaaaaccgtccggcacggattcccctaccagccgtccgctctggctttcgaccccgtgcagaaaatcctcgcagtgggaacacagactggggcattaaggcttttcggaaggcctggcgtcgaatgctactgtcagcatgatagtggcgccgctgtcatccagctccagttcctcattaacgagggcgccttggtcagcgccctggccgatgatacactgcacctgtggaacttaagacaaaaaagacctgccattctgcactcgctgaagttctgtcgggaaagagtcaccttttgtcacttgccttttcaatcgaagtggctgtatgtcggaaccgagcgagggaatattcacatcgttaacgttgaatccttcacattatcgggttacgtgatcatgtggaacaaggctatcgagctcagcagcaagagccacccaggcccggtggttcatatcagcgacaaccctatggatgaaggaaagctgctaatcggctttgagtctggaacagtagtgctgtgggatctgaaatccaagaaggcagattaccggtacacgtatgacgaggcaattcattctgtggcttggcaccacgaagggaagcagttcatttgctcccactccgacggtaccctgactatctggaacgttcggtcccccgctaagcctgtccaaacaataacaccgcatggtaaacagctcaaggatgggaagaaaccagagccatgtaagcctatccttaaagtggaattcaagaccaccaggagcggcgagccgttcattattcttagtggcggattatcttatgataccgtgggccggcgcccctgtctgacagtgatgcatgggaaaagtacagccgtgttggagatggattactccattgttgacttcctcactctgtgtgagaccccatatcccaatgactttcaggagccatacgccgtggtcgtcctgctggagaaagacctcgtgttaattgatctggcacaaaacggctatcctatttttgaaaacccctatcccctgagcattcacgagtcaccagtgacctgttgtgagtatttcgcggattgtccggtggacttaatccccgcactctactcagtgggtgccaggcagaagagacaggggtacagcaagaaggagtggccaataaacggcggtaattggggactcggagcccaatcctaccctgagatcatcataacgggtcacgctgatggttctgtcaagttctgggatgcctccgcaatcaccctacaagtgctgtataagctgaagacctcaaaagtgttcgaaaagagccgtaataaggacgataggccaaatactgatattgttgacgaagatccctacgcaatacagatcatttcctggtgtcccgaatccagaatgttgtgtatcgcgggagtgtccgcacacgtgataatctacaggttttccaagcaagaagtcatcacagaggtaatccctatgttggaagtgcgcctcctgtatgagattaacgatgtggaaacaccggaaggagagcaacctcctccactccctacccctgtaggaggcagcaacccccagcctatccctccccagagccatccatccacgtcgtcttcctcatcggatggcctcagggataacgtgccatgcctgaaggtcaagaatagtcccctgaagcagtctcctggctaccaaacagaactagtgatccagctcgtatgggtagggggagaaccaccacagcagataacgtccctggccgtcaactcttcatatggcctggtggtattcggaaactgtaacggaatcgctatggtggactaccttcagaaggcagtgctcctgaacttagggaccatagagctgtacgggtccaatgacccatacaggagagaacctcgcagcccgcggaagtcacggcagccgtccggggcgggcctttgtgatatctcagaaggaaccgtggtccccgaggataggtgtaagtctccgacaagtggaagctcaagcccacacaactccgacgatgagcaaaaaatgaacaactttattgaaaaagtcaaaaccaagtctaggaagttttcaaagatggtcgctaatgacattgccaagatgagtaggaaacttagcttaccaacagacctgaaaccagatttagatgtcaaggacaatagctttagcagaagtcgaagttccagcgttacctcgattgacaaagagagccgagaagctatttccgctctgcacttctgtgagacattcactagaaaaacagactcttctccctcaccctgcctgtgggtaggaactaccctcggcactgtgctcgttatcgccttgaatctcccgccaggaggtgagcagagattgctccaacccgtgattgtttctccaagcgggaccattcttcgcctgaagggtgccattcttaggatggcattcctagacaccactgggtgtcttatcccacccgcctacgaaccgtggagagaacacaatgtgcccgaagagaaagatgagaaggaaaagctgaagaagagaaggcctgtgtctgtctcccctagtagcagtcaggaaatcagcgagaaccagtatgcagtgatatgtagtgagaagcaggcaaaagtcataagcctgccgactcaaaactgtgcctacaagcagaacattactgaaacatctttcgtgctgcgaggggatattgtagccctaagcaatagcatctgcttagcatgcttctgcgctaacggacatatcatgacgttctcactccctagcctgcgtccattgctcgatgtctactatcttcccctgactaatatgaggattgcaagaactttctgcttcactaacaatgggcaggctctgtacctagtttcccctacggaaatccagagactgacatattcgcaggaaacctgtgagaacctgcaggagatgctcggtgagttattcacacccgtcgagactccggaggctccaaacagaggctttttcaaaggactttttggtggcggcgctcagtccctggaccgtgaggaactgttcggagagtcatcctcagggaaagcctcccgatcgctggctcagcacattcctggtcccggcggaatcgagggtgtgaagggcgccgctagcggcgtcgtgggagaactggccagagcgagactggcactcgacgagagagggcagaaattgggggacctcgaagagcgtacagccgcaatgctgtctagtgccgagtctttctccaagcacgcccacgagataatgctgaaatacaaagataaaaagtggtaccagttctag

SEQ ID NO: 137068 - DNA, 525 bp, synthetic construct
  misc_feature 1..525: note = Description of Artificial Sequence: Synthetic coding sequence
  source 1..525: mol_type = other DNA
taaaaggcagtcctgctgaaccttgggaccatcgaactgtacggctccaatgatccatacaggagagagcctagatcgccaagaaaatcacggcagccctccggtgcagggttgtgtgacatctcagaaggaacggtggtgccagaagatagatgcaaaagtcccacctcgggctcgagctcgccccataactcagacgacgagcagaagatgaataacttcatcgaaaaagccaagatgtccagaaagcttagcttaccaactgacctgaaacctgacctcgacgtgaaagacaactcctttagccggtcacggtctagctctgtgaccagcatcgataaggaaagccgggaggccatttcagccctgcacttctgtgaaacattcactcgaaagaccgattccagcccttcgccatgcctttgggttggaaccacactgggaactgtgctcgtgatagcgctcaacctgccaccaggaggagagcagagacttctccaacccgtgattgtctccccttcttag

SEQ ID NO: 137069 - DNA, 840 bp, synthetic construct
  misc_feature 1..840: note = Description of Artificial Sequence: Synthetic coding sequence
  source 1..840: mol_type = other DNA
atggtagactacctgcagaaagccgttctccttaacctggggactatcgagttatacggaagcaacgacccctatcggagagagcccaggtcgccccgaaagtccagacaacctagtgggggagtattaatagtaacatcgtgtatgtgcggcctcagctccctctattcagaatcgatgaaaaagctgcgctcctctttccttacagggttgtgtgatataagcgagggcaccgtggtgccagaggaccggtgcaaatctcccacctcagcgaagatgtcacgtaaactcagcctgccaaccgacctgaaaccggatctggacgtgaaggataatagttttagcagaagcaggtcttcgtcagtgaccagtatcgacaaggaaagcagagaggccatttccgcactgcacttctgcgaaacttttacccggaagacagatagctccccgtcaccatgcctgtgggtaggcacaacacttggaactgttctagtcatagctctcaatttaccacctgggggtgaacagcgcctgttgcagcctgtgatcgtgagcccttctgggaccatactgcggttgaaaggagccattctcagaatggccttcctcgacacaaccggctgtctcatccctcctgcatatgagccttggcgcgaacacaatgtccccgaagagaaagatgagaaagaaaaactgaagaagcggcgtccagtgagcgtttcgcccagctcttcccaggagatctctgagaaccagtacgccgtgatctgcagcgagaaacaagcaaaagtgatctcactgcctacccagaactgcgcgtacaagcaaaatatcacgtag

SEQ ID NO: 137070 - DNA, 3297 bp, synthetic construct
  misc_feature 1..3297: note = Description of Artificial Sequence: Synthetic coding sequence
  source 1..3297: mol_type = other DNA
atgaggaaatttaatatccgaaaagtgttagatggcctcaccgccgggagtagcagcgcatctcagcagcagcagcagcagcatccccccggcaaccgagagccagaaatccaggaaacattgcaatctgagcactttcagctgtgcaaaacagttagacacggatttccctaccagccaagcgctctggcctttgatcccgtccagaaaattcttgccgtaggtacacaaactggggccctgcgcctttttggccggcctggtgttgagtgctactgtcagcatgattccggcgccgctgtcatccagctccagttcctgatcaacgaaggtgcattagttagtgcactcgcggacgataccctccacttatggaacttacggcagaaaaggccagccatcctgcactctcttaaattctgccgtgaacgagtgacgttctgccatctgccctttcagtctaagtggctgtatgtcggaaccgagagagggaacattcatatcgttaacgtggaaagctttacgctgtccgggtatgtcatcatgtggaataaagcaattgagctgtcctcgaagagccaccctggtcccgtcgtgcatatcagtgacaaccctatggatgaaggaaaactcctcattgggttcgaatccgggacagtggtgctgtgggatctgaagtccaagaaggccgattacaggtacacttacgacgaggctatccattctgtggcatggcaccatgaaggcaagcaatttatttgttcacattcagatggaacactcacaatttggaacgtgagatcgcctgcaaaacccgtgcagaccatcaccccgcacggtaagcagctaaaagacgggaagaagcctgaaccatgtaagcccatcctcaaagtcgagttcaaaacgacccgatcaggtgagccctttatcattctgagcgggggcttatcctatgataccgttggtcgacgcccctgtctgactgtgatgcacggcaaaagcacagccgtcctggaaatggactactctattgtggattttctcacactctgtgagacaccttatcccaacgatttccaggagccatatgctgtcgttgtgctgcttgaaaaagatctcgtattgatcgatctggctcaaaacggatacccaatcttcgagaatccttatcctctgagcatccatgagtcccctgtcacctgctgtgagtattttgcagactgcccagttgatctgatccccgcactctactcagttggcgcccgccagaagcgacagggctattccaagaaggaatggcctatcaacggtggtaattggggcctaggtgcccagagctacccagagataatcatcactggccacgctgatgggtccgtgaagttttgggatgcctcagctattaccctccaggtgctctataaactcaaaacctccaaggtgtttgaaaaaagtagaaataaggacgatagacctaacacagatatagtggatgaagacccttacgcgatacagattatcagttggtgtccggagagtcggatgctgtgcatagcgggcgtttccgctcacgttattatctataggttcagtaagcaggaggttatcacggaggtgatccccatgctggaagtgcgcttgttgtatgaaatcaatgacgtcgaaacgccagagggcgagcagccccctcccctccccactcctgttggcggatccaatccccagcccatcccgccccaatcccacccttcaactagcagctcttcatccgatggcctgcgggacaatgtgccatgtcttaaggtaaagaatagccccctaaagcagtctccaggttatcaaaccgagttggttatccagctagtgtgggtggggggtgagcctccccaacagatcactagcctcgccgtgaattcctcatatggcttggttgtgtttggcaattgcaacggtatcgcaatggttgactacttgcagaaggctgtgctgttgaacctggggactattgaattgtatgggtctaacgacccgtatcggcgggaaccaaggagtccacgaaagagcaggcagccttctggtgccggtttatgtgacatcagcgaggggaccgttgtcccggaagataggtgtaaaagtcctacctcagatgtgaaagataattcgtttagtcggtcccggtccagctcagttacatcaatagacaaggagtctagagaagctatctcagctttgcacttttgcgagacattcacacggaagacggattctagtccgtcaccttgcctctgggtaggtacgaccctggggactgtgctggtgatcgccttaaacctgccacccgggggggaacagcgacttctgcagcccgtgattgtatctccctcagggacaatactgcggctgaagggtgctatcctacgaatggcttttctggataccactggctgtttgatcccaccggcatacgagccatggcgcgagcacaacgtaccggaggaaaaagatgaaaaggagaaattaaaaaagcgccggccagtcagcgtgagcccatcttcaagccaagaaatctccgagaatcagtacgcagttatatgttcagaaaagcaggctaaggtcatcagcttgccaacccagaattgcgcctataagcagaacatcaccgaaacctcatttgtactgcgcggagatatagtggctttgtccaactcgatatgtcttgcctgcttctgtgctaacggccatataatgacttttagcctgccttccttgcgcccacttctggacgtatactaccttcctctgactaatatgcgcatcgctcggacgttttgttttaccaataacggtcaagcactctatctagtatccccaacagagattcagcggcttacgtattctcaggaaacttgtgaaaatctgcaagagatgttgggcgagctgtttactccagttgaaacacctgaggcccccaacagagggttcttcaagggtctttttggggggggggctcagtcccttgatcgcgaggagctgttcggcgagtctagctccggaaaggcgagcaggtcccttgcacagcacatccccggacccggcgggatagaaggggtgaaaggcgccgccagtggtgtggtgggagagctggctcgcgcccggcttgctctcgatgagcgcggacagaaactcggcgacctcgaggagagaacagcagctatgctgtcttctgctgaatcattttcaaagcacgcacatgagatcatgctgaagtataaagacaagaaatggtatcaattctag

SEQ ID NO: 137071 - DNA, 3348 bp, synthetic construct
  misc_feature 1..3348: note = Description of Artificial Sequence: Synthetic coding sequence
  source 1..3348: mol_type = other DNA
atgcgaaagttcaatatcaggaaagtcctggacggactgacagccggatcaagcagcgcctctcagcagcagcagcagcagcacccccccggaaatcgcgaacccgaaattcaagagaccctccagtcggaacactttcagttgtgcaaaaccgtcaggcacggttttccgtatcaaccttcagctctggcctttgaccccgtccagaagatcctcgctgtcggaactcagactggcgcactgcggctatttggtcgacccggagtggagtgctactgtcagcacgactctggagcagccgtgattcaattgcagttcttgatcaatgagggtgccctggtatcagctctcgccgacgatacccttcacctttggaatctcagacaaaaaagacccgccatactgcattcactgaagttctgtcgagagagggtgacattttgtcatctgccttttcagagtaagtggctctacgtgggcaccgagagaggaaatattcacatcgttaacgtggagtctttcacgttgtccggatacgtaatcatgtggaataaagcaattgaactctcttcgaaatcccaccccggacctgtggtccacatatctgataatccaatggacgagggcaagctcctgatcggctttgagagtggcactgttgtgctgtgggatttgaagagcaagaaggccgactacaggtacacgtatgacgaggcgattcatagcgtggcctggcaccatgaaggcaaacaattcatctgtagccattcggatggcactctgaccatttggaatgtgaggagccctgctaaaccagtccagactatcacccctcacggcaaacagttgaaggacggtaaaaagccagagccttgtaagccgatattgaaagtggagttcaagacaacaagatccggggaacccttcatcatcctgtccgggggcctgtcgtacgatactgtagggcgccgcccctgtctgacagtaatgcacggaaagtccactgccgtgctcgagatggactatagcattgtggatttcttgaccctgtgtgaaaccccataccctaatgactttcaggaaccctatgctgttgttgtgttactggaaaaagacttggtccttatcgacttggcgcagaacggttatcccattttcgagaatccgtaccctctgtcaatacatgagagccctgtgacatgttgcgaatatttcgcggactgccctgtggacctaatacctgctctctactcagttggtgcgaggcagaaacgtcaggggtatagtaagaaggaatggcccattaacggagggaattggggactgggggcacagtcgtatcccgaaattatcatcactgggcacgctgatggctctgtcaagttttgggacgcctctgcgattacgttgcaggtcctgtacaagctgaagacttctaaggtttttgaaaaaagccggaataaggacgaccgtcccaacacagacattgtagatgaagatccctacgcaattcaaattatctcttggtgcccagagtcacggatgctttgcattgccggcgtgagcgcacacgtcatcatttacagatttagcaagcaagaggtgattaccgaggtgatccctatgctggaagttaggctcctgtatgaaataaacgatgtggaaacccccgagggtgaacagccgcccccattgccaacacctgttggaggctctaacccacagcccatcccaccccagagccatccctctactagttccagtagcagcgacgggttacgcgacaatgtgccgtgcctaaaagttaagaatagcccacttaagcaaagtcccggataccagaccgagctcgttattcaactcgtgtgggtgggcggcgagccaccacagcagatcacttccttggctgtcaactcatcttacggcctggtagtcttcggcaattgtaacggcattgccatggttgattacctgcaaaaagctgtgctgttaaacctcggtactattgaattatatggctcgaacgatccttataggcgcgagcctcgctcgccacgcaagagccgccagcccagcggggctgggttgtgtgacatttctgaggggactgtcgtgccagaagataggtgcaagtcaccaacgagcgccaagatgagccggaaactgtctctgcccactgacctgaagcccgacctcgacgtgaaggataattccttctcccgatcacgctccagtagcgtaacgtcaatcgacaaagagtcccgggaagctatatccgcgctgcatttttgtgagacgttcacgaggaaaaccgactcttctccttcaccctgtctttgggtgggtaccactctgggtactgtgcttgttatagcgttgaacttgccaccagggggggaacagaggttactccaaccagtaatagtgtctccctcaggaacaatcctcagactgaaaggcgcaatccttcgaatggcgttcctggacacgaccggatgcctgattccgccagcttacgaaccgtggcgcgaacacaacgtccccgaggaaaaggacgagaaagagaagctgaaaaaacggagaccagtttcagtttctccatcctctagccaggagatcagcgaaaaccagtatgccgtgatctgctcagagaagcaagccaaggtcatctctcttccaactcagaactgtgcatataaacaaaatatcaccgagaccagtttcgtcctgcgaggtgatattgtggccctatcgaattctatatgcctagcctgtttttgtgcgaacggacacattatgactttcagtctgccgagtcttcgccccctgttagacgtgtattacctgcctttgacaaatatgcggatcgctaggactttttgctttacaaacaacgggcaggctttgtatctggtgagcccaacagagatccaacgcctcacatatagccaagagacctgtgagaacctgcaggagatgctaggcgagctgttcactccagtggagactcctgaggctcccaaccgtgggttcttcaagggactgtttggcggtggtgcccaatcacttgaccgggaggagctcttcggagagtccagctcaggcaaggcttcccggagtctagctcagcatattcccgggcccggcggcatagagggcgttaagggcgccgcctctggcgtagtaggggagctagcccgagcacgtctagcgctggatgagcgaggtcagaagctaggggatctggaagaaagaacagccgccatgctctccagcgccgagagtttctcgaaacacgcccacgaaataatgttgaaatacaaggataagaagtggtatcagttctag

SEQ ID NO: 137072 - DNA, 795 bp, synthetic construct
  misc_feature 1..795: note = Description of Artificial Sequence: Synthetic coding sequence
  source 1..795: mol_type = other DNA
attgagttatatgggagcaatgacccttacaggcgcgaacccagatcgccaaggaaaagcaggcagccttcaggcggtgtgctcattgtcacatcctgcatgtgcggtctgagttcactgtactccgaatctatgaagaaacttcggtcaagcttcctgactggcctttgtgatatatcggaagggactgtcgtacctgaggaccgatgcaagtcccctacttctgcgaagatgtcccggaagctctcattgcccactgacctcaagccggatctggacgttaaagataactcattcagccgttccaggtcctcctcggtgaccagtatagacaaagagtctagggaggccatcagtgctctgcacttttgtgaaacctttacacggaagacagactccagccccagcccatgcctgtgggtgggtacaactctcgggaccgtgctggtaattgcccttaacctcccaccaggtggagaacaaaggctcttgcagcctgtaatcgtgtctcctagcggcaccattttgcgcctaaagggagccattttaaggatggctttcttagatacaaccggatgcctgatccctcctgcctacgagccttggcgggaacacaacgtgcctgaagaaaaggacgagaaggagaagctgaaaaagagacggcctgtctctgtgagtccgtcctcttcccaggagatttccgagaaccagtatgccgtgatctgctccgagaagcaggcaaaagtaatcagtctgcccacccaaaactgtgcatataagcaaaatatcacctag

SEQ ID NO: 137073 - DNA, 927 bp, synthetic construct
  misc_feature 1..927: note = Description of Artificial Sequence: Synthetic coding sequence
  source 1..927: mol_type = other DNA
atgagaaagttcaacatacggaaagtactggacggccttaccgctggtagcagtagcgcttcccagcagcaacagcagcagcaccctccagggaatagggaacctgagatacaggagacgctgcagtccgagcacttccagctttgtaaaacagtgcgtcacggcttcccctatcagccgagtgcactcgcttttgaccccgttcagaaaattctggctgtcggcactcagaccggcgccttgaggttgttcggccgacctggcgtagagtgctactgtcagcacgattctggagcagctgtgatccagctgcagtttctgattaatgaaggggcactggtgtcagccctggcagacgacacactccacctatggaacctgcggcagaagcgccccgccattctccacagccttaaattttgtagggaaagagtgaccttctgtcacctaccctttcagtctaaatggttgtacgtgggaaccgagcgcggtaatattcatatcgtcaacgttgaaagtttcacgctgtccggctacgtcattatgtggaataaagccatcgagctgtcgtctaagtctcaccccggccccgtcgtacacattagcgataaccctatggacgaagggaagttacttatcgggtttgagtccggtactgtggttctgtgggacctcaagagtaaaaaagcagactatcgctacacttatgacgaggccattcatagcgtggcctggcatcatgaaggaaagcagtttatctgcagtcattccgacggcacactgaccatttggaatgtccgctcccctgctaagccagtgcagacaattaccccacacggtaaacaattaaaggacggcaagaagcccgaaccctgtaaacctatcttaaaggtcgaattcaaaaccacaaggagcggcgtctgttag

SEQ ID NO: 137074 - DNA, 3561 bp, synthetic construct
  misc_feature 1..3561: note = Description of Artificial Sequence: Synthetic coding sequence
  source 1..3561: mol_type = other DNA
atgaaaaagttcaactttcgtaaagtacttgatggcttaactgcaagttcgcctggcagtggctcatccagtggaagcaactctggaggaggtgctgggagcggcagcgtgcatccggcaggcaccgctggagttctgcgtgaagaaatacaggagacgcttactagcgagtacttccaaatctgtaaaaccgtgaggcacggctttccccatcaaccaaccgcactggcatttgaccccgtccagaaaattctagctatagggacacggacaggcgccatccgaatactcggccgcccaggtgtcgactgctactgtcaacacgaatccggagctgctgtgttgcaactgcaatttctgattaatgagggggccctggtctccgctagcagcgacgacactttacacctgtggaacctgagacagaaaaggcccgcgattcttcattctctcaaatttaacagagagcgcataacatactgccacctgccttttcagtcaaaatggttatacgttggtacagagcgtgggaatactcatatagtgaatatagaaagtttcatcctatccggttacgtgatcatgtggaacaaggctattgagttgtctaccaagactcaccctggacccgtggtacaccttagcgattcccctagggacgagggcaagctgctgataggctacgagaacggcacagttgtgttttgggacctcaagtccaaacgggctgaattgcgggtgtattacgacgaagccatacattctattgactggcatcatgagggtaagcaatttatgtgtagtcactcagatggcagcctgaccctgtggaacctgaaaagcccgagcaggccattccaaaccaccataccccatggaaaatctcagagggagggcagaaagtccgaatcctgtaaacccatcttgaaagtcgaatataagacttgtaagaattctgagccattcattattttctctggaggcttgagttacgacaaggcctgtagacggccaagccttactattatgcacggaaaggcaataacagtactggagatggatcacccaattgtcgagttcctgactctgtgcgagaccccctaccccaatgaatttcaagagccctatgcggtcgtggtgttactggagaaagatctaatagttgtcgatttgacacagagtaactttcccattttcgaaaatccgtatcccatggatatacacgaatccccagtgacatgcactgcctatttcgctgattgtccaccagatcttatactcgtactctacagcatcggggtcaagcataagaagcaaggctactcaaataaggagtggcctatatccgggggcgcatggaacctgggagcccaaacatatccagagataatcataacaggtcacgccgacggctcaatcaagttttgggacgccagtgctattactctgcagatgctctataagttgaagacctccaaagtgttcgaaaagcagaaggtcggcgaagggaaacagacctgcgagattgtggaagaagatcccttcgctatacagatgatctactggtgccctgaatctagaatcttttgcgttagtggggtctctgcatacgtgatcatctataaattctctcgacacgaaatcactactgagattgtatctcttgaggtgagacttcaatatgatgtggaagacatcattactccagagccagaaacgagccctccctttcccgatctgtccgcccagctgccatcttcaaggtccctgtccggttccaccaacacagtcgccagtgagggtgtgaccaaggacagcattccttgcctgaatgtcaaaaccagacccgtgaggatgccccccggctatcaggcagagctggtaattcagctggtgtgggtggatggcgagcctcctcagcaaatcaccagcctcgcagtgtcctctgcttatggcatcgtagctttcgggaattgtaacggcttggccgttgtggattttatccagaagacagtccttctgagcatggggacaatcgacctatataggtcttcagatttgtaccagcggcagccaaggtcacccagaaagaacaaacagtttatcgcagacaatttttgcatgaggggtctgtcgaatttttacccagatctaacaaaaaggatcaggaccagctatcaaagtttgacagaactgaacgactccccagtgcctctggagctggagagatgtaagagccccacctctgatcatgttaacggtcattgtacttctccgacctcccagtcgtgctcctcaggtaagcggctgtctagcgccgatgtgagcaaggttaaccgctggggaccagggcgtcctccttttaggaaggcccagagcgccgcttgtatggagatttccctgccagttaccaccgaggaaaatcgcgagaattcctacaaccggagtagaagctctagcatctcatccattgataaggactccaaggaggctataactgctctttattttatggacagttttgctagaaagaatgattcaaccatctccccatgtctgttcgtgggcacctctctggggatggttctcatcatttctctgaatttgccgctggcagatgagcagagatttaccgaacccgttatggtgctgccttccggcactttcctttctttgaaaggcgctgtgcttacgttctcatgtatggatcgaatgggaggattgatgcagcccccctatgaggtctggagagaccccaacaacattgatgaaaacgaaaaatcatggcgccgtaaggtggtcatgaattcctcatctgccagtcaggagataggcgatcaccagtataccatcatttgttctgaaaagcaggccaaggtgttctcgctgccttcacagacttgcttatacgtacacaacatcaccgagacatcatttatcctgcaggccaacgtcgtagtcatgtgtagtagcgcctgcctggcctgcttttgcgccaatggacatataatgatcatgtctctgccttcgcttcgtcccatgctagacgtcaattatctcccactgacggatatgcggatagcccggaccttttgttttacaaacgagggtcaggccctctatctggtgtctcccacagagattcagcgattaacgtacagtcaggagatgtgcgataacctccaggacatgctgggggacctcttcaccccaatcgaaactcctgaggctcagaaccgtggcttcctgaagggattgtttgggggttcagggcagactttcgacagggaggaactttttggggaggctagcgccggtaaggctagtaggtcactggcccaacatattccagggcctgggtccattgagggcatgaagggagctgccggcggagtaatgggagagttgacgagagcccgtattgcattggacgagagggggcagaggttgggcgaactggaggagaagactgctggaatgatgacaagtgctgaagctttttctaaacacgcgcacgagctgatgttgaagtataaggataaaaagtggtatcagttctag

SEQ ID NO: 137075 - DNA, 384 bp, synthetic construct
  misc_feature 1..384: note = Description of Artificial Sequence: Synthetic coding sequence
  source 1..384: mol_type = other DNA
atgaagaagttcaatttccggaaggtgctagacggcctgactgcctccagcccgggatccggctctagttctgggagcaattctgggggtggcgcaggcagcggatcagtccatccagccgggactgccggcgttcttcgggaggagatccaagagacactaacatctgagtacttccagatttgcaagaccgtcagacatgggttcccccaccagcccacagccctcgcctttgaccctgtccaaaagatcctggctattgggactcgaacgggcgcaatccgaatcctagggcgacccggggttgactgttactgccaacacgaaagcggcgctgcagtgttacagttgcagttcttgatcaacgagggcgctctagtctag

SEQ ID NO: 137076 - DNA, 633 bp, synthetic construct
  misc_feature 1..633: note = Description of Artificial Sequence: Synthetic coding sequence
  source 1..633: mol_type = other DNA
atgtctgctaagagtgccatctccaaagagatttttgcaccccttgacgagagaatgctgggagcagttcaagtcaagaggcggacaaagaagaagatcccgttccttgcaaccgggggccagggagaatacctcacctatatctgcctgagcgtgacgaataagaaacccacgcaggccagcattacaaaagtcaagcagttcgagggctcaacgagctttgtacggcggtcccagtggatgctagaacaacttaggcaggtgaatggaatcgacccaaatggcgattccgcagaattcgacctattgttcgagaatgcatttgaccagtgggtcgcctcgacagcctcagaaaagtgtacattctttcagatcctgcaccacacatgccagagatatctgactgacagaaagcctgagtttatcaattgccagagtaaaatcatgggcggcaactctatattacatagcgcagcagacagcgtgacatccgccgttcaaaaggcctcacaggccctcaacgaaagaggggagcgcctcggaagagccgaagaaaaaactgaggatctgaaaaattctgcgcaacagttcgccgagaccgcccacaagcttgcaatgaagcacaagtgttag

SEQ ID NO: 137077 - DNA, 633 bp, synthetic construct
  misc_feature 1..633: note = Description of Artificial Sequence: Synthetic coding sequence
  source 1..633: mol_type = other DNA
atgtcggccaaaagcgctatcagcaaagagatatttgctccactggacgagcgtatgcttggggccgtccaggtgaagcgacgaactaagaaaaagattccatttctggccacagggggacaaggggaatacctgacctatatatgcctgtccgtcacgaacaagaaaccaacccaggctagcatcactaaagtgaagcagtttgagggctccacatcttttgtcaggagaagtcagtggatgctcgaacaactacgacaagtgaacggtatagatcctaatggggattctgctgaattcgatctgctattcgaaaatgcattcgatcaatgggtcgcctccaccgcatcagaaaagtgtacctttttccaaattctgcaccatacctgccaacggtacctgaccgatcgcaaaccagaatttatcaattgtcaatctaagatcatgggcggcaactcaattttacatagcgctgccgactcggtgacctctgccgtgcagaaggcaagccaggctttgaacgagcgcggggagaggctgggaagagccgaagagaaaaccgaagacctcaagaattccgcacagcagtttgcggaaaccgcgcacaaagtcacattccgggggagaaaatag

SEQ ID NO: 137078 - DNA, 633 bp, synthetic construct
  misc_feature 1..633: note = Description of Artificial Sequence: Synthetic coding sequence
  source 1..633: mol_type = other DNA
atgagcgcaaagtcagcaatctccaaggaaatttttgcccctctggacgagcggatgctgggagcagttcaggtgaagagacggacgaaaaagaagatcccgttcctggccactggaggtcaaggagaatatttgacatacatttgtctgtccgtgacaaataaaaaacctactcaagcaagcatcacaaaagtgaagcagttcgaaggcagcacgtcctttgttcggaggtcacagtggatgttggaacagctgagacaagttaatggtattgaccccaacggagactccgcggaattcgacctgctgttcgaaaacgcatttgatcagtgggtggcctcaaccgccagtgagaaatgtacgttttttcagatactgcaccacacgtgtcagcggtaccttactgatcgcaaaccggaatttatcaattgtcaatccaagatcatgggtggaaattcgatattgcattcagcagccgactctgtgacctctgcggtgcagaaagcctcccaggcactgaatgagcgcggagagcgactcggcagggccgaggagaagaccgaggacttaaagaacagtgcccagcaatttgcggaaacggctcataagctggctatgaagcacaagtgttag

SEQ ID NO: 137079 - DNA, 633 bp, synthetic construct
  misc_feature 1..633: note = Description of Artificial Sequence: Synthetic coding sequence
  source 1..633: mol_type = other DNA
atgagtgcaaagtccgcaattagtaaggagatcttcgccccactcgacgagcgtatgctgggcgcggttcaggttaagaggcgaactaagaaaaagataccctttttggcaaccggaggccaaggagaatacctcacctacatctgtttatcggtcaccaataagaagccgacacaagctagcataacaaaagttaagcagtttgaggggagtacaagtttcgtgcggcgcagccaatggatgcttgagcaacttagacaagtaaatggcatcgacccaaacggggatagtgctgagttcgacctgctctttgaaaacgccttcgatcaatgggttgcatccacagccagtgagaaatgcacattctttcagattttgcaccacacatgccagcggtatctgacagatagaaagcctgagttcatcaactgccaatctaaaatcatgggggggaactccatcctgcactctgccgctgactcagtgacctccgccgtccagaaggcctcacaggcgctgaacgagcgcggcgaaaggctgggtcgggcagaggagaaaactgaggaccttaagaactccgcccagcagttcgcagagaccgctcacaagctagcgatgaagcataaatgttag

SEQ ID NO: 137080 - DNA, 633 bp, synthetic construct
  misc_feature 1..633: note = Description of Artificial Sequence: Synthetic coding sequence
  source 1..633: mol_type = other DNA
atgtctgccaagtccgccatatcaaaggaaattttcgcccccctcgatgagcgaatgctcggcgctgtccaggtgaagcggcgcactaagaagaagatccctttcctagccaccggcggacagggggaatatttaacctatatctgcctttctgtaaccaataagaagcctacacaagccagcatcactaaggtgaagcagttcgagggaagcacctcctttgtccggcgcagccagtggatgctggagcaactgagacaagtgaatggcatcgaccccaacggggatagtgccgaattcgacctgctctttgagaatgctttcgatcagtgggtagccagcaccgctagtgagaaatgcactttcttccaaatcctgcaccatacatgccagaggtacttaacagacaggaagccagaattcatcaactgtcaatccaaaataatgggtggtaacagcatacttcattcagccgcagattctgtgacctcagcagtgcaaaaagcgtcccaagccctgaacgaaaggggtgagagactgggacgggccgaagagaagactgaagacttaaaaaattcagcgcagcagttcgcagagaccgcccacaagctggctatgaagcacaaatgttag

SEQ ID NO: 137081 - DNA, 327 bp, synthetic construct
  misc_feature 1..327: note = Description of Artificial Sequence: Synthetic coding sequence
  source 1..327: mol_type = other DNA
atgtctgcctgctttctggataccagacgcgcggctttcctccaatgcgacctacccagtagctatcgaatcttgactttgccagaatccggacattgcggctccgccgagcccgtgtccgatgccccagctctgctactctccgggaattcaatcctgcactccgccgccgattcagtgacctctgcagtgcagaaggcctcccaagccttgaatgaaagaggtgaacggttggggagagcagaagagaagaccgaagatctgaagaattctgcccagcaattcgctgagacggcccacaagcttgccatgaaacacaaatgctag

SEQ ID NO: 137082 - DNA, 633 bp, synthetic construct
  misc_feature 1..633: note = Description of Artificial Sequence: Synthetic coding sequence
  source 1..633: mol_type = other DNA
atgtctgctaagtccgccatatccaaagaaatcttcgcacctctggatgagaggatgctcggtgctgttcaggtcaaaagacgaacaaagaagaagattccattcctggccacgggcgggcagggagagtaccttacatacatatgcctttcagtgactaacaagaagcctacacaggcaagcatcaccaaagtgaaacagtttgagggaagtacctccttcgttcgtcgctcgcagtggatgcttgaacagctgcgccaggtcaacggcatcgatcccaacggagactcggcggagttcgatctgctcttcgagaacgcgtttgatcagtgggtcgcttctacagccagcgagaagtgtactttctttcagattcttcatcatacatgtcagcgctatctgaccgaccggaaacccgagtttattaactgccagtcaaagatcatgggcggtaattcgatcttgcattccgctgccgactctgtgacatctgcagttcagaaggcctctcaggcacttaacgagcgcggtgaaagacttggacgggctgaagagaaaacggaagatcttaaaaattcggcccagcagttcgccgaaaccgcgcataagcttgctatgaaacacaaatgctag

SEQ ID NO: 137083 - DNA, 633 bp, synthetic construct
  misc_feature 1..633: note = Description of Artificial Sequence: Synthetic coding sequence
  source 1..633: mol_type = other DNA
atgtcagcaaagtccgcaatttctaaagagatttttgcacccctggatgagagaatgctgggcgctgtccaagtgaagcgacgcaccaagaaaaaaatcccgttcctcgcaacgggcggccagggcgagtacctgacctacatttgtttgtctgtgactaataagaagccgacacaagcctctatcacaaaagtgaaacagtttgaaggcagtacttcttttgtgcgtcgctcccagtggatgttagagcagttgagacaggtgaatggtatagaccctaacggagactcagccgaattcgacctgctctttgaaaatgcatttgaccaatgggttgcatcaacagctagtgagaaatgtacctttttccaaatcctgcaccatacatgtcaaaggtacttaaccgaccgaaaacccgaatttatcaactgccagagcaaaataatgggcgggaactccatcttacactcggccgccgatagtgtgactagcgcggtccagaaagccagtcaggcactgaacgaaaggggcgaaaggcttgggcgggccgaggaaaagacagaggacctgaagaattccgcccaacaattcgccgaaactgcacacaaactggccatgaaacataagtgctag

SEQ ID NO: 137084 - DNA, 1617 bp, synthetic construct
  misc_feature 1..1617: note = Description of Artificial Sequence: Synthetic coding sequence
  source 1..1617: mol_type = other DNA
atggccgttgctgccgcggctgctgctgcagggcctgcgggggcaggagggggaagagctcagagaagcggactactcgaggtgttggtcagggatcggtggcacaaggttcttgtgaatctgagcgaggacgcgttagtcctgtcgtcggaagagggcgcagccgcctacaatgggataggcacagccactaacggcagcttttgccgaggcgcaggggcaggacaccccggggcgggaggcgcccagccccccgacagtcccgctggcgtccgcactgccttcacagacctcccagagcaggttccagagtcaatctccaaccagaaacgcggcgttaaagtgttgaagcaggagctcggaggtttgggcatttcaattaagggggggaaggaaaataagatgccgatcctgatctccaaaatttttaaaggcctggccgccgaccagacgcaggcactgtatgtgggcgacgcgattctttccgtgaacggcgctgatttacgagacgctacgcacgacgaggctgtccaagccctcaagcgcgcaggaaaagaagtccttctggaggtaaagtacatgcgggaggctaccccctacgtgaagaaaggttcacccgtcagtgagattggctgggaaactcccccccccgagtccccacgattggggggcagcacctccgacccgcccagcagtcagagttttagctttcaccgcgatcgtaagagcattccactgaaaatgtgctatgtgacacggtccatggcactggcggatccggaaaaccgacaactggaaatccacagccccgatgcaaagcatactgttatcctgcgctcaaaagactcagccaccgcgcaggcttggttctcagctatccactccaacgtgaacgatctgctaacaagggtgatcgcagaggttcgcgagcagctgggtaagaccggtattgctgggtcccgagagattaggcacttgggttggctggccgaaaaggtgccaggcgagagtaaaaagcagtggaagcctgccctggtggtgcttacagagaaagacctgctgatttacgatagcatgcctcgccgcaaggaggcctggttctcacccgtgcatacctatcccctactagccaccagactagtgcattctggacctggcaaaggttccccccaggccggagtcgatctcagctttgcaaccaggaccggaacccggcaaggcatcgagacgcatctttttcgggccgaaaccagccgcgatctttcccattggactagatccatcgtccagggctgccataattccgcagagctgatcgcggagattagcacagcctgtacctacaagaaccaagagtgcaggctaaccatccattacgagaatgggttttcaatcactacagagccccaggagggcgcattccctaagactattattcagtcgccgtacgaaaaactgaagatgtcttcagacgatgggatcaggatgctatacctcgacttcggcggtaaggatggtgaaatacaactggacctgcactcatgtcctaaacctattgtgtttattatccactcgtttctgagtgccaagatcacgcggttaggacttgtcgcatag

SEQ ID NO: 137085 - DNA, 1617 bp, synthetic construct
  misc_feature 1..1617: note = Description of Artificial Sequence: Synthetic coding sequence
  source 1..1617: mol_type = other DNA
atggctgtggcggctgccgccgctgccgctggccctgctggtgccggcggaggccgcgcccaacggtctggtctactggaagtcctcgtaagagaccgctggcacaaagtcttagtcaatttatccgaggatgcgcttgtactatcttccgaggagggcgcggccgcctacaacgggatcggaactgctacaaatgggagcttctgccggggggccggcgccgggcaccccggggccgggggggcccaaccccctgattcgccggctggcgtccggactgccttcacagatctgcccgaacaggtaccggagtcaatctctaaccagaaaagaggagtaaaagtcctcaaacaggagttaggtggtctaggcatctctatcaagggtggaaaggaaaataagatgcctattcttatcagcaagattttcaaagggttagccgcggaccagacccaagcactctacgtgggcgatgcaattttgtctgtgaatggagccgatctcagagatgccactcacgatgaagcagtccaagcgctcaaaagggctggtaaggaagtgctcctggaagtgaagtatatgcgggaagcaaccccctatgtcaaaaagggttcccctgtgtccgaaataggatgggaaactcctcctcccgagtctcccaggctgggtgggtcgacctccgaccctccctcatctcaatctttctcctttcaccgagaccgtaaatctattcctctgaagatgtgttacgttaccagaagcatggccctggccgatccagagaaccgtcaactagaaatacactcaccagatgccaaacacacagtcattcttaggtctaaggattccgcaactgcccaagcctggttctctgccatccactccaatgtcaacgacttgctgactcgtgttatcgctgaggtgcgggagcaattgggaaaaactggcatcgccggatctcgagaaatacgacatttagggtggctagccgagaaggtgcccggtgagagcaagaagcagtggaagccagccttggtcgtcctcacggaaaaagatcttcttatatatgacagcatgccgaggcggaaggaagcttggttctctcccgtgcatacatatcccttgctcgctactcgcctagtccattccgggccgggaaagggttccccacaagcaggggttgacctcagcttcgccacaagaacgggtacccgccaagggatcgaaacccaccttttcagggcggagaccagtcgagatctgtcacactggacgcgtagcattgtgcagggttgtcacaactccgctgaactcattgctgaaatctccactgcatgtacgtataaaaatcaggagtgccgactcactatacattacgagaatggattctccataacgacagagccccaggagggggccttcccaaaaaccattatccagtcaccatacgaaaagctcaaaatgtcctccgatgatggaattagaatgctgtatctggatttcgggggtaaggatggagagattcagctggatctccattcctgtccaaaacccatcgtgttcattatacacagcttcctgagtgccaagatcaccagactaggacttgtggcctag

SEQ ID NO: 137086 - DNA, 87 bp, synthetic construct
  misc_feature 1..87: note = Description of Artificial Sequence: Synthetic coding sequence
  source 1..87: mol_type = other DNA
atggcagtggcagcagcggccgcagcagcagggccagctggcgcaggagggggacgtgcacaacgaagcgggctcctcgaggtgtag

SEQ ID NO: 137087 - DNA, 1623 bp, synthetic construct
  misc_feature 1..1623: note = Description of Artificial Sequence: Synthetic coding sequence
  source 1..1623: mol_type = other DNA
atgcgtgttgctgcggcaacggccgctgccggggccggccccgccatggctgtgtggacacgggcgaccaaggccggactcgtcgagcttttgttgagggagcggtgggtgcgcgtggtcgccgagctgtccggtgagagtctaagtctgacaggagacgcagccgccgctgaactcgaacctgccctgggccctgccgccgctgcatttaacggcctgcccaacggaggaggcgccggcgatagccttccgggtagcccatctagggggcttggccccccatctccacccgctccaccaagaggacctgcgggcgaagctggtgcttctccaccggtgcggagagtgcgcgttgtgaagcaagaggccggtggtctgggaatcagcattaagggtggccgggagaatagaatgccgattttgatctctaaaatttttccaggactagcggctgatcagagcagggcactccggttaggtgatgctattctatctgtgaatgggaccgatcttaggcaggcaacccacgatcaggccgtgcaagccctgaagcgggccggcaaggaggtactattggaggtgaagttcatcagggaggtgactccatacatcaaaaagccctccctagtttcagacctgccctgggagggcgccgctccccagagccccagcttcagcggctccgaggactccgggtcaccaaaacaccagaactctactaaggataggaagattatcccactgaagatgtgtttcgcagccaggaacttgagtatgccggatctcgaaaaccgtctaattgagctccattctccggattctagaaacaccttaatcctgcggtgtaaggataccgctacggcccactcctggtttgtcgcaattcatactaatataatggcattgctgcctcaggtgcttgccgaactgaatgccatgctgggggcgacgtccaccgcgggaggatccaaagaggttaaacatatagcatggctggctgaacaagctaagctggacggcggtagacagcagtggagaccagtgctgatggccgtgaccgagaaggacttgctgttgtacgattgtatgccatggaccagggacgcctgggcatcgccgtgtcattcctatcctctagtcgctacccgcttggtacactccggatccggatgtaggagtccaagtctcggttcagatcttactttcgcaacccgaaccggatcccgccagggcatagagatgcacttgttccgtgttgagacacacagagacttgagtagttggactagaatcttggtgcagggctgccatgccgcagcagaattgattaaggaagtcagcctcggttgtatgctgaacggacaagaagttcgcctcaccattcactacgagaacggtttcacaatctcaagggagaatgggggcagcagctctatcctttataggtatccattcgagcgactcaagatgtccgccgatgatggcatcagaaatttataccttgactttggagggcctgaaggagagctgacaatggacttgcactcttgtcccaagccaatcgttttcgtactgcatacttttctgagtgctaaggttacgaggatgggactgctggtgtag

SEQ ID NO: 137088 - DNA, 1443 bp, synthetic construct
  misc_feature 1..1443: note = Description of Artificial Sequence: Synthetic coding sequence
  source 1..1443: mol_type = other DNA
atggacttccgaaccgcctgcgaggagactaagactggaatctgtctgctgcaggatggaaaccaagaacctttcaaggtgcgcctgcacctcgcgaaggacatcctgatgatccaggagcaggatgtgatctgcgtgagcggagagcccttttacagtggtgagaggacagttaccatccgccgtcagacagtcggagggttcggcctgagtattaaaggtggggccgagcacaatataccagttgttgtatccaagatatccaaggagcagagagccgagttgtctggactcctcttcattggtgacgctatactgcagatcaatggtatcaatgttcgaaagtgtagacacgaagaagtagtgcaggttctccgcaacgcaggagaggaagtaacccttacagtgagctttttgaaaagagcccccgcttttctaaaactgccgttaaacgaagattgcgcatgcgcaccatctgaccagtctagcggaacctcgtctccattatgcgatagtggactccatttgaactatcatccgaacaatacggatacactttcttgttccagttggcccacctcccccggattgcgatgggaaaagcgttggtgcgatttgcgccttatcccgctgttacacagccgcttttcacagtacgtgcctggtaccgatctgagccgccagaacgcttttcaagtgatcgctgtcgatggcgtctgcaccggaatcatccagtgtctaagtgcagaagattgcgtggactggctccaggccatcgcaaccaatatatccaaccttactaagcacaatattaaaaaaattaacaggaactttccagtgaatcagcagatcgtctatatggggtggtgtgaggctcgggaacaggacccgttacaggatcgggtttatagcccaacgtttcttgcccttagaggtagctgcttatacaagttcctggcaccacctgttactacctgggattggacacgggcggaaaaaaccttcagtgtgtatgaaataatgtgcaagatcctgaaggatagcgatctgctggacagacgaaagcagtgctttactgtgcagtccgaaagtggtgaagacctctacttcagcgtggagctggagagcgacctggctcagtgggagagggctttccagactgccacatttctcgaagtggagagaatacagtgcaaaacctacgcttgcgtgctggagtcacacctcatggggctgacgatcgacttcagcaccggattcatttgtttcgacgccgccactaaagaactggagttttccaacttatttgcagtcctgcactgcatccactccttcttcgccgccaaagtcgcgtgtctggacccactctttttaggaaaccaagcgactgcctccaccgcagcctcttcagcaaccacgagtaaagccaagtatacaacgtag

SEQ ID NO: 137089 - DNA, 1443 bp, synthetic construct
  misc_feature 1..1443: note = Description of Artificial Sequence: Synthetic coding sequence
  source 1..1443: mol_type = other DNA
atggatttcaggaccgcctgcgaagagaccaaaacaggaatctgccttctccaagacggaaaccaggaaccatttaaggtccgtctgcacttggcgaaggacatcttaatgatccaagaacaggacgttatttgtgtgtcaggtgaaccgttttattcaggagagagaaccgtcacaatcaggcgacaaaccgtgggaggtttcgggttgtctatcaaagggggagccgagcacaatatccccgtggtcgtgtccaagatcagcaaggagcagagggccgaactcagcggacttctctttatcggggatgcaatcctacagattaacggcatcaacgtgcggaaatgcaggcatgaagaagtcgtccaggtcctcagaaacgccggcgaagaggtgaccctgactgtctcattcttgaagagggctccggcgtttctgaagttacctctgaatgaagactgcgcctgtgcgccaagcgatcagtcctccggtacctccagtccactgtgcgatagcggccttcatcttaactaccatccaaataacacagatacactgtcttgctcctcttggcctacttccccaggactgcgctgggaaaaacgttggtgcgaccttaggctgattccgctcctccactctcgcttctcacagtacgtgccaggaactgaccttagtaggcagaatgcatttcaggtgatcgccgttgacggcgtgtgcacaggaataattcagtgtttgtccgcagaggattgcgtcgactggctgcaggctatagccaccaatatttccaacctgacgaaacataacatcaaaaagataaacagaaattttccagtgaatcaacagattgtgtacatggggtggtgcgaggcccgcgagcaggacccactccaggacagggtctattccccgacctttctcgctctgagggggagttgcctatataagtttctggcacctcccgttacaacttgggactggactagggctgagaagaccttttccgtctatgagatcatgtgcaagattttgaaagactcagacctactggacagacggaagcagtgtttcacggtacagtcagagagtggagaagatctctactttagcgtggaactggaatccgatctagcccagtgggagagagcttttcagacagccaccttcctcgaggtcgagcgcatccagtgtaagacgtacgcttgtgtgctggagagtcatctcatgggccttaccatagatttttccactggattcatatgctttgacgccgcaaccaaagagctagagttcagcaatctattcgcagtgttacactgcatccactctttctttgccgcaaaagtggcctgcctggaccctctttttctgggaaaccaggcgaccgcgagcacggcggctagttccgctaccacgtcaaaggccaaatatacaacgtag

SEQ ID NO: 137090 - DNA, 1554 bp, synthetic construct
  misc_feature 1..1554: note = Description of Artificial Sequence: Synthetic coding sequence
  source 1..1554: mol_type = other DNA
atggacttccggacagcttgcgaagagactaagaccggcatctgtctgctccaggatggaaaccaggagccattcaaggtgcgactgcatctcgctaaagacattctgatgattcaggaacaggatgtgatttgtgtgagtggggagccattctactccggcgagagaactgtgactataagacgacagactgtcggtggattcggcctgtcaataaaaggcggcgcggaacacaacattcctgtggtcgtttctaagatcagcaaggaacagagagcagagctgtccggtctgttgttcatcggagatgccattctgcaaataaatggtattaacgtgcgtaaatgtcggcacgaagaggtggttcaggtcttacggaacgccggcgaggaagtgaccctcaccgtctcttttttgaagagagccccagcttttctgaagcttcctttgaacgaagactgcgcctgtgcaccgtcggatcagagcagcgggacaagttcccctctatgcgactccggcctccacctgaattatcatccaaataacacagatacactctcatgctcgtcttggccaaccagccccggactcagatgggagaagagatggtgtgacctccgactaatccccctgctgcactctcgattttcccagtacgtccccggcacagacttgtcccgccagaacgcattccaggtgatagctgtggatggcgtgtgtacgggcatcattcaatgcctttctgctgaggactgtgtggattggctgcaggcaatcgcgacaaacatcagtaatctcacaaaacataacattaagaagatcaatagaaattttcccgtgaaccagcagatcgtttacatgggttggtgcgaagcaagggaacaggacccgcttcaagacagggtatacagccctacgttcctcgcactgagggggtcttgcctgtataagttccttgctcctccggtcacaacatgggactggacacgcgcggaaaagactttctccgtctacgaaatcatgtgtaagatcctaaaagacagcgatctcttagatcgcagaaagcaatgttttaccgttcaatctgagtcgggcgaagatctctactttagtgttgagctagagagcgacctggcacagtgggaacgcgccttccagactgctactttccttgaagttgaacggatccaatgcaaaacatacgcgtgtgtgctcgaatcccacctgatggggctcaccattgacttctctaccggattcatctgcttcgacgccgcgactaaggccgtcctgtggagatacaagttcagtcaactgaaaggctcgagtgatgacggcaaaagcaagatcaagttcctgttccagaaccctgatacaaagcaaatcgaagccaaggagctcgagtttagcaacctgtttgctgtcctgcactgtattcatagcttcttcgccgcgaaggtggcctgtctggatcccctattcctcgggaaccaagcaactgcatccacagccgcctcctcagctaccacctccaaggccaagtacactacatag

SEQ ID NO: 137091 - DNA, 1554 bp, synthetic construct
  misc_feature 1..1554: note = Description of Artificial Sequence: Synthetic coding sequence
  source 1..1554: mol_type = other DNA
atggacttccggacagcgtgcgaagaaacaaagacaggaatctgccttctccaagacggcaatcaggagccatttaaggtcagactgcacctggctaaggatatcctgatgatccaagaacaggatgtcatctgcgttagcggagagcccttttacagcggagagaggaccgttactatcaggaggcagaccgttggcggattcggtctgtccattaaaggcggggccgagcacaatattcccgtagttgtatctaagatttccaaggagcaaagagcagagctcagtgggttgctgtttattggcgacgccattctccagatcaatgggattaacgttcgcaagtgtaggcacgaagaagttgttcaagttctccgaaatgccggagaggaggttacactgactgtgtccttcctcaagagggcacccgctttcctgaagctgcccttaaatgaagattgcgcgtgcgccccatcagatcagagcagcggaacgagctcccctttgtgcgactctggcctacatttaaactatcaccccaataataccgacaccctctcttgttcatcatggcctacttcaccgggcctaagatgggaaaaaaggtggtgtgatttgcgccttataccactgttacatagcaggtttagccaatatgtcccaggaaccgatctgtccagacaaaacgcgtttcaagtgatcgctgtggacggggtctgtacaggcattattcaatgtctgagcgccgaagactgcgtggattggcttcaggccatagctaccaacatcagcaacctcactaagcacaacattaagaagattaatagaaattttcctgtgaatcagcagatcgtatatatgggttggtgtgaggccagggaacaagatccactccaggacagagtttacagtcctacattcctagctctccgggggtcatgcctttacaaatttttggcgccgcccgtgaccacctgggactggacccgtgccgagaagacattctcggtgtatgaaattatgtgcaagattctgaaggacagtgatctgcttgaccggcgcaaacagtgttttacggtgcagtccgagtcgggggaggacttgtatttctctgtcgagctggagtccgacctagcgcagtgggagagggccttccagaccgctacctttcttgaggtcgagcgtatccaatgtaaaacatacgcgtgcgtcctggagtcccatctgatggggctgaccatcgatttttctacgggcttcatctgctttgacgccgcaacaaaggcagtcctgtggcgttataagttttcccagctgaagggcagcagtgatgatggcaagagcaagatcaagtttttgttccagaacccagacacgaagcaaattgaggccaaagagctcgagtttagcaacctctttgccgtactgcattgcattcactccttttttgctgccaaggttgcgtgcctggaccccctctttttaggaaatcaggctactgcctcaaccgcggccagcagcgctactacatcaaaagccaagtacaccacatag

SEQ ID NO: 137092 - DNA, 279 bp, synthetic construct
  misc_feature 1..279: note = Description of Artificial Sequence: Synthetic coding sequence
  source 1..279: mol_type = other DNA
atggactttagaactgcctgcgaggagacaaaaactggcatctgcttactgcaagacggaaatcaggaaccatttaaggtcaggctgcacctagcaaaggatattctgatgattcaagaacaggatgtgatctgtgtctccggcgaacctttttatagcggagagcgtacggtgactatccgacgccagacagtcggaggatttggactgtccattaaggggggcgctgaacataacatccctgttgtggtctccaagatcagcaaggagcagcgctag

SEQ ID NO: 137093 - DNA, 423 bp, synthetic construct
  misc_feature 1..423: note = Description of Artificial Sequence: Synthetic coding sequence
  source 1..423: mol_type = other DNA
atggacgtgttcatgaaaggcttgtcgaaagccaaggaaggcgtagtggccgccgccgagaagaccaagcagggcgtggcagaggcagctggtaagaccaaagagggcgtcttatacgttgggtccaaaactaaagaaggggttgtccatggggtggcaactgtagccgagaaaacaaaggagcaggttaccaacgtcggtggcgctgtcgtcactggcgtaaccgccgtggcccagaagactgtggaaggggccggcagcatcgccgcggcaactggctttgtgaagaaggatcagctgggcaaaaacgaggagggggccccacaagagggcattctcgaggacatgccggtcgatccagataacgaggcatatgaaatgcccagcgaagaaggctaccaggactatgagcctgaagcctag

SEQ ID NO: 137094 - DNA, 339 bp, synthetic construct
  misc_feature 1..339: note = Description of Artificial Sequence: Synthetic coding sequence
  source 1..339: mol_type = other DNA
atggacgtgtttatgaaagggctctccaaggcaaaagagggagtcgtggcagcagctgagaaaaccaagcagggagtggccgaggccgctggaaagacaaaagaaggcgtgttgtacgttggatctaaaacgaaagaaggagtggttcatggggtggcaaccgtagcagaaaagaccaaggagcaggtcacgaacgtgggaggggctgtggtgaccggcgtaactgcagtggcccagaagactgtggaaggtgccggcagtatcgcagccgcaacggggtttgtcaagaaggatcagctcgggaaggaaggctaccaggactacgaaccagaagcctag

SEQ ID NO: 137095 - DNA, 423 bp, synthetic construct
  misc_feature 1..423: note = Description of Artificial Sequence: Synthetic coding sequence
  source 1..423: mol_type = other DNA
atggatgtatttatgaaaggattatcaaaagcaaaggagggagtggtcgctgccgccgagaaaaccaaacagggcgtggctgaagccgccggtaaaacaaaggaaggagtgctttatgtcgggagcaagaccaaggaaggggtagtgcatggggttgctaccgtcgcagagaagacaaaggagcaggtcaccaatgttggtggggcagtggtcactggggttacagccgtggcacagaagaccgttgaaggtgcaggcagcatcgcagccgccaccggcttcgtgaaaaaggaccagctcggcaagaacgaagaaggcgccccacaggagggcatcctcgaagatatgcccgtagatccagacaacgaagcctacgaaatgcccagtgaagaggggtatcaggattatgaacctgaagcgtag

SEQ ID NO: 137096 - DNA, 381 bp, synthetic construct
  misc_feature 1..381: note = Description of Artificial Sequence: Synthetic coding sequence
  source 1..381: mol_type = other DNA
atggacgtgttcatgaaaggattgtctaaagctaaggagggcgttgtagccgcagccgagaagaccaaacagggggtggcggaggcagcaggaaaaaccaaggagggggtactatatgtcgtggcagaaaagactaaggagcaagtgacaaatgtcgggggcgcggtggtgacaggtgttaccgctgtggcacagaaaaccgttgaaggtgcaggcagcatagctgctgctaccggctttgtcaagaaggatcagctcggaaagaacgaggagggggctccacaggagggcattctggaggatatgccagttgatcccgacaacgaggcttacgagatgccgtcagaggagggctatcaggactatgagccagaggcatag

SEQ ID NO: 137097 - DNA, 423 bp, synthetic construct
  misc_feature 1..423: note = Description of Artificial Sequence: Synthetic coding sequence
  source 1..423: mol_type = other DNA
atggatgtctttatgaagggactgtctaaggctaaggaaggggtggtggcagccgctgagaaaacaaagcagggcgtggccgaggctgcgggtaagacgaaggagggggtgctgtacgtgggcagtaaaactaaggagggtgtggtgcatggggtggcaaccgtggcagaaaaaacgaaggaacaggttacgaacgtagggggggcagttgtgactggagtgacagccgtggctcagaagacagtcgagggcgctggatctattgcagcggcaaccggcttcgtgaagaaagatcagttagggaagaacgaagagggggcgccacaggagggtattttagaggatatgcctgttgatcctgacaatgaggcctacgaaatgcctagtgaggagggctatcaggactatgagccagaagcctag

SEQ ID NO: 137098 - DNA, 339 bp, synthetic construct
  misc_feature 1..339: note = Description of Artificial Sequence: Synthetic coding sequence
  source 1..339: mol_type = other DNA
atggacgtctttatgaagggactcagcaaggccaaggagggggtcgtagccgccgcagagaagacaaaacagggggtggcagaagccgccggaaagacaaaagagggggtgctgtatgttggttctaaaaccaaagagggagtggtccacggagtggccaccgtcgccgagaagaccaaggagcaggtgacgaacgtgggcggagctgttgtcacaggcgttacagccgtggctcagaagacagtggaaggagctggctcaatcgcagcagccaccgggtttgttaagaaagaccaactgggaaaggagggttatcaggactacgagccagaggcctag

SEQ ID NO: 137099 - DNA, 348 bp, synthetic construct
  misc_feature 1..348: note = Description of Artificial Sequence: Synthetic coding sequence
  source 1..348: mol_type = other DNA
atggatgtctttatgaagggcttgtctaaagccaaagaaggcgtggtcgctgctgccgagaagacaaagcagggcgtcgccgaagcggccgggaagacgaaggaaggcgtgctatacgtgggctcaaaaactaaggaaggggtggtccatggtgtcgccacagtagcagaaaagaccaaagagcaggtaaccaacgttgggggggctgtcgtgactggcgtgaccgccgtggctcagaagaccgtcgagggcgcagggtctatcgctgctgctaccggttttgtgaaaaaggaccagctcggcaaagtctggctgtgtacattctgcgttacttttatcagctggtag

SEQ ID NO: 137100 - DNA, 381 bp, synthetic construct
  misc_feature 1..381: note = Description of Artificial Sequence: Synthetic coding sequence
  source 1..381: mol_type = other DNA
atggacgtattcatgaaggggctctccaaggctaaagaaggcgtcgtggctgcggccgagaagacgaaacagggagtggcggaggcagccggcaaaacaaaagagggggtgctttacgtggtggccgaaaagaccaaagagcaagtcacaaatgtgggaggtgccgtcgtcacaggtgttactgccgtggcgcaaaaaactgtggaaggcgctgggtcaatcgctgccgctacaggcttcgtcaagaaagatcagttaggcaagaacgaggaaggagcaccccaggaggggatcctcgaggatatgccggtggatcccgacaatgaagcctacgagatgccgtctgaagagggctaccaagactacgaacctgaggcctag

SEQ ID NO: 137101 - DNA, 423 bp, synthetic construct
  misc_feature 1..423: note = Description of Artificial Sequence: Synthetic coding sequence
  source 1..423: mol_type = other DNA
atggacgtgttcatgaaaggcctgtccaaggcaaaggagggtgtggtggcagccgctgaaaaaactaaacagggcgtggccgaggctgccggcaaaactaaagaaggtgtgctatacgtcggctccaaaacaaaggaaggggtggttcatggcgttgcaaccgtcgcagaaaagactaaggaacaagtgaccaatgtgggcggggcagtggtgactggcgtcaccgccgtggcacagaagaccgtagagggcgccggctcaattgcggctgccaccggctttgtcaaaaaggatcagctcggtaagaatgaggaaggggcgccgcaggagggcatcctggaggatatgcctgtagatccagataacgaggcttacgagatgccatccgaagagggataccaggactacgaacccgaggcctag

SEQ ID NO: 137102 - DNA, 204 bp, synthetic construct
  misc_feature 1..204: note = Description of Artificial Sequence: Synthetic coding sequence
  source 1..204: mol_type = other DNA
atggacgttttcatgaagggactcagtaaagcgaaggaaggggtggtggccgccgcagagaaaactaagcagggcgtggcggaggctgccggcaaaacaaaagaaggcgtcctctacgtaggtagcaagaccaaagagggggtggtgcacggggtcgctaccgtggcggaaaaaaccaaagagcaggtgacaaatgtgggatag

SEQ ID NO: 137103 - DNA, 423 bp, synthetic construct
  misc_feature 1..423: note = Description of Artificial Sequence: Synthetic coding sequence
  source 1..423: mol_type = other DNA
atggatgtattcatgaagggcttgtccaaagcaaaagagggtgtggtggccgccgcggaaaaaaccaaacagggggtcgccgaggccgccggaaagaccaaggagggggtgctgtacgtaggatccaaaactaaagaaggtgtagtacacggtgtcgccaccgttgccgagaagactaaagagcaggtgactaatgtgggcggggcagtggtgaccggggtgactgccgtagcacagaaaacggtagagggcgcgggatcgattgccgccgctactggcttcgttaaaaaggaccaactcggaaagaatgaagagggagctccacaggaagggatcttggaagatatgcccgtggatcccgataacgaagcttacgagatgccctctgaggagggataccaggactatgagcccgaagcctag

SEQ ID NO: 137104 - DNA, 2760 bp, synthetic construct
  misc_feature 1..2760: note = Description of Artificial Sequence: Synthetic coding sequence
  source 1..2760: mol_type = other DNA
atggaggcgcctgaatatctggacctggacgagattgacttcagcgatgacatctcatatagcgttacgtctcttaagacaatacccgagctgtgcaggcgctgcgatacgcaaaatgaggatcgaagcgtgtcctcatcttcatggaactgcgggataagtacgctgataacaaacacacagaaacccaccggtattgcagatgtgtactccaagtttagacccgttaagagggtgtctcccctgaaacatcaacccgagactttggagaacaacgagagcgacgatcaaaaaaatcaaaaggtggttgaataccagaagggtggtgaatctgacctgggaccccagccacaagaacttggacccggggacggcgtgggcggaccacccgggaaaagctcagagccaagcacctccctcggcgagttggagcactacgacctggacatggatgagatcttagatgtcccctacatcaaaagctctcagcagctggcttcgtttacgaaggttacatccgagaagcgcatcttaggcttgtgtacaaccatcaacggcttatctggtaaggcctgttctactggatcatccgagtccagctccagtaacatggccccattttgtgtgctttccccagtcaaatccccccacctcagaaaagcttcagccgtaatacatgatcagcacaagttatccacagaggagactgagatctccccccccttagttaaatgtggcagcgcttatgaacccgagaatcagagtaaagacttccttaacaaaacattttccgacccacacggccgcaaggtcgagaaaactacccctgactgtcagcttcgagcttttcatttgcagagctctgccgctgagagtaaaccagaggaacaggtgtcgggactcaaccgcactagctcccaaggcccggaggaaaggagtgagtaccttaagaaggtcaagtctatactgaacatagttaaggagggtcagataagcctgttgccccacctggcagctgacaatctggataagattcacgatgaaaacgggaataatctgcttcacatagctgcgtctcaaggacacgctgagtgcttacagcaccttacaagtctgatgggtgaagattgtttgaatgaaagaaacactgagaagctcacccctgcaggactggccattaaaaatggccagctggagtgcgtaaggtggatggtgtccgagaccgaggccatagcagaactgtcatgcagcaaagattttccgagcctgatccactacgctggctgttacggccaggagaagattctgctgtggctgctccaatttatgcaagagcaaggaatctcccttgatgaagtggatcaagacgggaacagcgctgtgcatgtggcctcacaacacggctaccttggctgtatccagaccttagtggagtacggtgccaacgtgactatgcagaatcatgccggtgaaaaacccagtcagtctgccgaacggcagggccatacactctgctcccggtatttggtcgtagtcgagacatgcatgagtttggcttcccaggtggttaaactgaccaaacagctgaaagagcagactgtagaaagggtgactctccagaatcagcttcagcagtttctcgaagcccagaaatctgagggcaagtccctaccctcatccccctcaagcccgtccagtccagcatcccgtaagagtcaatggaagtcacctgacgctgacgatgatagcgtggccaagtctaagccaggcgtccaggagggcatccaggtgttgggatctctaagtgcttccagcagagcacgccccaaggccaaggacgaagatagcgataagattctcagacagctgcttgggaaggagatcagcgagaacgtttgtacacaagaaaaactttcacttgaatttcaggacgctcaggcttccagccggaattccaagaagatccctctggagaagagggagttaaagctggcccgtcttaggcagcttatgcagaggtcactgagtgagtctgacactgattcaaataatagcgaagatcctaaaactacgcccgtgcgcaaggctgaccggcccagaccccagccaattgtggagtccgtggagtcaatggactctgcagaaagtctgcatctaatgattaagaagcacactctggcctcaggcggaaggagattcccctttagtatcaaagcttcaaaaagcctcgatggtcattcaccctcccccacatcagaaagctcagagcctgatcttgaaagtcagtaccccgggtctggttcgattcccccgaaccagccttcgggagaccctcagcagccgtctccagattcaaccgctgcccaaaaggtcgctaccagccctaagagtgcgctgaagtccccatcatcaaagaggagaacgagccagaacctgaagctacgggtgacttttgaagagccagtagtgcagatggagcagccctctcttgagctcaatggggaaaaagataaagataagggccgaaccctgcagcgaacgtctacatcaaatgagagtggggaccagctgaagagaccgtttggagctttccgctccattatggaaactctcagcggtaatcagaacaataacaacaactaccaagcggctaaccagctgaagacatctacactcccgctgacctcgctgggccgtaagactgacgccaagggcaatcctgccagttctgcctccaaggggaagaacaaggctgcctag

SEQ ID NO: 137105 - DNA, 3051 bp, synthetic construct
  misc_feature 1..3051: note = Description of Artificial Sequence: Synthetic coding sequence
  source 1..3051: mol_type = other DNA
atggaagcccctgagtacctcgatctggatgagatagattttagtgacgatatctccgacaacagatcacagggaaacagattgcaaaaactaggacttgaggacaccgatagggaggacgccatggggttcgggtcacatcgcgcgaaactgaccgtggtggcagctctgggggcctgccattgtcccgagaatgagtattccgtcacttccctcaaaactatccctgaactctgtcggcggtgcgacacacagaacgaggaccgctcagtgagctcatcctcctggaactgcgggattagtaccctaatcaccaacactcaaaaacccacggggatcgcggacgtatacagcaagtttcggcctgtcaaacgtgtgtctcccctcaagcaccagccggagacattagagaataacgaaagcgacgaccaaaaaaaccagaaagtagtcgaataccagaagggaggggagagtgacttgggtcctcaaccacaagagctgggcccaggggatggcgtaggagggccccccggaaaatcatcagaaccctctaccagtctgggagaactcgagcactacgatcttgacatggacgagatcctggatgtaccttacataaaatcatctcaacagcttgcctccttcacgaaggtcaccagcgagaagaggattctcggcctgtgcactaccattaacggactgtctggcaaggcttgttccacaggctccagtgagtcttcctcctccaacatggcccctttctgtgttctgtcccccgtaaaaagtccacacttgcggaaggccagcgctgtgatccacgaccagcataagctgtctacagaggaaacagaaatctcacccccccttgtcaagtgcggttctgcctatgaacctgaaaatcagtctaaagactttctaaacaaaacattttcggatccccacggtaggaaagtcgaaaagacaacacctgactgtcaactgcgggctttccatttgcaatcctctgctgccgagagcaagcccgaagagcaagtgtcgggactcaatcggacatcttctcagggacccgaagagcggtctgagtatctcaagaaagttaaatctatccttaatatcgtgaaggaggggcagatctccctgctgccacacctcgctgctgacaatctagacaagatccatgatgagaacggtaacaatttgttgcatatcgctgctagccagggccacgccgagtgcctacagcacctcacttccttgatgggcgaggactgtctgaacgaacgcaatacagaaaaactaacgcctgcaggcctcgccatcaagaacggtcaactcgagtgcgtcagatggatggtcagcgagaccgaggccatcgccgaactgagctgtagcaaagacttcccttccttgattcactacgccggatgttatggccaggagaaaatccttctctggttgttacagtttatgcaggaacaggggatctctcttgatgaagtggaccaagacggaaattctgctgtgcatgtggccagtcagcacgggtatctgggatgcattcagactctcgtggaatacggagcaaacgttactatgcagaatcacgccggcgagaagcctagccagagcgccgagcgtcaagggcatacactatgcagccgctatttggtggttgtggagacttgcatgagcctagcgtcacaggtagtcaagcttacaaagcagctcaaggaacagacagtggagcgggtgacgttgcagaatcagttgcagcagttcttggaggcccagaagagtgagggaaaatccctgccaagctctccgagttctccaagcagcccagcttcacgtaaaagccagtggaaaagcccagacgcagacgacgatagcgtagccaagtccaaaccaggagttcaagagggtattcaggtcttaggcagtctcagcgcaagcagtagggcaagacccaaagctaaggatgaggactcagataagatactaaggcagctgttggggaaagagattagcgagaatgtatgtacccaggagaagttaagtctggagtttcaggatgctcaggctagcagtagaaatagtaaaaagatccctctcgagaaacgcgagctaaaattagccaggttacggcagctaatgcagagatctctgagcgagtcagacactgattcgaacaattccgaggaccctaagaccacacctgtgagaaaggctgatcgaccgagaccccagcccattgtggaatccgtggagtcaatggacagtgccgaaagccttcatctgatgattaagaaacatacacttgcctccggtggcaggaggtttcctttttctatcaaagcaagcaagtctttagacggccactcccctagccctacaagcgagagctcggaacctgacttagagagccagtatccagggagtggaagtatccccccaaaccagccctctggggatccccaacagccatcccccgactccaccgccgcacagaaggtggcaacatcccccaaatccgctctgaaatctcccagttcaaaacggaggaccagtcagaacttgaagctgcgcgtcacattcgaagagccagtggtccagatggagcagcccagtcttgaactaaatggcgaaaaagacaaggacaagggtagaaccttgcagcgcacatccacatcaaatgaatcaggggaccaactgaaaaggcctttcggcgcttttcggtccattatggaaactctctcaggcaatcaaaataacaataataattaccaggccgctaaccagttaaagactagtaccctgcctctgacctctttggggcgaaagacagatgccaaaggcaacccagccagctctgcatccaaaggaaagaacaaagcggagatgtactcctcgtgcatcaacctgtcaagcaatatgcttatcgaggagcacctgtgtaacgatacccgtcataatgacattaatcggaagatgaaaaagagctattccatcaaacatatcgccgagccagagtctaaagagctgttcctgtag

SEQ ID NO: 137106 - DNA, 2580 bp, synthetic construct
  misc_feature 1..2580: note = Description of Artificial Sequence: Synthetic coding sequence
  source 1..2580: mol_type = other DNA
atggaggcacccgagtatctcgacctggatgagatcgatttttcagacgacatttcatatagcgtgacttccctgaagactattccagagctgtgccgtcggtgcgatactcagaatgaggacagatccgtcagttccagtagttggaattgcgggatctcaactctgattaccaacacacaaaagcccactgggatcgcggacgtctatagtaagtttagacccgtcaaacgcgtgtcacccctgaagcatcagccagagaccctcgagaacaacgaatcagatgatcagaagaaccagaaggtcgtggaataccaaaagggcggggaatcagaccttgggcctcagccgcaagagcttgggccaggcgacggtgtgggagggcctcccggtaagtcctcagagccatcaacttctctgggggagttggagcactacgacctcgacatggatgaaatcttggacgtcccatacatcaaatcatcccagcagttggctagttttaccaaagtgacaagtgagaaacgtatactcggactctgtacaacaattaacggcctgagcggtaaggcctgttctactggtagcagtgaatcctccagctctaatatggcccccttttgcgttctatcgccggtgaagagcccacatcttcgaaaagcctcagcagtcatccatgatcagcacaagttatctaccgaagagaccgagattagtcccccattggtgaagtgtggttctgcctacgagcccgaaaaccagtccaaggatttcttgaataaaaccttctctgatccgcatggtagaaaagtcgaaaagaccacacccgactgtcagcttagagcctttcatttgcagtccagtgccgccgagagcaaacctgaggagcaggtgtcaggtctgaacaggacttccagccagggacctgaggaaagaagtgagtatctcaagaaagtcaagagtattctcaatattgtcaaagagggacaaatttctctcctgaatggccaactggaatgcgtccggtggatggtgtcagagacagaagctattgccgagctttcttgttctaaagatttcccaagcctcattcattacgccggatgctacggacaggagaagatcctgctttggctgctgcagtttatgcaggagcagggcataagccttgacgaggtggatcaggacggaaatagtgctgttcacgtggctagccagcatggctacttggggtgcatccagactctcgtcgaatacggagccaatgtaaccatgcagaaccatgccggcgagaaaccttcgcagagtgctgagagacaaggccatactctctgtagtcgttatctcgtagtagtggaaacgtgcatgagtctggccagccaggtggttaaactgaccaaacaactaaaagaacaaacagtcgagcgggtcacactgcagaaccagcttcagcagttccttgaggcgcagaagagtgaagggaaatccctcccatcttccccctcaagtcccagttcgcccgcctctagaaaatcccagtggaagtcgcctgacgccgatgacgattcggtcgccaagtctaagcctggggtgcaagaggggatacaggttctggggagccttagcgcttcatctcgggcgcggccaaaggcaaaagatgaagatagtgacaagatcctgcgtcagctcctcggtaaagaaattagcgagaacgtgtgtacccaggagaaactgagcttggagtttcaagacgcccaggcaagctcacgaaatagcaagaagattccactggagaaacgcgaactgaaactggcccgcttaagacagctgatgcagcgtagtctgagcgaaagtgatacagacagcaacaactcagaggatcccaagacaacccccgtgagaaaagctgaccggcccaggcctcaacccattgtggaaagcgttgagagtatggacagcgccgagagcttacatctcatgattaaaaagcatacccttgcctctggaggcagaaggttcccattcagcattaaggccagcaaatcgctggacggacactcccccagcccgacttcagagagtagcgaaccggaccttgagagccagtaccctggatcaggaagcatccctcctaaccagcctagcggggatccccaacagccttctccagactccacagccgctcaaaaagttgctacaagccctaaatccgccctcaagtcgccgagctccaaaaggagaaccagccagaacctgaagctgcgagtaacgtttgaagagcccgtggtgcagatggaacagcctagtttagagttgaacggagagaaagacaaggacaaaggaaggacattgcagagaacaagcaccagcaatgagtcaggggaccagctgaagcgaccgttcggggcttttcgctcaatcatggaaaccctctccgggaatcagaacaacaacaacaactaccaggcagcaaatcaactcaaaacatcaacactgcccctcacaagtttgggcaggaaaacggacgccaaaggtaatccagcttccagcgcctctaaaggcaaaaataaggctgcctag

SEQ ID NO: 137107 - DNA, 1812 bp, synthetic construct
  misc_feature 1..1812: note = Description of Artificial Sequence: Synthetic coding sequence
  source 1..1812: mol_type = other DNA
atgacatatctcatccagtcccatcacagccgcaggtcacagaattgcgccgaggatgttattaggaagaccaaaacagaccaaaatggtcaactggaatgtgttaggtggatggtctcggagacggaggccatcgcagagctcagctgcagcaaagattttcccagcctcatccattatgcgggttgctacggacaggagaagattctgctgtggcttctccagttcatgcaagaacaaggcatctcactcgacgaggtggatcaggatggaaactccgccgtgcatgtggcctctcaacacggctatctcggatgcattcagactctagttgagtatggcgctaatgtgacaatgcagaaccacgccggcgagaagccctcccagagtgcagaaaggcagggccacacactctgcagccgctacctggtggtggtggagacatgcatgtccctggcgagccaggtagtgaagttgacgaagcagctaaaagagcagactgtagaacgggttaccttgcagaatcagctgcaacagttcctggaggcccagaaaagtgaagggaagtccctcccgagcagtccgagttctccgagtagccctgcgagtcggaaatcccagtggaagtcccctgatgcagatgatgatagcgtcgccaaatcaaagcctggggtacaggaaggaattcaggttctaggctcactgtcagcatccagtagggctcggcccaaggctaaagatgaggacagcgataagattttacgccaactcctgggaaaagagatcagtgaaaatgtgtgtacccaagaaaaactatccctggaattccaggacgcgcaggcctccagtcgcaactccaaaaaaatcccactcgaaaagcgtgagctcaaactggctcgtttgaggcaactcatgcaacgatctctgtccgagtctgacaccgatagtaacaacagtgaagatccgaaaactacccctgtccgaaaggctgataggcctagaccccaacctattgtggagagtgttgaaagcatggatagcgccgagagtctgcatttgatgattaagaagcacaccttggctagcggggggcgacggtttccattttccatcaaggcttcaaagtctctcgacggccattccccctcccctaccagcgagtcgtccgagcctgatctggaaagccaataccccggcagcggcagcatccctcctaaccagccctcaggggatcctcagcagccttctcctgactcaaccgccgctcagaaggtggctacatcaccaaagtcagccttaaagtccccaagctccaaacgccggacctcgcagaacctgaagcttagagttacattcgaggagcccgtggtccagatggaacagcctagcctggaactcaatggagaaaaggataaggacaaagggcgcaccctacagaggactagcacttcaaacgaaagcggagaccagctgaaacgcccttttggagctttccgctcaatcatggagaccctgagtggtaatcaaaacaacaacaacaattatcaagccgctaatcagctgaagacgtccaccctaccgttaaccagcctgggccgcaagaccgatgcgaagggaaatccagcaagttcagctagtaagggcaagaacaaagctgagatgtatagctcttgtatcaatttaagttcaaatatgctcatagaggaacacctgtgtaacgatacacggcacaatgacatcaataggaaaatgaagaaaagctatagcatcaagcatattgcagaacccgaaagcaaggaactgttcctgtag

SEQ ID NO: 137108 - DNA, 1566 bp, synthetic construct
  misc_feature 1..1566: note = Description of Artificial Sequence: Synthetic coding sequence
  source 1..1566: mol_type = other DNA
atgaagctcaccctcgtcatgacgtaccttattcaaagtcaccatagcaggaggtctcagaactgtgcagaagatgtgatccggaaaactaagacggaccaggaaaagattctcctgtggctcttgcagtttatgcaggaacagggaattagcctggacgaagtcgatcaggatggcaacagcgcggtacatgtggcttcgcaacacgggtacctcggctgtattcagactctcgtggagtacggggccaacgtaactatgcagaaccacgctggagaaaaaccttcccagtcagccgaacggcagggccacaccctatgttcccgctatttggtagtcgtggaaacgtgcatgtctctggctagccaggtcgtgaaactcacaaaacagctgaaagagcaaactgtggaaagggtaacactccagaatcaactgcagcaatttctagaggcacagaagtcagaagggaagtcactcccctcatctccctccagtccatcctcacctgcttccaggaagagccaatggaaatcccccgatgcggacgatgacagcgtcgcaaaatcaaagccaggggttcaggaagggattcaggtgcttgggtccctatctgcttcaagccgggccaggcctaaggctaaggacgaggattccgacaaaattcttcgacaactgctcgggaaggagatatccgaaaacgtgtgcacccaggagaaactcagcctggagttccaagacgcccaggcaagcagccggaatagtaagaagatcccattagagaaaagagagcttaagctggcccgactcagacagcttatgcagagaagcctttcggaaagcgacaccgactcgaacaactcagaggatccaaaaacgactccagtacgcaaggctgaccgcccgcggccgcagcccattgtcgagtcagtcgaaagtatggacagtgctgagtccctccatcttatgataaagaaacatactttagcctctggcggccgccggtttcctttttccatcaaggcatctaaatcattggatggccatagtccttctcccacctctgagagctccgaacctgatctggaaagtcagtaccccggctcaggatctatcccacccaatcaacctagcggcgatccacagcaaccctcgccagacagtacagccgctcagaaagtggcaactagtccaaagtccgccttaaagagcccaagctcgaaacggaggacctctcagaacctaaagctgagggttacatttgaggagcccgtggtgcagatggaacagcctagcctggaattaaatggggaaaaggataaagataaaggccggacactgcaacgcacctctacatcaaatgaatctggagatcagttgaagcgcccattcggggccttcagaagtattatggaaacattgtctgggaaccagaacaataataataactaccaggccgcaaatcagctgaagacatctaccctgcctctcacctccctcggaaggaagaccgacgccaaagggaatcccgcctcatccgccagtaagggcaaaaataaggcagcatag

SEQ ID NO: 137109 - DNA, 1146 bp, synthetic construct
  misc_feature 1..1146: note = Description of Artificial Sequence: Synthetic coding sequence
  source 1..1146: mol_type = other DNA
atgaagcttaccctcgttatgacatatttgattcagtcccaccatagccgtcgcagccagaactgtgcagaagacgttattcgcaaaaccaagactgatcagaatggacaactcgagtgcgtcaggtggatggtctccgagaccgaggctattgcagagttgtcatgtagcaaggacttccctagtctgattcactatgcggggtgctatggtcaagagaaaatacttctatggcttttacagttcatgcaggagcagggaatttcgctagatgaggtcgatcaggacggcaacagtgcagtgcacgtggctagccaacatggatatctgggctgtatccagacactagttgaatacggtgcaaacgtgaccatgcagaaccatgcgggagagaaaccttcccagagcgctgaacgccagggacacacgctctgttcacgttacttagtggtcgtcgagacctgtatgagcctggcatctcaggtggtgaaattgactaagcaattgaaggaacaaactgtggaaagagtcaccctgcagaaccagctacagcagtttctcgaagcccagaagtccgaggggaagtctctcccttcttccccaagttctccttcgtctcctgcctcacggaagtcccagtggaagtccccggatgctgacgatgactctgtagccaagagtaaacctggagtccaagaaggcattcaggttctgggcagcctaagcgcaagctcgagggcccgacccaaggccaaagatgaagattccgataagattctccgccagcttttgggtaaggaaatttccgaaaatgtctgtacacaggaaaaactgtccctggaatttcaggacgcccaggcaagcagccgcaattctaagaaaataccgcttgaaaaacgagagctgaagctggcgagacttcgacaattgatgcagcggtctctttccgagagtgacacggacagtaataacagcgaggatcccaaaaccacccccgtccgcaaagccgatcgaccaagacctcagccaattgtggagtcagtggagagcatggattctgccggcttcctgtccgcctcaagaccacctaacccttggatggcaacggcacatctcccaccacagagggctgcaaaccagacatag

SEQ ID NO: 137110 - DNA, 1767 bp, synthetic construct
  misc_feature 1..1767: note = Description of Artificial Sequence: Synthetic coding sequence
  source 1..1767: mol_type = other DNA
atggaagctcccgagtacctggatcttgatgagatcgatttctcagacgatatcagcgacaacaggagccaggggaatagattgcaaaaactgggtctggaggacaccgatagagaagatgcaatgggatttggatctcaccgggcaaaattgactgtcgtagccgcgctgggcgcctgccactgtcctgaaaacgagtacagtgtaactagcctgaagactatacctgagctctgccgcagatgcgatacacagaacgaggatcggtcagtctcgagctcgagctggaactgcggcatctcaactttaataacgaatacccaaaagcccaccggaatcgcagatgtatatagcaaattcaggccagtgaaacgagtctcccctctcaagcaccagccagaaactcttgagaacaatgaatcggatgaccagaagaaccagaaagtggtagaataccagaaaggtggggagtctgatcttggtccacaaccgcaagagttgggtcctggtgacggtgtcggagggcccccgggtaagagctctgaacctagtaccagcctgggagaacttgagcactacgatttagacatggatgaaatccttgacgtcccctacatcaagtcgagccagcaacttgcaagcttcacaaaagtgacgagcgagaagaggatcctgggcctatgtacaacgatcaacggcctgagtgggaaggcttgcagcacagggtcctcagaaagctcttcaagcaacatggctccattttgcgtcctgagccccgtcaagtccccacatctgagaaaagcatccgctgtcatccacgatcagcataagctctctaccgaagaaactgaaatctcaccgccactcgtaaagtgcgggagcgcttacgagcctgagaaccagagtaaagacttccttaacaaaacctttagtgatccccacggacgcaaggtggaaaaaactacaccagattgtcagctgagagccttccacctccagtcttccgctgccgaatccaaacccgaggaacaagtatccgggctgaatcgcacgtcatcacagggacctgaagagcgttccgagtatctgaaaaaggtcaaaagcattcttaatatagttaaggagggacagatatcactcctccctcacttggcagccgacaacctcgataaaatccacgacgagaacgggaacaatcttttgcacatcgcggcgtcccagggacacgcagagtgtctacagcacttgaccagcttgatgggcgaggattgccttaacgaaagaaacactgagaaactgactcccgccggcctcgctataaaaaacggacagctggaatgcgtgcgctggatggtgtctgaaactgaagccatagcagagctgagctgttcaaaagactttcctagtctcattcactatgccggctgctacgggcaggaaaaaatcctgttatggttgctgcagtttatgcaagagcagggcatctcactggatgaagtggaccaggatggcaactctgcagtccatgttgcttcgcagcatgggtacctgggctgcatacagaccagacttaagatccaggggacgtggaatggaagtgaaacatgcctctttacacaccatttttcttcttaccctccaatctccagcgggttgcagtgtcagggacaagagggcgttctcttcattccagaccaagtgggcgctgcaaccaataaacaggtcttgttccagaaccagttgcccgagactaaatcttcctattag

SEQ ID NO: 137111 - DNA, 267 bp, synthetic construct
  misc_feature 1..267: note = Description of Artificial Sequence: Synthetic coding sequence
  source 1..267: mol_type = other DNA
atggaagcccctgagtacttggacctggacgaaattgactttagtgacgacatctcatacagtgtcactagcctcaagaccatccccgagctgtgtaggcgatgtgatacccaaaacgaggaccgctcagccactccttcgtgccggcaaagccgtcagaactctaggcgtaaatggaaacagagcattacctactgcggcgtgacgggaacccgccgtgtgtccacagccccgcacttcttcgatggacgccgcctcccccagtag

SEQ ID NO: 137112 - DNA, 297 bp, synthetic construct
  misc_feature 1..297: note = Description of Artificial Sequence: Synthetic coding sequence
  source 1..297: mol_type = other DNA
atggaggctcccgagtacttggatctcgacgaaatcgatttttccgatgatattagctattctgtgacctccctcaaaactatccccgaactgtgcagaagatgcgatacacagaacgaagacagatcagtcagttctagcagttggaactgcggcatttctacgctgataacaaatactcagaaaccaactggtatcgccgacgtctacagtaagtttcgaccagtcaaaagagtgagtcccctgaagcaccagccggaaacactggagaacaatgagagtgatgaccaaaaatag

SEQ ID NO: 137113 - DNA, 45 bp, synthetic construct
  misc_feature 1..45: note = Description of Artificial Sequence: Synthetic coding sequence
  source 1..45: mol_type = other DNA
atggaagctcccgaatacttggaccttgatgaaatcgatttttag

SEQ ID NO: 137114 - DNA, 408 bp, synthetic construct
  misc_feature 1..408: note = Description of Artificial Sequence: Synthetic coding sequence
  source 1..408: mol_type = other DNA
atggaggctcctgaatatctcgatctcgatgagatcgatttctccgacgatatttcttatagcgtgacgtcccttaaaactattccagagctgtgccggcggtgtgatacccaaaatgaagacagaagcgtgagcagttcatcatggaattgcggtattagcacactcatcactaatacacagaaacctactgggattgcagatgtttatagcaagttcagacccgtcaagcgcgttagtcctctgaagcatcagccagagacgctcgaaaacaacgaaagtgatgatcaaaaaaatcagaaagtcgtggagtaccagaaaggaggcgagagtgacttgggtccccagccacaggagctgggccctggcgacggggtaggcggccctcctggtaaatcgtccgagtag

SEQ ID NO: 137115 - DNA, 1434 bp, synthetic construct
  misc_feature 1..1434: note = Description of Artificial Sequence: Synthetic coding sequence
  source 1..1434: mol_type = other DNA
atgcaggaacagggcatcagtctagacgaggtggatcaggacgggaacagcgcagtgcacgtcgcaagccagcatggatacctgggctgcatccaaaccctggtggagtacggggccaatgtgactatgcagaaccacgccggcgaaaagccctcacagagtgctgaacgccagggccatactctgtgttctcgttatctcgtggttgtggagacctgcatgagtctagcgagtcaggtggtcaaactgacaaaacagctgaaagaacagacagtcgaaagagttaccctccaaaatcagcttcagcaatttctagaagcgcagaaaagcgagggtaaatctctgccgagcagccccagcagccccagcagtccagctagtcgcaaatcccagtggaagtcgcccgatgcagacgacgactccgtggccaagtctaaacctggagttcaggaaggaatccaggttttaggatcactcagcgccagttctagagcccgccccaaggccaaagacgaggactcagataagattctgcggcagcttctgggtaaggaaatcagcgagaacgtgtgcactcaggaaaagttgtccctggagttccaggatgcgcaagcttcttccagaaactctaaaaaaatcccgctagaaaaacgggagttgaaactggccaggttaaggcagttgatgcagaggagtctttctgagagtgacaccgactcaaacaattccgaggatccaaaaacaactccggttcggaaggcagatcgtccaaggcctcaacctattgtggaatctgtggaatcaatggacagtgcagaatcattacacctcatgatcaagaaacacacccttgcttcggggggccgacggttcccattttctatcaaggcaagcaaatccctggacggccactccccaagcccaactagcgagagttccgaacccgacctggaatcacagtaccctggcagcggcagcattcctcccaaccagccctccggggaccctcagcagccaagtccagattccactgccgcacagaaagtggcaaccagtcctaagtcagcactgaagagcccaagctcaaagagacgaacttcacagaatctcaagcttcgagtcacatttgaggaacccgtagtgcagatggagcaacctagcctggagctgaacggcgagaaggataaggataagggaagaaccttacaaaggactagcacaagtaacgaatctggcgaccaattgaagagacccttcggtgcctttcgatccataatggagacgctttctggcaatcagaataataataataattaccaggctgcaaaccagctgaagaccagtaccctgccattgacatccttgggcaggaaaaccgacgcaaagggcaatcccgcatcctctgcctccaaaggcaagaataaggcagcatag

SEQ ID NO: 137116 - DNA, 405 bp, synthetic construct
  misc_feature 1..405: note = Description of Artificial Sequence: Synthetic coding sequence
  source 1..405: mol_type = other DNA
atggatgtgtttatgaagggactatctatggcaaaggaaggtgtggtggccgcagcagaaaagaccaaacaaggggtcacggaagccgcagagaaaacgaaggagggtgtactttatgtgggctctaagactagagagggggttgtccagggcgtggccagcgtagccgaaaagacgaaggaacaagctagccaccttggtggcgccgtcttcagtggagctggaaatattgctgctgccacggggctggtgaagcgtgaggagtttccgacggatctgaagcctgaggaggtcgcgcaagaagcagctgaagaaccactgattgaacctctcatggagcctgaaggtgagagctacgaggaccccccacaggaagagtaccaggaatacgagcctgaagcttag

SEQ ID NO: 137117 - DNA, 405 bp, synthetic construct
  misc_feature 1..405: note = Description of Artificial Sequence: Synthetic coding sequence
  source 1..405: mol_type = other DNA
atggatgttttcatgaaggggctatccatggccaaggaaggtgtggtcgctgccgctgagaaaacaaagcaaggcgtgactgaggcagccgaaaagaccaaagagggggtgttatatgtgggctcaaagacaagagaaggagttgtgcagggagtggccagcgttgctgaaaaaaccaaagaacaagcctcccacctaggcggtgccgtatttagtggggcaggaaacatcgccgccgcaaccggtcttgtgaaacgtgaagagtttccaacagatcttaagccggaggaagttgcccaggaagcagcggaggagccccttatcgaacctcttatggagccagagggcgaatcctatgaggacccaccacaggaagaatatcaggagtacgaaccagaggcctag

SEQ ID NO: 137118 - DNA, 405 bp, synthetic construct
  misc_feature 1..405: note = Description of Artificial Sequence: Synthetic coding sequence
  source 1..405: mol_type = other DNA
atggatgtgtttatgaagggcctaagtatggccaaagagggcgtggttgctgccgccgaaaaaacgaaacagggcgtgacagaagctgcagagaagactaaggagggggtgctctatgtcggatcgaaaacacgcgagggagtggttcagggggtggctagcgtcgctgaaaaaacaaaggaacaggccagtcacctgggcggagctgttttttcaggtgccggcaatattgctgcagccacaggcctggtgaaacgggaggaatttccaactgacctgaaacccgaggaggtggcccaagaagccgctgaagagcccttgatcgagccactaatggagcctgagggcgagagctatgaggatcctccgcaggaagagtatcaggaatacgagccagaggcgtag

SEQ ID NO: 137119 - DNA, 405 bp, synthetic construct
  misc_feature 1..405: note = Description of Artificial Sequence: Synthetic coding sequence
  source 1..405: mol_type = other DNA
atggacgtttttatgaagggcctgtccatggccaaggagggcgtagtcgccgcggcagagaaaactaagcagggggtcacggaagcggccgaaaagactaaagagggcgtcctctatgttgggtctaaaacaagggaaggggtagtgcagggcgtggcaagtgtagcagagaagaccaaggaacaggcttctcacctcggaggggctgttttctcaggggccgggaacattgccgccgccactgggctggtcaaaagggaggaattccccaccgatcttaagcccgaagaagttgcgcaggaagccgctgaagagccccttattgagccacttatggagcccgagggagaaagctacgaagacccaccacaagaagagtaccaggagtacgagcccgaagcctag

SEQ ID NO: 137120 - DNA, 381 bp, synthetic construct
  misc_feature 1..381: note = Description of Artificial Sequence: Synthetic coding sequence
  source 1..381: mol_type = other DNA
atggatgtcttcaagaagggattcagcatagcaaaagaaggggtggtgggcgcagtggaaaagacaaaacagggggtaaccgaggccgccgagaaaacgaaagaaggggtgatgtacgtgggagcaaaaaccaaggagaatgtggttcaatctgtcacatctggcttaccctggggctggggctgggggggagggcagcctgtctcttctcattccggacgggaggatcagggagctgggcagcggcgtgaacggggctgtggagagcagagacagcactgcggtcaccaagacagagggggaggcggagagcataggggccacctgcgcggcggggcgcagggaggcttggaagctatttgtcctcccacggggggctag

SEQ ID NO: 137121 - DNA, 384 bp, synthetic construct
  misc_feature 1..384: note = Description of Artificial Sequence: Synthetic coding sequence
  source 1..384: mol_type = other DNA
atggatgtttttaagaaaggattcagtattgcaaaagagggcgtcgtaggcgccgtggaaaagaccaagcagggggtgacggaagcagccgagaaaacaaaagagggggtgatgtacgtgggtgccaagactaaggagaacgtggtccagagtgtgacatcagtagccgaaaaaacgaaagagcaggcgaatgccgtcagtgaagcggtggtttcgtccgtgaacaccgtagccacgaagacagtagaggaggccgagaatattgcggtgacatcaggcgtagttagaaaagaggacctacgaccaagcgcaccccagcaagagggcgaagccagcaaagagaaggaagaggtggcggaggaggctcaatctggaggagactag

SEQ ID NO: 137122 - DNA, 471 bp, synthetic construct
  misc_feature 1..471: note = Description of Artificial Sequence: Synthetic coding sequence
  source 1..471: mol_type = other DNA
atggcgggacaatttaggtcctacgtctgggacccactgctgatcctgtcccagatagtgttgatgcagacggtctactatggctcactggggctctggctggctctcgttgacggactcgtgcgttctagcccctccctggaccagatgttcgatgctgaaattttgggcttctcaacgccacctggacgattatcaatgatgagtttcatactcaatgcacttacatgtgctcttggtctgttgtacttcatccgaagaggtaagcagtgcttagacttcaccgtgactgttcatttctttcatctattgggatgttggttctactcatctcggtttcctagcgccctcacctggtggctcgtgcaggctgtatgtatcgctctaatggccgtgataggcgaatatctgtgtatgagaacagagctgaaggagatccccctcaattccgctcccaaaagcaatgtctag

SEQ ID NO: 137123 - DNA, 471 bp, synthetic construct
  misc_feature 1..471: note = Description of Artificial Sequence: Synthetic coding sequence
  source 1..471: mol_type = other DNA
atggcgggtcaattccggagctacgtgtgggatcccttgctgatcctttcccagattgtgctgatgcagaccgtgtattacgggtcattgggtttgtggctggccctggttgacggcctggtgagatctagcccttctctcgaccagatgtttgatgccgagattctaggcttctcaacgccaccaggtaggctgagcatgatgtccttcatacttaatgccctgacgtgtgcactgggcctgctatactttataagacgcggaaaacagtgcttagatttcaccgtgacagtacactttttccatctactgggatgctggttttatagtagtcgcttcccctctgcgttaacatggtggcttgtccaagctgtatgtattgcactaatggccgtgatcggagaatatctgtgcatgcgcaccgaattgaaggagatcccattaaacagcgcccccaagagcaatgtgtag

SEQ ID NO: 137124 - DNA, 357 bp, synthetic construct
  misc_feature 1..357: note = Description of Artificial Sequence: Synthetic coding sequence
  source 1..357: mol_type = other DNA
atggctggccagtttaggagctacgtgtgggatccgctcctaatcctgtcccagatagtgttgatgcagacggtctattacggcagcctgggcctgtggttagcacttgtcgatggtctggtcaggagctcgcccagcctggaccagatgtttgacgccgaaatcctaggctttagcactccacccggtcggctctcaatgatgtcctttattctcaacgccctgacctgtgctctgggcctgctgtattttatccggcggggcaaacagtgcctggacttcactgtgactgtgcactttttccacctgctgggctgttggttctactcctctagattcccttctgccttgacctag

SEQ ID NO: 137125 - DNA, 231 bp, synthetic construct
  misc_feature 1..231: note = Description of Artificial Sequence: Synthetic coding sequence
  source 1..231: mol_type = other DNA
atggccggacagtttcgctcttacgtgtgggaccccttgctgattttaagccagattgtgctgatgcaaaccgtgtactacgggtcactaggtttgtggcttgctctggtagacgggttagttaggtcgtctccctcactggaccagatgttcgacgctgagatccttgggttcagtacgccacccgggaggctatcaatgatgtcttttatcttgaacgctctgacctag

SEQ ID NO: 137126 - DNA, 1134 bp, synthetic construct
  misc_feature 1..1134: note = Description of Artificial Sequence: Synthetic coding sequence
  source 1..1134: mol_type = other DNA
atgagcagccccggaaccgaatccgccggaaaaagcctgcagtatagagtcgaccaccttctctccgccgtggaaaacgagctgcaggccggatctgagaagggcgaccctaccgaacgcgaactgcgcgtcggcttggaagagagcgaattgtggttgaggtttaaggaacttacgaatgaaatgattgtaacaaagaacggccggcgcatgtttcccgtcctcaaggtaaatgtgtcaggattggacccgaatgccatgtattccttcctgttggactttgtcgctgccgataaccatcgttggaaatacgtcaacggcgagtgggttcctggagggaagccagagccccaggctccatcttgtgtttacattcacccagattccccaaacttcggcgcacactggatgaaggcacccgtcagctttagcaaggtcaagctgaccaacaaactgaacgggggaggacagatcatgttaaacagcttacataagtatgagccgaggattcatatcgttcgagtcggaggcccccagcgaatgatcacatctcattgcttcccagaaacccagttcatcgccgtcacagcttaccagaatgaagaaataaccgctctgaagataaaatacaatcccttcgcgaaagccttcttggacgccaaggaacggtccgaccacaaggagatgatggaagagcctggagattcacaacaacccggatattctcagtcttactctgataatagcccggcttgtctgtctatgttacaaagccacgacaactggtcttctctcggtatgcctgctcacccatccatgctgccagtcagtcacaacgctagcccccctacctcgtccagtcaatacccttctctgtggtccgtttccaatggagccgtgacacccggctcacaagccgccgccgtgagcaacgggctgggagcacagtttttcagaggtagtcctgcgcactacacaccgctaacgcatccagtatctgccccctccagttctggttcgcccctgtatgaaggggcagcggcagcaaccgacatcgtcgactctcaatatgacgccgcagcccagggtaggctgattgcatcttggactcctgtcagccccccatccatgtag

SEQ ID NO: 137127 - DNA, 735 bp, synthetic construct
  misc_feature 1..735: note = Description of Artificial Sequence: Synthetic coding sequence
  source 1..735: mol_type = other DNA
atgagatggtgcctgctcttgatctgggcacagggattaaggcaagcccctctagccagcggcatgatgactggtaccattgagactaccggcaacatcagtgccgaaaagggcggctccataatcctgcaatgccatctgagtagcaccaccgcccaggtgacccaggtgaattgggagcagcaagatcagttgttggccatatgtaatgctgacctcggctggcacatttccccttcttttaaggaccgggttgccccgggccctgggctgggtctgacgctgcagagcctaacagtcaatgatacgggtgagtatttctgtatctaccacacatatccagatggcacatacacaggtaggatcttcttagaggttttggagagcagtgtggccgagcatggtgcccgtttccaaatcccactgctgggagccatggccgccaccctggtggtcatctgcacagccgtgatcgtcgttgtagccctaacaaggaagaaaaaagcattgcggattcattctgtggaaggagacctgcgtcgaaaaagcgccgggcaggaagaatggtccccctccgccccctccccaccagggtcatgcgtacaggcagaggccgctccagcaggactgtgcggcgagcagcgaggggaggactgcgccgaacttcacgactactttaacgttcttagttatcgcagcctgggcaactgcagtttttttactgagacaggttag

SEQ ID NO: 137128 - DNA, 936 bp, synthetic construct
  misc_feature 1..936: note = Description of Artificial Sequence: Synthetic coding sequence
  source 1..936: mol_type = other DNA
atggctttcctagtcgctcatccaatgcagtttgtgtacctattgaccacgctgtgtgtctttaatatggtgtttgccaaattaggcttttccgagactgtattttctcagagactgtccttcaccgtgctgagcgcagtgggctacttccagtggcagaagcgcccgcacctcctccctgtagggccactcggtaggtctatgcgctggtgcctgctgctgatttgggcccaaggcctgcggcaagctcctttggcctctggcatgatgacaggcactattgaaaccaccggcaatatcagtgcagagaagggtggttcaatcatcctgcagtgccatctgtcctccactacggcccaggtaactcaagtgaactgggagcaacaggatcagcttctggccatttgcaacgctgatttgggatggcatatctctccaagcttcaaagacagagttgccccaggccccggactggggttaacgttacagtcattgacagtgaatgacacaggagagtacttctgtatataccacacgtatcctgacggcacgtacactggacgaatctttttggaagttctcgagtcatcagttgcagagcacggggccaggttccagatcccactgctgggcgctatggcagctacgttggtagttatctgcacagctgttattgtagtcgtggcattaacaagaaagaagaaagccttgagaatccattctgtggaaggggatctgaggagaaaaagtgccggccaagaagagtggagcccgtctgccccgagtccaccaggctcctgcgtgcaagccgaagcagcacccgctggactttgtggcgaacagagaggcgaggattgcgcggagttgcatgactacttcaacgtgctttcttatcgcagcctgggtaattgctcattcttcaccgagactgggtag

SEQ ID NO: 137129 - DNA, 735 bp, synthetic construct
  misc_feature 1..735: note = Description of Artificial Sequence: Synthetic coding sequence
  source 1..735: mol_type = other DNA
atgcgctggtgtctcctgcttatttgggctcaaggactcaggcaggctccactggcctccgggatgatgactggtactattgaaaccactggcaatatctccgccgaaaaaggtggaagcataattttgcagtgccacctgagtagtacgacagcccaggttacccaagtgaattgggaacagcaggaccagctgctagcgatatgtaatgctgatctcggctggcatattagcccctcattcaaggaccgggtggcgcccggccccgggctagggttgaccctgcagtctctcactgtcaatgatacgggtgaatatttttgcatataccacacctacccagatggaacatatactggacgtatttttctggaggtgcttgaatcttccgtggctgagcacggggctagattccagatcccgcttctgggcgctatggctgccacccttgtggtgatttgcacagctgtgattgtggttgtcgcgttaacacggaaaaaaaaggccctacggatccactcagtggagggcgatctgcggcggaagtctgcggggcaggaggagtggtcacctagcgctcctagcccccccggcagttgcgtccaagccgaggccgccccagcaggtctatgtggcgagcagcggggcgaagattgtgcggaacttcacgactactttaatgttctcagttatagaagcctgggaaactgtagcttctttaccgaaacagggtag

SEQ ID NO: 137130 - DNA, 561 bp, synthetic construct
  misc_feature 1..561: note = Description of Artificial Sequence: Synthetic coding sequence
  source 1..561: mol_type = other DNA
atgagcggcataagtggctgtccctttttcctttggggccttctcgcgctgctggggctggcactggttatttcattgatatttaacatctcccactacgtggagaagcagcgccaggacaaaatgtacagctactcttccgatcacacgagggttgacgaatactacatcgaggacactcctatttacggcaatttggacgacatgatctccgaaccaatggatgagaactgttacgaacagatgaaagcaaggcctgagaagtcggttaacaaaatgcaggaggcaaccccgagcgctcaggcaaccaacgagacacagatgtgctacgcttccctcgaccacagcgtaaaaggtaagcgaaggaaacctagaaagcagaacactcatttttcagacaaggatggcgacgaacagctgcatgccatcgacgcctcggttagcaagactacactggttgactccttcagtccagaaagccaggcagtcgaagagaacatccatgatgaccccatccgtttgttcggcttgattcgagccaaacgggagccaattaactag

SEQ ID NO: 137131 - DNA, 1308 bp, synthetic construct
  misc_feature 1..1308: note = Description of Artificial Sequence: Synthetic coding sequence
  source 1..1308: mol_type = other DNA
atgtcgagccctggcactgagagtgccggaaagagcctgcaatacagggtagaccatctgctttctgcggtcgaaaacgaactacaggctggtagcgagaaaggcgatcccactgaacgcgagttacgcgtgggtttagaagagtcagagttgtggctgcgctttaaagagctgactaacgaaatgattgttactaagaatgggcggcggatgttccccgtgctgaaggtgaatgtttctgggctcgaccccaacgctatgtatagctttctcttggacttcgttgcagcagacaaccaccgctggaaatacgtaaacggggaatgggtccccgggggcaaacctgaacctcaggccccatcatgcgtctacattcatcctgacagccccaactttggagctcactggatgaaggcgcctgtgagcttcagtaaagtgaagctgaccaacaaactgaatggtgggggccaaattatgcttaattccttgcataaatacgagcctagaatccacattgtccgtgttggagggccccaacgaatgattacttcccactgttttccagagactcagtttatcgccgtgacagcatatcaaaacgaagagatcaccgccttgaagataaaatataacccttttgccaaggcatttctcgatgcgaaggagagatcggaccacaaggagatgatggaggaacctggagactcacagcaaccgggctactcccagtggggctggctcttgccaggtaccagcacgctgtgtcctccggccaaccctcacccccagttcggaggagccctttccctcccctcaacacattcatgcgataggtatccaacacttcgatcgcaccggtctagtccttatccgtcgccatacgcccaccgaaacaatagcccaacctatagcgacaacagccccgcctgtctctctatgctccagtcacacgataactggagcagtctgggtatgccagcacacccctccatgcttcccgtttcccacaacgcatccccacccactagctcttctcagtaccctagtctgtggtctgtctccaacggggccgtcacccctggatcacaagccgcagccgtcagtaacggattgggagcccagttctttagaggctcccccgcccactacacaccactcacccaccccgtgtcagccccttcgagctccgggtctccactgtatgaaggtgctgcagccgcaacagatatcgttgacagtcaatatgacgctgccgcccaaggtcggttgattgcgtcatggacccccgtgagtcctccctctatgtag

SEQ ID NO: 137132 - DNA, 732 bp, synthetic construct
  misc_feature 1..732: note = Description of Artificial Sequence: Synthetic coding sequence
  source 1..732: mol_type = other DNA
atgagttccccagggacagagagcgcaggcaagtcccttcagtaccgtgtggaccacctgttgtcagccgtagaaaacgagctacaggccggcagtgaaaaaggcgaccctaccgaaagagagctgcgtgtcggtctagaggaaagcgaactttggctacgatttaaagaacttaccaacgaaatgatagttaccaaaaatggtagaaggatgttccctgtcctgaaagtgaatgtgtcggggttggaccctaatgcaatgtattctttcttattggatttcgttgccgctgataaccatcgctggaaatatgtaaacggagaatgggttcccggggggaagccagagcctcaggccccgtcgtgtgtgtacatccatccagactctccgaacttcggtgctcattggatgaaggcacctgtgagtttctctaaggtgaaacttacaaataaattgaacggcggcggccaaatcatgctgaattccctccataaatacgagccgcgtatacacattgtcagggtgggtggcccacagcgtatgattacttctcactgcttccctgaaactcagttcattgccgtgaccgcttaccagaacgaagaaatcaccgccttaaagattaagtataatcctttcgcaaaagcttttctggatgcgaaagagcgaagcgaccacaaagagatgatggaggagccgggtgacagtcagcagcccgggtatagccagtag

SEQ ID NO: 137133 - DNA, 366 bp, synthetic construct
  misc_feature 1..366: note = Description of Artificial Sequence: Synthetic coding sequence
  source 1..366: mol_type = other DNA
atgaggattatgctgctattcaccgctatacttgctttttcactcgctcaatcatttggagctgtatgtaaagagccccaggaagaggtcgtgccagggggaggaaggtccaagcgcgacccggacttataccagctcttgcaaagactctttaaatctcattcttcccttgaaggcctgttaaaagctctgtctcaggcaagcacggatcccaaagaatcaacgagccccgaaaaaagagacatgcatgacttctttgtgggactcatggggaaaaggtccgtgcaacccgatagccccaccgacgtgaatcaagagaacgtgcccagcttcggaatcctgaaatatccaccacgcgcggaatag

SEQ ID NO: 137134 - DNA, 366 bp, synthetic construct
  misc_feature 1..366: note = Description of Artificial Sequence: Synthetic coding sequence
  source 1..366: mol_type = other DNA
atgcggataatgctgctcttcactgctattttagccttcagtctagcgcagtcatttggtgccgtatgcaaagaacctcaagaggaagtggtcccggggggagggcgctccaagcgagatcccgacctgtaccagctgctgcagcgactgtttaaatcccactcttccctggaaggcttactgaaagcgctttctcaggcttccacagacccaaaggagtcaacttcacctgaaaagagagatatgcacgacttcttcgtggggctgatggggaagcgctctgtgcagcccgactccccaacagacgttaaccaagaaaacgttcctagctttggaattttgaagtatccaccaagagctgagtag

SEQ ID NO: 137135 - DNA, 312 bp, synthetic construct
  misc_feature 1..312: note = Description of Artificial Sequence: Synthetic coding sequence
  source 1..312: mol_type = other DNA
atgaggataatgttgctgttcacagcaattttggcgttctccctcgcacagagcttcggtgcagtatgtaaggaaccacaagaggaagttgtgcctggggggggtaggtcaaaaagggatcctgacctgtatcagctgctgcagcggctttttaagagtcactcatctctagaggggttgctgaaggctttaagccaagcatccaccgaccccaaggagtctacatctcccgaaaaacacagccctactgatgtgaatcaagaaaacgtgccatcctttggaattctcaagtacccgcctagggcagaatag

SEQ ID NO: 137136 - DNA, 366 bp, synthetic construct
  misc_feature 1..366: note = Description of Artificial Sequence: Synthetic coding sequence
  source 1..366: mol_type = other DNA
atgcggattatgctcctgttcactgccattctcgccttcagcctcgctcagagtttcggtgcagtttgtaaagaaccccaggaagaggttgtgcctggggggggaagatctaagagggatccagacctctaccaactgctgcagcggctgttcaaaagtcactcatccttggagggactgctgaaggctctatcccaggcaagcaccgatccaaaggagagtacgtccccagaaaaacgagacatgcacgatttttttgtcggactgatgggcaagcggtcggttcagcctgatagcccaacggacgtgaatcaggagaacgtgccttcatttggcatcctcaaatatccacccagagccgaatag

SEQ ID NO: 137137 - DNA, 1224 bp, synthetic construct
  misc_feature 1..1224: note = Description of Artificial Sequence: Synthetic coding sequence
  source 1..1224: mol_type = other DNA
atggacaacgtgctgccagtcgactccgatctttcccccaatatttctactaacacatctgagccaaatcagttcgtccagccggcatggcagatcgtcctatgggccgccgcgtacaccgtgatcgtggtcacgtcagttgtcggcaatgttgtggtgatgtggataatacttgcccacaagcgcatgaggacagtcactaactactttctggtcaacttagcattcgccgaggctagtatggctgcatttaacaccgtagtcaattttacgtatgctgttcataatgagtggtattatggcctattttactgtaagttccacaatttctttcccatcgcagctgtgttcgcatctatctatagtatgacagccgtcgcctttgatcgctacatggctatcatccaccctctgcagcctaggctgagcgcaacagcgaccaaagtcgtgatatgcgtaatatgggtgttagccctgttgctggcctttccacagggttattactcgactactgagactatgccatcccgcgtcgtgtgtatgatcgaatggccagagcatccgaataaaatttatgaaaaggtgtatcacatctgtgtcaccgttctcatttattttctgcccctgctggtgatcgggtacgcttacaccgtggtcggcatcacattgtgggcgtctgaaatccccggcgattcatccgaccgctaccacgagcaggtaagcgccaagcgtaaggtcgtgaaaatgatgatcgtggtggtatgtaccttcgcgatctgctggctgccgtttcacatcttttttctcttgccctatataaacccggatctctacctgaagaagttcattcagcaggtatatcttgctatcatgtggctcgccatgagttctaccatgtacaatccaatcatttattgctgcctaaacgatagattccggttgggctttaagcacgcttttcggtgctgcccattcataagcgccggagactacgagggtctggagatgaaatccacccggtacttgcaaacacagggctcagtatacaaagtgtccagacttgaaactaccatcagcacagttgtgggcgctcacgaggaagaacccgaggacgggcctaaagctacccccagctcactggatctgactagcaactgctcctcgcgctccgattctaagacaatgactgaatcgttttccttttcatcaaacgtcctttcttag

SEQ ID NO: 137138 - DNA, 936 bp, synthetic construct
  misc_feature 1..936: note = Description of Artificial Sequence: Synthetic coding sequence
  source 1..936: mol_type = other DNA
atggataatgtcctgcctgtcgactcagatctttcccctaatatttctaccaacacctcagagcccaatcagtttgtgcaacctgcatggcaaatagtgttgtgggcagcagcttacaccgtgattgtggttacttccgtggtggggaacgtggtggttatgtggatcatacttgctcacaaacgaatgcgcaccgtgaccaactactttctcgttaacctggcctttgccgaggcctccatggccgcctttaataccgtggtgaattttacctatgctgtccacaatgagtggtactacgggctgttctattgcaagttccacaatttctttccgattgctgctgtattcgctagcatttactcaatgacagctgtggctttcgatcgatacatggccattatccaccccttgcagccccggctcagcgccaccgcaaccaaagtggtaatctgtgtgatatgggtgctagccctgctgctcgcttttccccaggggtattactcaaccactgagactatgcccagccgggtggtgtgcatgattgagtggccagagcatccaaacaaaatctacgagaaggtgtaccacatttgtgtgactgtactcatttacttcttaccgctgctcgtgatagggtatgcatataccgttgtggggattaccctgtgggcctccgagattcctggggacagctctgaccgttaccacgaacaggtgtcagccaagcgtaaggtggtgaagatgatgattgtagtggtctgcacctttgctatttgttggctaccctttcacattttttttctcctgccgtacattaacccagatttgtacttgaaaaagttcattcagcaggtgtatctggccattatgtggctagccatgagctcaactatgtataatccaatcatatattgctgtttaaatgatagatag

SEQ ID NO: 137139 - DNA, 1197 bp, synthetic construct
  misc_feature 1..1197: note = Description of Artificial Sequence: Synthetic coding sequence
  source 1..1197: mol_type = other DNA
atggggacttgtgatattgtgacagaggccaacatttctagcggcccagaatccaacaccacggggatcaccgctttttcaatgccttcctggcaactcgcactgtgggcaaccgcttacctggcactcgtgctggtggccgtcacgggtaacgcaatcgttatctggattattctggcccaccgcagaatgaggaccgtcaccaattactttattgtcaacctcgcgcttgccgatttatgcatggccgctttcaatgcagctttcaactttgtttacgcgtcccacaacatctggtacttcggaagggccttttgttatttccaaaacctcttccctatcacagccatgtttgtgagcatatattcgatgacagctatcgcagcagataggtacatggctattgtccacccatttcagccccgtctgtccgctccctctaccaaagccgtaattgctgggatctggctcgtggccctagccctggcttctccccagtgtttctacagcacggttacaatggatcaaggtgctacaaagtgcgtggtggcctggccagaagattctgggggaaaaacattgttactgtaccatctggtggttatcgctttgatttattttctccccttggcggttatgttcgtcgcctactctgtcattggcctgaccctctggcgccgtgcagtcccggggcatcaagcacatggagctaaccttagacacctgcaagcaatgaaaaaatttgtaaagaccatggtcctggtggtcttaacttttgccatttgctggctgccataccatttgtatttcattttgggaagcttccaggaggatatctactgccacaaatttatccagcaagtctatctcgcacttttctggctggccatgagttcgaccatgtacaatccaatcatttactgctgccttaaccaccggttcaggagtgggtttaggcttgcgttcaggtgttgcccgtgggtgactccgacaaaggaagacaagctggaactgacccccactaccagtctaagtacccgcgtcaataggtgtcataccaaagaaaccctctttatggccggggacaccgcgccaagtgaggccacatctggcgaagccggacgtccccaagatggatcaggcttgtggtttggctatggattactggccccaaccaaaactcatgttgaaatctag

SEQ ID NO: 137140 - DNA, 561 bp, synthetic construct
  misc_feature 1..561: note = Description of Artificial Sequence: Synthetic coding sequence
  source 1..561: mol_type = other DNA
atgttcgtggcttatagtgtgatcggtcttacactctggaggagagctgtccccggccaccaagctcacggagctaacctcagacatctccaggccatgaagaaatttgtcaagacaatggtattggtggtgctcacatttgctatttgctggctgccatatcacttgtatttcatcttgggatcattccaggaagatatttattgccacaaattcattcagcaggtttacctggctttgttctggctggctatgtcttccactatgtacaacccaatcatttactgttgcctcaatcatcgctttcgaagtgggtttagactggctttccggtgttgtccctgggtcacaccaactaaagaggacaaactggagctgactcctacaacatcactgagcaccagggtcaaccgctgccacaccaaggaaacgctgttcatggctggagatactgcgccaagcgaggcaacctctggagaggccgggaggccccaggacggatcaggtctgtggttcgggtatgggctgttagctcccaccaagacccatgtggagatctag

SEQ ID NO: 137141 - DNA, 1398 bp, synthetic construct
  misc_feature 1..1398: note = Description of Artificial Sequence: Synthetic coding sequence
  source 1..1398: mol_type = other DNA
atggccaccctgcccgccgctgagacatggatagatggggggggaggcgtgggtgctgacgcagtgaatctgacagcaagcttagctgccggcgctgccacaggcgcagttgagacgggctggttacagctgctcgatcaggctggaaatctgagttcctctccctcagccctggggcttccagtggctagcccagccccctcccaaccatgggctaacctcactaaccagttcgtgcagccaagttggagaattgctctatggagcctggcctatggtgtggtggtggctgtggcggttcttggcaatctgatagtaatttggatcatactggcacacaaacgcatgcgaaccgtgaccaactatttcctggtcaatcttgcctttagcgacgcctccatggcagcatttaacactctcgtcaatttcatatatgccctccattcggagtggtactttggagctaactattgccggtttcagaactttttccccatcactgcagttttcgcatccatttactctatgaccgctatagcggtggaccgttacatggcgatcatcgatcccctcaaaccccggctgtcagcgaccgctaccaagatcgtcataggatctatctggattctcgccttcctgctggcttttccccagtgtctgtactctaagaccaaggtaatgccgggccggacactctgcttcgtgcagtggccggaagggcccaagcagcactttacctaccacattatcgttatcatcctcgtgtactgtttccctctcctgatcatgggtattacgtatacgattgtgggaatcacactatggggtggcgagataccgggcgatacgtgcgataagtaccacgagcagctaaaggccaagaggaaggtggtaaaaatgatgatcatcgtggttatgactttcgcaatttgttggctgccctaccacatctattttattttgaccgccatctaccagcagctcaatcgatggaagtatatacagcaagtgtatctcgcatctttttggttggctatgtcctctacgatgtacaatccaattatatactgttgcctcaacaaacgctttcgggcaggcttcaagcgggctttccgatggtgtccatttatcaaggtgtcatcatacgacgaattggaattgaagacaacacggtttcaccctaatcgacaatctagtatgtatacagtcacacgcatggaatcgatgacggttgtttttgaccctaatgatgccgatactaccagaagcagccggaagaaacgagccacaccccgagatccatcatttaacggctgtagccgtaggaactctaagagcgcatccgcgacaagctctttcatctcgagtccttacactagcgtcgatgaatatagctag

SEQ ID NO: 137142 - DNA, 5682 bp, synthetic construct
  misc_feature 1..5682: note = Description of Artificial Sequence: Synthetic coding sequence
  source 1..5682: mol_type = other DNA
atgggacctggatgcgatctcctcttgcgaacagccgcaacgattaccgccgccgctatcatgagtgatacggactcagatgaagactcagcaggcggcgggccttttagcctggctgggtttctgttcggaaacattaatggcgccggtcaattggagggcgaatcagtcctggacgatgaatgtaagaagcatctggctggactgggggctctagggttgggcagtttgatcacagagctcactgcaaatgaagagctgaccggcacagacggggccttggttaatgacgaaggatgggtgcggtctaccgaggacgccgtggattacagcgacatcaacgaggtggctgaggatgagtcacgccgataccagcagaccatgggctcattacagccactttgtcacagtgattacgatgaagatgactacgacgcagactgcgaggacattgactgcaagctgatgccccctccacctcctcctcctggacctatgaagaaggataaagatcaggactccatcacaggggtaagtgaaaatggtgaagggataatcctgccgagtatcatcgcccccagctccctggccagtgagaaggtggacttctcttcatcaagtgattcagagagcgaaatgggaccacaggaagcgacccaggcggagagcgaggatggaaaactgactctccccctggcaggcataatgcagcacgatgcgacaaaactgctgccctctgtgactgaactctttcctgagttccgccctggcaaggtcctgcggttcttacggctctttgggcccggtaagaacgtcccaagtgtgtggcgctcagctcgtcgaaagagaaaaaaaaaacaccgggagcttatacaggaggaacagattcaggaggtggaatgcagcgtcgagtctgaggtgtctcagaagtcattgtggaactatgactatgcccctcccccacccccagagcagtgtttgtcagatgacgagatcacgatgatggcacctgtggagtcgaagtttagtcagagtacaggcgatatagacaaggtcaccgatacaaaaccacgagtcgccgaatggagatacggcccggcgagactctggtatgacatgctgggcgttcccgaggatggctctggctttgattacggctttaagttacggaaaacagagcatgagcctgtgattaagagccggatgattgaagagtttagaaagctcgaggagaataacggcactgacctccttgccgatgagaacttcttgatggtgacacagttgcactgggaagacgacataatctgggatggggaagacgtgaagcataagggaacaaaaccccagagagctagccttgctggttggttgccaagcagcatgactaggaatgccatggcctataatgtccagcaggggttcgcagcaactttggatgatgataagccctggtactccattttccccatagacaatgaagatcttgtctatgggagatgggaagataatatcatctgggatgctcaggcaatgccacggctgttggagcctcctgtactcaccctggaccccaatgatgagaacctgatcttggaaatcccagatgaaaaggaggaagccaccagcaattccccatccaaagaatctaagaaagaatcatccctcaaaaagtcccgaattctgctggggaaaacaggggtgataaaggaagaaccccagcagaatatgagtcagcccgaagtgaaggacccatggaatttatctaacgacgagtattattaccccaagcagcaagggctcaggggcactttcgggggtaacatcattcagcactctatcccagccgttgagctccgccagcccttcttccccactcatatgggtcccattaaactgcgtcagtttcacagaccacctttgaagaaatacagcttcggggcactgtcccagcctggcccccatagtgtgcagcccctgctgaaacacattaaaaaaaaggctaagatgagagaacaggagagacaggcgtccggcggcggcgagatgtttttcatgaggaccccacaagacttgacgggaaaagacggcgacttgattttggctgagtattccgaagagaatggccctctcatgatgcaggtgggcatggcaacgaagattaagaattattacaaaagaaagcccggtaaggatcctggcgcccctgactgcaagtatggagagactgtgtattgccacacttcacctttcctgggctctttgcacccaggccagctgctccaggctttcgagaacaatctcttccgggcacctatatacctccacaagatgcccgagactgattttctgattatccggacgcgccaggggtactacatcagggaactcgtggatatctttgttgtaggccagcagtgccccctattcgaagtgcccgggcctaattcaaaaagggccaacacccacatccgggacttccttcaagtgtttatttaccgtcttttctggaaatcaaaggatagacccaggagaatcaggatggaagacataaaaaaggccttcccatcccactcagagagctccattaggaaacggctgaagctgtgcgctgatttcaagagaaccgggatggattcaaactggtgggtgctgaagagcgacttcaggctcccaaccgaggaggaaattcgagcaatggtgtcccctgagcagtgttgcgcatactacagtatgatagccgccgaacagaggctgaaggacgcgggatacggtgagaagtcgttcttcgcccccgaagaggagaatgaggaagacttccagatgaaaattgacgatgaggtgagaacagcaccatggaacaccacccgggctttcattgccgcaatgaaagggaagtgcctgttggaagttacaggggtagctgatccaacaggctgtggggaagggttttcttacgtcaaaataccaaataagcccacacagcagaaagatgataaagagccccaacccgttaagaaaaccgttacaggaacagacgctgacctgaggaggctgtccctaaagaatgccaaacaacttcttagaaaatttggcgttcctgaggaagaaatcaagaaactgtcacggtgggaagtgatcgacgtcgtgagaaccatgagcaccgagcaggcccggagcggagaggggcctatgtccaaattcgctaggggatcgagattcagcgttgcagaacaccaggagagatacaaggaggaatgccagaggatctttgaccttcagaataaggtgctgtcgagcaccgaggtcttaagtacagatactgactcatcatcagccgaggactccgactttgaagaaatggggaaaaacatcgaaaatatgctccagaacaagaagacatcttctcagctatctagagaaagggaagagcaggagcggaaggaactgcaaaggatgctactggcggcagggagtgcagctagtggcaataaccaccgagacgacgatacagcttccgtgacctcacttaactccagcgcgactggacgctgtctcaagatttatcgtacttttagggacgaggaggggaaggagtacgtgaggtgtgagacagtaagaaaacccgcagtgattgatgcctacgtgagaatccgcacgaccaaggatgaggagttcataagaaagttcgctctgtttgatgagcagcatcgagaggaaatgcgcaaggaacgtcgtaggatccaggagcagctgcggaggctgaaaagaaaccaggagaaggaaaagctgaagggacctccagagaagaagcccaaaaaaatgaaagaaaggcccgatttgaagctcaaatgcggagcatgcggcgccattggacacatgcggaccaacaagttctgtccactttactatcagactaatgctcccccctcaaatcccgtcgcaatgactgaagagcaggaggaggagctggaaaagacggtcattcataacgataacgaggaactcatcaaggtcgagggcacaaaaatcgttctgggcaagcagcttattgagagtgccgacgaagtgcggagaaagagcctcgtgctgaaatttccaaagcagcagttgccaccgaagaagaagcgcagggttggaacaacagtgcactgcgattatctgaacaggccccataagtcaatccaccgacgtcggacggacccaatggtgaccctgtctagtatcttagagtcaatcattaatgacatgagagacctgcccaatacatacccattccacacgccagtgaacgcaaaggtcgtgaaagattattataaaattattacccgccccatggacctgcagacgttgcgggagaacgttagaaagcgactgtacccctctcgggaagaattcagagaacacttggagctcatagttaagaactccgctacttataacgggccgaagcacagcctgacacagattagtcagtcaatgctcgatctctgtgatgagaagctgaaggagaaagaagataaactcgccaggctggagaaggccatcaaccctctgctcgatgacgacgaccaggtggcattctcattcatactagataatattgttacgcagaaaatgatggcagtgccagattcttggcctttccaccatcctgtgaataagaaatttgtacctgactattataaggtcatcgtcaatcctatggatcttgagaccattcgcaaaaatatctccaagcacaaatatcagtctcgagaaagttttttggacgatgtgaatcttattctggctaactccgtaaagtataacggtcctgagtctcagtacacaaagaccgctcaggaaatcgttaatgtgtgctaccagactctcacggagtatgacgagcacctaacccagctggaaaaggacatctgtaccgcaaaggaggcagcattggaggaagctgagctggagagcttggacccaatgacccccggcccctatacccctcaacctccagatctgtatgacaccaacacgtcgctcagtatgtcccgggatgcgagcgtcttccaggacgaatcaaacatgtccgtgctggatatcccgtccgcaactcctgagaaacaagtcacgcaggaaggcgaggacggggacggagacctggcggatgaggaagagggaaccgttcagcaacctcaggctagcgttctctacgaggatttgcttatgtcagaaggtgaagatgatgaagaagatgctggatcggatgaggaaggagacaacccattctccgccatccaactctccgagtcaggcagcgatagcgacgttggatcaggcggaatccggcctaagcagcccagaatgctgcaagagaacactaggatggacatggagaatgaagaatctatgatgtcgtatgagggcgacggcggtgaggcatcacacggattggaggactctaacatttcttatggctcttatgaagaaccagacccaaaaagcaacactcaggacacgagttttagctccatcggcggttacgaggtctccgaggaggaggaagacgaggaagaggaggaacagaggtctggaccatctgtgctttctcaggttcacctgtctgaggacgaggaggacagcgaggacttccactccatagctggtgactcagatctggacagtgatgagtag

SEQ ID NO: 137143 - DNA, 5619 bp, synthetic construct
  misc_feature 1..5619: note = Description of Artificial Sequence: Synthetic coding sequence
  source 1..5619: mol_type = other DNA
atggggccgggttgcgatttgctcctgaggactgccgcaactatcacagccgctgcaataatgtctgatactgatagcgacgaggactctgcaggaggagggcccttctccctggctgggtttctcttcggcaatattaatggagcaggccaattggagggcgaaagcgtactcgacgatgaatgcaaaaaacacctggcaggtctgggcgcactggggcttggctccctgatcacagagctaacagctaatgaagaactgacggggaccgacggcgccctggtgaacgacgagggatgggtgaggtcaaccgaggacgccgtggattacagtgacataaatgaagtggccgaggatgaaagtaggaggtaccaacaaaccatgggttccctgcagcctctctgccatagtgactacgacgaagacgattatgatgcagactgcgaggacattgactgtaagctgatgccgcctcccccaccaccgcccggacctatgaagaaggacaaggatcaggattccatcactggtgaaaaagtggacttctcgtcaagcagtgactccgaatctgagatgggcccgcaggaggcaacacaggcggagagcgaagatggcaagctgaccctgcctcttgccggcattatgcaacacgatgccaccaagctgctcccttcggtgacggaactcttccccgagttccggccaggcaaagttctgcgctttctgaggctattcgggcccggaaagaatgtgccttcggtgtggagatctgctaggagaaagaggaaaaaaaagcaccgcgagttgatacaggaggaacagattcaggaggtcgaatgcagcgtggagagtgaggtgtcacagaagtcgctgtggaactatgattacgctcctccccccccacccgaacagtgtttgtccgatgatgagattaccatgatggctcctgttgagagcaagttttcccaaagcacaggtgatattgataaggtgacggacactaagcctagggtggccgaatggcgttatggtccagctcggctctggtatgatatgttgggtgtccctgaggacggtagcggtttcgactatggcttcaaactacggaaaaccgagcacgagccagtgatcaagtctcggatgattgaggaattccgcaagctggaggagaataacggcactgacctgctcgctgacgagaacttcctgatggttacacagttgcattgggaggatgacatcatttgggatggggaagacgtgaagcacaaaggtacgaaacctcagcgtgccagcttggctggatggttaccatcttctatgacccggaacgccatggcctacaatgtacagcagggttttgctgccaccctggacgatgataaaccctggtactctatctttcctatcgacaacgaagatctggtatacgggcggtgggaagacaatattatttgggatgcccaggcaatgccccgtcttttagagccccccgtactgaccctcgatccaaatgacgagaacctgatcctggaaattccagatgagaaggaggaggcaaccagcaattcaccctcaaaggagtcgaagaaagaaagctctttgaagaagtcccgcatactgcttgggaaaactggcgtgatcaaagaggaacctcaacagaacatgtcccagcccgaagtgaaagatccttggaatctgtccaacgacgaatactattatcctaagcaacagggcctgcgtggtactttcggtggcaatattatccaacatagcatcccagctgtggaattgcggcaacccttcttccctacacacatgggcccgataaagctgcgacagttccataggccaccacttaaaaagtactcttttggagccctgtcacagcccggtccccactcagtccagcccctcctcaagcacattaaaaagaaagcaaaaatgagggagcaggaacggcaggccagcggtggcggcgaaatgttctttatgcggaccccgcaggacctgaccggcaaggatggggatcttattcttgcagaatactcagaagagaatggccctctgatgatgcaggtcgggatggccactaagattaaaaactactacaagagaaaaccaggaaaagaccccggggcaccagactgtaagtatggagagaccgtgtattgtcacacaagccctttcctggggtccctgcaccccgggcaattgcttcaggcgttcgaaaataatctgttccgcgcccctatctatttgcataagatgccagagaccgattttctgattatccgtacaagacaaggctattatattagagagttggtggacatttttgtggtcggacaacagtgccccctgtttgaggtgcccggacccaatagtaagcgggccaacacccacattcgtgattttcttcaggtgttcatttacagattattctggaaaagcaaagaccgacctagaaggatccgtatggaagatattaagaaggcctttcccagccacagcgagtccagcattcggaaaagattgaaactgtgcgcggactttaagaggactggcatggattccaactggtgggttctgaagagcgatttcagattgccaaccgaggaagagatcagagccatggttagtcctgaacaatgctgtgcatactatagcatgatcgccgctgaacagcggctaaaggatgccgggtacggtgaaaagtcctttttcgctcctgaggaagagaatgaggaggatttccaaatgaaaatcgatgacgaagtgaggactgccccctggaacactacccgggcattcatcgctgccatgaaagggaaatgcctgttagaggtgacaggcgtggccgaccccactggctgcggcgagggtttctcttacgtgaaaatcccaaacaagcccacccaacagaaggacgacaaagagcctcagcccgtgaaaaaaacggtgactgggacagacgcggacctcaggcgactgagcttgaaaaacgccaaacaactgctcagaaagtttggcgtccctgaagaggaaattaaaaagttatccagatgggaggttatcgatgtcgtcaggacaatgtcgactgagcaagcccgaagtggcgagggtcccatgtcaaaattcgcaagaggcagtcggtttagtgtcgccgaacatcaggagcggtataaggaagagtgccaaaggatctttgaccttcagaacaaagtgctgagttcaaccgaagttctttcaacagataccgatagtagcagcgccgaggactccgacttcgaggagatggggaaaaatattgagaatatgctccagaataagaagacctctagtcagctgtctcgagaacgtgaagaacaggaaagaaaagagctccagaggatgctactggctgcgggcagtgccgcctctggcaacaaccatcgcgatgatgacaccgcttccgttacttcactcaactctagtgcaaccggccggtgccttaagatttatcgcactttcagagatgaggagggaaaagagtatgtgcgctgcgaaacagtacggaagccagccgtcatcgacgcctatgtcaggattcggaccactaaagatgaagagtttattagaaaatttgcgctgtttgatgaacagcacagggaagaaatgcgtaaagaacgccgccgtattcaggaacagctccgcagattgaagaggaaccaggagaaggaaaagttaaagggcccccctgaaaaaaagcccaagaaaatgaaggagaggcctgacctcaagttgaaatgcggagcctgcggtgcaattgggcatatgaggaccaacaagttctgcccattgtattaccagaccaatgcccccccgtccaatcccgtggctatgactgaggagcaggaagaagaactggagaaaaccgtgattcataacgataatgaggaactcattaaagtggaaggcaccaaaatagtgctgggaaaacagctgatagaaagtgccgatgaggtcagaagaaagtcactggtgttaaagtttcctaagcagcagctgcccccaaagaagaagcgtcgcgtgggcaccaccgtgcactgcgactacctgaatcgtcctcataagagtatccatcgtcggcgaactgaccccatggtcacactatccagcatcctggaaagtattattaatgatatgcgggacctgcccaatacctatcctttccacaccccagtaaacgctaaggtggtgaaggactactacaagattattacgaggccaatggacctgcagaccctgcgggagaatgtcaggaagcggctgtacccctcgagggaagaattcagggagcacctggagctgatcgtgaagaatagcgcaacttacaacggtcctaagcatagtctcactcagatcagccagtccatgctcgacctgtgcgacgaaaagctgaaggaaaaagaggataaactagctcgactcgagaaggctatcaatcctcttctagacgacgacgaccaagttgctttttccttcattttagataatatagtgacgcaaaagatgatggccgtgcccgacagttggcccttccatcatccggtgaacaagaaatttgtgccggattattataaagtgatagtgaatcctatggatctggagactatccgaaagaacattagcaaacataagtaccagtctcgcgagagcttcctcgacgatgtcaacctgattttagctaactcagttaagtacaacgggcctgagtcccagtacaccaagaccgcgcaagagatcgtaaacgtgtgttatcagaccctgaccgaatacgacgagcatctgactcagctcgagaaagatatctgcaccgcaaaggaggcggcattggaagaagctgagctggagtcccttgaccctatgacacctggcccttacacacctcaaccaccagacctgtatgatacgaataccagcctctccatgagccgcgacgcttcagtgtttcaggacgagagcaatatgagcgtgctggacatcccgagtgccactcccgagaaacaggtgacccaggaaggcgaagacggggacggagacctggcagacgaggaggagggtacagtccagcagccccaggcgtccgtgctgtatgaggatttactcatgtccgaaggtgaggatgatgaggaggacgctgggtccgatgaggagggcgacaatccattctctgcgatccagctgagcgagtcaggctccgattctgatgtaggaagtgggggtatcagacccaaacaaccccgcatgcttcaggaaaatacccgaatggacatggaaaacgaagagagtatgatgagctatgagggagatgggggggaagccagccatggcctggaggactctaatatctcatatggctcctacgaagaaccagatccaaaatccaacacccaggatacttcgttctcttcaatcggtggatacgaggtgagtgaggaggaggaggacgaggaagaggaagaacaacgctccgggccctcagtcttgagccaagtgcatctgtctgaggatgaggaggacagtgaggacttccactctattgccggcgatagtgaccttgatagcgatgagtag

SEQ ID NO: 137144 - DNA, 1632 bp, synthetic construct
  misc_feature 1..1632: note = Description of Artificial Sequence: Synthetic coding sequence
  source 1..1632: mol_type = other DNA
atgacagaagagcaggaggaggagcttgagaagaccgtgattcataacgacaacgaagagttgatcaaggtggaaggcacgaaaatagtgctgggcaagcagctgatcgaatccgctgatgaggtgcgacggaagagtcttgtcctgaagtttccgaagcagcagcttccacctaaaaaaaagagacgtgtaggaacaaccgtccattgcgactatctgaacaggccccataagagcattcacagaaggagaacagaccctatggttaccttgtcctcaatcctggaaagcataatcaacgatatgagggatttgcccaatacataccccttccatacccccgtgaatgctaaggtggtgaaggactattacaaaatcataacacggcccatggacttgcagactttgcgtgagaatgtgcggaagcggctttatccaagccgagaggagttcagggagcacctcgagctgatagtgaaaaactctgccacatacaacggacctaagcattccctgacccagatctcccaatcaatgctggacctctgcgacgaaaaactgaaagagaaggaggacaagctagcgcgccttgaaaaggcaataaaccccctcctcgatgatgatgaccaggtcgcttttagcttcatacttgataatatcgtgactcagaagatgatggcagtgcctgacagttggccttttcatcacccggtcaacaagaaattcgtcccggactactacaaagtgatcgtgaatccaatggatctggagaccattagaaagaacatttcaaaacacaaataccagtctcgcgaaagctttctcgacgacgtgaacttgatcttggctaactcagttaagtacaatggcccagaaagccaatacaccaaaacagctcaggagatagttaacgtttgttatcagacacttaccgagtatgacgagcacctcactcagctggaaaaagacatctgtaccgctaaggaagccgctctggaagaggctgagctcgaatcgctagatcccatgacccccggaccttataccccacaggctaagccacctgacttgtacgatacaaatacctccttatcgatgagtcgcgacgcctcagtgttccaggacgaatctaatatgtcagtcctcgacattccctccgccaccccggagaagcaggtaacacaaatgagacaaggccggggccgactaggagaggaggactccgatgttgacatcgagggctacgacgacgaggaagaggacgggaagcctaagaccccggcgccagaaggcgaggacggagacggggacttggccgatgaggaagagggcaccgtccaacagccgcaagccagtgtgttatatgaagacctgctcatgagtgaaggcgaagatgatgaggaggacgccggctcagatgaagagggggacaacccattttcagcgatccagttgtccgaatctgggagtgacagcgatgttgggagtgggggcatcagaccaaaacagccccgcatgctgcaagaaaacacccggatggacatggaaaatgaagagtccatgatgagctacgaaggtgatggaggagaagcatcccacggactggaagatagtaacattagccaccagtag

SEQ ID NO: 137145 - DNA, 5688 bp, synthetic construct
  misc_feature 1..5688: note = Description of Artificial Sequence: Synthetic coding sequence
  source 1..5688: mol_type = other DNA
atggggccagggtgcgacttgctcctgcggacggccgcaacaatcacagctgcggccatcatgtcagacaccgactccgatgaggatagtgcaggaggtggtccattctctctggccggctttttattcgggaatattaacggagccgggcagttggaaggcgaaagcgttttggatgacgagtgtaaaaagcacttggccgggttaggggccctggggttgggctcactgatcactgagctgacagcgaacgaagagctgaccggtaccgacggcgctctcgttaacgatgagggttgggtccgatccacggaagatgcagtggattactcggacattaatgaagtggctgaggacgagagtcgccgatatcagcagaccatgggctcgcttcaaccactgtgccattccgattatgacgaggatgactatgatgcggattgcgaggacattgactgtaaactgatgcctcctccaccccccccccctggcccaatgaagaaggacaaggaccaggatagcatcactggcgtctccgagaatggagaaggaatcatcttgcccagtatcatcgcccccagcagtttggcgagtgaaaaggtcgattttagtagctcatcggattccgaaagcgagatgggacctcaagaggcaacacaggctgaatctgaagacggcaaacttactttgccgttggcaggtattatgcagcatgacgccacaaaactactgccatccgtgaccgagttgttccccgagttccgccccggtaaagttctcagatttcttagactgttcgggcccggcaaaaatgtgcccagcgtctggcgcagcgcccgaaggaagaggaaaaaaaagcatcgcgagttaattcaagaggagcagattcaggaggttgagtgctcagttgagtctgaggtctcacagaagagtctgtggaattacgactacgcacccccccccccacctgaacagtgcttaagcgacgacgaaatcacaatgatggcccccgtggagtccaaattctctcagagcaccggcgatatagacaaagtcactgatacgaagccacgcgtcgctgaatggagatacggcccagccaggctgtggtatgatatgctgggcgtgccagaagatggatccggatttgattatgggttcaaacttaggaagactgaacatgagccggtgattaagagcagaatgatcgaggaattcagaaaattggaggagaacaacggaacagacctgttagccgacgagaacttcctcatggtcacccaattgcattgggaagacgacattatctgggacggtgaggatgtcaagcataaggggacgaagccccagcgagcaagtctggcagggtggctcccaagttccatgacacgtaacgccatggcgtataacgtacaacagggtttcgcggccacattagacgacgataaaccctggtattcaatttttccaatcgataatgaggatttagtgtatggaagatgggaagataatatcatttgggacgctcaggcaatgccacgattactggagcctccagtgctgaccctggatcccaatgacgaaaacctcatcttggaaatccctgacgaaaaggaggaggccacatctaactcaccctcaaaggaatcgaagaaagagagcagtctgaagaagtccaggatcctgctgggcaaaaccggcgtaatcaaagaagagccccaacagaacatgagccagccagaggtcaaggatccgtggaacctgagcaacgacgagtactactaccctaaacagcagggtctacgtggcacttttggtggcaacattatccagcacagcatccccgcagtcgagctgaggcagccattttttcccacccacatgggtcccatcaagttaaggcagttccaccgcccgcctctgaagaagtatagcttcggggcgctgagccaacctggaccccactctgtccagcccctcctcaagcacattaaaaaaaaagcaaagatgagggagcaagagcgtcaggcctctggcggcggagaaatgttttttatgcggaccccccaggacctcacaggaaaggacggagacctcatcctggctgagtattccgaagagaatgggcccctgatgatgcaggtagggatggcgactaagatcaaaaattattataaaaggaaacccgggaaagaccctggggcgcccgactgcaaatatggtgagactgtctattgtcatacaagcccgttcttgggttctcttcaccctggacagttactccaagctttcgagaacaatctttttcgggcaccaatctacctgcataagatgcccgaaacagactttctcataataagaactaggcaaggctattatatccgggagcttgtggacatctttgtggttgggcagcagtgcccactgttcgaggtccctgggcctaacagcaagcgcgcgaacactcatatacgcgactttcttcaggtgtttatatataggctgttttggaaaagcaaagaccgacctcgccgaattcgtatggaagacatcaagaaagcatttccctctcacagcgagtccagcataaggaagagactgaagttatgcgccgattttaagcgcacagggatggacagcaactggtgggttttgaagtctgacttccgcttgccgactgaggaggagatccgagccatggtttctccagaacaatgctgcgcttattatagtatgatcgcagcggagcagcggttgaaggatgccggttatggagaaaagtcattctttgcccctgaagaggaaaacgaggaagattttcagatgaaaatcgacgatgaagtgcgcactgctccctggaacactaccagggcatttatcgccgctatgaaaggaaaatgcttattggaggtgacaggggtagctgatcctacaggctgtggggaagggtttagctacgtgaagattcccaataagcctacacagcagaaggacgacaaggaacctcaacctgtcaaaaaaacagttaccggaaccgacgccgaccttcgccggctctctctaaagaatgcaaaacagctgttgaggaagttcggagtcccagaggaagagattaaaaagctgagcagatgggaagtgatcgacgtggttcggaccatgtcgactgagcaggcgagatcaggcgaaggccccatgtctaagttcgctcgaggatcaagattttccgtagccgagcaccaggagcggtacaaagaggaatgtcagaggatattcgacctacagaacaaggtgctgagttcaacggaggtattaagcaccgatacggacagctcttccgccgaagacagtgacttcgaggagatgggcaaaaacatcgagaacatgctgcaaaacaaaaagacatccagccagctgagcagagaacgcgaggaacaggagaggaaagagctgcagcggatgctgttggcggccgggtcagcggcatctggcaacaatcatcgtgatgacgataccgcctcagtgacaagtcttaactcctccgcaaccggccgatgtctgaagatctatcggactttccgcgacgaggaaggcaaagagtatgtcaggtgcgaaacagtccgcaagcctgccgtcatcgatgcatatgtgcgaataagaacaacaaaagacgaggagttcattcggaagtttgccctgttcgacgagcaacacagggaagagatgagaaaagagaggaggcgaatacaggagcaattaagacggctaaagcgtaaccaggaaaaagaaaagctcaaaggtccacccgagaagaagccaaagaaaatgaaagaaagacccgatcttaaactcaaatgtggagcttgtggagctatcggccatatgcgcaccaacaagttctgccctttatattaccaaaccaacgctcccccgagcaaccccgtggcgatgaccgaagagcaggaagaggagctggaaaagaccgtaattcacaatgacaacgaggaactcattaaggtcgaagggactaagatagtgctcggcaagcagctaatcgagagcgcagatgaggttcggcggaagagtctcgtgcttaaattcccaaaacagcagctaccacccaaaaagaaaagacgtgtgggcactaccgtgcattgtgactacctgaatcgtcctcacaaaagtattcaccgaaggcgtacagacccaatggtgaccctgagttccatcctcgaatcaatcataaatgacatgcgggatttgcccaatacatatccatttcataccccagtcaatgccaaagtcgtgaaagattattataaaataattaccagacccatggatctccagactctgcgcgaaaatgtccggaagcggctgtatccatctagagaggagtttcgagaacacctagaattaatcgtgaaaaattcggcgacttacaatgggcccaagcactctctgacgcagatctctcaatctatgcttgacttatgtgatgagaagcttaaggagaaggaggacaaattagcccgcttggagaaagcaatcaaccccctgcttgacgatgacgatcaggtggcgttcagtttcatactggacaatatagtcacccaaaaaatgatggccgtgcccgattcgtggccattccatcaccccgtgaacaagaagtttgttcccgactactataaagtaattgtcaatccgatggaccttgagacaatacggaaaaacatctctaaacacaaatatcaatcgagagagtctttcctggatgatgtcaatctgatcctcgccaattccgtgaagtacaacggtcccgaatctcagtatacaaagactgctcaagagatcgtcaatgtgtgttatcagaccctgacagagtatgatgagcatctgactcagctcgagaaggacatatgtaccgcaaaggaagccgcgctggaggaggcagagttggagtccttggatccaatgaccccaggaccatatactccgcaggcgaagccgcccgacttatacgatacaaataccagcctcagtatgtcccgagacgcgtctgtcttccaggatgagtccaatatgtcggtcctcgatattccatcagcaacacctgagaaacaagtgacacaagaaggtgaagatggtgatggagatctagcagacgaggaggagggcacagtgcagcaacctcaagcatctgttttatatgaggacctgctgatgtccgagggcgaggatgacgaggaagacgcgggctcagatgaggagggagataacccgttttctgcaatccagctgtccgaatcaggatccgactccgacgttgggagcgggggtattagaccaaaacagcccagaatgctgcaggaaaatactcgaatggatatggaaaatgaggagagcatgatgtcatacgagggagacggaggagaagcttcccacggtcttgaagacagcaatataagctacggtagttatgaagagcctgatccaaaatccaatacgcaggatacaagtttcagctctataggtggttacgaagtttccgaagaggaagaggacgaggaggaagaagagcaaaggagcggccccagcgtgcttagccaagttcatctctccgaggatgaagaggattctgaagattttcactccatcgccggcgacagcgacctggatagcgacgagtag

SEQ ID NO: 137146 - DNA, 5721 bp, synthetic construct
  misc_feature 1..5721: note = Description of Artificial Sequence: Synthetic coding sequence
  source 1..5721: mol_type = other DNA
atggggcccggctgtgacctgctgctgcgaactgctgcaactatcacagcggccgctattatgtctgacaccgattcggacgaggactctgcaggcggcggacctttctccttggcaggatttcttttcggcaacattaacggcgccggccagctggaaggagagtctgtgctcgatgatgaatgcaaaaaacatcttgccgggctgggagcactcggtctgggaagcctgattacggaactaacggccaatgaggaactcacagggactgatggagcactcgtgaacgacgaaggctgggtgcgatccaccgaggacgccgtggattatagcgatatcaacgaggttgctgaagatgagagccggagatatcagcagacgatggggtctttgcagcccctgtgccatagcgactatgacgaagatgactatgacgcagattgcgaagacattgactgtaagctcatgcctccgcctccgccgccaccaggaccaatgaagaaagataaagaccaagactcaataactggggagaaggtggatttttcgagctcatctgatagtgagagcgagatggggcctcaggaagccacacaggccgagtccgaggatggaaagcttacacttccgctggccggtatcatgcagcacgacgcgacaaagctactgccgtccgtcaccgaactcttcccagagtttcgaccaggcaaggtgctacgtttcctaagacttttcggcccaggtaaaaatgttcctagcgtatggagatccgcccgtcggaaaaggaaaaaaaaacaccgggagcttatccaagaggagcagatacaggaagtggagtgcagcgttgagtccgaagttagccagaaatcactgtggaactatgattacgccccaccccctccccccgagcagtgcctgtctgatgacgaaatcacaatgatggcgcctgtcgagtcaaagtttagtcagtccactggggacattgacaaggtgacggacacaaagcctcgcgtagcggagtggcggtacggaccagcccggttgtggtatgacatgttaggagtgcccgaggatggatcgggattcgattacgggtttaagctgcgaaagaccgagcatgagcccgtgatcaagtccaggatgattgaggagttcaggaagcttgaggaaaacaacggtaccgatcttctggcagatgaaaacttcctaatggtcactcagctccattgggaagatgatattatctgggatggcgaagacgtgaagcacaagggaaccaagccgcaaagggcatctctcgctggatggctccccagctccatgaccagaaacgcgatggcctacaacgtgcaacaaggctttgctgctaccctggacgacgacaaaccctggtatagtatttttcctattgacaacgaggacctagtgtacggccggtgggaggacaacattatttgggacgcccaagccatgccccggctgctggaacctcccgtattaactctggatcccaatgacgaaaacttaattctggagatcccagatgagaaggaagaggctactagtaacagcccttcaaaggagtctaagaaggaatcatctctcaaaaagtcacggatacttctgggcaagaccggtgttattaaagaagagcctcagcagaacatgtcacaacctgaggtgaaggacccctggaacttgtcaaacgatgagtattactacccaaagcagcaggggcttagagggacgttcggaggcaatatcattcagcatagcattccagccgtcgagctgcggcagccttttttccctacacacatgggtcccatcaagctacgccaatttcaccgaccacccctgaagaagtacagtttcggcgctttgtcccaacccggcccgcattccgtccagccccttctcaaacatataaagaagaaagcaaagatgagagagcaggagcggcaggcgagcggcggtggcgagatgtttttcatgaggactcctcaggacctgactgggaaagacggggatcttatcttggcggagtattcagaggagaatggacccctgatgatgcaggttggcatggctacaaagataaagaactactacaagagaaaacccgggaaggatccaggcgctccagattgcaagtacggagaaaccgtttactgtcacacctctccatttctgggatctctgcaccccggacaactgttgcaagcattcgagaataatctgtttagggctccgatttatctgcataaaatgccagagactgattttcttattattcggaccaggcagggatattacatccgtgaactcgtcgatatttttgtggttgggcaacaatgcccgttgtttgaggtcccaggccccaacagtaagagggcaaatactcatattcgcgacttcctgcaggtctttatatatcgtctcttttggaaaagtaaagacagaccgcggcgaattcgaatggaagacatcaaaaaagcctttcctagtcattcggaatcttccatccgcaagagactcaagctttgcgctgatttcaaacgaacgggaatggatagcaattggtgggttttgaagagtgactttcgactccccacagaagaagagattcgcgctatggtctcccctgaacagtgctgtgcttattattcaatgatcgccgcagagcagagactcaaagatgctggctatggcgaaaaaagcttcttcgctccagaggaggagaatgaggaggacttccagatgaaaatcgatgacgaagtgcgcaccgccccttggaatacaactcgcgctttcatcgctgccatgaaggggaagtgcttactcgaggtcacgggggtggcagacccgactggctgcggtgaaggattttcctacgtcaagatcccgaataagccaacgcagcagaaagatgataaggagccgcaacccgttaagaaaaccgtgaccggcacagacgccgacctccgcagactaagcttgaagaatgccaagcagcttctgaggaagtttggagtgcctgaagaggagataaagaaactgtccagatgggaagtgatcgatgtggttagaacaatgtctacggaacaggcgcgctcaggggaggggccaatgtccaaattcgcgagagggtctcggttctctgtggcggaacaccaggagagatataaagaggagtgccagcgcattttcgatctgcagaacaaagtgctctcctccactgaagttctgtctacagatactgactcctctagcgctgaggattcagacttcgaagagatggggaagaacatcgaaaatatgttacagaataagaaaacttcatcacagttatcaagggagagggaggagcaggaaaggaaggaactgcagcggatgttgctggccgccggatctgcggcttccggaaacaatcacagggacgatgacacggccagtgtcacctcattaaattcctctgcaacaggaaggtgcctgaagatttaccgcacatttcgcgacgaggagggcaaagaatacgttcgctgcgagaccgtcagaaagcccgccgtcattgacgcatatgtgcgaatacgcaccacgaaagatgaggaattcattaggaagttcgcccttttcgacgaacaacatcgggaagagatgcgtaaggagcgtcggcgcatccaggagcagctgaggcgtctcaaaagaaaccaggagaaggaaaaactgaagggcccacccgaaaagaaaccaaagaagatgaaggagcggcctgatctgaagctgaagtgtggcgcctgtggagctatcggccacatgcgcaccaacaaattttgccccttgtattatcagactaacgccccaccttccaatcctgtagcgatgactgaagaacaggaggaggagctggagaagactgtcattcataatgacaatgaggagctaattaaggtcgagggtaccaaaatagttctcggtaaacagctgattgagagtgcagacgaggtgaggagaaagtcgttagtgctgaagttcccgaaacaacaactgccacctaaaaagaagagacgggtgggcacaaccgtgcactgtgattatttaaataggcctcataaatccatccaccggcggagaacagatcccatggtgaccctgtctagtatactcgaatccattataaacgatatgagagacctccccaacacctatccgtttcacactcctgtgaatgccaaggtcgttaaggactactataaaattatcactagacctatggacctacagactctgagggaaaacgtgagaaagagactgtacccgagcagggaagagttccgggagcacctcgagctcatagtgaagaactctgctacttataacgggcccaaacattctttaacccaaatttcacaaagcatgttggatctgtgcgacgagaaactgaaggagaaagaagataagctggcccgtctggagaaagcgataaatcccctcctggatgatgacgatcaagtggcgttttctttcatcctggacaatattgtcacacagaaaatgatggctgtcccggactcatggccgtttcatcacccagtgaataagaagtttgtgccggactattacaaggtgatcgtgaatccaatggaccttgagaccatccggaagaacatctcaaagcacaaatatcagagccgagagtcctttctggatgacgtcaatttaatcctggccaactctgtgaagtacaacggcccagagtcccaatacaccaaaaccgcccaggagattgtgaacgtttgttaccagactctcacggaatacgatgagcaccttacgcagctagagaaagatatctgcacagcaaaagaggcagctcttgaggaggccgaattggaatcgctcgatcccatgaccccggggccttataccccccagccccctgacctgtatgacactaacacttcactgtcgatgtcacgggacgccagcgtcttccaggacgagagcaatatgtctgtgctcgacatccctagcgctacacctgagaagcaggttacccaaatgcgccagggcaggggacgcctgggcgaagaagatagcgacgtggatattgaggggtatgacgacgaagaggaagacgggaaaccaaaaactccagcccccgagggggaggacggcgacggagatctggccgatgaggaggagggcacagtccaacaaccccaggcttccgtgctgtatgaggatttgctgatgtcagagggagaagatgatgaagaagacgccgggtccgacgaggaaggcgataacccttttagcgctattcagctaagtgaatcaggcagtgactcagacgttggatccgggggcatcaggccgaagcaacctaggatgttgcaggagaatacgcggatggatatggaaaatgaagagtctatgatgagctatgaaggcgacggcggggaggcaagtcacggactggaagactctaacatatcgtacggcagttacgaggaacctgatcccaagtctaatacccaagacacttcattcagctcaataggcggctacgaagtgtccgaggaggaagaagacgaggaagaagaggaacagcgctctgggccgtcggtattgtctcaggttcacctctcagaagatgaggaggattccgaggacttccacagcatagctggggattccgatctggacagcgatgaatag

SEQ ID NO: 137147 - DNA, 897 bp, synthetic construct
  misc_feature 1..897: note = Description of Artificial Sequence: Synthetic coding sequence
  source 1..897: mol_type = other DNA
atgacagaggagcaggaggaggagttggagaagacagtgatccacaatgacaacgaagagcttataaaagttgaaggtaccaagattgtactgggaaaacaactcattgaatccgccgacgaagtgcgtcgcaaatccctggtgctgaaatttccgaagcagcaactcccaccgaagaagaaacgtagagtgggaacaacggtacactgcgactacctgaaccggccccacaagtccatacatagacggaggacggaccctatggtcactctctccagcatcctggaaagcataatcaatgacatgcgagatctgcccaatacttatccctttcacacaccagtaaatgcgaaagtggtgaaggattactacaagatcatcaccagacctatggacctgcagacactgcgagagaacgtccggaagaggctttatccttcaagggaggagttccgtgaacacctcgagctgattgtgaagaactccgccacctacaatggtcctaaacacagcctgactcagattagtcagtcaatgctcgacctgtgcgatgagaagttgaaggaaaaagaggataagttagcccggttagagaaggccattaatccactgttggacgatgatgaccaggtggccttctcttttatccttgacaacatcgtcacccaaaaaatgatggccgtccccgactcctggccgtttcaccatcccgtcaacaagaagttcgtccccgactattataaggtcatagtcaatcctatggacctcgaaacaattaggaagaatatttctaaacataagtatcagagccgagagagcttcctcgacgacgtgaatctgatcctggctaactctgtcaaatacaacggctacatgtgtacgacatgccgattctag

SEQ ID NO: 137148 - DNA, 657 bp, synthetic construct
  misc_feature 1..657: note = Description of Artificial Sequence: Synthetic coding sequence
  source 1..657: mol_type = other DNA
atgtcatgctccggatctggagctgatcccgaggccgcacctgcctcagctgcgagtgcacctgggcccgcaccccccgtttccgcccctgccgcactcccgtcctccacagccgcagagaacaaggcctctcccgccggtacagccggtggacctggcgccggcgccgcggccggcggtaccggaccattggccgcacgggctggagaaccggcagagcgcagaggggcagcccctgtgagcgccgggggagccgccccccccgagggggctatttccaatggagtgtatgtgctacctagtgccgctaacggagatgtgaagccagtcgtcagctcgactcccttagtcgactttttgatgcaactggaagattacacgccaactatcccagatgccgtgacaggatactacctgaatagggctgggttcgaggcctctgaccctcggatcatccgcctgatatctttggcagcacagaagttcatttctgacatcgccaatgatgcgctccagcactgcaagatgaaaggcacggctagcgggagttccaggtctaagtccaaggaccggaaatatacactcactatggaagatctcactcctgctctgagtgaatatggtatcaacgttaagaaaccgcactacttcacctag

SEQ ID NO: 137149 - DNA, 636 bp, synthetic construct
  misc_feature 1..636: note = Description of Artificial Sequence: Synthetic coding sequence
  source 1..636: mol_type = other DNA
atggacgatgctcacgagagtccaagtgataaggggggggaaaccggtgaatccgatgaaacagctgcagtgcccggtgacccaggcgctaccgacacagatggaatacccgaggagacggacggcgatgcggatgtcgacctgaaggaagccgctgccgaggagggagaattagagtcccaggacgttagcgacctgaccactgtggaaagggaggatagctctctcctgaaccctgcggccaaaaagctgaagatagacactaaagagaagaaagaaaaaaaacagaaggtggatgaagatgaaattcaaaaaatgcagatactagttagctccttctccgaagaacagctaaaccggtacgagatgtatagacgttctgcattcccaaaggctgccatcaagcgccttatccagtccatcacgggcacaagcgtctcacagaacgtcgtgatcgcgatgtctggcatatctaaagtttttgtgggggaggtcgtggaagaagccttagatgtgtgtgagaagtggggagaaatgccgccgcttcagccgaaacatatgcgggaagcggtgcggcgtttaaaatcaaaaggccaaattcctaatagcaagcacaagaagattatttttttctag

SEQ ID NO: 137150 - DNA, 465 bp, synthetic construct
  misc_feature 1..465: note = Description of Artificial Sequence: Synthetic coding sequence
  source 1..465: mol_type = other DNA
atggatgatgcccacgaatccccctctgataagggtggcgaaaccggggaatctgatgaaaccgctgcagtgccaggagaccctggagcgactgacactgacggcatccctgaggagactgatggtgatgcggacgtggacttaaaggaggctgccgccgaagaaggcgaactggaaagccaggacgtgtccgacctcactacagttgaacgggaagattcctcccttctcaacccggctgctaaaaagcttaagattgataccaaagagaagaaggagaagaagcagaaggtggacgaggatgagatccagaaaatgcagatccttgtgtcctctttctctgaagagcaactcaatcggtatgaaatgtataggagatctgcctttccaaaggcagctataaagcgccattggatgtgcgtccgctctggcgaaaagtgccatcattataatcccaacatttag

SEQ ID NO: 137151 - DNA, 486 bp, synthetic construct
  misc_feature 1..486: note = Description of Artificial Sequence: Synthetic coding sequence
  source 1..486: mol_type = other DNA
atgaatcagtttggccccagcgcccttattaatctgtctaatttttctagcatcaaacccgaacccgcgagcacaccaccccagggatcaatggcgaatagtacagccgtagttaaaatcccgggtacacctggggctggcggcagactcagccctgagaacaatcaggtccttaccaaaaaaaagttgcaggacctggtacgcgaagtcgacccgaatgagcagttggacgaggacgtggaggaaatgctgctccaaatagcagatgacttcatagagagtgtagtcacagctgcttgtcagttagcaagacatagaaaaagctctaccttagaggtcaaagatgtccagttacatctcgagcgccagtggaacatgtggattcctgggtttggttcagaagaaatacgaccatacaaaaaggcctgtaccaccgaggcacataagcagcgtatggccctgatacgaaaaactaccaagaagtag

SEQ ID NO: 137152 - DNA, 486 bp, synthetic construct
  misc_feature 1..486: note = Description of Artificial Sequence: Synthetic coding sequence
  source 1..486: mol_type = other DNA
atgaaccagttcggacccagtgccctcattaacctctccaacttcagctctatcaagccggagccagctagcacacccccgcagggctcaatggcgaactcaaccgctgtagtgaaaatcccaggcactcccggcgccggcggcaggctcagtcccgagaataaccaagttttgacaaagaaaaagttgcaggatctggtaagggaggttgatcccaacgagcagcttgatgaggacgttgaagaaatgctccttcagatcgccgacgacttcatagaaagcgttgtgactgctgcctgtcagcttgctaggcatcggaagagttcgacactcgaagttaaggatgtgcagctccaccttgaaagacagtggaatatgtggatccctggttttggctccgaggaaatcaggccttataagaaggcatgtactactgaagcccataagcagcggatggccctcattaggaaaaccactaaaaagtag

SEQ ID NO: 137153 - DNA, 1779 bp, synthetic construct
  misc_feature 1..1779: note = Description of Artificial Sequence: Synthetic coding sequence
  source 1..1779: mol_type = other DNA
atgtcggattctgggtcgtatggacaaagcggaggagagcaacagagttatagcacttacgggaaccctggaagtcagggctatggccaggcttcccagtcatacagtggttacggacagaccaccgattcttcttacggccaaaactacagtgggtatagctcttatgggcagagccagtccggctatagtcagtcttacggcgggtatgagaaccaaaaacagtccagttactctcagcagccttacaacaatcaggggcagcagcagaacatggagtcaagtggcagtcagggtggacgggccccaagttacgatcagcccgactacgggcagcaagacagctacgatcagcagagcggctacgatcaacatcagggctcctatgatgagcaatccaactacgatcagcagcacgacagctattcccagaaccaacagtcctatcattctcagagagagaactatagccatcacacgcaagatgaccggcgggacgtcagtcgctacggagaggacaaccgggggtacggcggttctcaggggggcggacgggggcggggaggatacgacaaggacggaaggggccccatgaccggctcctccggcggcgacagaggcggattcaagaacttcggcgggcacagagactatggaccccggacagatgccgactccgagtccgataattctgacaataatacgatcttcgttcagggcctgggggagggagtatctactgaccaagtgggtgaattcttcaagcagatcggcattatcaagactaataagaagacaggaaaaccaatgattaacctctacactgataaggacacaggcaagcctaaaggcgaagctaccgttagcttcgatgacccaccatccgccaaagcagcaattgattggtttgacggaaaagaatttcacggtaacattattaaggtgtcttttgctacccgaagaccagagttcatgagaggaggcgggtcgggaggtggtcgtagagggaggggtgggtaccgcggcaggggagggtttcaggggagaggaggcgatccaaagagtggagactgggtctgcccaaacccctcttgcggaaacatgaatttcgcccgcagaaattcctgcaaccagtgcaacgaaccacgccccgaggacagtcggccaagcggtggagatttcagaggtcgcggttatggcggagagcgcggctaccgcggtcgcgggggacgagggggcgatcgaggtggatacggcggtgaccggtcgggcggaggatacggaggagatagatcctctggtggcggttatagtggagatcgcagtggtggcggctacggcggtgacagaagcggcggagggtacgggggagaccgcggcgggggctacggtggcgataggggcggtggatatggcggagaccgcgggggaggttacggaggagacagaggcggttacggtggtgatcggggcggcgggtacgggggcgacagaggtgggtacggcggggatagaggcgggtatgggggagatcgtggcgggtatgggggcgacaggggaggatatggaggcgaccgttcccgcggcggctatggtggagacaggggaggcggaagcgggtatggcggcgaccggtcaggcggttacggtggagaccgttcaggcgggggatatgggggggataggggcggcgggtacggaggcgacaggggcggctacggcggaaagatggggggtcggaacgactataggaatgaccaacggaaccgcccctattag

SEQ ID NO: 137154 - DNA, 1779 bp, synthetic construct
  misc_feature 1..1779: note = Description of Artificial Sequence: Synthetic coding sequence
  source 1..1779: mol_type = other DNA
atgagcgactccgggagctacggccagtctggtggggagcaacagtcctattccacttacgggaaccccggaagtcagggatatgggcaagccagtcaatcttactcaggttacggtcaaaccaccgatagtagctacggacagaactacagtgggtattctagttacggacagtcccaatccggttactcccaatcatatggagggtacgagaatcaaaaacagtcttcatacagccagcagccctacaacaatcaggggcaacagcagaatatggaatcatctggatcccagggagggagagcgccgtcctatgatcaacccgactatggccagcaagattcctatgaccagcagtcaggatatgatcaacaccagggtagctatgacgagcaaagtaattacgaccaacaacatgacagctatagtcagaaccagcaatcatatcattcccagcgagagaactattctcatcacacccaagatgatcgccgagacgtaagtagatatggggaagataataggggctatgggggatctcagggcgggggaaggggccggggaggctacgacaaagacggccgcggacccatgaccggcagtagcggaggtgacaggggggggttcaagaatttcggcggccatcgggactacggccccagaactgacgctgactccgagagtgacaattctgataacaacaccatttttgtgcaaggcttgggcgaaggtgtgtctacggatcaggtgggcgagtttttcaaacagattggcatcatcaagacaaacaagaaaacgggaaagccgatgatcaatctttatactgacaaggatacagggaaaccgaagggcgaagcaacggtgagcttcgacgatccaccatcagccaaggccgctatcgactggttcgatggaaaagaatttcatggaaatattatcaaggtgtcttttgcaaccaggaggccagaattcatgagaggcggaggcagcgggggcggacgcagaggtcggggggggtataggggccgaggtggcttccaaggtagaggaggcgaccctaagagcggggattgggtctgtccaaacccttcttgcggcaacatgaatttcgctagacgtaactcatgtaaccagtgcaatgagcctaggcctgaggattcccgcccttctggcggcgactttagaggccgaggctatggcggcgaacgggggtatcgcggacgaggaggcaggggtggcgaccgcgggggctacgggggcgatcggtcaggcggggggtacggtggagacaggtcctcaggcgggggttacagcggagataggagcggcggaggctacggcggagacagatccggaggcggttatggcggggatagagggggtggctacggaggcgatcgaggaggtgggtacggtggagaccggggcggaggctatggcggggacagagggggctacggtggcgatcgaggaggcggatatggaggcgaccggggcgggtacggcggcgatcgcggcggctacgggggagaccgtggcggatatggaggtgataggggaggctacggaggcgaccgctctcggggcgggtatggaggagatcgcggcggaggaagcgggtacggaggtgaccgctccgggggctacggaggcgacagaagcggaggaggatacgggggtgataggggcggcggatacggaggtgacaggggcgggtacggaggcaaaatggggggtagaaacgactatcgcaacgatcagcgcaacagaccctattag

SEQ ID NO: 137155 - DNA, 1188 bp, synthetic construct
  misc_feature 1..1188: note = Description of Artificial Sequence: Synthetic coding sequence
  source 1..1188: mol_type = other DNA
atgacaggatcctctggaggggatcggggtggcttcaagaacttcggaggccaccgcgactatggcccacgcactgatgcagattcagagtctgacaatagcgataataacacgatattcgtccaggggctcggcgagggcgtctctacagaccaagtcggagaatttttcaagcagataggtattataaaaacaaataaaaagacagggaagcctatgattaatctctatacagacaaagacacggggaagcccaagggcgaggctaccgtcagttttgatgatcctcctagtgctaaggcggctatcgattggttcgatggcaaagagttccacggaaacataattaaagtcagctttgctactcgtcggccagagtttatgcgtggcggcgggtcaggaggggggcgtcggggaagaggcggctatcggggtcgcggcggtttccaggggagaggcggcgacccaaagagtggcgattgggtctgccctaacccttcctgtggcaacatgaattttgctcgcaggaattcctgcaaccagtgcaatgaacctaggcctgaggacagcaggccctcaggcggggatttcagaggaaggggctacggcggggaacgcgggtatcgtgggcgcggcggacgggggggggaccgtgggggctatggcggtgatcgatctggcgggggctacgggggagacaggtcatcaggaggcggctattcgggcgataggagtggtggcggttatggcggcgaccgctccggcggaggatacggtggcgacagaggcggaggctacggtggagaccgagggggaggatatggcggcgatcggggtggggggtatggaggggaccgggggggatatgggggcgatagaggggggggatacgggggagaccggggcggctacggtggggacagagggggatatggcggcgaccgtgggggttacggaggagatcgcggagggtatggcggagacagatctagaggaggatatggaggggacaggggaggagggtcggggtacgggggcgacaggtccggcgggtacgggggcgacaggtctggcgggggctacgggggggatcgcgggggaggttacggtggtgatagaggcggctacggcggaaagatgggcgggcgcaatgactaccgaaatgatcagagaaaccggccctactag

SEQ ID NO: 137156 - DNA, 2790 bp, synthetic construct
  misc_feature 1..2790: note = Description of Artificial Sequence: Synthetic coding sequence
  source 1..2790: mol_type = other DNA
atgtgcgagtcatattcgcgttccctgctccgcgtgagtgtagctcagatctgccaggccctgggctgggactctgttcagcttagcgcatgtcaccttcttaccgatgtgctccagcgctatctgcagcagcttgggcgggggtgtcaccggtactccgaactgtatgggaggactgatcctatcctcgacgatgtgggggaagctttccagctgatgggcgtgagcttgcacgagctggaggattacattcacaacattgaaccagttacattcccacaccaaatccccagtttcccggtgagcaagaacaacgtattgcagtttccccagcccgggagtaaggacgctgaagaaagaaaggagtacatccctgattacctgccacccatagttagcagccaggaagaagaggaggaagaacaagtccccacagacggcgggactagtgctgaggctatgcaggtaccacttgaagaagacgatgaactggaagaagaggagattatcaacgacgaaaactttcttggcaagagaccccttgatagccctgaggccgaagaactgcccgcaatgaagcggccccggctcctctcaacaaagggcgatacactggacgtggtcttgctggaagcccgggaacctctgtcctctattaacacccagaaaataccacctatgttgagtcccgtacatgttcaagacagtactgaccttgcccctccttcaccagaacctccaatgctggccccagtcgccaagtcccaaatgcctaccgccaaacctctagagaccaagagcttcactcccaagactaagacgaagacaagttcccccggtcaaaagactaagtcaccaaagacagcccagtctccagctatggtaggatctcctattaggagcccgaagaccgtgagcaaggagaagaagagtccaggtcgatccaaaagtccaaagtcccctaagtcccccaaagtaacgacacacatcccacagactcccgtcaggccagagaccccaaatagaactccctcggctacacttagcgagaagatctcaaaagagactatccaggtgaagcagatccagacgccgcctgatgccggaaagctgaatagtgaaaatcagcccaagaaagcggtagttgcagataaaaccatcgaggctagcatcgatgctgtgattgcacgcgcctgcgccgagcgtgagccggacccgtttgagttcagtagtggatctgagtctgaaggcgacatttttacttcaccgaaaagaatttccggcccggaatgcaccacaccaaaagcctcaacgtcagcgaacaactttaccaagagcggttctaccccgctaccactgagcgggggtacctcatcctctgataactcatggaccatggatgcatcaattgacgaagttgtaagaaaggccaaactcggaaccccctcaaatatgcctcctaacttcccatatatctcttctccatctgtatcacctcctacaccagagcccttgcataaggtatacgaggaaaaaactaagcttcccagcagcgttgaggtcaagaaaaagctgaagaaggagctcaaaactaagatgaagaagaaagagaagcagagagaccgagaacgggagaaggataagaacaaagataaaagcaaggaaaaagacaaagtgaaagagaaggagaaagataaggagaccggccgcgaaacaaaatacccctggaaagaatttctaaaagaggaagaagccgacccttacaagttcaaaattaaggagttcgaggatgtggaccccaaggttaaattaaaggatggcctggttcgcaaggagaaagagaaacacaaggataagaagaaggaccgtgaaaagggcaagaaggacaaagataagcgtgagaaggagaaggtcaaggacaagggacgggaagacaagatgaaagcccctgcacctccgctggtgttacctcccaaggagctcgcgctgcctctcttcagtccggcaactgcatcgagggtgccagctatgctgccgagcttgctacccgtcctgcctgaaaagttgttcgaggagaaagaaaaagtcaaggagaaagagaagaagaaggataaaaaagagaaaaaaaaaaagaaggagaaagaaaaggaaaagaaggagaaggaaagagagaaagaaaagcgcgaacgcgagaagcgtgaaaaagagaaggagaagcacaagcatgaaaagattaaggtggagccagttgcactggctccttccccagtaatcccgaggctgaccttgagggtgggcgccggccaagataagatagtaattagcaaagtggtaccagctcccgaagcaaagccagcaccttcacagaacagacctaaaacacccccaccagcccccgctccagcccccggccccatgttggtttcgcctgcgcccgtgcccctgccactcttagcccaagcagctgcaggccccgccctgctgccttcacctggccccgcagccagtggggcaagcgcaaaagcgcctgtgagatctgttgtcaccgagacagtgtcgacctacgttatccgcgatgaatggggcaatcagatctggatctgtcctggttgcaacaagcccgatgatgggtcacccatgattggatgtgacgactgcgacgactggtaccactggccctgtgtggggatcatgacagctcctccagaggaaatgcaatggttttgcccaaaatgtgctaacaaaaaaaaggataagaagcacaagaaaaggaaacaccgggctcattag

SEQ ID NO: 137157 - DNA, 852 bp, synthetic construct
  misc_feature 1..852: note = Description of Artificial Sequence: Synthetic coding sequence
  source 1..852: mol_type = other DNA
atgtgcgagtcttattcccggagtctcctcagagtctcagtggctcagatatgtcaggccttgggttgggattctgtccagctgagcgcttgccatctacttaccgacgtgttgcagaggtatctgcagcaacttgggaggggctgtcaccgatactccgagttatatggaagaactgatcccatcctggacgacgtgggggaggcatttcagctcatgggcgtgagccttcacgaactcgaagactatattcacaacatcgagcccgtcaccttccctcaccagatcccatcgtttccagtgagcaagaacaatgtgttacagttcccacagcccggcagtaaggacgcagaagaaagaaaagaatacattcccgactatttgcctcccatcgttagctcccaggaggaggaggaggaagagcaggtgcccactgatggcggtacctctgctgaggctatgcaggtcccgctggaggaagatgacgagctggaggaagaagagataattaatgacgagaactttctgggaaagaggccattggacagccctgaagctgaggaacttccggccatgaagcggcctagactgctgagtacaaagggagacaccctagacgtagtgcttctggaagcccgagagcctctgtcctcaatcaacacccagaaaatacccccaatgctctcccccgtgcacgttcaagattcaacagacctggcacccccttcccctgaaccgcctatgctggcccccgtagcaaagtcccagatgcccacagcaaagccactggaaaccaagagctttacacccaagactaagacgaagaagaagaaaaagaagaagaagagttag

SEQ ID NO: 137158 - DNA, 3258 bp, synthetic construct
  misc_feature 1..3258: note = Description of Artificial Sequence: Synthetic coding sequence
  source 1..3258: mol_type = other DNA
atggccgcaggcagtgatctacttgacgaggtattttttaactccgaggttgacgagaaagttgtttcggacctggtgggctctctggagtcccagcttgctgcatccgctgcacaccaccaccatctggccccgaggactcccgaggttagagctgccgccgccggggcactcggaaaccatgtggtgagcggatcccccgcgggcgccgccggtgctgggccagccgccccagccgagggcgccccaggcgcggcgcctgaaccacctccggctggaagagcccggccaggaggcggcggaccacagcggccaggccccccaagtccccgacgtccgctggtgcccgccggtccagccccacctgcagccaagctgcgacccccccccgaaggctccgcaggctcctgtgcccccgtgcccgccgcagccgccgtggccgctggccctgagcctgcgcctgccggaccagccaagcctgcgggccccgccgcactggccgccagggctggacccggacctggacctggtcccggaccaggtccagggcccgggcccggcaagcctgctggcccgggcgccgcacagactttaaatggcagtgccgcactcctgaatagtcaccacgccgctgctccagctgtatcattagtgaataatggccccgctgcactcctgcctctgccaaagcctgccgccccgggcacggtgattcagactcccccctttgtcggcgctgcggcgccacctgcacccgccgccccctctcctccagcagccccagcgcccgccgctcccgccgcagcacccccaccccccccacccgctccagccacacttgcacgcccaccagggcatccggcaggccctccaaccgcagctccagcagtccctccacccgcagctgcccagaacggcggctccgccggagcagctccagcaccggcgccagcagccggaggtccagccggagtctccggccagcccggccctggggcagctgcagcggcaccagccccaggcgtgaaagcagaatctcccaaaagggtggttcaggccgcccctccagccgcccagaccctcgctgcttctggtcctgcttccaccgctgcaagcatggtgataggtcccacaatgcagggggctttaccctctccggccgccgtcccacctcccgccccaggcactccaactggattacctaaaggcgcggcaggcgcggtgactcaatcactttctcgaaccccaactgctactacttctggcatccgggctacactgacccccacggtccttgctccaagactccctcagcccccacagaaccctactaatatccaaaactttcaactgcccccaggaatggtactggtgagatctgagaatgggcagctgttaatgattccccagcaggctctggctcagatgcaggcacaggcccacgctcaaccccagactacgatggctccaaggccagccaccccaacttccgctcctccagtgcagatatccactgtgcaggcccctggaacccctataatcgccaggcaggtcacccctacaaccattattaagcaggtgtcccaggctcagacaactgttcagcccagcgccactctgcagagaagccctggggtgcagcctcaattggtcttgggcggtgccgctcaaaccgctagtctggggaccgcaaccgcagtgcagaccggtacaccacagcgcacagtgcctggggctacaaccactagttccgcagctaccgagaccatggaaaatgtgaaaaagtgcaagaacttcctgagtacactcattaagttggccagctctggaaagcagtccactgagacagctgctaatgtcaaagagttggttcagaacctgctggacggcaagatcgaggccgaagatttcacaagtaggctttaccgcgaacttaactcctctccgcagccttatcttgtcccatttctgaagcgctcccttcccgccctgagacaactcactcctgattccgcggccttcatacagcagagccaacaacagccacccccacccaccagtcaagctaccacagccctgacagcagtcgttctctctagctctgtgcagcgcacagccggaaagacagctgccactgtaacatccgccttacagccgcctgtcttgtcgttgacacagcctacacaggttggggtgggaaagcagggacagccgacccctttggtgatccagcagcccccaaagcccggggccctaattcggcctcctcaggtgacgcttacccagacccctatggttgcgctgcgccagcctcacaatcggattatgctgaccactccacagcagatacaactaaatccccttcagcccgttccagtcgtgaagcccgctgtactacccgggacaaaggccctgtccgctgtttcagctcaggctgcagctgctcagaaaaacaagctcaaggaaccaggcggcggtagcttcagggatgatgatgacatcaatgatgtcgccagtatggccggagtgaatctgtccgaggagagtgctcgaatcctggccaccaattccgaactggtcggcactctgacgcgaagttgtaaggatgaaaccttcctcctccaagcaccgcttcagcgacggatcctggaaatcggaaagaaacacggtattactgaactccatcctgatgtagtaagttacgtttcccatgctactcagcagcgtctgcaaaatctggtcgagaaaattagtgaaactgcgcaacaaaagaacttctcttacaaggacgacgaccgatacgaacaggcgtctgacgtgagggcacagctgaaatttttcgaacagctcgaccagatcgagaaacagagaaaggatgaacaggagagagagattctcatgcgggcggcaaagtcccggtccaggcaggaagacccagagcaactgcggctgaagcagaaggccaaagagatgcagcaacaggagctcgcccaaatgcgtcagagagacgccaatttaaccgccttggcagcaatcgggcctcgtaagaaacgaaaagtcgattgccccgggccaggaagcggtgccgaagggtccgggccaggctccgtagtccctggtagcagtggagtggggacaccaaggcagttcacgcggcagaggataacccgggtgaatctgagggacctcattttctgcctggaaaatgagagagagaccagtcactccctgctgctctacaaggcattcctcaaatag

SEQ ID NO: 137159 - DNA, 2850 bp, synthetic construct
  misc_feature 1..2850: note = Description of Artificial Sequence: Synthetic coding sequence
  source 1..2850: mol_type = other DNA
ggccggggcctcctgcagcagcgcgggggaagagaaagcggccccgctcctcccgccgctaaactccgcccacctccggaggggtctgccggctcctgcgccccggtgccagccgcagctgcggttgcagcaggtcccgaaccagccccggccggccctgccaagccagctggccctgctgcccttgcggcacgagcaggaccaggccctggtccaggaccaggccccggcccagggccaggcccggggaagccagctggtcccggggcggcgcaaactctgaacggaagtgctgccctcctaaattcacatcacgcggcggctcccgccgtgagcctggtgaacaacggtcccgctgccctgctgcctctgcccaagcctgccgcacctgccgccgccccccctcctcctcctccggcccccgccacccttgcccggccccctggccatccagcaggccccccaaccgctgcacctgctgtgcccccacctgcagctgcccagaacggcgggtcagctggtgcagccccagcccccgcccccgctgctggcggcccagcaggcgtgtcaggccaacccggccccggcgccgcggcggccgccccagctccaggagttaaggccgagagcccaaagcgcgttgttcaggccgctcctccggccgcgcagactctcgctgcgtcagggccagctagcaccgccgcttcaatggtcatcggcccgactatgcagggagcacttccgtccccagcagcggtgccacccccagcacccggtactcctaccggtctgccaaagggagcagccggcgccgtgacccagtccctgtcccgtacacccacagccacaaccagcggcattagggccactcttacaccgaccgtcctggcacctagactaccacagcctcctcagaatcctactaacatccagaattttcagttgcctcctggaatggtcctggtcagaagtgaaaacggtcaacttcttatgattccacaacaggctcttgcccagatgcaggcacaggcacatgcacagccacagacgacgatggctccccggcccgcaacccctacctccgctcctcccgtgcagatcagtacagttcaggcacctgggacacctatcattgcccgccaggttacaccaactaccatcataaagcaggtgtcacaagctcagactaccgtgcaaccatccgcaaccctccaaagatcacccggggtgcagccacagctagtactaggaggagccgcgcaaacagcatccttgggtacagccacggcggtgcaaaccgggaccccccagcgcaccgtcccaggtgcaaccacaacctcgtcagccgcaacggagacaatggagaatgtgaagaaatgcaagaactttttatccacgctgattaagttggcttctagcgggaagcagagtaccgaaacagcagccaacgtgaaggaactggtgcagaatctactggatggaaagatagaggccgaagacttcacctcccggctctacagggagcttaactcttccccccagccctatcttgtgcctttcctgaaaaggagcctgccagctctgcgacagttaacccctgatagcgcagctttcatccagcaaagccaacagcagcctccaccaccaaccagccaagctacgaccgctctgaccgctgtggttctctcctcatcggtccagaggacagccggcaaaacagctgcaaccgtcacctctgcattgcaaccccccgttctctcacttactcaaccaacccaagtgggcgtggggaagcaaggccagcctaccccactggttatccaacaaccaccaaagcccggcgctctcattcgccccccacaggtgacgctaacccaaactccaatggttgctctgcgacagccccacaaccggatcatgctgacaactccccagcaaatccaactgaatcccctgcagccagtacctgtagtgaagcctgctgtgctgccaggaaccaaggctctttccgccgtctcagcacaagccgctgccgcccagaagaataagttgaaggaaccaggtggaggctctttccgcgacgatgacgacataaatgacgttgcctccatggcaggagtgaatttatctgaggaaagtgcccggatcctggcaactaacagcgagctcgtcggaaccctgacccgcagctgcaaggatgaaacgtttctgctgcaggcaccactgcaacgaagaatcctggaaatcggaaaaaagcatggcattactgagctccaccctgatgtggtgtcttacgtcagccacgcgacgcagcagagacttcagaacctggttgaaaaaatctcagagactgctcagcaaaagaatttctcttacaaggacgacgataggtatgagcaggccagtgacgtgcgggcccagctcaagttttttgaacagcttgaccagattgaaaagcagcgtaaagacgagcaagaaagagaaattctgatgcgggctgccaagagtcgaagcagacaagaggaccccgaacaacttcggcttaagcagaaagcaaaagaaatgcagcaacaggagctggctcagatgagacagcgtgatgccaatcttacagcactggccgccattgggcctcgaaaaaaacgcaaagtcgactgtcccggtcccgggtcaggagctgaggggagcggaccgggtagtgttgtccctggatctagtggtgtgggcactccacggcagtttactaggcagagaatcacaagagtgaacctacgcgacctgattttttgtctcgaaaacgaaagagaaaccagccactccctcctgctgtacaaggcgtttttaaaatag

SEQ ID NO: 137160 - DNA, 2589 bp, synthetic construct
  misc_feature 1..2589: note = Description of Artificial Sequence: Synthetic coding sequence
  source 1..2589: mol_type = other DNA
atgcccgctggactaaccgagcccgccggcgctgcgcctcccgcagccgttagcgcttctgggacagtgaccatggcacccgccggggccctccccgtgagggtcgagtctacacctgtggccttaggagccgtgactaaagcccctgtctcagtctgtgtagaacccacggccagtcagcctctcaggagtccagtggggactttggtaacaaaagtggccccagtcagcgcgccaccaaaggtgagttccggtcctagactccccgctcctcagatcgtggccgttaaggctcctaacacaactactattcaattccccgctaatctgcagctgccgcctgggacggtgctgatcaagtccaacagtggtccactgatgctggttagcccacagcagactgttacacgggcggagaccacgagcaatatcacgtcccggcctgccgtgccagctaatcctcagactgtgaagatctgcacagttcccaatagcagttcgcagctaatcaaaaaggttgccgtgactccagtgaagaagttggcacagattggcacaaccgtggtcaccactgtacccaagccttcctctgtgcaatccgtagccgtgcccacctcagtcgtcaccgttacaccggggaagccactgaacacagtaactaccctgaaacccagctcactgggagcctccagtacacccagtaacgagcccaatctgaaggctgaaaacagcgccgcagttcagatcaatttgtctccaaccatgctggagaacgtgaagaagtgcaagaactttctagcaatgctgatcaaactggcgtgctctgggtctcagtctccagagatgggccagaacgtgaagaaattggttgagcagctgctggacgcaaagattgaagccgaagaatttacacgcaagctctacgtggagctcaagtcttcccctcaaccacacctggtgccgttccttaagaagagcgttgtagcgctccgacagctccttccaaattcccaaagttttattcagcagtgcgtacaacaaacctcttctgatatggttattgctacctgcacaactaccgtgactaccagccctgtcgttaccacaaccgtgtcatcaagccagagcgagaaaagtatcatcgtttctggggctaccgcacccagaacagtctcggtccagacactcaatcccttagcaggtccagtcggagccaaggctggcgtcgtgacactgcactccgtgggtcccaccgccgcaaccggaggcactacagctgggactgggctgctacagacctccaagcctctcgtaacaagcgtagccaatacagtgactaccgtgagcttgcagcctgagaagccagtcgtatcgggaacagcagtgacattaagcctacccgcggtgacattcggcgaaacttcaggagccgccatttgtctgccctctgtgaagcccgtcgttagttccgcaggaaccacctccgataagcccgttataggcacaccggtgcagataaagctggcccaaccaggtccagttttgagccagcctgctgggattcctcaagccgtgcaggtgaagcagttggtggttcagcagccaagtgggggcaacgagaaacaggtcacaacaatctcccacagctccaccctcacaatccaaaagtgtggtcagaagaccatgcccgtgaatacgattattccgacttcccaattcccacctgccagcatactgaagcagattacgctgccaggaaataaaatcctgagtttgcaagccagtccaacacaaaaaaaccgcattaaagaaaatgtcaccagttgtttccgcgacgaggacgacatcaatgatgtgacttccatggccggtgtgaatttaaatgaggagaatgcttgtattctggctaccaattccgagctggtgggaacgctgattcagtcatgcaaagatgagccctttctgtttataggtgcgctccagaagcgcattctagatattggcaagaaacatgacattaccgaactgaattctgacgccgtaaaccttatctcacaggctacccaagaaaggttaaggggactgctggaaaagctgaccgcaatagcccagcacagaatgactacatacaaagcttctgaaaactacattctatgcagcgacacccgcagtcagctgaagtttcttgagaaactggatcagctggaaaagcagaggaaagatttggaggagagagagatgctgcttaaagcggctaagtcacgttcaaacaaggaagatccggaacagctacgcctcaagcagaaggcaaaagaacttcaacagcttgagctggcgcaaattcagcaccgcgacgccaacctcaccgccttagcggctatcgggcctaggaagaagaggcctttagaaagtgggatagagggcttgaaggataacctcctcgcaagtggaaccagctcactcaccgccacgaagcagctacatagacctagaattacccgcatttgcctccgcgacctgatcttctgtatggaacaggagcgtgagatgaagtattctagggcactgtatctcgcgctgctcaaatag

SEQ ID NO: 137161 - DNA, 1857 bp, synthetic construct
  misc_feature 1..1857: note = Description of Artificial Sequence: Synthetic coding sequence
  source 1..1857: mol_type = other DNA
atgcctgcaggcctcactgaacccgctggtgcagcaccgccagcagccgtgagtgccagcgggaccgttaccatggcacccgccggagccctgcccgtccgagtagagtcaaccccagttgcgctgggggcagtgactaaagcccccgtgtcagtgtgcgtggaaccaaccgctagtcagcccctccgctctcccgttggaaccctcgtaaccaaagtggcgcctgtcagtgctccacctaaggtcagttcaggtcccaggctaccagcgccacagatcgtggcagtgaaggcccctaatacaacaacgattcaatttcctgccaaccttcagctgccccctggtaccgtgctgataaagagcaactcggggccactcatgctggtgtccccacagcaaaccgtgacacgcgccgaaaccacatccaatatcacgagtcgacctgccgtccccgccaatccccagacagtgaaaatttgcaccgtgcctaattccagctctcagcttattaagaaggtagccgtcacccccgtgaagaagctcgcccaaattgggacgaccgttgttacgactgtgcccaaaccctcttctgtccagtcggtcgcggtacctacctctgtcgtcaccgtaacgccaggaaagccgctcaacactgtcacaaccttgaagccctcatccctgggtgccagcagtacacctagcaacgaacccaacctcaaggcagaaaattctgctgccgtacaaataaatctatcacctactatgttagaaaatgttaaaaaatgtaagaacttcctggccatgctcataaagcttgcatgttccggctctcagagtcctgagatgggccagaacgtcaagaagctcgtggaacaactcctcgatgccaagattgaggcagaagagtttacccgcaagctctacgtggagctgaaatcctctccacagccccacttggtgccattcctgaagaagtcagtggttgcactaagacagttgctgcctaattcacagagcttcatccagcaatgcgtgcagcaaacctccagtgacatggttattgcaacttgcaccacaacagtcacaacctctccggtcgttaccacaacggtatcttcctcacagagtgagaaaagtatcatcgtgtcgggcgccacagctccccgtactgtgtccgtgcaaaccctgaatccccttgccggtccagtcggcgccaaagcaggcgtggtaactctgcactccgtcggccctactgcagctactggcgggaccacagctggcaccggcctgttgcagacctccaagcctctagtgacctcggtggccaacacggtcacaaccgtgagtctacagcccgagaaaccagtagtttctggaacagccgtgaccttgtcactccccgccgtcacgttcggagagacatctggagccgctatttgtttgccgagcgtaaagccggtggtgagctccgcgggcaccacctcagataagcctgtcatcggcacaccagtgcaaatcaaactggcccagccagggcctgtgctgagtcagccagcagggatccctcaggcagtccaggtgaaacagctggtggttcaacagccgtctggcggtaatgagaaacaggtcacaacaatcagccacagtagcacactaacaatccagaaatgcggacagaagaccatgcccgtcaacaccataattcctacatctcaattcccccctgcatctatcctcaaacaaatcactttacctgggaataagattctgtctctccaggcctcgccaacccagaaaaacagaatcaaagagaacgtcacaagctgtttcagatctactttcatttgtgtgtactag

SEQ ID NO: 137162 - DNA, 2598 bp, synthetic construct
  misc_feature 1..2598: note = Description of Artificial Sequence: Synthetic coding sequence
  source 1..2598: mol_type = other DNA
atgcccgcaggtctgaccgagccagccggcgctgctccaccagccgcagtgtctgcatccggcactgtgaccatggctcccgctggagccctgcctgtgcgagtcgaatcaacccctgttgccctgggcgcagtgaccaaagcaccggtttcagtgtgtgtagaaccaactgcaagccagcctttgcgcagccctgttgggacactggtgacaaaggtggctcctgtgagcgctcctcctaaagtaagttctggtcctagactccctgcacctcagattgttgccgtgaaagctcctaatacgacaactatccaattcccagctaatctgcagctcccacctggcacagtcttaatcaaatcaaacagcggacccctgatgctcgtctccccacagcagacagtgaccagagccgaaaccacgagtaacatcacctctcgtcctgctgtgcccgcaaatccacaaactgtcaaaatttgtaccgtgcccaactcttctagccagctgatcaaaaaggtggctgtgacccctgtcaagaagctggcacagatcggcactaccgtagtgaccaccgtgcctaaaccaagttctgttcagagcgttgcagtgccaactagcgtcgtaactgtgacaccgggcaagcctctaaacaccgtgacgaccctgaagccatctagcctgggggcgtcttcgacgccatccaacgagcctaacctgaaagccgagaactctgccgctgtccagatcaaccttagtcctactatgctggagaatgtgaagaaatgcaagaacttcttggctatgttgatcaagcttgcatgctccggttcgcagtcacccgagatgggccagaacgtgaaaaaactcgtcgagcagcttctcgatgcaaaaattgaggccgaagagtttactagaaaattatacgtagagttgaaaagcagccctcagccgcacctggtaccattcctaaagaagtccgtggtggcactgaggcagctgctgcctaactctcaatcctttatacagcagtgcgtacagcaaacatcatccgatatggtcatcgccacatgcacaactactgtcaccacatccccggttgtgacaacaaccgtatccagcagccagtccgagaaaagcattattgtgtccggagctaccgctccccggaccgtgtcagttcaaacactgaaccctctggcgggtccagtaggagccaaggcaggggtggtgacattgcattctgtaggacccactgcagctacaggcggtacgacggcaggaacaggcctcttgcagacctctaagccactggtcactagcgtggctaacaccgtaactaccgtgagtcttcagccggagaaacccgtggtgagcggcacagctgtgaccttgagcttacccgccgttacctttggtgagacctccggcgctgccatctgcctaccgagtgtgaaacccgttgtgttttgctgggatcacataaagcccgtaatcggcactccagtccaaattaagctggctcagcccggtcctgtcttaagtcagccagccgggatcccacaagcagtgcaggtcaagcaacttttcagcttattccaggtggtgcagcagccttctggggggaacgagaaacaggtcactaccatcagccacagcagtaccttgacgatccaaaaatgcggccaaaaaacaatgcccgttaacaccattattccaacttctcagtttcctcccgccagtatactaaagcagatcaccctgcccgggaataagattctttctctgcaggccagtcctacgcagaaaaaccggatcaaagagaacgttacatcctgctttagagacgaggatgatatcaatgacgtgacctccatggcaggggtcaatttaaacgaagagaatgcgtgcatcctggcaaccaacagcgagctcgttgggacgttgatccaatcatgtaaggacgagccattccttttcattggcgccctacagaagcgaatattggacattgggaaaaagcatgacatcactgagctcaactcggatgccgtaaatctgattagccaagccacacaggagaggctgagggggctcttggagaagctgacagctatcgcgcagcatagaatgactacatacaaggcaagcgagaactatatcctgtgtagcgataccagaagccagctaaagtttctggaaaaattggatcagcttgaaaaacagcgcaaagatctcgaagaaagagagatgctcttgaaggccgcgaaatctagatccaacaaggaagacccagagcagttacggctgaaacagaaagctaaggagcttcagcagctggaactggcccagattcagcatcgcgatgcaaatctcacagccttagccgccatcggccccaggaaaaaacgaccactcgaatccggaatcgagggcctgaaagataaccttctagcatctggcacctctagcctgaccgcgacaaagcaactgcaccggccacggatcactcgcatttgtctgagagacttaatattttgcatggaacaggagagagagatgaaatatagccgggccctgtacttggccctgctgaaatag

SEQ ID NO: 137163 - DNA, 2238 bp, synthetic construct
  misc_feature 1..2238: note = Description of Artificial Sequence: Synthetic coding sequence
  source 1..2238: mol_type = other DNA
atggccgctctcgctgaggagcagacagaggtggctgtcaagctcgagcccgagggcccccctacactgcttcctccccaggcaggcgacggagccggcgaaggaagcgggggcactacaaataacgggccaaatggggggggcggcaatgtggcggcctcaagcagcacgggcggcgacggaggcacaccaaagccgactgttgcagtgtccgccgcggccccggccggagctgcaccagtgcctgccgccgcaccggatgcaggcgccccacatgaccggcagacacttctcgcagtcctgcagttccttaggcaatctaagttacgggaggctgaggaagccttaaggagggaggccggcctattggaggaggcagttgctggatccggtgctcccggcgaagtagattccgccggcgccgaagtaacgtcggcacttcttagtcgggtcaccgccagcgcgccaggcccggccgctcctgacccgcccgggacaggagccagcggggcaactgtcgtgagtggctcagcctccggtccagccgcccctggtaaggtcgggagcgtcgcggttgaggaccagcccgatgtgtcagcggtcttgagcgcttacaatcagcaaggagacccaacaatgtatgaggaatattatagcggattgaagcacttcattgaatgctccctggactgccatcgagcagaactgtcacagctgttttatcctctgttcgtacatatgtacctggaactggtgtacaatcaacacgagaacgaggctaagtcgtttttcgaaaaatttcatggagaccaggagtgctattatcaggacgatctgcgagtgctttcaagcctgaccaagaaggaacatatgaaaggcaacgagactatgcttgatttcaggacctccaaatttgtgctccgtatcagcagagacagctaccaactcctgaaacgccacctgcaggagaagcagaataatcagatatggaatatcgtgcaagagcacttgtatatcgacattttcgatggtatgcctaggtctaaacagcaaattgacgccatggtggggtctctcgccggcgaagcaaaacgtgaagccaataaatccaaggttttcttcggccttctgaaggaacccgagatcgaggtgccactcgacgatgaggacgaggaaggcgaaaatgaagagggaaagcccaagaagaagaagccaaagaaagactccattggatccaagtcgaaaaagcaagatcctaacgctcctccacagaatcgcattcccctgccagaattgaaggacagcgacaaattagacaagattatgaacatgaaggagactaccaaacgcgtccgcctaggccctgactgcctcccaagtatatgtttctatacttttctgaatgcgtatcagggactgacagccgtagatgttactgacgatagcagcctgatcgccgggggattcgctgattcgacagtacgggtgtggtctgtcacacctaaaaaactgagaagtgtcaagcaggcctcagacctctctcttatcgacaaggaatcagatgacgttctagagaggatcatggatgaaaaaaccgcttcagagctcaagattctgtatggtcacagtggccccgtatacggagcctcattttcacccgacaggttatgggcgaccgaccactaccagcccctgagaatcttcgcaggccacctcgctgatgtgaattgcacaagatttcacccaaactcaaactatgtggcgacaggtagtgcggatagaactgttcgcctctgggatgttctgaatggcaattgtgtaagaatattcacaggacacaaggggcctattcattccctcactttttctcccaacgggcgatttctcgccacaggcgccactgatggccgagtgctgctctgggacatcggacatgggcttatggtgggagaattgaagggccatacggataccgtgtgttcattgaggttcagcagggatggagagatcctcgcgagtggatcaatggacaacacagttagactgtgggatgccatcaaggcctttgaggacctcgaaacagatgacttcaccaccgctactggccatatcaacctcccggaaaatagtcaggagttgctgctggggacatatatgacgaagagtactccagtagtccatctgcacttcacaaggcgaaacctcgtgctggcggccggggcctattcacctcagtag

SEQ ID NO: 137164 - DNA, 2403 bp, synthetic construct
  misc_feature 1..2403: note = Description of Artificial Sequence: Synthetic coding sequence
  source 1..2403: mol_type = other DNA
atggcagctctggcggaagaacaaacggaagtggcagtcaaacttgaacccgaggggcctcctaccctacttcctccacaagcaggtgatggcgccggcgaaggtagtggagggacaactaacaacggacctaatggggggggtggcaacgtggccgcatctagttccacaggaggcgacggtggcactcctaagcccactgtggctgtgtccgctgccgcccctgcaggagccgctcccgtgcccgcagccgctcctgatgcaggggccccccacgaccggcagaccttgctggcagtgcttcagtttctccgacagagcaaactgagagaggccgaggaggccttgagacgggaggccggattgctagaagaggccgtggctgggagcggcgccccgggtgaagttgatagcgccggggccgaggtaacaagcgccctcttaagccgcgtaacagccagcgcacctgggccagccgctcccgatcctcctggaaccggtgctagtggggcaaccgtcgtctccggcagcgcctcagggccagccgcccccggtaaggtgggaagtgtagccgtggaagaccagccagatgtctccgccgttttgtctgcatataaccaacaaggagacccaacgatgtatgaggagtattatagcggccttaaacacttcattgaatgcagcctggattgtcaccgggctgagctgtcacagcttttttatccactgttcgtgcacatgtacctcgagctcgtgtataatcagcacgaaaatgaagccaagagcttcttcgagaaattccatggggatcaggaatgctactatcaggatgacctcagggtgttatctagtctcaccaagaaagaacacatgaaagggaacgaaactatgctggactttcggacctccaaatttgtgttaaggatttcccgcgactcataccagctcttgaagcgccacctacaggaaaaacagaacaatcagatttggaacattgtacaagagcacctgtatatcgatatctttgacgggatgccaaggtcaaagcagcagattgacgcgatggtggggagcctcgctggcgaggccaagcgtgaagccaacaaaagcaaggtattttttggactgctcaaagaaccggagattgaagtgccactggatgatgaggacgaggagggcgagaacgaggagggtaaacccaaaaaaaagaagcccaaaaaggattctataggtagcaaatccaaaaagcaggatccaaatgctcccccccagaatcgcatccctctcccggaacttaaagactcagataagcttgataaaattatgaatatgaaggaaaccactaaacgcgtcaggctgggtcccgattgcctgccttcaatttgtttctacacttttctgaacgcataccagggcctaactgccgtcgatgtgaccgacgatagtagtctcatagcaggcggttttgctgacagtacagtgcgcgtgtggagtgttactccgaaaaagttgagaagcgtcaagcaagctagcgatctgtccttaatcgacaaggagtcggatgacgttcttgagcgcatcatggacgagaaaactgcatccgaactgaagattttatatggacactctggccccgtgtacggcgcctctttctctccggatcggaattatctgctgtccagcagtgaggatggaaccgtgcggctgtggagccttcagactttcacatgcctggttggctacaaaggacacaactatcccgtctgggacacccagtttagcccttatggctactacttcgtgtccggcggacatgaccgcgtcgcccgtttatgggcaactgaccactaccagcctctcaggattttcgcaggccacctggcggacgtgaattgcactcggttccaccctaatagcaactacgtggcaaccgggagtgcagaccgtacagtgcgcttgtgggacgtcctgaacgggaattgtgttaggatttttaccggccacaaggggccaattcactccctgactttcagcccaaacggcaggttcctggcgacaggcgccacagacggaagagtgctgttatgggacatcggccatggcctgatggtgggagagctgaagggacacactgacacggtatgttctctgcgctttagccgtgacggcgaaatcctagcctcagggagtatggacaacacagttcgcctgtgggacgctatcaaggcttttgaggacctggaaaccgatgattttaccaccgctaccgggcatatcaatctgcccgaaaactctcaggaactcctactgggcacctacatgacaaagtcaacccctgtcgtccacctccacttcacaagaaggaatcttgtcctcgctgccggggcttattcacctcagtag

SEQ ID NO: 137165 - DNA, 2034 bp, synthetic construct
  misc_feature 1..2034: note = Description of Artificial Sequence: Synthetic coding sequence
  source 1..2034: mol_type = other DNA
atggcagaggaaaagaagcttaaactgagcaacactgtgctgccatcagaaagcatgaaagttgtcgcggagtccatgggcatagcccagatccaggaagagacttgtcagcttctgactgatgaagttagctacagaattaaggagattgcccaggacgctttaaaatttatgcatatgggaaaacgacagaagcttactacaagcgatatagactacgccctgaaactcaagaacgtggaaccgctgtacggctttcacgcgcaggagtttattccgtttcgattcgcatctgggggtggccgtgagttgtacttctacgaggaaaaggaagtggacctaagtgacatcatcaatactcctcttcctcgggtacctttagatgtgtgtttaaaagcccattggttatccatcgagggatgccagcccgctatcccggagaaccctcctcctgctcctaaagagcagcagaaagctgaagctacagagcctttgaaatccgccaagcctggccaggaagaagatgggccgctaaaaggaaaaggccagggggctacaaccgcagatggaaagggaaaggaaaagaaagcccccccactgttggaaggggccccactaagattaaagcctcgtagcattcatgaattatccgtagaacagcagttatactataaggagatcacagaggcctgcgtcggaagttgcgaggctaagagagcggaagctctgcagtccattgcaactgacccgggcttgtaccagatgctgccccgattcagtacctttatttccgagggtgtacgggttaacgtggtgcagaataatctggctttgttaatttatctgatgaggatggtcaaagccttgatggacaatcctacgctatatttggagaagtatgtccatgagcttatcccagccgttatgacatgtattgttagccggcagctttgcctgaggccggatgtcgataatcattgggccttgagggatttcgctgctcgtctcgtagcccaaatatgcaaacatttcagcacaaccaccaacaatattcagagccggatcaccaagacgttcactaagtcttgggtcgacgaaaagactccatggacaactcgctacggatctattgccggcctcgccgaactgggccacgatgtgatcaaaactctgatactgcctaggttgcaacaggaaggagaacgcatccgcagcgtgctcgatgggccggttctgtcaaacatcgaccggattggggctgaccacgttcagtccctgcttctaaaacattgtgctccggtactcgctaagttgaggccacctccggacaaccaggacgcttatagggccgagttcggctcactcggccccctcctttgctctcaggtggtgaaggcaagagcccaggccgcattgcaagctcagcaggtcaaccggacaacacttacgattacccaaccgagaccaaccttaacactatcccaggccccccagcctgggccccgaactccaggactgctgaaggtgccaggatccattgcgctgccggtacaaacgctcgttagcgccagggcggccgctcccccacagcccagccccccccccacaaaattcatcgtcatgtcttcctccagctcagcacccagcactcagcaagtcctgtctctctccacaagtgctccaggatcagggagtaccactacctcacctgtgaccaccactgtgcccagtgtacagccgattgtcaagctggtctccaccgccacgacagccccaccgagtacagccccgtccggacccggctccgtccagaaatacatcgttgtgtccctgccacccaccggggagggcaaaggcggccctaccagccacccttcacccgtgccccctcctgcctctagcccgtcccctctgtccggatccgctctgtgcgggggcaaacaggaggccggagatagccctcccccagctcctggaacaccaaaagcgaatggctctcagccgaattctgggtctccacagcctgccccttag

SEQ ID NO: 137166 - DNA, 231 bp, synthetic construct
  misc_feature 1..231: note = Description of Artificial Sequence: Synthetic coding sequence
  source 1..231: mol_type = other DNA
atggcggaagaaaagaaacttaagctgtccaataccgtactgccaagcgaaagcatgaaggtggtagctgagtcaatgggaattgcacaaatacaggaggagacttgccagttgctgaccgatgaggtgagttacaggattaaagaaatcgcccaagacgccttgaaattcatgcatatgggcaagcgacaaaagttgacaacatccgatatcgactatgcacttaagtag

SEQ ID NO: 137167 - DNA, 1806 bp, synthetic construct
  misc_feature 1..1806: note = Description of Artificial Sequence: Synthetic coding sequence
  source 1..1806: mol_type = other DNA
atgcacatgggcaaacgccagaaactgaccacgtctgacattgactatgcgctcaagttgaagaacgtggaaccgctttacggttttcacgcgcaggagttcatcccgtttcggttcgcgtcaggtgggggcagggagctgtacttctatgaagaaaaagaggtggatctatctgacatcattaacacccccttacccagagtgcccctggatgtgtgtttaaaggcccctaaagaacagcaaaaagctgaggctaccgagcccttaaagtcggcaaagccaggacaagaggaagacggcccgctcaagggaaagggccagggggccaccacggcggacggcaagggaaaggagaaaaaagcacctcccctcctggaaggcgctccgctgcgtcttaagccacgttcaattcatgagctctccgtagagcaacaattgtactacaaagaaataaccgaagcttgtgtagggtcttgcgaggccaagcgtgccgaggccctgcagagcatcgctaccgatcctggtttataccaaatgctcccccgcttcagtactttcatctctgaaggagtgcgcgtcaatgtcgtgcagaataacttagcactgctcatctatctgatgaggatggtaaaggccctaatggataatcccacgctctatctggagaaatacgtccacgaactcatcccggccgtgatgacctgtattgttagccgccaactgtgcctgcggccagatgtggacaatcactgggccctccgagatttcgccgctcgcctcgttgcccagatttgtaaacacttttctacgactactaacaacatacagtcgcggatcacaaagacatttacgaagagttgggtggacgagaagacaccatggacgactcgttacggatccatcgctggcctagcggagctggggcacgatgtcatcaagacccttatcttacctcggctgcaacaagaaggagaaagaatccgcagcgtgctggacgggccagtacttagtaatatcgataggattggagctgaccacgtccaatctctattgcttaagcactgcgctcccgtcttggcaaagctgcggccaccacccgataatcaggacgcttacagggccgagtttggctcactggggcctctcttatgctcccaagttgtcaaagctagggctcaggccgctctccaggcacagcaagtcaaccgcactacgctaacaatcactcaaccacgaccaaccctgactctgtctcaggccccacagccaggacccaggacaccaggacttctgaaggtgcccggttctattgctttgcctgtgcaaactttggtcagcgcacgcgcagcagcccccccgcaacctagtcctcctcctaccaagtttatcgtgatgtcctcttctagttccgcaccatccacacagcaggttctatcgttgtccacctccgccccaggaagcgggagcactaccacttcccccgttacaactactgtacctagcgtgcagcctatcgtgaaactggtgtcaaccgcaaccactgctccgccttccaccgcaccatctgggccaggttctgttcagaaatacatcgtggtgtccctcccaccgacgggcgaaggcaagggcggacccacaagccacccttcaccggtacccccacccgcctcaagcccttcccctttgtctgggtctgccctgtgcggcggcaaacaggaggccggagattcccctcctcccgcccccgggaccccaaaagccaatggatctcagccaaattcaggctctccccaacctgccccctag

SEQ ID NO: 137168 - DNA, 45 bp, synthetic construct
  misc_feature 1..45: note = Description of Artificial Sequence: Synthetic coding sequence
  source 1..45: mol_type = other DNA
atggccgaagaaaagaagctcaaattgagcaacaccgtactgtag

SEQ ID NO: 137169 - DNA, 2145 bp, synthetic construct
  misc_feature 1..2145: note = Description of Artificial Sequence: Synthetic coding sequence
  source 1..2145: mol_type = other DNA
atgactaaacgacggctccagactatcaccgcctgcttacagctccgagagggttcgccaagtctgcatagaggcctacatccttctcgagaagaaaaacgggatagcagaatggcggaggagaagaaactcaagttgagcaacactgtgcttccaagtgagagcatgaaggttgtcgccgagagcatgggcattgcacagatacaagaagagacgtgccagcttctgacggacgaggtcagttaccgcatcaaagagattgctcaggacgctctcaagttcatgcacatgggaaagcgtcagaagctcaccacctctgatattgattacgctctgaagctaaaaaacgtggaacctctgtatggctttcacgcccaagagtttattcccttccggtttgcttcagggggaggacgggagctttatttttacgaagagaaagaggtcgacctgtccgatattatcaacactccactgccccgtgttcctttggatgtttgtctcaaagcacactggctgtctattgagggctgccagcctgctatccctgagaatcccccccccgcgcctaaagaacagcagaaggccgaggcaactgaacccctgaagtccgccaagccagggcaggaagaggacggcccactgaaaggcaagggacagggagccacaacagccgatgggaagggaaaggagaaaaaggccccacctttgttggagggagctcccctccgactgaaacctaggtccatccacgaactgtctgttgagcagcagctttactataaagaaattactgaagcatgcgttggcagctgtgaggctaaaagggcagaagctcttcagagtattgccacagatcccggtctgtatcaaatgctaccacgattttcaacgtttatctcggaaggcgtgcgcgtgaacgttgttcagaacaacttagcattgctcatatatctgatgcgtatggtgaaggccttaatggataaccctacactctacctggagaagtacgtgcatgaactgattcctgcagtgatgacttgcatcgtcagccgtcagctgtgtttgagacctgatgttgataaccactgggcgcttcgcgacttcgcggcccggctggtggcgcagatctgcaaacacttttccactaccacgaataacattcagtcaaggattaccaaaacattcactaaatcatgggtggatgagaagactccctggaccacacgatatggttctattgctgggctcgctgaactgggtcacgacgtaatcaaaacactcatcctcccccggctgcagcaggaaggtgaacggattcgctcagtcctggacggtccagttctgagtaatattgaccgcattggagcagaccacgtccaaagtctgttactgaagcactgcgcacctgtgctggccaaacttagaccgccgccagataatcaggacgcctatagagccgagtttggatccttggggccactactgtgttcacaagtggtgaaggcacgggcccaggcagctctgcaagcgcaacaggtcaaccgcaccacactgactattacccagccaagacctacactaaccctgtcccaggctcctcagcccggcccacgcacgcccggcctgctgaaggtgccgggctccattgcactccctgttcagacactcgtatctgcacgcgccgccgcaccccctcagccctctccacccccaaccaagtttattgtaatgtcgagctcatccagtgcgccgagcactcaacaggtgcttagcctcagcacctcggcccccggctccggctcaaccaccaccagccctgtaactacaactgttccttcagttcagccgatcgtaaagctggtgagcacagccactacagcccccccctcaactgccccaagtgggcctggctccgttcagaaatacatagtggtgtctttaccaccaacgggtgaaggaaaggggggacctaccagtcaccccagcccagtcccacctcctgcttctagtccatctccactgtctggctccgcactgtgtgggggcaaacaggaagccggagattccccaccccccgctccagggacgccaaaggccaatgggtctcaacccaactccggatcacctcagcctgccccttag

SEQ ID NO: 137170 - DNA, 702 bp, synthetic construct
  misc_feature 1..702: note = Description of Artificial Sequence: Synthetic coding sequence
  source 1..702: mol_type = other DNA
atggccgaggaaaagaagctaaagctgtccaacacggttcttccatctgaatccatgaaggtggttgctgagtccatgggcatcgcccagattcaggaagaaacctgtcagttgctcactgacgaagtttcctacagaatcaaagagatcgcccaggatgccctcaagtttatgcatatgggaaagcggcagaagctgaccaccagcgatatagactacgctcttaagctgaagaatgtggagcctctatatggtttccatgcccaggaattcatacctttccggttcgcatcgggcggcgggagggaactttacttctatgaggagaaggaagttgatctctccgacattatcaacacccctctcccacgcgtgccactggacgtgtgcctgaaggcccccaaggagcagcaaaaggcagaggcgactgagccgctgaagtctgccaaacctggacaggaagaagatggtccattgaagggaaaaggccaaggcgcgaccacggctgacggcaagggaaaagaaaaaaaggcacccccattgcttgagggagctccgctgcggctgaagccgcgctctatccatgagcttagcgtagagcagcagctgtattataaagagatcaccgaagcgtgtgttggtagctgtgaagctaagagggccgaggcactacagtcaatcgccacagaccccgggttatag

SEQ ID NO: 137171 - DNA, 405 bp, synthetic construct
  misc_feature 1..405: note = Description of Artificial Sequence: Synthetic coding sequence
  source 1..405: mol_type = other DNA
atggccgaagagaaaaagcttaaactgtccaacacagttctgcccagcgaatctatgaaggtggtggccgagtcaatgggcattgcgcagatccaggaggagacatgccaattgctcaccgacgaggtctcatatcgcataaaagaaatcgctcaagacgctctcaaattcatgcatatgggcaagagacagaagctgaccacaagtgatattgactacgctctaaagttgaaaaatgtcgaacccctgtatggatttcatgcccaagagttcatccccttccgcttcgcgtcagggggaggcagggaactgtatttttatgaagaaaaggaagtggatctatccgacattatcaataccccgctgcccagggtcccccttgatgtgtgtctcaaagcacactag

SEQ ID NO: 137172 - DNA, 345 bp, synthetic construct
  misc_feature 1..345: note = Description of Artificial Sequence: Synthetic coding sequence
  source 1..345: mol_type = other DNA
atggcggaagaaaagaagttgaaattatcaaacaccgtccttccatcagagtcaatgaaagtggtggccgagtcaatgggtatcgctcaaattcaggaggagacctgtcagttgcttaccgacgaggtgtcttacagaatcaaggaaattgcacaagacgccctcaagtttatgcacatgggaaaacgccagaagttaactacgtctgatattgactatgccttgaaactgaaaaacgtcgagcccttatacggcttccacgcacaagagtttattcccttcagattcgccagcggaggcggacgggagctgtatttctacgaggaaaaggaggtcgatctgtag

SEQ ID NO: 137173 - DNA, 2034 bp, synthetic construct
  misc_feature 1..2034: note = Description of Artificial Sequence: Synthetic coding sequence
  source 1..2034: mol_type = other DNA
atggctgaggagaagaagctcaaactgagcaatacagtgctcccctcagaaagcatgaaagttgtggcagagtccatggggatagcgcagattcaagaagagacctgccaattgctgacggacgaggtctcttacagaattaaggaaattgcacaggatgccctcaagtttatgcacatgggaaaacgccagaagctcacgacctccgacattgattacgccctgaaactgaagaacgtggaacctctgtacggctttcatgctcaggagttcattcccttcagattcgcttccggcggcgggcgagagttatacttctacgaagagaaggaggtggacctgtctgacattatcaatacaccactgcccagagtacctctagacgtgtgcctaaaggcccactggttgagtatcgagggatgtcagccggccattccagaaaacccacctccagcccctaaggagcagcagaaagctgaggccaccgaacccctcaagtccgccaaaccaggccaggaagaggatggccctttgaaagggaaaggacagggagccactactgccgacggcaaagggaaggagaaaaaagcccctcctctccttgagggtgccccattaagattaaagcctaggtcaatacatgagttgagtgttgaacagcagctttactacaaagaaataactgaggcctgcgtcgggagctgcgaggctaaacgcgctgaagccctgcagagcattgcgacagacccaggtctgtatcagatgctgcccagattttcaacgtttattagcgaaggggttcgggtgaatgtggttcagaataatttggcgctactcatctatctcatgaggatggtaaaggctctgatggacaatcccacgctttaccttgagaagtacgtccatgaactgattcctgctgtgatgacttgcattgttagccgacagctgtgcctccgcccagatgtcgacaatcattgggcgctgcgcgactttgccgccagactggttgcccaaatatgtaagcatttctccacaacgactaacaatatccagagcagaattaccaaaaccttcacaaaatcttgggtcgacgagaagaccccttggaccacacggtacggcagtatcgcaggtctggcagagttaggccacgacgttatcaaaacactcatcctccctaggttacagcaggagggcgaacggatacgctcggttctggacggacccgtgctgtctaacatcgatagaatcggcgccgatcatgttcagtctcttcttctcaaacactgtgctccggtattggccaagctcaggccccccccagataatcaggacgcttatcgggcagagtttggttcacttggccccttactgtgcagccaggtagtgaaggcacgcgcgcaggctgccctgcaagcccaacaggtgaataggacaaccctaacaattacacagccccgccctactctgactcttagccaggccccccagcctgggcctagaacgcctgggctgctgaaggtgcctggatccattgcattgcctgtgcagaccttggttagtgcccgagccgcagccccgcctcagccctcacctccaccaaccaagtttatagtcatgtcttcatcatcaagcgcgccctctacccagcaggtgctgagcctttcaactagtgccccgggatccggctctaccacgacatctccagtgactactaccgtgccctccgtccagccaatcgttaagctggtatcaactgcaacgaccgccccaccatcaacggccccatcaggtccaggatccgttcagaaatacatcgtggttagtttgccacccaccggtgaaggcaagggtggcccgacttcccatcccagccctgtgcccccccctgcgagctcacccagcccgttatctggctccgccttgtgtggcgggaagcaggaggcaggcgactccccgccaccagcgcccggaactcccaaagccaatggctctcagcctaactcagggtctccccagcccgcaccatag

SEQ ID NO: 137174 - DNA, 2034 bp, synthetic construct
  misc_feature 1..2034: note = Description of Artificial Sequence: Synthetic coding sequence
  source 1..2034: mol_type = other DNA
atggctgaggaaaagaagctgaaactgagcaacactgtgctgcctagtgaaagtatgaaggtagtggcagagagcatgggaatcgctcagatccaggaggaaacatgtcagctccttactgatgaagtgtcctaccgcatcaaggagatagcccaagacgcacttaagttcatgcatatgggtaagcgacagaaactaacgacgagcgatattgattacgcccttaagcttaaaaatgttgaacccctgtacggattccatgcccaggagtttattccgttcagattcgcttccggcggaggcagggaactgtacttctacgaagaaaaagaggtcgacctctccgacatcataaatacacctctcccccgtgttccgctggacgtctgtctgaaagcccattggttgtccatcgaagggtgtcagcctgccatacccgagaatccccccccagcccccaaggaacagcagaaagctgaggcaactgagcccctgaagagcgcaaaacccgggcaagaggaagatggaccactcaaagggaaaggacagggagccacaacagccgatggtaaagggaaggagaaaaaagctcctcctctgttggagggtgcacctttaagactgaagccacggtctatccacgaactgtccgttgagcagcagttatattataaggaaataaccgaagcatgtgtcggctcgtgcgaggccaagcgggcagaagcactgcagtccattgctaccgacccggggttgtatcaaatgctgccgagattctccacgttcatctctgaaggcgtgcgggtaaacgtggtgcagaataacctggcattgctgatctacctgatgcgaatggttaaggctctaatggacaatcccactctgtatctagagaagtacgtccacgagttaatccccgcggtgatgacttgcatagtgagtcgacaactgtgtctcagacctgatgtcgacaatcattgggctctgagagatttcgcagcaaggttggtggctcaaatttgcaagcatttctcgaccactaccaacaacatacaatctcgcattacaaagacatttactaaatcttgggtggacgaaaaaacaccttggaccacacgttatggaagtatcgcgggcctcgctgaactgggtcatgacgtcataaaaactctcatcttgcctagactgcagcaggaaggcgaaaggatacgcagtgtgcttgatggacccgtgttgtcaaatatcgaccgtattggagctgaccatgtgcagagtctcttattgaagcactgtgctcccgttctggctaagctgcgccccccgccagacaatcaggatgcttatcgagccgagtttggtagcctgggccccctcctctgctctcaggtcgttaaggcgagggcccaggctgctcttcaggcacagcaagtaaacaggacaacactgacaatcacccagccgagacccaccctgactctctctcaggcaccccaaccggggccccggacccctggactcctcaaggtccctgggtccatcgcattgcccgtccagactctggtgtcagcgagagccgctgcccccccccagccctcaccaccccctactaagtttatagtgatgtcttcatcttccagcgccccatctactcaacaggtactgtctctgtccactagcgcacccggcagtgggtccaccactacttccccagttaccaccactgtaccctcagtgcaaccaattgttaagttagtctctacagccactaccgcccctccttctacggcccctagcggccctgggagcgttcaaaaatacatcgttgtgtctttaccacctacaggagagggcaagggcggaccaacctctcatccctcaccagtccctccacctgcttcaagcccttctccactttctgggtcagccctgtgtggtggcaagcaagaggcaggagattctccccctcctgctccgggcacccccaaagccaatgggagccagcccaatagtggttcccctcagccggctccctag

SEQ ID NO: 137175 - DNA, 30 bp, synthetic construct
  misc_feature 1..30: note = Description of Artificial Sequence: Synthetic coding sequence
  source 1..30: mol_type = other DNA
atggcagaagagaaaaagcttaaattgtag

SEQ ID NO: 137176 - DNA, 2205 bp, synthetic construct
  misc_feature 1..2205: note = Description of Artificial Sequence: Synthetic coding sequence
  source 1..2205: mol_type = other DNA
atggatattcggcacagcgaattcctgccctgtcttcactgtccccctttcgtgggccctctgcccgtttctcacgtttccttctcctctgcttgccccgtccccctccccggaagcccaagcctgcaccggggcttgcaccccagcagagaggaaaagcgcgacagtagaatggcagaggagaaaaagcttaagttatcaaataccgtcctgcccagcgagagtatgaaagtcgttgccgagtccatgggcattgcccagatccaggaggaaacctgccagcttctgacagacgaggtgtcctaccggatcaaggagattgcacaggacgctctaaaatttatgcacatgggaaagaggcagaaacttacaacctccgacatagactacgccctgaagttaaagaacgtggaaccactttacgggtttcacgcccaggaattcattccctttaggtttgcttctggcggtggtcgggagttgtacttttatgaggaaaaggaagtggatctgtccgacataatcaacacgccacttccgcgcgtccctctggacgtatgcctaaaagcgcattggttgagcattgaaggttgccagccagcaattccagagaacccgccacccgcccccaaagagcagcagaaggctgaggccaccgagcctctgaagtcggccaaacctgggcaagaagaggacggacctcttaaaggcaaaggccagggtgccacaactgccgatggcaagggtaaggaaaagaaagcacccccactgcttgaaggggctccgctccgcctaaaacctcgcagcatccacgagctaagcgtcgaacagcagctgtactataaagagatcaccgaagcttgcgtaggttcttgcgaggctaaaagggccgaagctcttcagtcaattgctacagacccagggctgtatcagatgctgcctcgattcagcactttcatctctgagggtgtacgagtcaatgtggtgcagaacaacctggccctgctaatctatttgatgcgaatggttaaagccctgatggacaaccccacactctatctcgagaagtatgtccatgagctcatccccgctgtcatgacctgtatcgtttcccggcaactgtgcctcaggcccgatgttgataaccactgggcgctaagggattttgccgctcgacttgtagcacagatttgcaaacacttctcaacaaccactaataatattcagagtaggatcaccaaaacattcaccaaaagttgggtcgacgagaagacgccctggactaccaggtacggctccatcgcaggcctggccgaactggggcacgacgtcattaaaacgctgatccttccaagactccagcaggagggagagagaattcggagcgttttggatgggcctgtactgtctaatattgaccgcattggagctgaccatgtgcaatctttgctgctcaaacactgtgcgcccgtgctggcaaagttgagacctcccccagacaaccaggacgcctaccgggcggaatttggtagtctcggacctctgttgtgttctcaggtcgtaaaagcacgggcccaggctgcccttcaagcccaacaggtcaatcgcaccaccctgacaattactcagcccagacctaccctgaccctctcgcaagcccctcagcccggtccacgtacaccaggcttgctcaaggtacctgggtccatcgctctccctgttcagacgctcgtttctgccagggccgcagcacccccacaaccatcacctccacccacgaagtttatcgtaatgagctcttcctcctccgccccatcaacccagcaggttctcagcctttcaactagtgctcccggctccggttccacgaccacgtctcccgttacaaccacagttccttcggttcagccaatcgttaaactagtgtccacagcgactacggcgccaccctctaccgcaccatcaggacccggaagtgtccagaaatatattgtagtctctcttccccccaccggcgaaggcaagggagggccaacaagccatccctctcctgtgccaccaccagcaagtagccccagcccccttagcggcagcgccttgtgtggtgggaaacaggaagcaggagattcccctccacccgcccctggtacccctaaggctaatggcagccagcctaattcaggatcaccccagccagctccatag

SEQ ID NO: 137177 - DNA, 768 bp, synthetic construct
  misc_feature 1..768: note = Description of Artificial Sequence: Synthetic coding sequence
  source 1..768: mol_type = other DNA
atggccgaggaaaagaaacttaaactcagcaacactgttctcccctcagagagtatgaaagtggtcgcagaatctatggggatagcccagatacaggaagaaacctgccagctgctgacggatgaggtgtcatatcggatcaaagaaatcgctcaggacgcactcaaattcatgcatatggggaaaaggcagaaacttactacttccgatattgattatgccctaaagctgaagaatgtcgagcccctatacggcttccacgcacaggagtttatcccattcagattcgcctctggaggaggtcgcgagctttacttctacgaagagaaggaagtcgacctgagcgacattatcaatacacccttgcccagggtgccactcgatgtgtgcctgaaggcacactggctatctattgaagggtgtcaacctgcaataccagaaaaccctccaccggccccgaaagaacagcagaaagcggaagcgaccgagcccctgaagtccgctaagccaggacaagaggaggatgggccattaaaggggaaagggcagggtgccacaacggcggacggcaagggaaaggaaaaaaaggcaccaccactccttgagggcgcacccctgaggcttaagccgagaagtatccacgaattgtcagtggagcagcaattgtattataaggaaatcaccgaagcatgcgtcggttcatgtgaagctaagagggccgaggcgttgcagagcatagcgaccgatcccggtttgtaccagatgtag

SEQ ID NO: 137178 - DNA, 1050 bp, synthetic construct
  misc_feature 1..1050: note = Description of Artificial Sequence: Synthetic coding sequence
  source 1..1050: mol_type = other DNA
atgtcaaaatccaaggatgatgccccacacgagctggagagccaatttatactgcgattgccgccagaatacgcatctactgtgcgcagagccgtgcagagtggccatgtcaatctcaaggatcggctaaccatcgagttgcatcctgacggcagacatggaatcgtacgcgttgacagggttcccctggcttccaagttagtggatctgccttgcgtgatggagagtctcaagactatagataaaaagactttttataagaccgctgatatatgccagatgttggtgtcaaccgtggatggtgacttgtaccctcccgtggaggagccagtggcgtcaaccgatcctaaggcgtctaagaagaaggataaggataaggagaagaagttcatctggaatcacggcatcaccctgccccttaaaaacgtgcgtaaaaggcggttcaggaagaccgccaaaaagaagtatattgagtcacccgatgtggagaaagaggtgaagcggctactgtccactgacgctgaggcggtgtccactagatgggaaatcattgcagaggatgaaaccaaggaagcagagaaccagggcctcgacataagtagccccggcatgagcgggcacaggcaggggcacgacagcctcgaacatgatgaattgcgcgaaatctttaatgacttaagctccagtagtgaagatgaggacgaaactcaacaccaggatgaggaagacattaatatcattgacactgaggaggatctggaacgccaactgcaagacaagctgaatgagtctgacgaacagcatcaggaaaacgaaggtaccaaccagctggtgatggggatccagaaacaaattgacaacatgaaggggaagctgcaagagacccaggaccgggctaaacggcaggaggaccttatcatgaaggtggagaatttggctctaaaaaatcgtttccaggccgtcctagatgagctgaagcaaaaggaagatcgcgagaaagaacagctttccagcctccaggaagaattagaaagcctactggagaagtag

SEQ ID NO: 137179 - DNA, 909 bp, synthetic construct
  misc_feature 1..909: note = Description of Artificial Sequence: Synthetic coding sequence
  source 1..909: mol_type = other DNA
atgtcagaaagtcaggatgaggtgccagacgaggtagaaaatcagtttatccttcggttacccctggagcatgcttgtaccgtgcgtaacctagcaaggagccagagcgtgaaaatgaaagataagctgaaaattgacctcctgcccgatggccgccatgcagtggtagaggtggaggacgtaccactagccgcaaagctcgtggacctcccttgcgttatcgaatcactcaggactctagataagaaaactttttacaaaacggctgacatatcgcagatgctggtttgcacagcggacggtgatattcatttgtctcctgaagagccagccgcatctactgacccgaacatcgtgcgcaagaaggaaaggggacgggaggagaagtgtgtgtggaaacatggtattaccccacccctaaaaaacgtaagaaagaagagatttagaaaaacccagaaaaaggttccagacgtgaaagagatggaaaagagtagcttcaccgagtacattgagtcacccgatgtggagaacgaggtgaaaagactgttgagaagcgacgcggaagctgtgtccacgaggtgggaagtgatcgcagaggatggtactaaggagatcgaaagccaaggaagcattcccggctttttaatctccagcggtatgagttcacacaagcaaggccacaccagctccgtgatggagatccaaaaacagatagagaaaaaagaaaagaagctgcacaagatccagaataaagcccaaagacaaaaggatttgatcatgaaagtcgagaatcttaccctcaagaaccattttcagtccgtgctcgagcagcttgagctgcaagaaaagcagaagaacgagaaacttatctcgcttcaggagcaacttcagcgatttctgaagaaatag

SEQ ID NO: 137180 - DNA, 1131 bp, synthetic construct
  misc_feature 1..1131: note = Description of Artificial Sequence: Synthetic coding sequence
  source 1..1131: mol_type = other DNA
atgagcgaatctcaggacgaggtgcccgatgaggtcgagaaccaattcattctgcgtcttcctctggagcacgcgtgcaccgtgagaaacttagcgagaagtcagtcagtgaaaatgaaagataagctgaaaatcgacttgttgcccgacggacgtcatgctgtggtggaggtggaggatgtgcctcttgcggccaaattggtcgaccttccatgcgtcattgagtctctgaggactcttgataagaagacgttttacaagactgctgatatctcgcaaatgctggtatgtacagccgatggggacatccacttgtctcccgaagagccagccgctagcacggacccaaacatagtgcgcaagaaggaacggggcagagaagagaagtgcgtctggaagcacggcataaccccacctctgaagaatgttcggaagaaacgtttccggaagacgcaaaaaaaggtaccggatgtgaaagagatggagaagtcttcctttacagagtatattgaatctccagacgtggagaacgaggtaaagcgtcttctgcgctccgatgccgaagcagtttccacccgctgggaggttattgcagaggatgggactaaggaaatagagtcccagggaagtatccctggttttctgatctctagtggcatgtcaagccacaaacagggacacaccagtagcgagtatgacatgttgagagagatgttttctgactcgcggtccaacaatgatgatgacgaggacgaggatgacgaggacgaagatgaagatgaggacgaagatgaggatgaggataaggaggaggaggaggaagattgtagcgaggaatatttggagcgccaacttcaggccgagtttatcgagagcgggcaatatcgcgctaacgagggcaccagcagcattgtgatggagatccaaaaacaaatcgaaaagaaggaaaagaagctccacaagattcaaaataaggctcagcgtcaaaaggacctaattatgaaggtggaaaaccttaccctgaaaaaccatttccagtctgtgctagagcagctggaacttcaggagaaacagaagaatgagaaactcatcagcctacaggaacagctacagcggttcctgaaaaagtag

SEQ ID NO: 137181 - DNA, 909 bp, synthetic construct
  misc_feature 1..909: note = Description of Artificial Sequence: Synthetic coding sequence
  source 1..909: mol_type = other DNA
atgtcagagagtcaggacgaagtccctgacgaagtcgagaaccagtttatattaagattgcccctcgaacatgcctgtacagtgaggaatctcgctcggagtcagagcgtgaagatgaaagataagctcaaaatcgacctgctccctgacggccgacacgctgtggtggaagtggaagacgtgcccttagccgcaaagcttgtggacctcccctgtgtcattgagagcttaaggacactcgacaagaagaccttttacaaaaccgccgacattagccagatgctggtctgcactgcggacggcgatatacacctgagccccgaagagccagctgcctcgacggatcctaatattgtccgaaagaaggagcgcgggcgcgaggaaaagtgcgtgtggaaacatggtataacccccccactgaagaacgtgagaaaaaaaagattccggaaaactcagaaaaaggtgcccgacgtcaaagagatggaaaaaagtagcttcactgagtacatcgaatcaccagacgtggaaaacgaggttaagcgactccttagatctgacgctgaggctgtgagtacgcgctgggaagtgatagctgaagacgggaccaaggaaatcgagagtcagggatctatacctggattcttaatttccagtggaatgtcaagccacaaacagggtcataccagctctgtcatggaaatccagaaacaaatcgagaagaaggaaaagaaactccacaagatacagaataaggcgcagaggcagaaggacctcataatgaaagtagagaaccttactctgaaaaatcactttcagtccgtgcttgaacagttggaattgcaggagaaacagaagaacgaaaaattgatttccctgcaggaacagctgcagaggttcctcaagaagtag

SEQ ID NO: 137182 - DNA, 1389 bp, synthetic construct
  misc_feature 1..1389: note = Description of Artificial Sequence: Synthetic coding sequence
  source 1..1389: mol_type = other DNA
atggaatgtcccgagggacagctgcccatcagcagtgagaacgactcaactcctacagttagcaccagtgaggtgacatcccagcaggaacctcaaattctggttgatcgtggctctgagaccacgtacgagagctcagccgacattgccggcgacgaaggtacacaaattccagcggatgaggacactcagaccgatgccgatagcagtgcacaggccgccgcccaggcccccgagaactttcaggagggaaaggacatgagtgagagccaggatgaggttcccgatgaagtcgaaaatcagtttattcttcggctacctcttgagcatgcatgcaccgtaagaaatctcgcacgatcccagtcagttaaaatgaaagataagcttaagatcgatctcctgcctgatggacgacacgcagtggtagaagtggaggatgtgccgctagctgccaagcttgtggacttgccttgcgtgatcgaatctctccggactcttgataagaaaactttctacaaaacagccgacatttcgcagatgctggtatgcactgccgacggtgacatacatctctctcctgaagaacccgccgcgtccactgatccaaacatcgtacggaagaaagaacgcggtagagaagagaaatgtgtgtggaagcacggaatcactcctcccttaaagaacgtccgcaagaaacgcttccggaaaacacaaaagaaggtccccgatgtgaaagaaatggagaaaagttcctttaccgaatacattgaatctccggatgttgaaaatgaagtgaagcgcttattgcgttcggatgccgaggcagtctccactagatgggaggtaattgctgaagacgggacaaaggagattgagagccaaggatccataccaggattccttatctccagtggaatgtcatcccacaagcagggtcatacctccagcgaatacgacatgcttagggaaatgttctccgacagtaggagcaataacgatgatgatgaggatgaagatgatgaagatgaggacgaggacgaggatgaggatgaggacgaggataaagaagaagaagaagaggattgtagcgaggaatacctcgagaggcaactccaggcagaatttatcgagtctggacagtatcgcgctaacgaaggcacttcatccatcgtcatggagatacagaaacagattgaaaaaaaggagaagaaactgcacaagatacagaataaagcccagcgtcaaaaggatctgatcatgaaggtggaaaatctgactcttaagaatcattttcaatccgtcctggagcaactggagctgcaagagaaacaaaaaaacgagaagctcatcagtcttcaagagcagttgcagagatttcttaagaagtag

SEQ ID NO: 137183 - DNA, 1548 bp, synthetic construct
  misc_feature 1..1548: note = Description of Artificial Sequence: Synthetic coding sequence
  source 1..1548: mol_type = other DNA
atgggcaactgggtcgtgaatcactggttttcagtcttgtttctggtagtgtggctggggctcaacgtatttctgtttgttgacgcctttctgaaatatgaaaaagccgataaatactattatactcgtaaaatcctgggatccaccctcgcctgtgcccgcgcgagcgcgctttgtttaaactttaattccaccctgattctgctgccagtctgccgcaaccttctctcctttctgcgcggaacttgcagcttttgctctcgcaccctgagaaaacagctcgaccataaccttaccttccataaacttgtggcctacatgatttgtttacacaccgccatccacattattgcccatctctttaacttcgactgctactcgaggagtagacaggccaccgacgggagtctggcctccatcctctccagtttgagccacgatgaaaagaagggagggtcctggctgaatccgattcagtctagaaacactacagtggagtatgtcactttcacttccattgccggactgacaggagtgatcatgacgatcgcactgattctgatggtcactagtgccacagagttcatccgcagatcctatttcgaggtgttctggtacacacaccatctgttcattttctatatcttgggcttaggcatacacggcatcggaggaatagtaaggggacagaccgaggagtcgatgaacgagtcgcacccgcgaaaatgcgcagagtccttcgagatgtgggacgatagggacagccattgccgccgtcccaaatttgagggacacccccctgagagctggaaatggatcctcgctccggtgattctgtacatctgtgagaggatccttagattttacagatcgcagcaaaaggtggtcataactaaagtcgtcatgcacccttcaaaggtgttagagctgcagatgaataaaagaggcttttctatggaggtaggacagtacatctttgttaattgtccatctatttcgctcctggaatggcatcccttcaccttgacttccgctccggaggaggacttcttctctatacacattcgagcagcaggagattggaccgagaatctcattcgggccttcgagcagcagtacagtcccataccacgcatagaagtcgatgggccattcggaacagcctctgaagacgtctttcaatacgaggtagccgtcttggtcggagccgggattggagtaacccctttcgcgagtatcctgaaatccatctggtacaagtttcagtgtgccgaccataatctcaagaccaaaaaggttggccacgcggcgcttaatttcgataaagctaccgacatcgtgacgggactgaaacaaaaaacttccttcggaaggcccatgtgggataatgaattttctaccattgctacaagccacccaaaatctgtcgttggggtgttcctctgtggccccaggacactggcaaaatcactgcgcaaatgttgccatcgatacagctcccttgatcccagaaaagttcagttttatttcaataaagagaatttttag

SEQ ID NO: 137184 - DNA, 795 bp, synthetic construct
  misc_feature 1..795: note = Description of Artificial Sequence: Synthetic coding sequence
  source 1..795: mol_type = other DNA
atggagtcaggtaagacagcttcccccaagagcatgccaaaggacgctcagatgatggcgcaaatccttaaagatatgggcattactgagtacgaaccacgagtgatcaatcaaatgctggagtttgcctttcgatatgtgaccaccatactcgacgatgccaagatttatagtagccatgcaaagaaagccaccgtagatgctgacgacgttagactcgctatacagtgtagagccgaccagtccttcacctcaccaccaccgagggattttctgttagacatcgcccggcagagaaatcagacacctttacccctgatcaagccctattccggtccacggctgcctcctgatcggtattgtctgacggcccccaattaccgtctgaaatccctccaaaagaaggcgtccacgagcgcaggacggatcacagtgccacggctgtctgtgggaagcgtgacatcccgtccatcaacacccaccctggggacaccgacccctcagactatgagtgtgtcaactaaggtcggtacaccaatgtctctgactggccagcggtttaccgtacagatgcccactagccagtctcctgccgtgaaggcttcaatacctgcaacgagcgctgtccagaacgtgctgatcaacccgtctcttatcggttctaaaaatattctaattacgacgaacatgatgtcctcccagaacactgcaaatgaatcgagtaacgcactgaaacggaaacgggaagatgatgacgacgacgacgatgacgacgatgattacgataacctttag

SEQ ID NO: 137185 - DNA, 510 bp, synthetic construct
  misc_feature 1..510: note = Description of Artificial Sequence: Synthetic coding sequence
  source 1..510: mol_type = other DNA
atgtgccataggaagccaggcacccctggtgtggggaagaccactctgggtaaggagctcgcttccaagtctggcctcaagtatattaatgtcggcgatcttgctcgagaggagcagctgtatgacggttatgacgaggagtatgattgtccgatcctcgacgaggatcgggtcgtcgacgaactggacaaccagatgagagagggcggggtgattgtagattaccatggctgtgacttctttccagaaaggtggttccacatagtgtttgtgctgcgcaccgacactaatgtcctgtacgaacggttagaaacacgaggctacaatgagaaaaaactgactgacaacatccagtgcgagatcttccaggtcctgtacgaagaagcaactgcatcttataaggaagagatagtgcaccaactccccagcaacaagcctgaagagttggagaacaacgttgaccagatccttaaatggatcgaacaatggattaaggaccacaacagttag

SEQ ID NO: 137186 - DNA, 519 bp, synthetic construct
  misc_feature 1..519: note = Description of Artificial Sequence: Synthetic coding sequence
  source 1..519: mol_type = other DNA
atgctgcttcccaacatactactgacaggaactccaggagtgggcaagaccacactcggaaaagagcttgcatcaaaatctggactgaaatatatcaatgtcggggacctggctagagaagaacaactttatgacggttatgatgaggagtacgattgtcccattctggatgaagacagggtcgtggatgaattagacaaccagatgcgggagggcggggtcatagtggattaccacggctgcgatttctttcctgaaagatggtttcatattgtgttcgtgctgcgcacagacacaaatgttttgtacgagcgactggaaacacgcggctataatgagaagaagctgaccgataacattcagtgcgagatcttccaagtcttgtacgaagaggcaaccgcgtcctacaaggaggagattgtccaccagttgccaagcaacaagccggaggagctggaaaataacgtggaccaaattttaaaatggatcgagcagtggatcaaggatcacaacagctag

SEQ ID NO: 137187 - DNA, 597 bp, synthetic construct
  misc_feature 1..597: note = Description of Artificial Sequence: Synthetic coding sequence
  source 1..597: mol_type = other DNA
atggagtccggcaagaccgcctctccaaaatccatgccaaaagatgcccagatgatggctcagattctcaaagacatgggtataactgaatatgaaccaagagtgatcaaccagatgctcgagtttgctttcaggtatgttacaaccattctggatgacgctaaaatatacagttcccatgccaagaaggctactgttgatgccgacgacgtaaggttggcgatccagtgtcgggctgaccagagcttcacttcacctccgcctcgggatttcctgctcgatatcgctcgccagcgtaaccagacacctctgcccctgataaaaccttacagcgggcctagacttccaccggatcggtactgcctgactgcaccgaactaccgattaaagagcctgcagaagaaggcatccacgtcagctggccgcataacagtcccccgactcagtgtagggtcagtgacttcaaggccatcaaccccaactctaggaaccccaaccccccagaccatgagtgtgtcaacgaaggtgggaaccccgatgagcttaactggtcagcggttcaccgtccagatgcccacctcccagtcacctgcatag

SEQ ID NO: 137188 - DNA, 411 bp, synthetic construct
  misc_feature 1..411: note = Description of Artificial Sequence: Synthetic coding sequence
  source 1..411: mol_type = other DNA
atggagtcaggtaagacagcttccccaaagtctatgcctaaggacgcacagatgatggcacagatcctcaaagatatgggtattactgagtatgagcctcgggtcataaaccagatgcttgaattcgcctttcgatacgtcaccacaatacttgatgatgcaaaaatctactccagccacgcgaaaaaggcgacagtcgacgccgacgatgtgcggctagcaatccagtgtagggctgatcagtccttcacttctccccctccgagggacttcctgcttgatatcgctaggcagaggaatcaaacacccctcccgctaattaagccctattcagggcccaggttaccccctgatcgatactgtctgacagctcctaattatagactcaagtccctacagaagaaggcttag

SEQ ID NO: 137189 - DNA, 795 bp, synthetic construct
  misc_feature 1..795: note = Description of Artificial Sequence: Synthetic coding sequence
  source 1..795: mol_type = other DNA
atggaaagcggaaagactgcatctccaaaatctatgccaaaagatgcacaaatgatggctcagattctaaaagatatgggcataaccgaatatgagcctcgcgtgatcaatcaaatgctcgaatttgcatttcggtatgtaactactatactggacgacgcaaaaatatattcctcgcatgctaagaaagccacagttgacgcagatgatgtccggctcgccattcagtgccgagccgatcaatcattcacctcaccccctcccagagacttcctgctcgatattgcgcggcaacgaaatcagactccactgccattgattaagccatactccgggcccaggctgccccctgaccgatattgcctgaccgcccccaactataggcttaagtccctccagaaaaaagcatccacaagcgcgggcagaatcaccgtcccccggctctccgtcggcagtgtgacttcgaggccgtctacacccactttgggtaccccgaccccccagacaatgtctgtatctacaaaggtgggtacacctatgagtctgaccgggcaacgctttaccgtgcaaatgccaacatctcaatcccccgcagtcaaggcatccatccctgctacctctgccgtgcagaatgtcctcattaatccatccctcatcggttccaagaatatcctcattactacaaacatgatgtcatctcaaaatacggcaaatgaatcttcgaacgcccttaaacggaagagagaagacgacgatgatgacgatgacgacgatgatgactatgataatctgtag

SEQ ID NO: 137190 - DNA, 309 bp, synthetic construct
  misc_feature 1..309: note = Description of Artificial Sequence: Synthetic coding sequence
  source 1..309: mol_type = other DNA
atggaaagtggcaaaactgcatccccaaaatccatgccaaaagacgctcagatgatggcgcagatcctgaaagacatggggataactgagtatgaacctcgagttatcaaccaaatgctggagtttgcctttagatatgtgacaacgattctcgatgatgcaaagatatattcttctcatgctaaaaaagccaccgtggacgccgacgacgtcaggctggccatacaatgtagagctgaccagtcttttacctctccgcccccgcgggacttcctgcttgacatcgctagacagaggaatcagacctag

SEQ ID NO: 137191 - DNA, 501 bp, synthetic construct
  misc_feature 1..501: note = Description of Artificial Sequence: Synthetic coding sequence
  source 1..501: mol_type = other DNA
atggaaagtgggaaaactgcctcccctaagagtatgccgaaagacgcgcagatgatggcccagatcttgaaggatatgggcattacagagtacgagccccgagttatcaatcaaatgttggagtttgccttccggtatgtcacaactatcctagatgacgccaagatctacagcagccacgccaaaaaagcaacggtggacgccgacgatgtacgtctggccattcaatgtcgtgcagaccaaagctttacaagcccccctccgcgcgatttcttgctggatattgcccgccagcgaaatcagacccccctgccccttatcaagccgtacagcggaccccgactgcctcccgatcgatattgcctgaccgctcctaactaccgtctgaaaagcctgcagaaaaaagcaagtacaagcgctggccgtatcacggtgcctcggctcagcgtaggctctgtcacctcccgaccctccacacccaccctgggaacgcccacgtag

SEQ ID NO: 137192 - DNA, 384 bp, synthetic construct
  misc_feature 1..384: note = Description of Artificial Sequence: Synthetic coding sequence
  source 1..384: mol_type = other DNA
atggagagcggcaagactgctagccctaaatctatgcctaaagacgcccagatgatggctcaaattctgaaagatatggggatcactgagtacgaaccacgagtaatcaaccagatgctagagtttgcttttcgctatgtaactacaatccttgatgatgctaagatatattcttcgcatgccaagaaggccacagtggacgcagatgatgtcaggcttgccattcagtgcagagccgaccagagctttaccagtcccccccctcgggactttctcctcgacatcgcaaggcagagaaaccagacgcctcttcccctgatcaaaccttactccggcccacggctccctccagatcgatactgtctcacggcccccaactattag

SEQ ID NO: 137193 - DNA, 756 bp, synthetic construct
  misc_feature 1..756: note = Description of Artificial Sequence: Synthetic coding sequence
  source 1..756: mol_type = other DNA
atggagagcggaaaaatggctccccccaaaaacgccccaagggacgccctggtgatggcacagattctgaaggatatgggtataactgagtatgagccccgtgtgatcaaccagatgctggagtttgcgttccgctatgtcacaacaattctggatgatgcaaagatttactcatcccacgccaaaaagccaaacgtagatgccgatgatgtgcgcctggctattcagtgtcgtgctgaccagtcattcacatctcccccacctcgagactttctgctagatatcgctcgccagaaaaaccagactccactgccactgatcaaaccctatgccggaccaagactgccaccagatcgttattgcctgaccgcccccaactatcgactaaaatccctcattaagaagggaccgaatcagggacgactcgtccccagactttcagtgggtgcagtcagctctaagcctaccacccctactatcgctacaccccagacagtctcagtcccaaataaagtcgctaccccaatgagtgtgacgagtcagcggtttactgtgcaaatccccccgtctcagagtactcccgtgaagcccgtaccagccacaaccgcagtgcagaatgtgctgatcaacccatctatgatcgggcctaaaaatattctgattaccaccaacatggtgtcctcccaaaatacagcaaacgaagctaacccattgaagcggaagcatgaggacgatgatgacaacgacatcatgtag

SEQ ID NO: 137194 - DNA, 879 bp, synthetic construct
  misc_feature 1..879: note = Description of Artificial Sequence: Synthetic coding sequence
  source 1..879: mol_type = other DNA
atgcctcttcatgtgaaatggcccttccctgctgtacccccccttacatggactctggcatctagtgtggtcatgggcctggtcgggacatattcttgcttctggaccaagtacatgaaccacctgacggtgcacaacagagaagtgctgtatgaactcatagagaaaagggggcctgctacgcctctgattaccgtctccaatcatcagtcatgcatggacgatccacacctttgggggattctaaaacttcgccatatttggaatctgaagttaatgagatggactccagcagcagcggacatctgttttaccaaggagcttcactcccatttttttagccttgggaaatgtgtccctgtatgcaggggcgccgagttctttcaggctgagaacgagggcaagggagtgctggacactggcagacacatgccaggtgcgggtaaacgccgtgaaaaaggcgatggcgtataccaaaaaggtatggattttatattagaaaagctgaaccatggggactgggttcacattttccccgagggtaaggtcaatatgtcctcggagttcttacgcttcaagtggggcattggtcgcttaattgctgagtgtcacctaaatcccatcatcctgcccctgtggcacgtagggatgaatgacgtccttcccaactctccgccttacttccctcgattcgggcagaagataactgtactcatcggaaaaccattttccgccctgcccgtcctcgagaggctccgcgcagagaacaaatcggctgtggaaatgaggaaggcgctgacagacttcattcaggaagagtttcaacatttaaagacccaggccgagcagttgcataatcatttacagcctggcagatag

SEQ ID NO: 137195 - DNA, 789 bp, synthetic construct
  misc_feature 1..789: note = Description of Artificial Sequence: Synthetic coding sequence
  source 1..789: mol_type = other DNA
atgccacttcacgtcaaatggccctttcccgccgtgccccctctcacatggacactcgcaagctcagtggtgatgggccttgtaggcacctacagctgcttttggacaaaatacatgaatcatcttactgtacacaatcgcgaggtgttgtatgaactgatagaaaagcgggggcccgcaaccccacttatcacggttagtaaccatcagtcatgtatggatgacccccatctctggggtattctaaaacttcggcacatttggaacctgaagctcatgagatggactcctgcagctgctgacatctgcttcactaaagagctacactcacattttttcagcctggggaaatgtgtgcccgtgtgcagaggcgacggtgtctatcagaagggtatggacttcatcctcgagaagttgaatcatggggactgggtgcatatctttcccgagggcaaagtcaacatgtcctccgaattcctgcgctttaaatgggggatcggtcgcttaatcgctgagtgccacctcaacccaatcattctccccctgtggcatgttgggatgaacgacgtactccctaactcccccccttactttcccaggttcggccagaagattaccgtgctgatcgggaaaccattttccgctctccccgtcctggagcgcctccgagccgaaaataagagtgccgtggaaatgcggaaagctctgacagatttcattcaagaggagttccaacatctcaaaacacaggcagaacaactgcataaccacctgcagccaggcagatag

SEQ ID NO: 137196 - DNA, 837 bp, synthetic construct
  misc_feature 1..837: note = Description of Artificial Sequence: Synthetic coding sequence
  source 1..837: mol_type = other DNA
atgccactccacgtgaaatggccctttccagccgtgcctcccctgacgtggacactggcctcatctgtcgtgatgggacttgtcgggacgtattcctgcttttggaccaagtacatgaaccaccttaccgtacataaccgcgaagttctgtacgagctgattgagaagaggggcccagccacaccactaatcacagttagcaaccaccagtcctgcatggatgaccctcacctgtggggcatcttaaaactgcggcacatctggaatttaaagctgatgcggtggacaccagccgcggccgatatctgtttcactaaggagcttcattcgcacttcttcagcctcgggaagtgcgtacccgtgtgcaggggcgctgagtttttccaggccgagaacgaagggaagggcgtgctcgacaccggcaggcatatgccaggggctggcaaaagaagggaaaaaggcgacggggtataccaaaaagggatggattttatcctcgaaaagctgaatcacggcgattgggtacacatttttccggaaggaatcggccggctcatcgccgaatgtcatcttaaccccataattctgcctctgtggcatgtgggaatgaatgatgtactcccaaatagtcctccgtacttccccaggtttgggcaaaagatcactgttctgataggcaagcctttctccgctcttcctgtattggaaagattacgggctgaaaacaaaagcgccgtcgagatgagaaaagcactcaccgactttatccaggaggagttccagcacctcaaaacccaggccgagcagctgcataaccacctgcagcccgggaggtag

SEQ ID NO: 137197 - DNA, 747 bp, synthetic construct
  misc_feature 1..747: note = Description of Artificial Sequence: Synthetic coding sequence
  source 1..747: mol_type = other DNA
atgccgcttcacgtgaagtggccatttccagctgtgcccccccttacatggacgctcgcctcgtcagtcgttatggggcttgttgggacttatagctgtttttggacaaagtacatgaaccacctgaccgtgcataatcgcgaggtgctctatgagctcattgagaaacggggacccgctacacccctaatcactgtatcaaaccaccaatcatgtatggacgatccgcacttgtggggcatactaaagttgaggcacatctggaatcttaaacttatgcgttggactcccgcagcagccgacatctgcttcacaaaggaacttcactcgcatttcttctccctggggaagtgcgtgccagtgtgcaggggggacggggtgtatcagaagggcatggatttcattctggagaaactcaaccacggagactgggtgcatattttccccgaaggtatcggccgcctgattgcagagtgtcacctcaaccccataatcttgcctttatggcatgtgggtatgaatgatgtcctgccaaacagccccccatattttccacggtttggacaaaaaattacagtcttgatcggaaaaccgttctctgccctgcccgttttggagcgtcttcgggcagagaataaatctgctgtggaaatgaggaaggcgctgactgatttcattcaggaagaattccagcacctaaagactcaggctgaacagctgcacaaccacttgcaacctggtcgttag

SEQ ID NO: 137198 - DNA, 798 bp, synthetic construct
  misc_feature 1..798: note = Description of Artificial Sequence: Synthetic coding sequence
  source 1..798: mol_type = other DNA
atgccactgcacgttaaatggccattcccagccgtcccacctcttacatggacattggctagctctgtcgtgatgggactggtcggaacttacagttgtttttggacaaagtatatgaatcacctcaccgtacataacagagaggtactgtacgaattgatcgaaaagagaggccccgccacacctctgattaccgtctctaaccaccagagttgcatggatgacccgcacttgtggggaatccttaaattgcgccatatctggaaccttaagcttatgagatggaccccagccgcagctgatatctgtttcaccaaggaacttcactcccattttttctccctgggtaagtgcgtaccagtctgtcgtggggcagaattctttcaggcagagaatgaaggaaagggggtgctggatacagggcgccatatgcctggagcaggcaagcgacgtgagaagggcaaagtgaacatgtctagcgagtttttacgtttcaagtggggtatcggacgtcttatagcggaatgccacttgaaccccattatcctgcctctgtggcacgtagggatgaacgatgttctaccaaatagtccaccctatttcccacggttcgggcagaaaataaccgtgctgatcgggaaacccttttcggccttgccagtgctagagcgtttgagagcggaaaacaagtctgccgtggaaatgcggaaagccctgaccgacttcattcaggaagaatttcagcatctgaagacccaggcagagcaactccacaaccacttacagccaggccggtag

SEQ ID NO: 137199 - DNA, 7629 bp, synthetic construct
  misc_feature 1..7629: note = Description of Artificial Sequence: Synthetic coding sequence
  source 1..7629: mol_type = other DNA
atggtggccctgagcctgaagatctgtgtgagacactgcaacgtcgtgaaaacaatgcagtttgagccaagtaccgctgtttacgacgcttgcagggtgattcgggaacgcgtacctgaggcacagaccggccaggctagtgattacggactgtttctgagcgacgaagaccctcgaaaaggcatctggctggaagccggacgtacccttgactactacatgctcagaaacggggacattctcgaatacaaaaagaagcaacgcccccagaagattaggatgttggacggctcagtgaagaccgtcatggtggacgattcaaagactgtgggcgaactccttgtcacgatttgtagtagaatcgggattacgaattacgaggagtacagcttaattcaggagaccattgaggaaaaaaaagaagaaggcacgggtactctgaaaaaggacaggaccctgctcagggatgaaagaaagatggaaaaattaaaggctaagctccacactgacgatgatcttaactggcttgatcattccaggactttcagagagcagggagtggatgaaaacgagaccttgctgctacggcgcaaattcttttacagtgaccaaaacgtggatagcagagatcctgtacaactgaatctgctgtatgttcaggcccgcgacgatatcctgaatgggtcccaccctgtcagtttcgaaaaagcttgtgagttcggcgggttccaggcccagatccaattcggaccccacgtggagcacaaacataagcccggcttcctggacctaaaagagtttctgcccaaggaatacattaaacagaggggagcagagaagcggatctttcaggaacacaagaattgtggagaaatgagtgaaatagaggcaaaagtgaagtatgtcaagctggcaaggtctctcagaacctacggcgtgagcttttttctagtgaaagagaagatgaaaggcaagaataaactcgtgccccgtctgctgggtattacaaaagattctgtcatgagggtggacgagaagacgaaggaggtcttacaagagtggcctcttacaactgtcaaaaggtgggcagcctcccctaagtctttcacattggatttcggtgagtaccaggagtcttattactcagtgcagaccacagagggcgaacagatctcacagctgatagcaggctacatcgatattattctgaagaaaaaacagagcaaagaccggttcggactggagggggatgaagaaagtaccatgctggaagaaagcgtttccccaaaaaaaagcacaatcctgcagcaacagtttaaccgaaccggaaaggccgagcacggcagcgtagcactgcctgcggtcatgaggtccggaagctcaggacctgagacctttaacgtcgggtcaatgccttccccacagcagcaggtcatggtcggtcagatgcacaggggccacatgccccccctcacttcagctcagcaggctttaatgggaacaattaacacatctatgcatgcagtgcagcaggcccaggacgacctatctgaactggattctttaccaccactcggccaggatatggcctctagagtatgggtccagaacaaagttgacgagtcaaagcacgaaattcacagccaagtggacgctattacagccgggacagccagtgtggtgaatcttacagccggggatccagcggacaccgactacacagcagtcggatgtgcaatcactaccatttcatccaatttgacagagatgtccaagggggtcaagctgcttgcagcgctgatggacgacgaggtggggagtggagaagacctccttagggccgcccgcactctcgccggagccgtatctgacctgctgaaggccgtgcagccgacctctggggagccacgacaaaccgtgctgaccgccgctggaagcattggccaggccagcggcgaccttctcaggcagataggagagaatgaaaccgatgaaaggttccaggatgtactgatgtctctggctaaggctgtcgcgaatgcggcagccatgttagtgcttaaagcaaagaacgttgcgcaagtcgccgaggacaccgttctgcagaaccgtgtgattgcagcggctacccagtgtgccctgtccacatctcagttagtggcgtgcgcaaaagtggtgagtcccacaatttcatcacctgtatgccaggagcagcttatcgaggctgggaagttagtggatagatctgtggaaaactgcgtgcgggcgtgccaagccgcaaccacagacagcgaattactcaagcaggttagtgcagcagctagcgtggtttctcaggccctccatgaccttctgcagcacgtgcgccagtttgcatccaggggagaaccaattgggcgttatgaccaggctaccgacacgatcatgtgtgtgaccgaaagtatcttctcttccatgggcgacgcaggcgaaatggtccggcaggcaagggtcctggcccaggcaacctccgatctggtgaacgcaatgcgatctgatgctgaggcagagattgacatggaaaattccaagaaacttctggcagccgcaaagcttctggccgattctactgctcgaatggtagaagctgcaaaaggtgctgccgctaaccccgaaaacgaagatcagcagcagcgtctcagagaggccgctgagggcttgcgagtggcgacaaacgccgcggctcagaatgcaatcaagaaaaaaattgtgaatcgcttagaagtcgcagccaagcaggccgctgctgcagccactcagaccattgctgcaagtcaaaatgccgcggtaagcaacaaaaaccccgccgcccagcaacaactggttcaaagttgcaaagctgtggccgaccacatacctcaactggtccagggcgtccgaggtagtcaggcgcaggccgaggacctgtctgcccagctcgctctgatcattagctcacagaacttcctgcagccaggctccaagatggttagcagcgcaaaggccgctgtcccaacagtgtctgaccaggcagccgcgatgcagctaagccagtgcgccaaaaacctcgctaccagcctcgccgaactaaggaccgcctcccagaaggcccatgaggcttgtgggcccatggaaatcgattctgctcttaacaccgtgcagactttaaagaatgaactccaagacgccaagatggccgctgtcgagagccaactgaaaccactccccggcgaaaccctcgagaaatgcgcccaggacctgggatctaccagtaaggccgtgggatccagcatggctcaactgctgacctgcgctgcccaaggaaacgagcactataccggggtcgctgcccgggagactgcgcaggccctgaaaacactcgcccaggctgcgcgaggcgtagctgcatccactaccgatccagctgccgcacacgccatgctggattctgccagggatgtcatggaggggtccgccatgctgatccaggaagctaagcaggccttgatcgctccaggcgatgctgagaggcagcagcgactggcacaggtggctaaagccgtaagccactccctaaacaactgcgtcaactgtctgcccggacaaaaggacgttgatgtcgcccttaagtccatcggtgaatctagcaaaaagttactggtggattctcttcctccctccacaaaaccttttcaggaggcccaatcagagcttaatcaagccgccgcagatctgaaccagagcgcgggcgaggtggtacacgcaacgcgcggacagagtggtgagttggccgcggcctccggcaagttctcagacgatttcgatgagttcctggacgcagggatcgaaatggcaggtcaggctcaaaccaaagaggatcagattcaggtaatcggaaatttaaagaacatcagtatggctagcagcaaactgctgttggccgctaagtctttatctgtggatcccggagcacccaacgctaaaaacctcctggcggccgccgcgcgggcagttacagaatccatcaaccagctgatcacactgtgcactcagcaggcccctggtcaaaaggaatgcgataatgctctgagggaacttgaaactgtcaagggcatgctagacaatccaaatgagcccgtgtctgacctgtcctacttcgattgcattgaatccgtgatggaaaattccaaggtgctgggagagtctatggccggtatatcccagaatgccaaaacaggggatttacccgcatttggagagtgcgtggggattgcatctaaagcactgtgcggtttgacagaggcagctgcccaggccgcatacctggtgggaatcagtgatcccaatagccaggcgggccaccagggcctggtcgaccctatccaatttgctcgagcaaatcaggccattcagatggcctgccagaacttggtggaccctggctctagcccaagccaagtactgtctgccgccaccattgtggctaagcatacttccgcactgtgtaatgcctgtcgcatcgcttcatctaagacagccaacccagtggccaagcgtcactttgttcagagcgctaaggaggtggcaaactctaccgccaacttggtcaagacaatcaaagctctcgacggcgacttctcagaggataacaggaataaatgccggatcgctacagcaccgctgatcgaagccgtggagaacctgacagccttcgcttcgaacccggagttcgtcagtatacctgcacagatcagttccgaggggtcccaggcccaggagcctatcctggtctctgctaaaaccatgctagagagctcctcttacctgatacggactgccaggagcctcgctattaatcccaaggacccccccacgtggtccgtcctggcggggcactctcacaccgtctcagattcgataaagtctctcatcaccagcattagagataaggcccccgggcagagagaatgtgattattcgattgacggaatcaacagatgtatccgcgatatcgaacaggcttctcttgcagcagtttcccaaagtttagccacacgcgacgatatctcagttgaggccctccaggaacagttgaccagtgtggttcaagaaatcggtcacctcattgatccaatcgccactgcagcccgaggcgaagctgcgcagctggggcacaaagtgacccagctagcaagctactttgagcccctaatcttggccgccgttggggtcgcttctaaaatcctcgatcatcaacagcaaatgaccgtgttggatcaaactaaaacactcgctgaatccgccctccaaatgctatatgctgccaaagagggaggaggcaaccccaaggcccaacacacccacgatgcgataacggaggcagctcagttaatgaaagaggctgttgatgatataatggtgaccttgaatgaggctgccagcgaagtcgggctggtgggaggcatggtcgatgcaatcgctgaggcgatgtccaaactcgacgagggaacccccccggagcctaagggaactttcgtggattatcaaactaccgtggtcaagtattcaaaagccatcgccgttaccgctcaggagatgatgactaagtcagtgaccaacccagaggagctgggcggcctggcaagccagatgacaagcgactacggccacctagctttccagggacagatggctgccgcaacagcagagcctgaggaaataggctttcaaatcagaactagggtgcaggacctgggccatggttgtatatttctagtccagaaggctggggctctccaggtgtgcccgactgattcttatacaaagagggagctcattgagtgcgcacgcgcggtgactgagaaagtgtcactggtgttgagcgccctgcaggcgggcaataaggggactcaggcatgcattacggcggccaccgcagtttctggaatcatcgcagatcttgacaccactattatgtttgccacagcgggcacattaaatgcagaaaatagcgagacgttcgccgatcatcgagagaatatactcaaaaccgccaaagccctggtcgaagacactaaactcctggtgagcggggccgcttccactccagataagcttgcccaggccgcccagagctctgccgcaaccatcacacaattggctgaggtcgtgaaattaggcgctgctagcttggggagtgacgaccctgaaacccaggtcgtacttatcaatgccattaaagacgtggcgaaagctctgtcagacctgatctcggccactaagggggcggcatcgaagcccgttgatgatcctagcatgtatcaattgaaaggcgcagcaaaggtaatggtcaccaacgtgacaagtcttctgaaaactgtgaaggccgtggaagatgaagccaccagaggaacacgggcactggaggcaaccatagaatgcattaagcaggagctgactgtgttccagagcaaggacgtgccagagaagacaagcagcccagaggagtcaattcgcatgacgaagggaataactatggctaccgccaaggcagttgcagccggcaacagctgtcgtcaggaagacgttattgcaacagcgaacctgagcagaaaagcagttagcgacatgctcacggcgtgcaagcaagcgtcattccatcccgacgtatcagacgaagtgaggacccgtgccctaagatttgggaccgaatgcacattaggatacttggatttattagaacacgttctggtcatcttgcagaagcccacaccagaattcaagcaacaactcgccgccttctcaaagagagtcgcaggcgctgtaacggaactcatccaagcagctgaggccatgaagggtaccgaatgggtggatccggaagatcctaccgttattgctgagacagagctgctgggcgccgccgccagcattgaggccgcagccaaaaagctagagcagttgaagcctcgggcaaagcccaagcaagccgacgagactctagattttgaggagcagatattagaggctgcgaaatcgattgccgcagccacttcggcactggtaaagtctgccagtgcagcacagagagagcttgtagcgcagggaaaagttggatccattcctgcaaacgcagccgatgatgggcagtggtcccaggggctgatctcagctgctcggatggtggctgcagcaacgtccagcctttgcgaagccgcaaacgcttccgtgcagggccacgcatcagaggagaagctgattagcagcgcaaaacaagtggccgcctcgaccgctcagttgctggtggcatgtaaagtgaaggctgatcaggacagtgaagccatgaggagacttcaggccgctggaaatgctgttaaacgcgcaagtgacaatctggtgcgggccgcacagaaggccgccttcggcaaagctgacgatgacgacgttgtagtgaaaacaaaatttgtgggaggcattgctcagatcattgcagcacaagaagagatgctgaagaaggaacgcgagctcgaggaggcaagaaagaaattagcccaaatcagacagcaacagtacaagttcctgcccactgagctgcgggaagacgaagggtag

SEQ ID NO: 137200 - DNA, 7629 bp, synthetic construct
  misc_feature 1..7629: note = Description of Artificial Sequence: Synthetic coding sequence
  source 1..7629: mol_type = other DNA
atggtcgccctttcattaaagatttgcgtgcgccactgcaacgtggtgaaaacaatgcagttcgaaccatcaactgcagtttacgacgcgtgtcgagtcataagggagagagtcccagaggcacagacagggcaggcctcggattatggattattcctttctgacgaggacccccgcaagggtatttggttggaagcggggcggaccttagattactatatgctccgtaacggcgacatcttggagtataaaaaaaagcagcggccccagaaaatcagaatgcttgatggttctgtgaagacagtgatggtcgacgacagtaagactgtgggcgaactgcttgtcaccatttgtagccgtattgggatcactaactacgaggaatacagtctgattcaagagacgatcgaggagaagaaagaggagggcaccggcactttaaagaaagacagaacactactgcgcgacgaacgaaagatggaaaaactgaaagccaaacttcatactgatgacgacttgaattggctcgatcacagtaggacgtttagggaacaaggtgtggatgagaacgagacactgcttctgcgcaggaagttcttttattctgaccaaaacgtggactcgcgcgaccccgtgcagctgaatctcctctatgtacaggctcgtgatgatatcttgaacggaagtcaccctgtatccttcgagaaggcctgcgaattcggcgggtttcaggcgcagatacagttcgggcctcacgtcgaacacaaacacaagcctggtttcctcgacctgaaagagttcctgcctaaagaatatatcaagcaacggggagccgagaaacggattttccaggaacacaagaattgtggggaaatgtctgagatagaggctaaggtgaaatatgtgaaactggcacgctccctccgcacctatggcgtgtcgttttttctggtgaaggaaaagatgaaggggaagaacaagcttgttccgcgactgctgggcatcaccaaagatagtgtcatgcgcgttgatgaaaaaacaaaggaagtcctgcaggagtggccacttacaacggtcaaacgctgggccgcgtcaccaaagtcctttaccctggacttcggcgagtaccaggagtcctactacagcgttcagactacagagggagaacaaatttctcagctaatcgccggctacatcgacattatccttaaaaagaaacaatctaaagaccgcttcggactggagggcgatgaagaatcaacgatgctggaagagtctgttagccccaagaaatcgactattctccagcagcagttcaaccgcaccgggaaagcggaacatggaagcgtggccttgccggccgttatgaggtccgggtcctccggccctgagacattcaatgtcgggtctatgccctcgccacaacagcaggtgatggtgggacagatgcaccggggccacatgccccccctgacctccgcccagcaagccctgatggggactataaatacgtcgatgcacgcagtgcagcaggctcaggacgacctgtctgaattggattcgctgcctccactgggacaggacatggcatcaagagtgtgggtgcagaataaggtggacgagagtaagcatgagattcacagccaggttgacgccataaccgccgggactgcctcggtggtaaacttgacagccggcgacccagctgatacggattatactgctgtaggttgtgccatcacgactatctcctcaaacctgacagagatgtcaaaaggggtgaagctcctggctgctctgatggacgacgaggtggggtctggcgaagacctccttcgcgctgccagaaccctggccggcgccgttagcgatctgctcaaggccgtgcaaccaacgtccggggagccgcgacaaacagtgctgaccgcggccgggtcgatcggccaggcttcgggtgaccttctgcgccaaattggcgagaacgaaacagacgagagatttcaagatgtgttgatgtcccttgccaaagcagtggccaacgccgccgctatgctggttctcaaagccaagaatgtggctcaagtggcagaggacaccgtgcttcagaacagagttatcgcggccgctacccagtgcgccctgagcacatcgcagcttgtagcctgtgcgaaagtggtctcccccacgatttccagccctgtttgtcaggaacagctgatcgaagcaggtaaactcgtcgatcgaagcgtcgaaaactgtgtgcgcgcatgtcaggccgcgaccacagacagtgagctcttaaagcaagtaagcgccgctgcatctgtagttagtcaggcacttcacgacctactgcagcatgtgcgacagttcgctagccgcggtgaacccatcggacggtatgaccaagccacagacactatcatgtgcgtgaccgagagcatcttttcctccatgggagacgccggtgagatggtgaggcaggccagagtattagcgcaagctacatcagatctggtgaatgccatgcgctcagacgccgaagctgaaatcgacatggagaactccaaaaaactgttggctgcagcaaagttgctcgcagattccaccgcccggatggtggaagcagctaagggcgcagccgccaatcctgagaacgaagaccagcaacagcggctccgcgaggccgcagagggccttcgcgttgcaactaacgccgctgcacagaacgcaatcaagaaaaagatcgtgaatcgcctggaggttgccgcaaagcaagccgcagctgcagccacgcagaccattgccgccagtcagaatgctgcagtgtccaacaaaaatccagcggcccaacagcagcttgtgcagagctgtaaagcggtagcggaccacatcccacagctggtccagggggtgcgggggagccaggcccaggccgaggacctgtcagctcaactggcactcattattagcagtcaaaatttcctgcaaccagggagtaaaatggttagctccgccaaagctgccgtccccactgtgtctgatcaagccgccgcgatgcagctgagccagtgtgcaaagaacctggcaactagcctggctgagctgcgaaccgcttctcagaaggctcacgaggcttgtgggccaatggaaattgattccgctctcaatacagtccagacattaaaaaacgaactgcaggacgccaagatggccgcagtcgaaagccaattaaagcccctgccaggcgagacactcgagaagtgcgcccaggacctggggagcaccagcaaggccgtgggatcgtccatggcacagctgctgacttgcgctgcccagggcaatgagcattatactggggtagctgcccgagaaaccgcccaggctctgaaaaccctggcccaagcagcccgtggcgttgccgcttcaacaacagatccagccgctgcccatgctatgctggacagcgcaagagacgtaatggaagggagcgccatgctaatccaggaagctaagcaggctctcatcgcacctggtgacgccgagaggcagcaaaggctggctcaggttgccaaggccgtgtcccattccctgaacaattgcgtgaattgtctgccggggcagaaagacgtggacgtggccctgaagagcatcggggaaagtagtaagaaactgttggtggattcccttcccccttcaacaaaaccctttcaggaggcccagagcgaactgaatcaagccgccgccgatttaaatcagtcagcgggagaagtggtgcacgccacaagaggacagtccggagaacttgcagcggcatcagggaagttctcagatgatttcgacgaatttctcgacgcaggaatcgagatggcagggcaagcacagacaaaagaagatcagatacaggtgattggaaacctgaaaaatatctccatggcatcttcgaagttactgctggcagctaagagtttgtcggtggacccaggtgcgcctaatgcaaagaatttacttgctgccgcagcgcgggccgtcactgagtccatcaaccaactgatcactctgtgtactcagcaggctcctggccaaaaagagtgtgacaatgcactgcgagagctcgagactgtgaagggtatgttggataacccaaacgaacctgtgtctgacctttcttactttgattgtattgaaagtgtgatggaaaatagtaaagtgctgggagagtctatggcaggaatttcacagaacgcaaagactggagatctgcctgcttttggagagtgtgtgggtatcgcatctaaagccttgtgcgggcttacagaggctgcggcgcaggcggcttatctcgtaggcatttctgatcccaatagccaagcgggtcaccagggactggtggatccaattcagttcgctcgagcgaaccaggctatacagatggcttgtcaaaatctggtcgatcccggctctagcccaagccaggtgctgtccgcagctactatcgtggctaagcacacttccgccctgtgcaatgcctgtcggatagctagctcaaagacagccaatcccgtagccaaaaggcatttcgttcagtcggccaaagaggtagctaactccaccgctaacctcgtcaaaaccatcaaggctctcgatggcgacttttccgaggacaatagaaacaaatgcagaatcgcaaccgctcccctgattgaagccgtagaaaacctcactgcttttgcatcaaatcctgaattcgtaagcatcccagcccaaattagttccgaaggctcacaggctcaggagccaatactggtcagcgccaagacaatgctggagagtagttcatatttaatcagaaccgcacggagcttggccatcaatccaaaggatcctcctacgtggtcggtgttggctggccacagtcatactgtatccgattccatcaaatcattaattacatcaatccgagacaaagccccaggccagagggagtgcgactacagtatcgacggaattaatcgctgtatccgggatatagaacaggcctctttggccgcagtgtcccagtcgttagccacaagagatgacatctcagtggaggctcttcaggaacagcttacttcagtcgttcaagaaatcggacatctgattgaccccatcgccacagctgcccggggagaagccgcgcagctcggacataaagtgactcagttggcatcctatttcgagcccttgatcctcgccgctgtcggggtagcgtccaaaattctggatcaccaacaacagatgacagtacttgaccagactaaaacgttggcggagtcagccctacagatgctttacgcggccaaggaaggaggcggaaatcccaaggctcagcacacacacgacgcaataaccgaggctgcgcagctcatgaaggaagccgttgacgacatcatggtgactcttaatgaagcagcaagcgaggtcggcctggtgggaggaatggtcgacgccattgcagaagcaatgtctaaactggacgagggaactccccctgagccaaaaggcacattcgtggactaccagaccacggtcgtgaagtattctaaagccattgcagttacagcccaggagatgatgaccaagtccgtcacgaacccagaggagctggggggactagccagccaaatgactagtgattatggacatctggccttccaaggccaaatggccgctgctaccgcagagcctgaagagatcggttttcaaattagaacccgggtacaggacctgggacatggatgcattttcctggtgcaaaaggccggtgcattgcaggtgtgtccaaccgactcctatactaaacgtgaacttattgagtgcgcaagggcagttaccgaaaaggttagcctggtcctgtctgccttacaagctgggaataaggggacgcaggcctgtattacagccgccacggcggtctctgggatcattgctgacctggataccacaattatgtttgctacagccgggaccctgaatgccgagaattcagagacatttgcagatcacagagaaaacatactcaaaactgctaaagcgttggtggaggatacaaagctgctggtcagtggcgccgcttccacacccgataagttggcccaagcggctcagtctagcgctgcaactatcacacagctggctgaggtagtcaagcttggggccgcctctctgggatcagacgatccagagacccaggtagtattgattaatgccattaaggatgtggcaaaggctctgagcgatttgattagtgcaaccaaaggagcagcctccaagcccgtcgatgacccttctatgtatcagctcaagggggcggcgaaggtcatggtaacaaatgtgacgtccctcctgaagaccgtgaaagcagttgaggacgaagcaacacgcggcaccagggccctagaggctaccattgaatgcatcaagcaagagttaacggttttccagtcgaaagacgtgcccgagaaaaccagttcgcccgaggagagcatccggatgactaagggcattaccatggccactgccaaggctgtggcagctggcaattcttgcaggcaggaggatgtaattgccacagcaaatttaagcaggaaggctgtatccgatatgttaacagcctgtaagcaggctagcttccatcccgacgtcagcgacgaagtcaggacgcgagccctgcgttttgggaccgaatgcactctggggtacctcgatctcctggagcacgtgctcgtgatcctgcagaagcccacacctgagttcaaacagcagctggccgccttcagtaagagggtagctggagcggtgacggaactgattcaggcggccgaggccatgaaggggaccgagtgggtggaccccgaggacccgaccgtcatcgccgaaacggagctgctgggcgccgccgcatctatcgaggctgcagctaagaaactggaacagctgaagccgagagctaaacccaaacaagctgacgaaaccctggattttgaggagcagatcctcgaggccgccaaatccatagctgcagccacctcagcactcgtcaagtctgccagcgctgcccagcgagagctagtcgcccaaggaaaggtcgggagtatacccgccaacgctgcagatgacggccagtggtcgcagggtttgatctccgctgctcgtatggtggccgccgctacctctagcctctgtgaagccgctaatgctagtgttcaagggcacgcatccgaggagaagttgatcagcagcgccaagcaggtggccgcgtcaacagcacagctgctggtagcgtgtaaggtcaaggccgaccaggattccgaggccatgagaaggctccaagcagcaggaaatgccgtgaagcgcgcaagtgataatttagtgcgtgcagcccaaaaggctgcctttggaaaagcggacgacgatgacgtcgtggttaagactaaattcgtgggagggatagcccagattattgccgctcaagaggaaatgctcaaaaaagaacgagagctggaggaggcccgtaaaaaattggcccagataaggcagcagcagtacaagttcctgcccactgagttgcgggaagacgaggggtag

SEQ ID NO: 137201 - DNA, 5190 bp, synthetic construct
  misc_feature 1..5190: note = Description of Artificial Sequence: Synthetic coding sequence
  source 1..5190: mol_type = other DNA
atgaaagttagcacgttacgtgagagttctgccatggcttccccccttcctcgagaaatggaagaagagctggtaccaaccgggtccgaacccggcgatacaagggctaagccccctgtaaagccaaaacctagggcactccctgccaagcccgcgctgccagccaagccaagcctcctggttcctgtgggcccacgaccccccagggggcccctcgctgagctcccttccgctaggaagatgaatatgcttgctggaccgcagccttacggggggagcaagaggccactgccatttgcccctcgacccgcagttgaggcctccacgggaggagaagccacccaggaaacaggtaaggaggaggccggcaaggaggaaccgccaccgcttaccccacctgcaaggtgcgctgccccagggggcgtccgtaaagcccccgcccctttcaggcccgcgtctgaacggtttgctgcaacaaccgtcgaagaaatcctcgctaagatggagcagcctcgcaaggaggtgctcgcgagtcccgaccgcctgtgggggtctagacttactttcaatcacgacggatcatcccgctacggaccaaggacttacggcacaacaacagctcctcgggatgaagacggttcaacactttttcggggctggtctcaggagggacctgttaagtcgcccgccgagtgccgcgaagagcactcaaaaacccctgaggagcgcagtctgcccagcgacttagccttcaatggcgacctggcaaaggccgcatcttccgagctacccgccgacatctcaaaaccatggattccttctagtcctgcaccttcttctgagaacggtggaccagcttccccaggtctccccgccgaggcttctggttcgggccccggctcccctcacctgcaccctcccgacaagagttcaccctgccactcacagctgcttgaggcccagacacccgaagcctcacaggcgtccccatgtcccgccgtcactcccagcgccccatcagctgcacttcctgatgaaggtagccggcacacaccatcgccgggtctaccagccgagggcgcacccgaggcaccaagaccatcttcccccccgccagaggtgcttgagcctcattcactggaccaaccgccagcaacttctcctaggcccctgattgaagtgggtgagttgctcgatctgaccaggaccttcccttcaggaggggaggaagaggctaaaggtgatgcgcatctacggccgacgtcacttgtgcagcgccgctttagcgagggagtactgcagtctccatcacaagaccaagagaagctcggaggaagtctcgctgccttaccacagggccagggcagtcaactggccctagataggccctttggagctgaaagcaactggtctctttcgcagtctttcgagtggactttcccaacaaggccctctggtctcggcgtgtggaggctcgatagtcccccaccctccccaatcaccgaggctagtgaggctgcggaggccgctgaggcaggcaatttagccgtgagttctcgtgaggagggagtgagtcagcaagggcagggagccggatcagcacctagtggatccggatcttcttgggtgcagggcgatgatccctctatgagtcttacacagaaaggagacggagagagccagccgcagttccctgccgtgcctttggagccgctgcccacaacggagggtacccccgggttgcctctccagcaggccgaagagcgctacgaatcccaggagccactagcaggacaagagtccccacttcccctggctacccgtgaggccgcacttcctatactggaaccagtgctcggccaggagcagcctgcagcccccgatcagccatgcgtactctttgctgacgcacctgagcccggccaagccttgccagtcgaggaagaggcagtcacgctcgctagggccgagacaacacaggcgcgaacagaggctcaggatctgtgtcgagcatctccagaacctccaggtcccgagtccagtagcagatggctggatgatctattggctagcccacctccatctggcggaggcgccagaaggggagctggtgccgagctgaaggacacccagagcccttccacatgttctgaaggtctgctggggtggagccaaaaagatctgcagagcgagtttgggataaccggagaccctcagcccagcagcttctccccctcttcatggtgccagggggccagccaagactacggcctaggcggagcaagcccccggggggatcctgggctgggagagagggattggacctctaagtacggccagggcgcaggcgaaggctcaacgcgcgaatgggcttctaggtgcggcatcgggcaggaagagatggaagcaagctcttctcaagatcagtccaaagtttcagcccctggcgtcctgaccgctcaggacagagtggttggaaagccggctcagctggggacccagagatcccaggaggccgacgtgcaagactgggagttccgtaaacgtgactcccagggtacttacagcagtcgcgatgcggagctgcaggatcaggaattcggaaagcgagacagtttagggacctatagctctagagatgtctctttgggggactgggaatttgggaagcgcgacagcctcggcgcgtacgcttcacaagacgccaacgaacaaggacaggatctcggtaagagggaccatcacgggaggtatagtagccaggatgccgacgaacaggactgggagttccagaagagagatgtgtcgttaggcacctatgggagcagagctgcagaaccgcaggagcaggaattcggtaagagcgcttggatccgggattatagctctggaggctccagccgcaccctggacgcgcaagatcgcagtttcggtaccagaccattgtcctctggcttctctccagaggaagcccagcaacaagatgaagaatttgagaaaaagataccaagcgtagaggacagtctgggcgaaggaagtagggacgcaggccggccgggagagcggggttccgggggactcttctcaccctcaactgcccatgtgcctgacggcgctttgggtcagcgagaccagagttcatggcagaacagtgatgccagtcaggaagtaggcggacaccaagagagacagcaggccggcgcacagggcccaggtagcgcagacttagaggacggagagatgggcaagagagggtgggtgggcgagttttccctcagtgttggtccccagcgggaggccgctttcagccctggacagcaggattggagtagagatttctgcattgaagcatcggagcgcagttatcagtttggaatcattggaaatgacagggttagcggagctgggttttctccgagctctaagatggagggcggccactttgtgccacctggcaaaactaccgctgggtcagtggactggaccgatcagttgggtttgcgtaatctggaggtgtcctcatgtgtgggaagtggaggcagctcggaagctagagagtctgcagttggccaaatgggctggagcggtggcctgtcactgagagatatgaatctgacgggatgccttgagtctggaggctctgaagagccagggggaattggcgtaggagagaaagactggaccagcgatgttaatgtcaaaagcaaggacctggctgaagtaggggagggaggcgggcatagccaggccagagaatctggtgtgggacagaccgactggagcggtgtggaagccggcgagttcctcaaatctcgggagcggggtgtgggacaggctgactggacacccgatctggggctcagaaatatggcgcccggagctgtctgttcccctggcgagtccaaggaactaggagtcgggcagatggactggggcaataacttaggactgcgggacctcgaagttacatgtgaccctgatagcggagggtcgcagggattgcgcggctgtggtgtggggcagatggactggacacaagatcttgctccgcaaaatgtggaactgtttggagctccgagcgaagcgcgggaacatggagtcggcggggtaagccagtgccccgagcccgggctacgacataacggaagtctgtccccaggtctagaagctagagaccctctagaagcacgggaactgggcgtcggggaaacctccggtccggagactcagggcgaggactactcgagcagctcccttgaaccccatcccgctgatccaggcatggagactggggaggccttatctttcggggccagccccggcagatgccctgctcgcccacccccatcagggtcacagggcttgctggaggagatgttggccgcttctagtagcaaggccgtcgctcgccgcgaatcagcggcatctggcttagggggcctcctcgaagaggaaggcgccggcgccggcgctgcgcaggaggaagtactggaacccggacgggattctcctccttcttggcgcccccagcctgatggcgaggcttcacaaactgaagacgtggacggcacttggggcagttccgccgctcgttggagtgatcagggaccagcccagacatcccgccggccaagtcagggccctcctgcacgaagcccgtcccaggattttagttttatcgaggataccgaaatcttagactccgcaatgtatcggagcagggcaaatctcgggcgcaagaggggccaccgggctcccgtgatcagacccggcgggacgctgggactttccgaggccgccgacagtgacgcccatctatttcaagacagcactgaaccccgggcaagtcgggttccatccagcgacgaggaggttgtcgaagagccccagtcaaggcggacgcggatgagtttgggcaccaagggattgaaggtcaaccttttccccggactgtctccttcagccttaaaggctaagctgcggccaagaaacagatctgccgaagagggagagcttgcagagtcaaagagctcacagaaagaaagcgcggtacagaggagcaagagctgtaaggtgccaggcctcggcaaaccactcacacttcctcccaagcctgaaaagagctcagggtctgagggctccagcccaaactggctgcaagcactgaagttaaagaaaaagaaagtatag

SEQ ID NO: 137202 - DNA, 432 bp, synthetic construct
  misc_feature 1..432: note = Description of Artificial Sequence: Synthetic coding sequence
  source 1..432: mol_type = other DNA
atgaaggtttctacattgcgcgaatcatcagcaatggcctctcctctgcctcgggagatggaagaagagcttgtgcccaccggaagtgagccgggcgacaccagagccaaacctcctgtgaaaccgaagcccagagcccttccagcaaaaccagcgctgcccgctaagcctagcttattagtccccgtgggacccagacctccgaggggccctctggccgaactccccagcgcacgcaaaatgaatatgctagcgggaccgcaaccctatggcggcagtaaacgcccactgccctttgcacctagacctgctgtagaggcctctaccggaggcgaagctacgcaggagacaggtaaagaggaggcagggaaagaggaacctcccccactgacaccccccgcacgctgtgctgcccccggcggcgtcagatag

SEQ ID NO: 137203 - DNA, 5190 bp, synthetic construct
  misc_feature 1..5190: note = Description of Artificial Sequence: Synthetic coding sequence
  source 1..5190: mol_type = other DNA
atgaaggtctctacattaagggagtcaagtgccatggccagtcccttaccacgggagatggaggaggagcttgtacccactggctctgagccaggtgacactcgggctaagccacctgtgaaaccaaagccaagagcccttcccgcaaaacccgcgctcccagctaaaccgtccctattagtgcccgtgggacccaggcctcccagagggcccctggcagaactcccgagtgcaagaaagatgaacatgctggccggtccccagccctatggggggtccaaaagacctctgccctttgcgcctagaccagctgtggaggcttccaccgggggcgaagcgacacaagagacgggaaaagaggaggctgggaaagaggaaccccctcctttgacccccccagctagatgcgcagcccctggcggcgtgaggaaagctccagcccctttcagaccagcatctgaacgttttgctgccacaaccgtcgaggaaatcctcgccaaaatggagcagccgcgaaaggaggtacttgcatcacccgaccgcttgtggggctcccgccttacattcaaccacgatggttccagccggtatgggccgcgtacctacggtaccaccaccgcgccccgcgatgaagatgggagcacactgtttagagggtggtcccaggaaggacctgtcaagtccccagctgagtgtcgtgaggagcattcgaagactcctgaagaaagatccctccctagtgacctggcctttaacggagatttggctaaggctgctagcagtgaactccccgccgatatctctaagccatggattccgtccagccccgccccgagttcggagaatggcgggcccgctagccctggtctgccggccgaggcctcaggctctggcccgggatctccgcacttgcacccaccggataagtcgtcgccctgccatagccagctgcttgaggctcaaacgcctgaggcaagccaggcctctccatgtccagctgtaactccgtccgccccctctgcagcgctgcccgatgagggtagtcgacacacaccatcccccgggctgcccgctgagggtgcacctgaagccccacggccatcctcacccccccccgaggttctggagccccactcactggatcagccccctgcgactagccctagaccacttattgaagtcggagagctcctggacctaacccgaactttcccttctggcggcgaggaggaagcaaagggggatgcccacctcaggcccactagcctagtgcagaggaggttctcagagggagtgcttcagagcccttctcaggaccaggaaaaactgggcggcagcctggctgctctcccacagggacagggctcccagctggcactggaccggccattcggggcggagagcaactggtctctctcacaaagcttcgagtggacattcccaacccggccgtcagggctcggcgtgtggcgcttagacagcccccccccaagtccaatcaccgaggcctctgaggcagccgaagccgccgaggctgggaatttagccgtctccagtcgggaggagggtgtgtcgcagcaaggccaaggtgcgggaagcgcccctagcggatccggctcatcgtgggtgcaaggcgacgacccctccatgagcctgacccagaaaggcgacggggagtcacagccccagtttcctgccgtgccactggaaccactgccgacaactgaaggcacccctggtctccccctgcaacaggctgaggagaggtacgaatcccaggaacccctcgctggacaggaaagtcctctgccgctcgccacaagagaggccgcgctccctatactggaaccagtgcttggacaagagcagcccgctgcacctgaccagccatgtgtgctgtttgctgacgctccagagccaggtcaggccctgcctgtcgaagaagaggctgtgacattagcccgtgccgagacgacccaggctagaaccgaggcccaggacttgtgtcgggcaagtccagagccacccggaccagaatcctcctccaggtggctggatgatctactggccagcccacctccgagcggtggcggggcaagaaggggtgccggcgccgagttaaaggacactcaaagtcctagcacctgttccgagggcctgctgggttggagccaaaaggacctgcagagcgaattcggaattaccggcgatccccagcctagctcctttagccctagttcttggtgccaaggggccagccaagactatggactgggtggtgccagccccaggggcgacccagggctcggtgagagagattggactagcaagtacggacagggcgcaggcgaggggtcgacccgagaatgggcaagccgttgcggcataggtcaggaggaaatggaggcttcttcctcccaggatcagagcaaggtcagcgccccaggagttctgacagcccaggaccgcgtggtgggcaaacctgcccagctggggacacagagatcacaggaagccgatgtccaggattgggagttcagaaagcgagattcccaggggacttatagctcgcgagacgccgagcttcaggaccaggaattcggaaaacgcgactcccttggcacatatagcagccgggacgtatcccttggcgactgggagtttggcaagagagactccctgggagcctacgcttcacaggatgcaaacgaacagggccaggatctgggtaagcgtgatcatcacggaaggtactcctcacaggacgctgatgagcaggattgggagtttcagaaaagagatgtcagcctggggacctatggatctagagctgcggaaccccaggagcaggagttcgggaaatccgcctggattagggactattccagcggcgggagcagcagaactctagatgcccaggatagatcattcggtacccggccactctcgtcaggttttagcccagaggaagcccagcagcaggacgaggagtttgagaagaaaattccctcggtcgaggattctttgggggaagggtctcgcgacgccgggaggcccggggagaggggctctggcggcctgttctcaccctccacagcacatgttccagacggcgccctcggtcagcgggatcagtcctcctggcagaattccgacgcttctcaggaagtcggtgggcatcaggaaaggcagcaggcgggcgcccaggggcctggctccgccgacctcgaagacggcgagatggggaaacgtgggtgggtgggcgagttttcactatctgtgggtccccaacgggaggcagctttctcgcccggccagcaagattggtcacgtgacttctgtattgaagcgagcgaaagatcataccagttcggcattatcggcaatgaccgggtttcgggagctggattttccccaagtagcaagatggaaggcggtcacttcgtgcctcccggaaagaccaccgctggcagtgttgactggaccgaccagctgggacttcggaacctggaagtctcctcttgtgttgggtcgggaggctcctctgaggctcgcgaatctgcagtggggcagatgggctggtctggcggactgtccctccgggacatgaaccttaccggctgcctcgagagcggaggctcggaagaaccgggcgggatcggcgtcggcgagaaagactggactagcgatgtcaacgtgaaatctaaggacctggccgaggttggcgaaggggggggtcattcacaggcccgcgagagcggcgtgggccagacagactggtctggagtcgaggctggagagtttctgaaaagtcgagagaggggtgtcggacaagctgactggacccccgaccttgggctgcgcaatatggctccaggcgcggtgtgttcacctggagagagtaaggaactgggtgtagggcagatggactgggggaataacctgggcttgagggacctggaggtgacgtgtgatcccgactcgggaggctcacagggactccgcgggtgcggcgtggggcagatggattggacacaggatctagcacctcagaacgtcgaactgtttggcgctcctagcgaggccagggagcatggagtgggcggagtatcacagtgccccgagcctggactgcgtcacaacggcagcctgagcccaggacttgaggcccgcgacccactggaggcgagggagctgggggtgggggaaactagtggacccgaaacgcagggtgaagattactcttcctctagtcttgagccccacccagccgatcctggaatggaaacaggcgaggcactttcatttggtgcctcacctgggcgctgcccagctaggccgccaccaagcggatcccagggccttctcgaagaaatgctggctgcatctagttccaaagctgttgcaaggagggagagtgctgccagcggcctaggaggactccttgaagaggagggagccggcgctggcgcagctcaggaggaggtcctggaaccaggccgggatagcccacccagttggcggccccagcctgatggggaagcgtcgcagactgaggacgtggatgggacctgggggtcctctgcagcccggtggagtgaccagggtccggctcagacctctagaaggcccagccagggccccccagcacgttccccaagccaggatttttctttcattgaagacacagagattctggactcagctatgtaccgctccagagccaatctgggtcgaaaaagaggacacagagcccctgtgattcggcccggaggaactctcggtctgtctgaagccgccgatagcgatgcccatctatttcaggatagcaccgaaccccgggcctcccgagtccccagctcagacgaagaggtggtcgaagagccacaaagccgacgcaccagaatgtcgctcggcaccaaaggcctcaaggtaaatctatttccagggcttagccccagcgccctcaaagccaagttgcgacccaggaaccgctccgccgaggagggcgaactcgccgagtccaaaagttcacagaaagaatccgccgtccaacggagcaagagttgcaaagtgcccggcttaggtaagccactgactctgcctcctaagcccgagaagagctctggttccgaaggaagctcccctaattggctgcaggccttaaagctgaaaaaaaaaaaagtttag

SEQ ID NO: 137204 - DNA, 3006 bp, synthetic construct
  misc_feature 1..3006: note = Description of Artificial Sequence: Synthetic coding sequence
  source 1..3006: mol_type = other DNA
atgccaagcaccaaccgggccggctcgctaaaggatccggaaattgccgagctcttctttaaggaagaccccgaaaaactgttcacagatctgcgtgagatcggccacggaagtttcggtgccgtttatttcgcaagggacgtgcgaaccaacgaggtggttgctattaagaagatgtcctattccggaaaacagagtaccgagaagtggcaggatatcatcaaggaagtgaaatttctgcaaagaataaagcaccccaacagcatagaatacaaggggtgctacctccgtgaacacacggcctggcttgtgatggaatattgtttaggaagtgctagcgacttactggaggtccacaagaagcctctccaggaagtggagatagccgcgattacccacggtgctcttcaggggctcgcttatttacattctcacaccatgattcacagagatatcaaggccggcaatattctgctaaccgagccaggtcaggtgaaactagctgacttcggttctgctagcatggcatcccctgctaattcttttgtagggacgccctactggatggctcctgaagtgatcctggccatggacgagggacagtatgatgggaaggtagatgtctggtctttggggatcacatgcatcgaactggcagagagaaagcccccactctttaacatgaatgctatgtccgctctctatcacatcgcccagaatgagtctcctacgttacagagcaacgagtggagtgactacttccgtaatttcgttgatagctgcctccagaagattccccaagataggcccacatccgaggagcttttaaaacatatttttgtactaagagagaggcctgagacagttctgatagacctcatacaaaggacgaaggacgcagtgagggaactcgataatctgcaatatagaaagatgaaaaagttactgttccaggaagctcacaatggccctgcagttgaggcgcaggaagaggaggaagaacaggaccacggtgtggggaggaccggtaccgttaatagtgtcggctccaatcagtccataccatcgatgtccatcagtgcatcaagtcaatcatcgagcgtcaattcactgccagatgtgagcgacgataagtccgaattggatatgatggaaggagaccacaccgtgatgagtaatagcagtgtgatccacctcaaaccagaggaggagaattacagagaggaaggcgatcctcgtactagggcctcagacccgcagagtccaccccaggtgtctcgccacaagtcccattaccggaaccgcgagcattttgctactatacggaccgcctccctggttacccggcagatgcaagaacatgagcaagattccgaactgcgtgagcagatgtcaggctataaacggatgcgcagacagcaccagaaacaactgatgacactcgagaacaagctcaaggcggaaatggatgagcatagactccgtctggataaggatttagaaactcagcggaacaatttcgccgccgagatggagaaattgattaaaaagcaccaagctgccatggagaaggaggcaaaggtgatgtcaaacgaagaaaagaagttccagcagcatattcaggctcagcagaaaaaagaactcaactcatttctcgaatctcagaagcgggagtacaaacttcggaaggaacagttgaaggaagagttaaatgagaaccagtcaacaccaaaaaaagagaagcaggaatggctctcaaaacaaaaagagaacatccagcactttcaggcggaggaggaagccaacctgcttcgccggcagaggcagtatctggagctagagtgccgtcgctttaagaggcgtatgctactcggtcggcataatctggagcaagatttggttcgagaggagttgaataagcggcaaacccagaaggacttggaacacgcgatgctactgaggcagcacgagtcgatgcaggagctggagttcagacacctgaacaccattcagaagatgagatgtgagctcatcaggcttcagcaccagaccgaactcacgaaccagctggagtataacaaacggagagagcgggagctgaggcgtaaacacgtgatggaggttagacagcagcccaaatcactaaaatcaaaagaactgcaaataaaaaagcaattccaggatacctgtaagatccagacacggcagtacaaggccctgcggaatcatctgctcgaaaccacgcctaaatctgaacacaaagccgtcctcaagcggctgaaagaggaacagacccggaagttagcaattctggcagagcagtacgatcactctatcaacgagatgctctctacccaggcactgagactggatgaagcccaagaagcagaatgtcaagtattgaagatgcaactccagcaggagctggagttactgaatgcctatcagagcaaaattaaaatgcaagccgaggcccagcatgaccgggaattacgtgagctggagcagagagtatctttgcgtcgcgccctcttagagcagaagatcgaagaggagatgcttgcactgcagaatgaaagaacagagagaatccgaagcctacttgaacgccaagccagggaaattgaggcgtttgatagtgaaagcatgaggctggggttcagtaacatggtgctttctaacctcagccccgaggctttctcccattcataccctggcgccagcggctggagccacaaccccaccggcggacccgggcctcattggggacatccaatggggggccctccccaggcatgggggcatcctatgcagggaggaccgcagccttggggacacccctccggccctatgcagggagtgcctcgggggtcgagcatgggcgtccggaattcacctcaagcactgcgtaggaccgcctcagggggaaggactgagcagggtatgagccgttccacatctgtgacatcccaaattagcaacggctctcatatgtcttatacctag

SEQ ID NO: 137205 - DNA, 2562 bp, synthetic construct
  misc_feature 1..2562: note = Description of Artificial Sequence: Synthetic coding sequence
  source 1..2562: mol_type = other DNA
atgccatccaccaaccgagcagggagcttgaaggatcctgaaatagctgaattattcttcaaagaggatccggaaaagctatttacagatctccgggagattggccacggctctttcggtgccgtatatttcgccagggacgtaagaactaatgaagtcgtggcaattaagaaaatgagttacagtgggaagcagagcaccgaaaaatggcaggacatcatcaaggaagtgaaatttttacagcgtatcaagcacccaaactccatcgagtacaaaggctgttatctgagagagcacactgcatggctggttatggaatactgtctgggaagcgcatccgatttactggaagtgcataagaagcccttacaggaagtggagatcgccgctataacacatggggccctgcaaggtctggcttacctccattcacacaccatgattcaccgggacatcaaagctggaaacatccttctcaccgagcctgggcaggtgaaacttgctgatttcggctccgcgagcatggcgtctcccgcaaacagtttcgtgggtaccccatattggatggcccccgaggtgatcctggccatggatgagggtcagtatgacgggaaagtggatgtgtggtccctcggtatcacgtgtattgagttggccgagcgaaaacccccgctgtttaacatgaatgccatgagcgctctctatcacatagctcagaacgagtctcctaccctgcagtcaaacgaatggagcgattacttccggaacttcgtggatagctgcctgcagaaaatcccacaggaccggccaacttccgaggagctgcttaagcacatttttgtgctgcgcgagaggcctgaaaccgtgctcatcgacctcattcagcgaacaaaggacgcagtccgcgaactcgataacctgcagtaccgcaagatgaagaagctgctgttccaggaagcccacaacggccccgccgtggaggcgcaagaagaagaagaggagcaggatcacggggtcggacggactgggaccgtgaactccgtagggagtaaccagagtattccctctatgtccattagtgctagctcccaatcttcaagcgtgaactcacttccggatgtgagcgatgacaagagcgagttggatatgatggagggtgatcacaccgttatgtctaactcatctgtcatacaccttaaaccagaggaggaaaattatcgagaggagggggaccccaggaccagagcgagcgaccctcaaagccccccccaagtgagccgacacaaatcacattaccgtaacagggagcacttcgccacaatcaggaccgcttcgctggtgacaagacagatgcaggagcacgaacaagattctgaacttagggaacaaatgtctggatacaaacgaatgagacgccaacaccagaagcagttaatgaccctggagaacaaactcaaggctgaaatggatgaacataggttgcgcctggataaagacctggagacacaacggaacaactttgccgcagaaatggagaagttgattaagaaacatcaagccgcaatggaaaaagaggccaaggttatgagtaacgaggagaagaaattccaacaacacatacaggctcagcagaaaaaagagctgaactctttcctcgagtcccagaagcgagaatataaacttcgcaaggaacagctgaaggaatccaaagaattgcagataaagaaacagttccaggacacctgcaagatccagacacgccagtataaggccctgagaaaccacctactggaaaccactcccaaatcagaacacaaagccgtgcttaaacggctaaaggaagaacagactcgcaaactcgcaatcctggcagagcagtacgatcatagtatcaatgaaatgctgagcacccaggccctccgactggacgaggcccaggaggccgaatgtcaggtcctgaagatgcaactccagcaagagctggagctcctgaatgcataccaaagtaagattaagatgcaggcggaagcccagcacgaccgggaactacgcgaactggagcagcgggtctctctccgccgggccctgttggaacagaaaattgaagaagaaatgcttgcgcttcaaaatgagaggacggaaagaattaggagcttgctggaaaggcaagctagggaaatagaggcctttgactccgaaagcatgcggttggggttctcaaatatggttctcagtaacttgagccccgaagcatttagtcattcataccccggagccagcggttggagccataatcccaccggcggacccggccctcattggggacacccaatgggcgggccaccgcaggcatggggacaccccatgcagggcggcccgcaaccttgggggcaccccagcggccccatgcagggagtgcccagaggaagttctatgggcgtgaggaatagtccgcaggccttgcgaagaaccgcttccggtggccgcactgaacaaggcatgagccggagcaccagtgttacttcccaaatttcaaacggttcgcacatgagttatacatag

SEQ ID NO: 137206 - DNA, 3150 bp, synthetic construct
  misc_feature 1..3150: note = Description of Artificial Sequence: Synthetic coding sequence
  source 1..3150: mol_type = other DNA
atgcctgctggaggcagggctggctccctcaaggacccagatgtggcggagcttttcttcaaagacgatccagaaaaactgttttcagatcttagggaaatcggtcatggctctttcggcgctgtttacttcgctagagacgtgagaaacagcgaggtagttgccatcaagaagatgtcatattccggcaaacagagcaacgaaaagtggcaggatattataaaagaggttcgctttctccagaagctgaggcatccgaacactatccaatacagaggatgttatttgagagaacataccgcatggctggtgatggaatactgcctgggaagcgcgagcgacctcttggaggtgcataagaaacctctccaggaggttgaaatcgccgccgtgacccatggggcactacaggggctggcgtatctgcactcacataatatgatccaccgggatgtgaaagccggcaatatcttgctgtccgaaccgggattggtgaagcttggagatttcggttccgccagcattatggcaccagctaactcattcgtggggacaccttattggatggccccagaagtgattctcgctatggacgagggacagtacgacggcaaggtagatgtgtggtctctcggcattacttgcatcgagctcgctgaacgcaaacctcctctgtttaacatgaacgctatgtcagcgttataccacattgcacagaacgagtccccggttctgcagtcaggacattggagcgagtactttcgcaactttgtggactcatgcttgcagaaaattccccaagacagacccacttcggaagtgctactcaagcatcgatttgtccttagagaaaggcctccaacggtcatcatggatctcatccagaggaccaaggacgcagtcagagaactggacaatctgcagtatcgcaaaatgaaaaagatactgtttcaggaggcccctaacggccctggggccgaggccccagaagaagaagaggaggccgagccttacatgcatagggccgggactttaacctctctcgagagctcgcactcggtgccctcgatgagtatatctgcttcctcgcagagcagctcggtgaacagcctcgccgacgctagcgacaatgaggaagaagaggaagaggaagaggaggaggaggaggaggaggaaggtccagaagctcgcgagatggctatgatgcaagaaggtgaacataccgtcaccagtcactcgtccatcatccacaggttgccagggtcggacaacctttatgacgatccataccagcccgagatcaccccaagcccattgcagccacccgcagccccagcacccacaagcacgactagttccgccaggcgacgagcttactgcagaaacagggaccatttcgcaacaataaggactgcttccctcgtgagccgacagatccaagaacatgaacaggatagcgccctgagagaacaactaagcggatataagcgcatgagaaggcaacaccagaagcagctgctcgcactcgagagcagactgagaggagaacgggaggagcactctgccaggctccagagggagctggaagctcagagggctggatttggtgcagaagccgagaaattggcccgccgacatcaagcaattggtgaaaaagaagcccgggccgcacaggccgaagaaaggaagttccagcagcacattctcggtcaacagaaaaaagagctggctgccttacttgaggctcagaaaagaacttacaagctgagaaaggaacagttaaaagaggaattacaggagaatccaagcacccctaaaagggaaaaggcagagtggctcctccgtcagaaagagcagctccaacaatgtcaagctgaggaagaagcaggcctactgcgtcggcagcggcaatacttcgaactgcagtgcaggcagtataaacggaaaatgcttctcgcccggcactctctcgatcaagacctgctcagggaggatttgaacaaaaagcagacccagaaggatctggaatgcgccctgcttctccggcaacatgaagccactcgtgagctggaactgaggcagctgcaagcagtccagagaactagagctgagctgactcggttgcagcaccagaccgagctcggcaatcagctggaatacaacaagagacgcgaacaagagcttagacagaagcatgcagctcaggttaggcagcagccaaagtccttgaagtccaaagagctccagatcaaaaagcagtttcaggaaacgtgcaaaatccagaccagacagtacaaggccctgagggctcatttactggagaccacacccaaggcccaacataagagcctattaaaacggttgaaagaagagcagacccgaaagctggcaatcctcgccgagcaatacgaccagagtatttctgaaatgctgtcgtcccaggcgttgcggctcgatgaaactcaagaggctgagtttcaggccttacgccaacagttgcagcaggagctcgagctgctcaacgcctaccagagtaagattaaaattaggacagagtctcaacacgagcgtgagctgagggaattagaacagagagtcgctctgcggcgagcactgctggagcaacgcgtcgaagaggaactgctggccctgcaaacaggtcgctcggaaagaatcaggagcctcctggagagacaggcacgggagattgaagccttcgatgctgagtcaatgaggctcggcttcagctccatggctttaggcggaatcccagccgaagccgctgctcaagggtatcccgcccctccacctgcccctgcctggccctcccgtcccgtacctcggtctggcgcgcattggagtcatgggcctccccccccagggatgccccctccggcctggcgtcagccctctctgctggccccccctggtccgccaaattggctcggtccaccgactcagtccggtactccccggggtggagctttactcctgctgagaaatagccctcaaccgctgcggcgcgcagcttccgggggaagcggcagtgagaatgttggtcctccagcagccgcagttcccgggcccctctctcgatccacgagtgtagcttctcatattctgaacgggtcatctcatttctactcttag

SEQ ID NO: 137207 - DNA, 3708 bp, synthetic construct
  misc_feature 1..3708: note = Description of Artificial Sequence: Synthetic coding sequence
  source 1..3708: mol_type = other DNA
atgcccgcgggcggaagggcaggctctcttaaagatcccgacgtagccgaactgttctttaaagacgatccggaaaaactgttttccgatctgagggaaatcggccatgggtcattcggagcagtgtactttgcacgggatgtgagaaattctgaagtggtcgccatcaagaaaatgagctactccggcaagcagtctaatgagaagtggcaggatatcataaaggaggttcggttcctgcagaaactccggcaccctaacactatacagtatcggggatgttacctgagggagcataccgcatggctggtgatggaatattgcctgggatccgccagtgatcttctcgaggtacacaagaagcctctgcaggaagtagaaatcgccgcagtaacgcatggagctctgcagggcttggcctacctgcatagccacaatatgatccacagggacgtaaaggcggggaacattctgctgtccgaacctgggctggtgaaactaggggatttcggcagcgcctccatcatggcgcccgccaattccttcgtgggaactccctattggatggccccagaagtcatcttagctatggacgagggacagtacgacgggaaggtggatgtgtggagtctggggattacctgcatcgagctggccgagcggaagccccccctctttaacatgaacgcaatgagcgctttgtatcacatcgcccagaatgagtctcctgtgttacagagtgggcactggagcgagtatttccggaactttgtggatagttgcttacagaagattccacaagacagacccacgtccgaggtgctccttaagcatcgattcgtgctgcgcgagaggcccccaaccgtgattatggacctgatccaaaggacaaaggacgcggtgcgcgaattagataatctacaatatcggaaaatgaagaaaattctgtttcaggaagccccgaatggcccaggtgcagaggctcctgaagaggaggaagaagcggaaccatacatgcaccgggctgggaccctgacatctctcgagtcttcccactccgtgccatctatgtctataagcgctagtagccagtctagtagcgtgaatagcctcgctgacgccagcgacaacgaggaagaagaggaggaggaagaggaagaggaagaggaagaggagggacctgaggcccgggaaatggcaatgatgcaggaaggggaacatacagtcacaagccacagttctatcatccaccgccttcctggcagcgacaacctgtatgacgatccctaccagcccgagattacaccttcaccactgcagcctccagccgcccccgcccccacatcgacaacttctagcgccaggaggcgggcttactgtcgcaaccgagatcacttcgcaaccattcgaaccgctagcctggtctcaaggcagatccaagaacacgagcaagattcagctctgagggaacaactgtccggatacaagcggatgcgcagacagcatcagaagcagctgttggctttggagagccgcctccggggagaacgggaggagcattcagccaggctgcagcgcgaactggaggcgcagcgagcaggatttggcgccgaggcagagaaactggccaggcgccaccaggctattggagagaaggaggcacgcgccgcccaggccgaggagaggaagttccaacagcacatcctcgggcagcagaagaaggaactggctgctttgctcgaggctcagaagcggacttacaagctgagaaaggagcagctgaaagaggagcttcaggaaaaccctagcaccccaaagagggagaaagcagaatggctccttagacagaaagaacaactacagcagtgtcaggccgaagaggaagccggactgttgaggcggcaacggcagtactttgaacttcaatgccggcagtacaagagaaagatgctcttagccagacattcactagaccaagatttgctcagagaagatttaaataagaagcagactcagaaggacctggagtgcgcactgctattgcggcagcacgaggctactagagagttggaactccgccagctccaggccgttcagcggactagggcggagctgactcggctgcagcatcagactgaattgggaaaccaattagagtacaataagcggagggagcaggaattaaggcagaagcacgcagcccaagtgagacagcagcctaaaagtctgaaagtgcgcgccggccagcggccacctggactacccttgcccattccgggcgctcttggccctcccaacaccggaactcctattgagcagcagccttgctcccccggccaggaagcagtgctggaccagcgcatgctgggagaagaggaggaagccgtcggagagaggagaatcctgggcaaggagggggccacgctggaaccaaaacagcagagaatactgggggaggagtcaggtgccccatctcctagcccgcaaaaacatggctcacttgtcgatgaggaggtctgggggcttcctgaggagatagaggagctgcgagtcccaagtcttgtaccccaggagaggagcattgttggccaggaagaagctggaacctggagcttatggggtaaagaggacgaatccctactcgacgaagagtttgagctgggctgggttcagggcccagccctcactccagtcccggaggaggaggaggaagaggaagagggcgcccccattggcacccctagggaccccggagatggttgccctagtcccgacatcccaccggagccgccccccactcatctgaggccctgtcccgctagtcagttgcctggactgctgtcacacggtctgttagccggcttgtcattcgccgtaggctcatcctcaggcctgttgccgctgctgctgctcctcttacttccactcttggccgcgcagggcggaggcggcctccaggccgccctcctggcactggaggtaggtctggtgggattgggggccagctatctcctgctatgtacagcactgcatcttccgtcaagtttattcctgctgcttgctcaaggtaccgccttgggcgctgttcttgggctaagttggaggcggggcctcatgggagtgcccctgggcttaggcgccgcctggctgttggcatggccaggtctggccctaccattggtagccatggctgctgggggaagatgggtccggcagcagggcccgagggttcgcagaggaatttcccgattgtggctgcgcgtgcttctaagactgtcgccaatggcattccgagcactgcaggggtgcggtgccgtaggtgatcgtgggctcttcgctctgtacccaaaaaccaataaggacgggttccggtcgcggctgcctgttccaggacccagacgccgaaaccctcggactacacagcatcccctcgcccttctggctagggtctgggtcctgtgtaaagggtggaactggcgactggctagggcaagccagggattagcttctcacctgccgccatgggcgatccacacactggccagctggggcctcctgcggggggaacggcccactcggattccacggttgctcccaaggagtcagcggcaactcggaccacccgcctcgaggcagcctctccccggcacgctggcaggaaggagaagccgtactaggcagtcccgcgccctccccccttggcgatag

SEQ ID NO: 137208 - DNA, 2268 bp, synthetic construct
  misc_feature 1..2268: note = Description of Artificial Sequence: Synthetic coding sequence
  source 1..2268: mol_type = other DNA
atgcccgctggaggccgtgcaggatcccttaaggatcccgacgtcgctgagctttttttcaaagatgatcctgagaaactcttctcagatctgagagagataggacacggcagcttcggagccgtctactttgcccgcgacgtcagaaatagcgaggtggtggctattaaaaagatgtcatactcaggcaagcagtcgaatgaaaagtggcaggacataatcaaagaggttaggttcttacagaaactgcgacatccaaataccatccagtaccggggctgttatctcagggaacacaccgcctggctggtcatggaatattgtctcggtagcgcaagtgatttgctggaggtccataaaaagccactgcaggaggtggaaatagcggctgtgactcatggcgctcttcagggcctggcctacctgcactcccataatatgattcaccgtgacgtcaaagcaggcaacatcctcctctccgagcccggcctggtgaaacttggggattttggtagcgctagcatcatggcccctgctaactcttttgtcggcaccccttactggatggcacccgaggtgattttagcaatggatgagggacagtatgacggcaaagtggatgtttggtccctcggcataacgtgtattgaactcgcggagaggaagccccctctgtttaacatgaatgctatgagtgccctgtaccatatcgctcagaacgaatctccagtgctccagtctgggcactggtccgagtacttcaggaacttcgtggacagctgcctgcagaaaatcccccaggatcggccaacgagcgaggtgctactcaagcacagattcgttctgagagaaagacccccgacagtcattatggatctgatccaacgaacgaaggacgctgtgagggaactggataatttgcagtacagaaagatgaaaaagatcttgtttcaggaagccccgaatgggcccggggcggaggcccccgaagaggaagaagaggcagagccatacatgcatcgtgctggaactctcacttcgttggaaagtagtcatagcgttccttctatgtccatcagcgctagctcacaatccagctctgtgaacagccttgctgacgcaagcgacaacgaagaggaagaggaggaggaggaggaggaggaggaagaggaggagggacccgaagcccgtgagatggccatgatgcaggaaggcgagcacacagtgacctcccattcgagtattatacacagactgcccgggagtgacaatctgtacgatgatccctaccaacctgagattactcccagtccattgcaaccccctgctgcacccgctcccactagtaccacctcttcggctagacgtcgcgcctactgccgtaatcgggaccacttcgctactatccgaaccgcctcattagtgagtcgccagatccaggagcatgaacaggactccgccctgcgtgaacagctctcggggtataaaagaatgcggcggcagcatcagaaacagctgctggcactggagagcagactgaggggtgagagggaggagcactccgctaggctgcagagggaactggaggcccaacgcgcaggctttggggcagaggccgaaaagctcgcacggcgccatcaagccattggagaaaaggaggctcgagccgcccaggcagaggaaaggaaatttcagcagcacatcctcggccaacagaaaaaggagctcgccgcccttcttgaggcccagaaacgaacttataaattgaggaaggaacagctcaaagaagaactccaggaaaacccttcaacacccaagagagaaaaggcagagtggttgctgagacaaaaggagcagttacagcagtgccaggccgaggaggaggccggattgctgcggagacaacgtcagtactttgaactgcagtgcaggcagtacaagaggaagatgcttcttgcccgtcacagccttgaccaggacctgctgcgggaggacctgaacaaaaagcaaacacagaaggacctagagtgtgccctgctactgagacagcacgaggcaactagagaattggagcttcggcaattgcaagctgtccagaggactcgtgcggagctaacaaggttgcaacatcaaactgaattgggtaatcagctggaatataacaaaaggcgtgagcaggaactgagacagaagcacgcggctcaggtgagacaacagcctaaaagccttaagaaaaagaccaatacaaacaaaatttccgaacgctag

SEQ ID NO: 137209 - DNA, 3369 bp, synthetic construct
  misc_feature 1..3369: note = Description of Artificial Sequence: Synthetic coding sequence
  source 1..3369: mol_type = other DNA
atgcccgccggtgggcgcgctggctctctcaaggatcctgatgtggccgaattgttctttaaggacgatccagagaaattattcagtgaccttcgtgagattggccacggctccttcggtgcggtgtacttcgccagagacgttcgaaactccgaagtggtggcaataaagaaaatgtcatatagcggtaagcagtccaacgagaagtggcaagacattattaaggaggtgcggttcttgcagaagctccgtcaccctaacaccatccagtaccgaggctgctatttgcgagagcacaccgcgtggttggtcatggaatattgcctgggctcagcgagtgacctgctggaggtacacaagaagcccctgcaggaggtcgagatcgcggcagtaactcacggggcgcttcaggggctggcttacctccacagccacaacatgatccatcgggatgtcaaagcagggaatattctcctgagcgagcctggcctggttaaactgggcgactttggctcagcctcaatcatggccccagctaatagctttgtgggtactccctattggatggcaccggaagttattctggccatggatgaaggccagtacgacggcaaagtcgacgtgtggagcctcggcatcacatgtatcgagttggcggagagaaaacctcctttgttcaacatgaacgcgatgagtgcactttatcacatcgctcaaaacgaatccccagtgctgcagagcggccactggtcagagtactttcgaaacttcgtggactcttgtcttcagaagatcccccaagacaggcccacatccgaagtgctcctgaagcatagatttgtgctgagggagcggccgccaactgtgattatggacctgatccagcggacaaaagatgcagttcgggagctggacaatctgcagtaccggaaaatgaaaaagatcctgtttcaagaggctcctaacgggcccggcgccgaagcccctgaggaagaggaggaggcagagccttatatgcacagggcagggacgttgactagcttagagagtagccactcggttcccagcatgtcaatttcagcctcgtctcagtcttcatcagtgaattctctagccgacgcatcagacaatgaagaggaggaagaggaggaagaagaggaggaagaagaggaagaaggccctgaggctagggagatggctatgatgcaagagggggaacatacggtaacaagccattcttcaatcatacaccgtctcccaggctctgataacctctatgatgacccttatcagcctgagattactcccagtccacttcaacctcccgccgcccctgccccaacttcaacgacatcctcggctcgccgacgggcatattgccggaatagggaccattttgcgacaatccgcactgcttctctcgtgagccggcagatccaagagcatgaacaggatagtgccttgcgagagcaactctccggatacaagcggatgaggagacagcaccaaaagcagctcctggccctggagtctcgcttgcggggtgaacgagaggagcatagcgcccgtctgcaacgcgaacttgaagcccagagggcaggatttggcgcagaagccgagaaactggcacgaaggcaccaagctattggggaaaaggaggccagagccgcgcaggcggaggaacgcaagttccagcagcacatactgggccaacagaagaaagaactagccgccctcctggaggcccagaagaggacatacaagctccgcaaagagcaactgaaggaggaactccaggagaatccatccactccaaagcgcgaaaaggctgagtggcttcttcgacagaaggaacagctccaacaatgtcaggcggaggaggaagccggcctgctgcgcaggcagcgccagtactttgaactgcagtgtaggcagtacaaacgcaagatgttgctggcccgccattccctggaccaggatttacttcgagaggatctcaacaaaaaacagacgcagaaagacttagaatgtgctttgttattacgccagcatgaagcaaccagagaacttgagctccggcagctccaggcagttcagcgtacaagagctgaactcactagactccaacatcaaacggagctggggaatcaattagagtacaataagaggcgcgagcaggagctgagacaaaaacacgcagcccaggtcagacagcagcccaagtccttgaaggaaaggtctatcgttggacaggaggaagctgggacgtggagcctgtggggtaaagaagatgagtccttactggatgaggagtttgagttgggctgggtccagggcccagcccttacacccgtaccggaagaagaggaggaggaggaggagggggcacctatcgggacaccacgcgaccctggggacggctgtccatcacccgatatcccccctgaaccaccacctacacaccttcgcccatgccctgcttcacaactacccggcctcttgtcccatggcctacttgctggcctgtcgtttgctgtgggatcctccagcggcctgctgccactcctgctcctgttgctgctgcctttactggctgctcaggggggggggggcctgcaagccgccttacttgccctcgaagtagggctggttgggctgggggccagctacctgctattgtgcaccgctctgcaccttccgtcctcattgtttctgcttctcgctcagggtacagcactgggtgccgtactcggcctgagctggcgaagaggcctgatgggcgttccactggggctcggcgccgcctggctgctggcctggcctggacttgcattgcccttggttgccatggcagccggaggacgctgggtccggcagcagggaccacgggtgaggcggggaattagtcggctgtggctgcgcgtgctgttgcggctgtcccctatggcgtttcgggcattgcaaggatgtggagctgtgggcgatagaggtctctttgccctgtacccaaagacaaacaaggacggattcaggtcccggctacccgtcccagggccccgaagacgcaatccccggacaacccagcatcccttagcactcctagccagagtgtgggttctctgcaagggttggaactggcgcctggcaagggcatcccaagggttggcctcccacctccccccctgggccattcatacgcttgctagttggggactgctgcgtggcgagagaccaactagaatcccacggttactccctcgctctcagcggcagttgggccccccggcctcaaggcagccattaccaggtactctcgctggtaggagatccagaacaagacaaagtcgcgccctgccaccttggcggtag

SEQ ID NO: 137210 - DNA, 1401 bp, synthetic construct
  misc_feature 1..1401: note = Description of Artificial Sequence: Synthetic coding sequence
  source 1..1401: mol_type = other DNA
atgaagagcctgagcttactgttagctgtggctctgggcctagctacggccgttagcgcgggacctgcagtgatcgagtgttggttcgtcgaggatgcatccggcaaggggctcgcaaagcggcctggagctctcctcctgagacagggacccggagagcccccaccaaggccagacctcgatccagagctgtatctgtccgtgcacgatcctgctggggctctgcaagccgcgttccgcaggtaccctagaggagcccctgcccctcactgtgagatgtctaggttcgttccgctgccagctagcgctaaatgggctagcgggctgacccctgctcagaattgcccgcgcgcccttgatggcgcctggctcatggtgtccatatcttcgcccgtactttcactgagttcccttctcaggcctcagccagagccacagcaggaaccagtgttaatcaccatggcaaccgtggaaatgggctttcatcacgtcggacaggcagccctcgaactgctgacatccgttgtgttaactgtgctgactcacacccctgcacctcgggtacgcctgggccaggacgctttattagatctcagcttcgcatatatgccgccaacttcagaagccgcctcttctctggcaccaggcccccccccttttggcctggaatggcgtcggcaacacttgggcaaggggcacctgcttcttgccgcaactccggggctcaacgggcagatgcccgcagctcaagagggcgctgttgcttttgccgcctgggatgacgacgagccatggggaccatggacgggcaacggaacattctggctgccacgggtgcagccattccaggagggcacctatctggctactatccacctcccgtacttgcagggccaggtgaccttggagctggctgtatataaacctcctaaagtgtcgctgatgccagctacacttgcgagagccgcaccaggcgaggctcctccagagttactctgcctggtatctcatttctacccaagtggagggttggaagtcgagtgggagcttaggggcggcccgggcggccggtcgcaaaaggcagaaggacagagatggctgagcgccctgagacatcactccgatggatcggtttcactgagcgggcacctgcagccccctcctgttaccacagaacagcacggggcacggtatgcatgtcgaatccaccacccatctcttccggccagcggaagaagcgccgaagtgacgctggaggtggccggcctgtctgggcctagccttgaggacagcgttggtttgttcttgtccgcctttctgctgttaggactctttaaagccctgggctgggctgctgtctacctgagtacatgtaaagatagcaaaaagaaggcagaatag

SEQ ID NO: 137211 - DNA, 1347 bp, synthetic construct
  misc_feature 1..1347: note = Description of Artificial Sequence: Synthetic coding sequence
  source 1..1347: mol_type = other DNA
atgaaatccctgagtctcctcctggccgtcgccctcgggttagccaccgcagtgtctgcaggtccagccgttatagagtgctggttcgttgaagatgcaagtgggaaaggtctggccaaacgaccaggcgctttgttgctgcgccagggtcctggcgaacctccacctaggcctgacctcgatcccgaactgtatctctctgtgcacgatcccgcaggcgcattgcaggctgcattccgcagatatccacggggcgctcccgctcctcattgtgagatgagtaggttcgtgccccttcctgccagcgccaaatgggcatctgggctcacacccgcacagaattgcccaagggccctggacggggcctggctaatggttagcatttcatcccctgtattgagtttgtcctcattactgcggccccagccagaaccccaacaggagcccgtgctgattaccatggctaccgttgtcctgacagtcttaacacacactcctgcaccgagagtacgtttggggcaggacgctctgctggatctctcctttgcgtatatgcctccaaccagcgaggctgcctcctcacttgccccaggtccaccgcctttcggcctggagtggagaaggcagcacctcggcaaaggccacctgctcttggctgctactccaggcctaaatggccagatgcctgctgctcaggagggggctgtggcgtttgcagcctgggatgacgacgagccatgggggccatggactgggaacggaacattctggctgccaagggtacagccctttcaggaaggtacttatctagcgacgatacaccttccttatctgcagggtcaggtcacactagaactagccgtgtataaaccccctaaggtgtctctcatgccagctactctcgccagggccgctccaggagaggcccctcctgagttgttatgtctcgtgtctcacttctatccaagcggcggccttgaggtggaatgggaactcaggggagggcccggaggaagatcccagaaggcggagggtcagcgctggttatcagccctcagacaccattctgacggttccgtgagtctgtctgggcatctgcaacccccccctgttacaacggaacaacatggagcacgctatgcttgccggatccaccaccctagcctacccgcctccggccgctctgccgaagtgacactggaagttgcaggactgtccggtccctccctcgaggacagcgtgggcttgttcctgtcggcgtttctgcttctaggtcttttcaaagccttaggatgggccgcagtgtacttatcaacgtgcaaggactccaaaaagaaagctgaatag

SEQ ID NO: 137212 - DNA, 1515 bp, synthetic construct
  misc_feature 1..1515: note = Description of Artificial Sequence: Synthetic coding sequence
  source 1..1515: mol_type = other DNA
atgaagtcactgtccctcctgctcgctgtggcactgggtctggcaacggccgtctcggctggcccagccgtcatcgagtgctggtttgttgaggacgcctcaggtaaaggattggctaaacgaccaggagccctgctgctgcgacagggccctggcgagcctccccctagacccgacctggaccccgaactctacctgagtgtgcatgaccctgccggtgccttgcaggcagccttcaggcgctaccctcggggagcaccagccccccactgcgagatgtctcggttcgtgccacttcccgcatcagccaagtgggcctccggccttacaccagcacagaattgtcccagggctctcgacggggcgtggctgatggttagtatttcttccccggttctgtcactgtcctctctgctccgaccccagcccgaaccccagcaagaacctgtgctcattaccatggcaacagtggtattgaccgttctgacacatacgcccgccccaagagtgagactgggccaggatgccctgcttgatttatctttcgcctatatgccccccacttcggaagctgcctcgagcctcgccccaggacctcctccttttggcctggaatggagacgccagcatttggggaagggccacttactcctggccgccaccccaggactgaacgggcagatgccagcagcccaggagggagcagtagcatttgctgcctgggacgatgacgagccttggggaccttggacaggaaacggcacattctggttacccacagtacagccctttcaggaaggtacgtacctcgccactatacacctgccttaccttcaggggcaggtgaccttggagttagccgtgtacaagcccccgaaagtgtcgctcatgcctgccaccctcgctagagctgctcctggagaggctcccccggaactgctatgtcttgtgtcgcacttttatcccagtggtggacttgaggtcgagtgggagctgcgcggcgggcccggcggacggtctcaaaaggcagaagggcagcgctggcttagcgccctgcgccatcatagtgacggctctgtcagtcttagcggccacctgcagcccccgcccgttactaccgaacagcacggcgcccggtatgcctgccgcatccatcatccgagcctacccgcctccggaagaagcgccgaagtaaccctggaggtggccggcctgagcggaccctccctggaggattccgtcgggttgttcctcagcgcctttctgcttcttggcttgttcaaagcactgggctgggcagcagtgtatctctctacctgcaaggattccaagaaggtgcagtgttctaccagtctgtatctgtcgctggtcactttgtccccacatccgatctcaaagccaatggagggcgggtgctggtgcggaagacagaatctgggcctagagtttacactgatctgggtgaaaacatggcactatattttgactgtgggtctgtttgaacacgcgacttag

SEQ ID NO: 137213 - DNA, 1347 bp, synthetic construct
  misc_feature 1..1347: note = Description of Artificial Sequence: Synthetic coding sequence
  source 1..1347: mol_type = other DNA
atgaagtcccttagtttgctactagccgtggcactcgggcttgcgacagccgtgtccgccggacccgcagtaattgagtgctggttcgtcgaagacgcttctggcaaagggttggccaaacgacccggggccctgttgctcagacagggaccgggagagcctccgccccgccccgaccttgaccccgaactctatctatcggtgcatgatccggccggagctctgcaggccgcctttcgccgatacccacgcggagcaccagcaccgcactgtgaaatgagccgatttgttcctctgcccgctagtgccaagtgggcctcaggacttacacctgcccaaaactgtccacgagctcttgatggtgcgtggttaatggtgagcatcagtagtccagttcttagcctgtcttccctgttacgtccgcagcctgaacctcagcaggagccagtgctcataactatggctacggttgtgttgactgtcctcacacacacacctgctccacgagtcagactgggacaagatgctctattggacctgtccttcgcatacatgccgccgacatcagaagccgccagctctcttgcaccaggacccccacccttcggactcgaatggaggcgccagcacctgggtaagggccacttgctcctggcagcgacccccgggctaaacggccagatgcctgccgctcaagagggcgctgtggcattcgccgcatgggacgatgatgagccttggggaccttggaccggcaacggaaccttttggctgcctacagtgcaacccttccaggagggcacatatctggccaccattcacctgccctacctccaagggcaagtgacactcgagttagctgtctataaacctcctaaggtctcactgatgccggctactttggcaagggcagcccccggtgaggcccctcccgagctgttatgcctggtgtcgcacttttatccctctggaggactggaagtggagtgggaactgagaggtggacctggtggcagaagtcagaaggccgaaggccagcgctggctttcagctcttcgtcaccactctgatgggtctgtgtccttatctgggcacctccagcccccccccgtgacgacggagcagcatggcgccagatatgcctgcagaatacaccatccaagcctcccagccagcggaaggagtgctgaggtgaccctcgaggtggcaggtctgagcggtcctagtctagaggactcagtgggcctgtttctgagcgcttttctgctgctcggcctgtttaaggctttaggctgggccgccgtctacctgagcacttgcaaggattccaagaagaaagctgagtag

SEQ ID NO: 137214 - DNA, 1401 bp, synthetic construct
  misc_feature 1..1401: note = Description of Artificial Sequence: Synthetic coding sequence
  source 1..1401: mol_type = other DNA
atgaaatctctttccttactgcttgcagttgcccttggtttagccacagctgtcagtgcggggcccgctgtgatcgaatgctggtttgtggaggacgcctcaggcaagggcctggccaagagacctggcgccttactattgcgacaaggccctggggagccgcccccgcgtcccgacctggatcccgagctctacttgtcagtgcacgatcccgctggcgcactccaggccgccttcaggcggtaccccagaggagcccccgccccacattgtgagatgtctagatttgttccactgcccgcttccgccaaatgggcctctggcctaacaccagcccagaactgcccacgcgccctggacggagcttggcttatggtgagcatatctagcccggtgctgagcctctcctccctgctgaggccccagcctgaaccacagcaagaacccgtcctcatcactatggcaacagtggaaatgggattccatcatgtgggccaggcagctctggagctgttaacctctgtggtgctcacagtgctgacccatacaccggccccacgggttaggcttgggcaggacgccctgctggacttgtcctttgcctatatgccccctacctctgaggcagccagctcgctagcacctggaccacctccctttggcctcgagtggcgcagacagcatcttggcaaggggcatcttctgctcgctgctactcccggactgaacgggcagatgcctgcagctcaagaaggagccgtggccttcgccgcttgggatgatgacgaaccctggggcccctggaccggaaatgggacattctggctgcctaccgtgcagccttttcaggagggcacgtacctggccacgatacatttgccatacctccagggacaagtgaccttggaattggcggtgtataagcctcccaaggtgtccctcatgcccgcaaccctggctcgcgctgctccgggagaagctccccccgagctgctgtgtctggtctctcatttctaccccagcgggggcctggaagtcgaatgggagttgaggggcggaccgggggggagaagtcagaaggccgagggccagaggtggcttagtgctctgcgccatcattctgacgggtccgttagcttgagtggccacctacaacccccccctgtcactacggaacaacacggggcccgatatgcttgtcggatccaccatccatcgcttcccgcctccggtaggagcgccgaggtcacactggaggtggccggtctgtctgggccatctttggaggactccgtggggctgtttctctcggcatttctcttgctgggcctattcaaagctttgggatgggccgcagtctacctcagtacctgcaaagatagtaaaaagaaagccgaatag

SEQ ID NO: 137215 - DNA, 1515 bp, synthetic construct
  misc_feature 1..1515: note = Description of Artificial Sequence: Synthetic coding sequence
  source 1..1515: mol_type = other DNA
atgaagtcactgtctctgctactggccgtggctttgggcctggccacggcagtgtccgctggtcctgcggtgattgaatgttggttcgtggaggatgcttcaggcaaggggctcgcgaaaaggccaggagctctcctacttaggcagggcccaggcgagccaccgcctagacctgatttggacccagagttatatctgtccgttcatgaccctgccggcgctcttcaagccgccttccggagatatcccaggggagcccccgccccccactgtgaaatgtctaggttcgtccctctaccagccagcgcgaagtgggcctctggattgacgcctgcacaaaactgtccacgcgcgcttgacggcgcgtggctgatggtatcaatcagttccccagtgctgtccctgtccagtctgctgcgcccacagcccgaaccgcaacaggagcctgtgctgatcacaatggccactgtggtgctgactgtgctgacacatacgcccgctcccagagtcagactggggcaggacgctttattggatctctcgttcgcatacatgcctcctacttccgaagctgctagcagtctggcaccaggccctccgccatttggtttggaatggaggcggcagcacctaggcaaagggcatctactccttgccgctacacccgggctgaacgggcagatgccggctgcgcaagaaggagccgtcgcctttgccgcctgggacgatgacgaaccctggggcccatggacagggaacgggacattctggctgccgcgggtacagcctttccaggagggaacgtacctggctaccattcatctcccctacctgcaaggacaagtgaccttggagctggctgtctacaagcctcctaaagtgtccctcatgcccgctacactggcccgcgccgccccaggtgaggcaccaccagaattgctctgtctcgtctcccacttttacccaagcggagggctcgaggtcgagtgggagctgcggggaggtccaggaggccgcagccagaaagctgagggtcagagatggctgtccgccctgcggcatcacagtgatgggtcagtgagcctgagcggccacctacagcctccaccagttacaaccgagcagcacggggctcggtatgcatgcagaatccaccatccctcgcttcctgcctctggccggagcgccgaggtgacactcgaggtggcaggcctgtccgggccgtctctcgaagacagcgtcggcctctttctatccgccttcctactcctgggcttatttaaggccctgggttgggcggccgtttatctgagcacttgcaaagatagcaaaaaggtacaatgctcaacgagcctgtatctctctcttgtgaccctatctccccacccaatcagcaagcccatggaaggcggttgttggtgcggcagacagaatctgggactggaatttaccctcatttgggttaagacctggcattacattctaacggtagggctgtttgaacacgctacatag

SEQ ID NO: 137216 - DNA, 1347 bp, synthetic construct
  misc_feature 1..1347: note = Description of Artificial Sequence: Synthetic coding sequence
  source 1..1347: mol_type = other DNA
atgaagtctcttagcctcctgctcgcggtcgcactcggcctggccactgctgttagcgccgggcccgctgtcattgagtgctggtttgtggaagacgctagcggaaaggggctggcaaaacgcccaggggccttgctgctccgccagggtcctggagaacctccaccccggccggacctcgatccagaactttacctgagtgtgcatgatcctgccggcgccctgcaggctgcttttcggcgatacccgagaggagcgcccgccccccattgcgagatgtcaagattcgtacctctccccgccagcgccaagtgggcctcagggttaaccccggctcagaattgtccgagggccctagacggagcttggctgatggtgtctatctcttccccagtcctcagtttatcctctttgctgcgcccacaacccgaacctcagcaagaacccgtgcttatcacaatggctactgtggtgctgacggttctgactcatactcccgctcctcgggtccgactgggtcaagatgccctgttggacttgtccttcgcctacatgcctcctacctcagaggccgccagtagcctggcgccaggccctccgccattcggcctggagtggagaagacagcacctgggtaaggggcatctgcttttagctgcgacacccgggctgaatggtcaaatgccagccgctcaggagggagcagtggccttcgcggcatgggatgacgatgagccatgggggccctggactggaaacggtacgttttggctccctagggttcagccgttccaggaaggtacatacctggccactattcatcttccttatttacaggggcaggtcaccttagaactggccgtgtacaagccccctaaggtttccctgatgcccgctaccttggctagagctgcccctggtgaggcccctcccgaactgctctgtcttgtatctcacttctaccctagtggcggcctcgaagttgaatgggaattgagaggaggcccaggcggcagatcccagaaggcggagggtcaaagatggctgagcgcattacgtcatcattcagatggctccgtctcactctcaggtcacttacagcccccaccggttacaaccgaacaacatggggctcggtacgcctgtcgtattcaccacccttccctgcccgcgagcggccgctcagccgaggtgacgttagaggtcgccggtctatctggccccagcctggaggatagtgttggcctgttcctgtccgcttttttgctgctcgggctcttcaaagccttgggctgggctgcagtttatctctctacctgcaaagacagtaagaaaaaggcagaatag

SEQ ID NO: 137217 - DNA, 1515 bp, synthetic construct
  misc_feature 1..1515: note = Description of Artificial Sequence: Synthetic coding sequence
  source 1..1515: mol_type = other DNA
atgaagagcctgagcttattgttggcagtggcccttggacttgcgaccgcggtgagtgcaggacctgccgtaattgagtgctggtttgtcgaggacgcctcagggaagggacttgctaaacggcccggcgccctgctgctcagacaaggcccaggcgagcccccacccagacccgatttagaccctgagctctacttgtctgtccacgatccggctggtgctcttcaggccgctttcagaagatatccccggggagcgcctgccccccattgcgaaatgtcgagattcgtgcccttacccgcgagcgccaaatgggcaagtggactcacacccgcccagaactgccctcgtgcccttgatggagcatggctaatggtgagcatttctagcccagtcctcagtctctcctctctgcttcgcccacagccggaaccccagcaggagccggtccttatcacaatggcgactgtagtgctgacggtgctcactcatacccccgcgccacgggtgcggctgggccaagacgccctcttggatctcagctttgcgtatatgcctccaacctccgaagccgccagcagtctcgcgccaggcccacccccgtttggcctggagtggaggcgccagcacttagggaagggacacctgctgctcgccgccaccccaggcctgaatgggcagatgcctgccgctcaggagggcgcagtggcttttgcagcctgggatgacgacgagccttggggcccctggaccgggaatgggaccttctggctgccaagggtgcagccgtttcaggagggaacatacctggccactattcatctaccctatctgcaaggccaagtaaccttggaactggctgtgtataagccacccaaggtgtccctgatgccggctacattggcgagagcagccccaggagaggctccacccgaactgctttgtctcgtgtctcatttttatccctctgggggattggaagttgagtgggagctgaggggggggcccggtggcagaagccaaaaagccgaaggtcagagatggctgagcgctcttagacaccactccgacggctctgtgtccctgtccggccatctgcaacccccgcctgtgactactgagcagcatggagccaggtatgcgtgcagaattcatcacccgagtctgcccgcgtcagggcgttcggcagaggtcaccctagaggtcgctgggctgagtggaccaagcctggaagattccgtgggattgtttctgagcgctttcctcctgttgggcctcttcaaggccctcggatgggccgcagtgtatctgtctacatgcaaagacagcaaaaaagttcagtgcagcacctcgctgtacttgagtttagtaaccctctcgccgcatcccattagtaaacctatggagggaggctgctggtgtgggaggcagaacctgggactggagtttacccttatatgggtcaaaacgtggcactacatactgaccgtcggcctgttcgagcacgccacctag

SEQ ID NO: 137218 - DNA, 1401 bp, synthetic construct
  misc_feature 1..1401: note = Description of Artificial Sequence: Synthetic coding sequence
  source 1..1401: mol_type = other DNA
atgaaaagcctgagcctcctgctggctgtagccctgggcctcgctaccgccgtgtctgcagggccagcagtcattgagtgctggtttgtggaggacgcatcgggaaagggcttagccaagcggcccggcgcactgctgctacgacagggacccggcgagccccctcctcgtccagacctcgatccagagttgtacctttccgtgcatgaccctgcaggcgcactgcaggctgcttttaggcgataccccaggggcgcaccagctccccactgtgagatgagtagatttgtacccttgcctgcttctgccaagtgggccagcgggctgacgccagcacagaactgtccccgggccctggacggcgcctggcttatggtctctatatcatcaccagttctctcattgtcgagcctgctccgaccccagcccgagccccagcaggaacccgtgctgatcacaatggcaacggtggaaatggggttccaccacgtgggacaagccgctttagagctactgacatcagtggttctcacagtactaacacacacgcctgctccccgtgttcggctcggccaggacgccttgctggacctgtccttcgcctatatgccccctacgagtgaggccgcttcttcactggcgcccgggccaccaccctttggattagagtggcgcaggcagcacttaggaaaggggcacttactcctggccgccacccctggtttgaatggacagatgcctgccgctcaggagggagccgtggccttcgccgcttgggatgacgacgaaccctggggtccttggacggggaatggcactttctggctgccccgcgtacagccattccaggagggcacctacttggccactattcacttgccctatttacaaggtcaagtcaccttagagctcgcagtgtacaagccgccaaaagtgtccctcatgcctgctacactggcacgtgctgctcctggggaggcacccccagagctcctttgtctagtatcgcatttctacccctccggcggattggaggtcgagtgggagcttcgcggcggccctggaggcagatctcagaaagcagaggggcaaagatggctgtctgcactgcgccaccactctgatggatctgtcagcctttcaggacatctccagcctcctcctgtaacgactgagcaacacggcgcccggtatgcctgccggattcaccacccatctcttcctgccagtgggcgcagcgccgaggtgacgctcgaggtggcgggcctaagcggcccgagcctggaagattcagtgggcttgttcctgagcgcctttctcctcctcggcttatttaaggctctgggctgggccgcagtatatctgagcacttgtaaagacagcaaaaaaaaggcggaatag

SEQ ID NO: 137219 - DNA, 1347 bp, synthetic construct
  misc_feature 1..1347: note = Description of Artificial Sequence: Synthetic coding sequence
  source 1..1347: mol_type = other DNA
atgaagagcttgagccttctgcttgccgtggccctcggattagccacggcagtttcagcagggccggctgtgatcgaatgttggttcgtcgaggacgcgagcggcaaggggctggcaaaacggcccggagccttgctgctgagacaaggaccgggggaacccccgcctaggccagatctcgacccggagctgtatctctctgtgcacgatcccgcgggcgcactgcaagccgcattcaggaggtatcccagaggagctccagctccccactgcgaaatgagtcgcttcgtacctctcccagcctctgcaaagtgggcctcaggtctgaccccagcccagaattgtcctcgagccctggatggggcctggcttatggtgtctatcagttccccagtgctgtccctgtcctcattgctgcggccccagcctgaaccccagcaggagcctgtgctgatcacaatggccaccgtggtcttaaccgtgctgacacacacacctgctcctagggtacggcttggacaggacgctttgctggatctatccttcgcttacatgccaccaacctccgaagctgcgagttctttagcgccgggccccccaccctttggactggagtggaggcgtcagcaccttgggaaagggcacttactgctggccgccacgccgggactcaacggccagatgccagctgctcaggagggagccgtggcctttgcagcctgggacgatgatgaaccatggggtccgtggaccggtaatggcactttttggttgccccgtgttcagccatttcaggagggtacttatttagctaccattcacctcccctatttgcagggccaagttactttggagctggccgtctataagccaccaaaagtctccctcatgcccgccacattggcccgagccgctcctggtgaggctccgcctgagctactatgcctcgtgagtcacttctatcctagcggcggcctggaggtcgaatgggaacttcgcggcggccccggcggcagatcccagaaggcagaaggccagagatggctgagcgctttgaggcaccactctgacggctccgtgtccctgagcgggcacctccaacctcctccagtgactacagagcagcatggcgctcggtacgcttgccgaatccaccacccctcccttcctgcttctggcaggtcagccgaagtcactctcgaagtcgctgggctgtcagggcccagtttggaggactcagtgggattgttcttgtctgcctttctgctactaggcttattcaaggcgctgggatgggccgcagtttatttaagcacgtgtaaggactcaaagaagaaggcagagtag

SEQ ID NO: 137220 - DNA, 1515 bp, synthetic construct
  misc_feature 1..1515: note = Description of Artificial Sequence: Synthetic coding sequence
  source 1..1515: mol_type = other DNA
atgaagtcgctctcactgttattagccgtggccctggggctggcaactgctgtgtccgcgggacccgccgttatcgagtgctggttcgtcgaagatgcttccggcaaaggccttgcaaaacgaccaggggcgctactcctcagacagggtcccggggaaccccccccacggcctgacctggatcccgaactgtacttgtccgttcatgatccagctggggccctccaggccgccttccgccggtacccaagaggggctcccgctccacactgtgagatgagcaggtttgtcccccttccggcgagcgctaagtgggcatctggtttgaccccggcccagaactgccccagggctttggatggggcgtggctgatggtgtccattagttccccagtactttcgctctcgtccctgcttaggccgcagcccgaaccacagcaagagccggtactgattaccatggcaactgtcgttctgaccgtgctgacacatacccctgccccgcgggtccggttggggcaagatgccctgcttgacctgtctttcgcctacatgccgcctacctccgaggctgcctctagtctcgcacccgggcctccacctttcggattggagtggcgaaggcaacatctcgggaagggtcatttgctgttggccgctacccctggccttaacggtcagatgcccgctgctcaggaaggcgctgtcgctttcgccgcttgggatgatgacgagccatggggcccctggaccggtaatgggactttttggttgcctactgtgcagccattccaggagggcacctacttagctacaatccatctaccctatttacaaggccaggttactctggagctggccgtgtataaaccccccaaagtgtccttgatgccagccacactggctagagctgctccaggggaggccccacccgagctgctgtgtctagtgtcacacttctaccctagtggaggactggaagtggaatgggaactgagggggggcccaggtggccgcagccagaaagcggaaggacagcgctggctcagcgcactccgacatcacagcgatgggagcgtgtcattaagtggccatctgcagccacctcctgtcacgactgagcagcacggggccaggtacgcttgccggatccaccacccgagtctgccggcttcaggcagaagcgctgaggtaacactggaagtggctggtctttctggaccctcactggaagattccgttggcttgttcttgagcgctttcttacttttaggcctgtttaaagctcttggctgggcagcagtttacttgtctacatgtaaggatagcaagaaggtccagtgttcgacaagtctgtatttgagccttgttacgctgtccccccaccctatttccaagccgatggaagggggttgttggtgcgggcggcagaacctggggttggagttcactctcatttgggtgaaaacatggcactacattttaactgtgggcttatttgagcacgccacctag

SEQ ID NO: 137221 - DNA, 609 bp, synthetic construct
  misc_feature 1..609: note = Description of Artificial Sequence: Synthetic coding sequence
  source 1..609: mol_type = other DNA
atgaagtcgctgagtctgcttcttgccgtggctctcgggttggccaccgctgtctcagccggaccagctgtcatcgagtgctggtttgtggaggacgcttcaggcaaggggcttgcaaagcgccccggcgctctgctgctgcgtcagggccccggggagccgcctccccgcccagatctcgatccggagctctacctgtcagtacacgtggttctcacagtcctgacccacacccctgctcccagagtccgacttggacaggatgcactgctcgacttaagctttgcctatatgcctccaaccagcgaggccgcctcctcacttgccccggggccacccccctttggccttgagtggaggagacaacatttgggcaagggacatctgttactggctgccactccgggcttgaatggacagatgcccgccgcccaggagggcgccgttgcctttgctgcgtgggatgacgacgagccttggggtccctggaccggtaatggcactttttggctgccacgagtccaacccttccaggagggcacttacctagccaccattcatctcccctaccttcaagggcaggttaccctggaactcgccgtctactag

SEQ ID NO: 137222 - DNA, 1347 bp, synthetic construct
  misc_feature 1..1347: note = Description of Artificial Sequence: Synthetic coding sequence
  source 1..1347: mol_type = other DNA
atgaaaagcctgtcccttcttctcgcggtggcccttgggctggctaccgctgtatcggcgggtccagctgtgatagaatgctggtttgtcgaggacgcttccggaaaggggctggccaagcgaccaggcgccctgctccttcgacaaggacccggagagcctcccccccgacccgatttggaccccgaattgtatttgtcagtgcacgatcccgccggggccctacaagcagctttccgcaggtaccctcggggagcacccgcaccacactgcgagatgtccaggtttgtccctttgcctgctagtgccaagtgggcctcgggcctaacgccagcccaaaactgcccacgcgctctggatggcgcctggctcatggtttcaatttcttctcccgtcttatctctgtcctcactcctgagaccccagccagagccccagcaggagccggtcctgatcaccatggcaacagtcgtcttgaccgtgctgacccacacccctgctcctcgagtgcgcctgggccaggacgccctgctggatttatcctttgcgtatatgcctcctacatccgaagcagcgagctctttagcccccggcccccccccttttgggctggaatggcggcgccagcatttaggtaaaggtcacctgcttctcgctgccacccctggcctgaacggccagatgccagccgcccaagagggtgcggttgcttttgctgcctgggacgacgacgagccatgggggccctggactggcaacggtaccttctggctcccgacagttcagccattccaggaaggtacgtatctggccactatccacttaccttacttgcagggccaggtgactttggagttggccgtatacaagccacctaaagtgagcttaatgcctgctacattagccagggcggccccgggcgaggccccccctgaactgctctgtcttgtgagccatttctacccgtcaggcggcctcgaggtggagtgggagctacggggcggacccggaggccggagtcaaaaggcagaggggcagagatggctttcagcccttcgccaccactcggacggcagtgtcagtttgtctgggcacctccagcctccgccagtaacaacagagcaacacggcgccaggtacgcctgtagaattcatcaccctagcctgcccgctagcggccgctccgctgaggtgacactcgaggtggccggcttaagtgggccatccctggaagacagcgtgggcctgtttctgagcgccttcctacttctcggtctgttcaaagcgctgggctgggcagccgtctacctgagtacatgtaaagattctaagaaaaaagccgagtag

SEQ ID NO: 137223 - DNA, 1401 bp, synthetic construct
  misc_feature 1..1401: note = Description of Artificial Sequence: Synthetic coding sequence
  source 1..1401: mol_type = other DNA
atgaagtccctctccctgctcctggcggtagctctgggacttgcaacagctgtaagtgctggccctgctgtgatagagtgctggttcgtcgaggacgccagcgggaaaggtcttgctaaacggcccggtgcgctcctactgcgccagggcccaggggagcctccaccaaggccggacttggacccagagctctatctgtcagttcacgatcctgcaggggcactacaggcagcgttcagaagatatcctcgcggagcccccgcccctcattgcgagatgtcccgctttgtgcccctacctgcctcagccaaatgggcctctgggctcactcctgctcagaattgtccacgcgcgctggatggagcatggctcatggtgagcatcagctcccctgtgctgagcctgtcatctctcctgcgtcctcagccagagccacagcaggaacccgtactgataacaatggctacggtagaaatgggttttcaccacgtcggacaggccgccctggagctcctcacaagcgtcgttctgacagtgctgacacatacaccagcaccccgggtcaggctcggacaagatgctctgctggacctgtccttcgcttacatgcctcctacttccgaggccgcttcctcattggcaccaggtccaccgccgtttggcttagagtggcgtcggcagcatctgggcaaaggccatctgttactcgccgcaacccccggattgaacgggcagatgccagcagcgcaggaaggcgccgtagcttttgccgcatgggacgacgacgaaccttggggtccatggaccggcaacggcaccttctggcttccccgggtccaacccttccaggaaggcacttacctcgcgacaattcatcttccttatctgcagggccaggtgactctggagttggcagtgtataaacctccaaaggtcagtctgatgcctgccacactcgcccgggccgcccctggggaggccccacctgaattgttgtgccttgtcagtcacttctatcctagtggcgggctggaggtagagtgggagttgagaggaggtcccggaggacggagtcagaaagccgagggacagagatggctgtcagccctgcggcaccattctgatgggagtgtgtcccttagtggtcacctccagccacctccagtcacaaccgaacagcatggcgcccgctatgcatgccgaatacaccaccccagccttcctgcctcgggtcgctcagctgaggttacgctcgaagtggcaggcctgagcgggccctctttggaggattcggtgggtctgttcctgtccgccttcttgctgctcgggctctttaaggcgctcgggtgggccgccgtgtatctgtcaacatgtaaggattctaagaagaaggcagagtag

SEQ ID NO: 137224 - DNA, 609 bp, synthetic construct
  misc_feature 1..609: note = Description of Artificial Sequence: Synthetic coding sequence
  source 1..609: mol_type = other DNA
atgaagagcctatcactgcttttggccgtggcgctcggactcgcgactgccgtctctgcaggacccgccgtcattgagtgttggttcgttgaggacgcctccggcaaaggactggccaaacggcccggcgcgctgctgttgcggcagggcccaggtgagcccccgccaagacccgatctggatcccgagctttatttgagcgtccacgtcgtgctgaccgtactcactcatacacctgctcctcgcgtcaggctcggccaagatgcccttctggacctttccttcgcgtatatgcctccaactagcgaggctgccagcagtttggctcctggtccgccaccttttggactggaatggaggagacaacatctggggaaaggtcacctccttttggcggcaacccccggcctcaacggacaaatgcccgcggcacaggaaggcgccgttgcctttgctgcctgggatgacgacgaaccttggggcccttggaccggaaatggaacattctggctccccaccgtccaaccgttccaggagggaacctacctggctaccatccatctgccatatctgcagggacaagttaccctagaacttgccgtgtactag

SEQ ID NO: 137225 - DNA, 609 bp, synthetic construct
  misc_feature 1..609: note = Description of Artificial Sequence: Synthetic coding sequence
  source 1..609: mol_type = other DNA
atgaagagtctgtcccttctgcttgctgtagctctggggcttgccacggctgtgagcgccggccctgccgtaattgaatgctggtttgtagaggatgcctcagggaaagggctcgccaagaggccgggagctctgctgttaagacaaggtcccggggagccccctcccaggccagacctagaccccgagctgtacttatccgttcacgtggtgctgactgtactaacacatacgcccgccccccgggtccgccttgggcaggacgccctccttgacctctcttttgcttatatgccaccaacctccgaagcagccagctccctcgctcctggacctcctccatttgggcttgagtggagaagacagcacctaggcaaaggacacttgctgctagccgccaccccaggcctgaacgggcagatgccggccgcacaagagggcgctgtggcctttgccgcctgggatgacgatgaaccttggggcccatggacaggcaatggaaccttttggttgccaagagttcagccatttcaggaagggacatacctggccacgattcatctcccgtacctacaaggccaggtgacgctggagctggccgtgtactag

SEQ ID NO: 137226 - DNA, 609 bp, synthetic construct
  misc_feature 1..609: note = Description of Artificial Sequence: Synthetic coding sequence
  source 1..609: mol_type = other DNA
atgaagtctctgtcactgctgctggctgtggctctaggcctggccacagccgtcagcgcgggaccagcagtcatagagtgctggttcgtggaggatgcttccggaaaaggactggcaaagagacctggagcgcttctgcttcgccagggaccgggcgagcccccccccagacccgatctggatccagaactctatttgtccgttcacgtggttctgactgtcctcacccatacgccggcaccccgggtgcgactagggcaggacgctctcttagacctcagctttgcatatatgcccccaacatcagaggctgccagctcactggcacctgggcctcccccattcggtctggagtggaggaggcaacacttagggaaaggacatctgctgctggcagcgacaccaggactgaatggtcagatgcctgcggcacaggaaggggctgtcgccttcgcagcctgggatgatgacgaaccctggggcccatggaccgggaacggcacattctggctgcccagggtgcagccttttcaggaaggtacatatctcgcgaccattcacctgccctacctacaaggtcaggtgaccctggagctggccgtttattag

SEQ ID NO: 137227 - DNA, 1347 bp, synthetic construct
  misc_feature 1..1347: note = Description of Artificial Sequence: Synthetic coding sequence
  source 1..1347: mol_type = other DNA
atgaagtcactgtccctgctgctggcagtggcgctgggcctggcgacagctgtctcagctggccctgcagtgattgaatgttggtttgttgaggatgcttccgggaagggtctggctaagcggcccggagcattgctcttacgacagggacccggagagccaccccctaggccagatttagacccagagctgtatctgtcggttcatgacccagccggggccttgcaggctgcctttcggcgatacccacggggcgcccccgccccacactgcgaaatgagccggtttgttcctttgcccgcgtcagccaaatgggcgtctgggcttacccctgcacagaattgtccaagggccctggacggcgcatggctgatggtgtcaattagtagtccagttctgagtctcagctcactgctgagaccccagcccgagcctcagcaggaaccagtcctcatcacgatggcgaccgtggtgctcacagtcctgacgcataccccagcccctagggtaagactgggacaagatgccctgcttgacctttcattcgcctacatgcctcccacaagtgaggctgcatcatccctggcaccaggccccccgccttttgggttagagtggcgaaggcaacacctgggtaaaggccatttattacttgctgccacaccggggctgaacggacaaatgccagccgctcaggaaggtgccgtggcattcgcagcgtgggatgacgacgagccttggggtccctggaccggtaacggcacgttctggctgcccaccgtgcaaccattccaggagggaacctacctcgcgacgatacacttgccatatttgcagggccaggtcaccctggagctggctgtttacaagccccctaaggtttcactgatgcccgccaccctcgctagggccgcccctggggaggcacctcctgaactgttgtgcctcgtgtctcatttctacccctccggcggtttagaagtggagtgggaactgagaggaggccctgggggccgcagtcagaaagctgaaggacagaggtggctgtccgcccttcggcaccacagtgatggctctgtcagtctctcagggcacctgcaaccaccacccgttaccacagagcaacacggtgctcgatacgcctgcaggatccaccaccccagcttgccagcgagcggccgaagcgccgaggtgactctagaggtagcaggactatccgggcccagcctggaggatagcgtggggctttttctgtctgcctttctgcttttgggtttgtttaaagcactcggttgggcagcagtatatctgtctacgtgcaaggacagcaaaaaacatgctacctag

SEQ ID NO: 137228 - DNA, 1515 bp, synthetic construct
  misc_feature 1..1515: note = Description of Artificial Sequence: Synthetic coding sequence
  source 1..1515: mol_type = other DNA
atgaaaagccttagcctcctgctggcggtagctctaggactggcgaccgcagtgtcagctgggcctgccgtgatcgaatgttggttcgtagaggacgcatctggaaagggactggctaaacgccccggagcactgttgttgcggcagggacccggcgagccaccccctagaccggacttggatcctgaactctatctttctgtccacgatcccgccggagcgctccaggccgctttccgcagatatcccaggggggcccccgcgccccactgtgagatgtctcgttttgtgccactgcctgcgagcgccaaatgggctagcggtctcactccggcccagaactgtcctagggctctggacggggcatggctgatggtgagtatatcttcaccagtactgagcttatcatctttgctccgtcctcaacccgagccacagcaggaaccggtgttaattacaatggctacggtggtgttgacagtactgacacataccccggcacctagagtgcggctgggccaggacgcactcctggatctaagctttgcttacatgccacccacaagtgaagccgcctctagccttgctcccggcccgccacctttcggccttgaatggcgacggcagcacctgggaaaaggacaccttctactggccgcgactccaggactgaatggtcagatgcccgctgcccaggaaggtgcggttgcttttgccgcctgggacgatgacgagccatggggcccatggacagggaacggcactttttggctacctagagtgcagccctttcaggagggaacgtacctcgccacaatacacctcccttacctgcagggccaggtgactctagagctggcagtgtacaaaccgcccaaggtgtcccttatgccggctaccctggcacgggccgcacctggggaagccccccctgagctcctttgccttgtctcccatttctatccatccggtggtctcgaggttgaatgggagctgcggggaggccccggtgggcggagtcagaaagctgaagggcaaaggtggctgtcagcactgcgccatcatagcgatggcagtgtgagtctgtctgggcaccttcagccccctcctgtcacgactgagcagcacggggctcggtacgcttgccgcatacatcacccctccctgcctgcttcggggagatccgcggaagtcacgctcgaggtagcgggcttatctgggccctctctggaagactccgtggggctgtttctgtctgccttcctcttacttggtctgtttaaggcattggggtgggctgccgtgtaccttagcacatgtaaagatagtaagaaagtgcagtgctctacttcattgtatctgagccttgtgaccctgtctccccaccctatctccaaacccatggagggggggtgttggtgcggccggcagaacctggggttggagtttacactaatttgggtcaagacatggcattatatccttacagtcggtctattcgaacatgccacctag

SEQ ID NO: 137229 - DNA, 471 bp, synthetic construct
  misc_feature 1..471: note = Description of Artificial Sequence: Synthetic coding sequence
  source 1..471: mol_type = other DNA
atgaaaagcctgtcactgcttctcgcagtggcactcggcctagccaccgcagttagtgcagggcctgccgttattgagtgctggtttgttgaggatgcatccggaaaaggcttggctaaaagacctggagccctcctgttacgacaaggccccggagaacccccaccaagacccgacctggatcctgagctttacctgagcgtgcatgaccccgcgggcgcgctccaggcagcctttcggaggtaccctaggggcgcaccagccccccactgtgaaatgagccggttcgtgccgctgcccgcttccgccaaatgggcaagcgggcttactccggctcagaactgtcctagggccctggacggagcgtggctgatggttagcatttcttctatggggcacgccatgcccgttgagtttaccattcccgcgtgcttaccacgcggggccgccctccgttctccttggagatag

SEQ ID NO: 137230 - DNA, 1401 bp, synthetic construct
  misc_feature 1..1401: note = Description of Artificial Sequence: Synthetic coding sequence
  source 1..1401: mol_type = other DNA
atgaaatcactaagcctcctgcttgctgttgctcttgggttggccacagctgtgagcgccggtccagcagttatcgagtgctggtttgtggaagatgcatcagggaaaggcctggctaaaagaccaggcgctcttctactgagacagggtccaggcgagccccctcccaggcccgatctcgatcccgagctgtatctgtcagtccatgatcccgctggtgctctccaggccgcatttcgacgttatccgagaggtgcccctgccccccactgtgaaatgtcccggtttgtgcccctccccgcatctgccaagtgggcctcaggcttaacccctgcacagaactgccctcgggccctggacggagcttggctcatggtatccatctcttcccccgtattgtctctgtccagtctcttgcgcccacaaccagaaccccagcaggaaccagttctgattaccatggcaacagtcgaaatgggatttcatcacgtcggacaggcggccctagaactgctgaccagcgttgtgttgaccgttctgacgcatacccctgccccaagggtccgcctggggcaggatgctctgctggacttgtcctttgcttatatgcccccgacttccgaagcggccagttctctggcccctggtcccccaccgtttggactggaatggaggcgccaacatctgggcaagggacatcttctcctggctgccacacccggactgaacggccagatgcccgccgcccaagagggggccgtcgcttttgctgcctgggacgacgatgaaccatgggggccttggacagggaacggtaccttttggctgcccaccgtccagcccttccaggagggaacctatcttgccaccattcacctcccttatctgcagggccaggtcacattggaacttgcagtctacaagcctcccaaagtgtccctgatgccagctaccctagcacgcgctgctccgggggaggctccccctgagttactctgtctcgtttctcatttctacccatcaggcgggcttgaggtggaatgggagctcagaggaggtccggggggacgctcccagaaagctgaagggcagagatggctttccgcactcagacaccactctgatggcagtgtgagcttatctggccacctccagccccctccggttacaacagagcaacatggtgcccggtatgcttgtcgcatacatcatccatctctgcctgcctcagggcgatctgcagaggtgaccttggaggtcgctggattgagcggtccgtctctggaggattccgtgggcctcttcctcagtgctttcctgctgcttggcctgtttaaagcgctgggttgggccgccgtctacctgtcaacatgcaaggattctaagaagaaagcggaatag

SEQ ID NO: 137231 - DNA, 1086 bp, synthetic construct
  misc_feature 1..1086: note = Description of Artificial Sequence: Synthetic coding sequence
  source 1..1086: mol_type = other DNA
atgaagagcctgtcactgctcctagccgtggcgctgggtctcgctactgcagtgagcgctggcccagcagttatagaatgttggttcgtggaggatgctagtggcaagggattggctaaacggccaggagccctcctactacggcagggaccaggcgagccgcctccccgacctgatttggatccagagctttacttgtcagtgcacgttgtcctgactgtcttaacccacactccagcaccccgggtgaggctgggtcaggacgcgctactggacctgtcattcgcctacatgccgcctactagtgaggccgctagctctctcgctccaggccctcctccatttgggctggagtggaggagacaacacttgggcaaaggacacttgttactcgctgcgacgccaggcctgaatggtcagatgccagcggcacaggaaggcgccgtcgctttcgccgcctgggacgacgatgagccttgggggccatggactggtaacggcactttctggttacccaccgtacagccctttcaggagggcacttaccttgctaccattcacctgccttatctgcagggccaagtgacgctggagctcgccgtgtataagccacccaaggtctctctcatgcccgccaccctggctcgggccgctccaggggaggcacctccggagttgttgtgcctagtaagccacttttacccaagcgggggactagaggttgaatgggagctccgcggggggccaggcggaaggagccagaaggccgaggggcagagatggctctcagccctccgccatcattctgatgggtcagtgagccttagtggccatctgcaacctccacctgttacaactgaacagcatggggcccgttatgcctgcaggatccaccatcctagcctccccgcctctgggaggagcgcagaggtgacactggaggttgccgggctatctgggccttctctggaggacagcgtgggactgtttctctctgcctttctgcttctgggtcttttcaaggccctcggatgggctgccgtgtatctgtctacctgcaaggattctaagaagaaagctgagtag

SEQ ID NO: 137232 - DNA, 1347 bp, synthetic construct
  misc_feature 1..1347: note = Description of Artificial Sequence: Synthetic coding sequence
  source 1..1347: mol_type = other DNA
atgaagtctctcagtttgctcttggcagtagccctcggcctggccacagccgtgagcgcaggacccgccgtgatcgagtgctggtttgttgaagatgcatcaggtaaggggctggctaagcgccctggtgctctcctgctgcgccagggcccaggagagccaccccctcgcccagatctcgaccccgagctgtatctgtccgtgcacgatcccgccggtgctctgcaagctgctttcaggaggtacccaaggggcgcacccgcaccacactgcgaaatgtcaaggttcgtcccattgcctgctagcgctaaatgggctagtggccttactcccgcgcagaactgtcctcgggctttagacggagcctggttaatggtttccatttctagtccagtattatctctgagttctctccttcggccccaaccagaaccccaacaggagcctgtcctcataaccatggccacagtggtcttaactgtgctgacccataccccagcaccccgcgtccgcctagggcaggatgccctgctggatttgtccttcgcttatatgcctcccacttcagaggcagcctcaagtctggctccaggtccacctccttttgggctcgagtggcggcgtcaacacctgggcaaaggccaccttctgctggccgcaacccctggattgaatggccaaatgccagctgcgcaagagggcgctgtcgctttcgcagcttgggatgacgatgagccctggggtccctggaccgggaatggtactttctggctgcccaccgttcagccgtttcaagagggcacataccttgccactatacaccttccgtatctgcagggtcaagtaactttggaactggcagtgtacaagcctcctaaggtctccttgatgccagccactctggccagagccgcacccggagaggcccccccagaattgctctgcctggtttcccatttttacccttcagggggtctcgaagtggaatgggaactccggggcggacccggggggagaagccaaaaagcagagggacagcggtggctgagcgccctgcgccatcactcagatggatccgtttctctgagtggccatttgcagcctccaccagtcaccacggagcagcacggagctaggtacgcctgtcgtatccaccacccgtctcttcctgccagtggccgcagcgcagaggtgaccctcgaggtggccggcttatccggacccagcctcgaggattcagtgggactgttcctgagtgcctttttattactgggtctgtttaaggcactgggctgggccgcagtctacctgtcaacttgtaaggacagcaagaagcacgcgacttag

SEQ ID NO: 137233 - DNA, 471 bp, synthetic construct
  misc_feature 1..471: note = Description of Artificial Sequence: Synthetic coding sequence
  source 1..471: mol_type = other DNA
atgaagagtcttagtctgctcctggcagtagctctcggacttgccaccgcagttagtgccggtcccgcagtaattgagtgctggtttgtggaggatgcaagcggtaaaggactggctaaacgacccggagcactcctccttcgccagggtcccggagaaccccccccacggccagacttagaccccgagctatacctttcagtgcacgatcccgccggcgccctccaggccgcatttaggaggtacccccgtggggctccggcgcctcattgtgagatgagtaggttcgtgccactgcccgcgagcgcaaaatgggcgtcaggcctcacaccagcccaaaactgtcctagagccctggatggcgcgtggcttatggtcagcatcagctctatgggtcacgcgatgcctgtcgagttcacaatcccagcctgcctcccccggggagccgccttgcggagtccatggcgttag

SEQ ID NO: 137234 - DNA, 1086 bp, synthetic construct
  misc_feature 1..1086: note = Description of Artificial Sequence: Synthetic coding sequence
  source 1..1086: mol_type = other DNA
atgaagtccctgtctcttctcctggccgttgccctggggctggctactgccgtgtctgccggacctgcagtcattgaatgttggtttgtcgaggacgcaagtggaaagggactggcaaagcgacctggggcgcttctgctgcgccaggggcctggcgaacctccccctaggccggatctagaccctgagttgtacctgtctgtgcatgtcgttctcacagtcctcactcataccccagccccacgagtgcgcttggggcaggacgcactgctggatctatcattcgcttacatgccgcccacctctgaggccgcatcatccctcgccccgggccctcctcccttcggcctagaatggcgtcgccaacacctgggtaaaggacacctcctgctggctgcgactcccgggcttaatggccaaatgcctgcagcgcaggagggggctgtcgcgttcgctgcgtgggatgatgacgagccttggggaccttggactggcaatggcactttctggctgcctagggtccagccttttcaagaagggacgtatctggccacaatccacctaccttacctccaggggcaggtgaccctggagcttgcggtgtacaagccacccaaagtcagcctgatgccggccactctggctcgagctgcacccggcgaagctcctccagagctcctctgcctggtcagccatttctatccgagtggaggcttggaggttgagtgggagctgcgcggaggccccgggggaagaagccagaaggcagagggccagaggtggctctccgcactgagacatcactccgacggatcagtgtccctgtctgggcatttgcagcccccgcctgtcactaccgaacagcatggggcccgatatgcgtgtcgtatccaccacccgagcttgcctgcctctggacggtctgcggaggtaactctggaagtggcggggctgagtgggccctccctggaggattctgtcgggctttttttatctgcattcctgttgcttggactattcaaagcgcttggatgggccgcagtatatctctccacttgcaaggatagcaagaagcatgctacctag

SEQ ID NO: 137235 - DNA, 1347 bp, synthetic construct
  misc_feature 1..1347: note = Description of Artificial Sequence: Synthetic coding sequence
  source 1..1347: mol_type = other DNA
atgaagagtttaagtcttctgcttgctgttgcgcttggcctggcaacagccgtgtccgccgggcccgcagtcatcgagtgctggtttgttgaggacgcctcgggtaagggcctcgcgaagcgccccggcgcactgctccttcgacagggacccggagagccgccaccaagacccgacctggatccagaactttatttgtcagtgcatgatcctgccggtgcactccaggcggcttttcggaggtatccaaggggggcccctgccccacactgtgaaatgagcaggttcgtccctttgcctgcctctgctaagtgggcaagcggactcacccctgcacagaactgcccgagagctctggacggggcctggctgatggtgtctatatccagtccagtgctgtcgctctccagcctcctgagacctcagccggaacctcagcaggagccagttttaattaccatggcaaccgtcgtcctgactgtattgactcacacacctgccccccgggtgcggctcggccaggatgccctgctagatttgagttttgcttacatgccaccaactagtgaggccgcttcttcactggcccccggcccgccgccttttggtttggaatggaggagacagcacttgggcaagggacatctgcttctggccgctacccccggcctcaatggtcaaatgcccgccgcccaggaaggcgccgtggcctttgcggcgtgggatgacgacgaaccatggggcccctggacgggtaacggcaccttctggttacctagggtgcaaccttttcaggagggaacctaccttgcgaccatccacctcccatatctgcagggtcaggtaaccctggagctagccgtgtataagccacctaaggtcagcttaatgcccgcgaccctggcaagagctgctcctggagaggcgcctcccgagctgctgtgtctggttagtcatttctatccgagcggcggattggaagttgagtgggagctccgggggggccccgggggtagaagtcaaaaggcagaggggcagagatggctttccgcacttcggcatcattccgatggctcggtctcactaagtgggcacctgcaacctccccctgtcacgactgagcagcacggtgctcgctatgcttgcaggatacaccatccttctctgcctgcttccggcaggagcgcagaggtgaccttggaagttgccggactgtccgggcccagcctggaagacagcgtcgggctgttcctgtccgcgtttctgctgctggggcttttcaaggcgctgggctgggcggccgtgtacctctctacatgtaaagactccaaaaagcacgcaacttag

SEQ ID NO: 137236 - DNA, 1086 bp, synthetic construct
  misc_feature 1..1086: note = Description of Artificial Sequence: Synthetic coding sequence
  source 1..1086: mol_type = other DNA
atgaaatccttgtcactcctgcttgccgtggccctcggacttgcaaccgccgtctccgccggcccagctgttatagaatgctggttcgtagaggatgcgtcagggaaaggtctggcaaaaagaccaggagctctgctgttaagacagggcccgggtgagccacctcctagaccagacctggacccagaactatatttgagcgtgcacgtagtcttaactgtccttacccatacacctgcacctcgagttaggctaggccaagatgctctcctcgacctgagtttcgcctatatgccccccacttcagaagccgcttcatctctcgcacccgggccacccccctttggattagagtggcgacggcaacatctcggaaagggccaccttttgcttgcagctacccctgggctgaacggccaaatgccggctgcccaggaaggtgcagtggccttcgctgcttgggacgatgatgaaccatggggcccatggactggaaatggtaccttctggctccccagagtccagccttttcaagaaggtacctatttagccaccatccacctgccatacctgcagggtcaagttactctggagctggcagtgtacaaacctcccaaggtctcgttgatgcctgcaactctcgccagagctgcacccggagaagctccacccgaattgctgtgcttggtttctcacttctacccttcaggcggactcgaagtggaatgggagttacgcggtggtcctggaggcaggtcacaaaaggccgaagggcagcgctggttgtctgctctccgtcatcactccgacggctccgtgagtctgagcgggcaccttcaaccacctcctgttactaccgaacaacatggcgcaaggtacgcatgtaggatccatcatccctccctgccggcatctggcaggtctgcagaggtaaccctggaggtcgccggcctgtcaggtccttcactggaagattctgtcggcctctttctatctgctttcttgttgttgggactctttaaagccctcggttgggctgccgtgtacctctctacatgcaaagactctaaaaagcatgcaacatag

SEQ ID NO: 137237 - DNA, 471 bp, synthetic construct
  misc_feature 1..471: note = Description of Artificial Sequence: Synthetic coding sequence
  source 1..471: mol_type = other DNA
atgaagtccctgagcctgctactcgccgttgccctgggcttggccacggcagtatccgcgggtcctgctgtgattgaatgctggtttgtggaggacgcaagcggaaaagggctggctaaacggcccggagccttactgctgagacaggggcctggggagcccccaccgcggcccgatctagaccctgagctctacctcagtgtgcacgatcctgcgggcgctctgcaggcagcattcaggcgttaccctagaggtgctccggcgcctcactgtgagatgagccggttcgtgccactgcccgcttcggcaaaatgggcatcgggattaaccccagcacagaactgcccccgtgctctggatggggcatggttaatggtatccataagctccatggggcacgcaatgcctgtcgagttcacaatccctgcctgtctccctcggggagctgccctgaggtctccttggagatag

SEQ ID NO: 137238 - DNA, 1347 bp, synthetic construct
  misc_feature 1..1347: note = Description of Artificial Sequence: Synthetic coding sequence
  source 1..1347: mol_type = other DNA
atgaaatcacttagtctcctgctcgccgtggctttgggactggcgacggccgtttccgctggccccgctgtgatagaatgctggtttgtggaagacgcaagcgggaaaggcctcgcgaagagacctggcgcgttgctactccgccagggtccgggggaaccccccccaaggcccgatctggatccagaactataccttagtgtacacgacccagcaggcgccctgcaggcggcttttaggcgctatccacggggggctccagccccgcactgtgagatgtcccgattcgtgccattacccgccagtgccaagtgggcatcaggactgacaccagcacagaactgtcctcgagccttggatggagcatggctgatggtatcgatatcgtcaccagtcttgagtctctcttcactgctgaggccacagcccgagcctcaacaggagcctgtgctcatcaccatggccaccgttgtcctaactgtcctgacacacacaccagcacctagagtgaggctaggacaggatgccctgctcgatctctcatttgcctacatgccaccaacaagcgaagcagccagctcactggcaccagggccaccccccttcgggcttgaatggcggcgacagcatttaggaaaaggtcatcttctcctggcagctacgccgggcctgaacggccaaatgcctgcagcccaagagggcgcagtggcttttgccgcctgggacgacgacgagccttggggaccatggaccggtaatggcactttttggcttcctcgagtgcaaccttttcaagagggtacgtatttagctaccatacatctaccctacctccagggacaggtcacgttagaactggctgtgtataaacctccaaaagtgtctctcatgcccgctaccctggcccgggccgcgcccggggaggctccccccgagcttctatgtctggtgtctcacttctatccatcaggcggcctggaggtagagtgggagctccgcggagggcctgggggacgatcacagaaggccgaagggcagcggtggctttcagctctccgccatcactcggatgggtctgtcagtctctcaggccacctgcagcctccgcctgtcacaacggagcagcatggtgcgagatatgcttgtagaatccatcaccctagtctccccgcctccggtcggagtgctgaagttactttggaggtggcaggacttagcggtccctcactcgaagacagcgtcggcttgtttctatccgcatttctgctcttgggactgttcaaagcactcggatgggctgccgtctacctctctacctgcaaagactctaagaagcatgccacttag

SEQ ID NO: 137239 - DNA, 1086 bp, synthetic construct
  misc_feature 1..1086: note = Description of Artificial Sequence: Synthetic coding sequence
  source 1..1086: mol_type = other DNA
atgaaatcattatcactgctgttagcggtagccttgggcctagccacagcagtttcagccggcccagccgtcatcgagtgctggtttgttgaggacgctagcggaaaagggctagcgaaaaggccgggggcactgctgctgaggcagggccctggagagccaccaccccggcccgatctggacccggagctgtacttgtccgttcatgtcgtgctgaccgtgttgacccacacgcctgcccccagagtccgactggggcaagatgccctgctcgacctctcttttgcctacatgccccccacttcagaagctgccagctcactcgctcctgggcctcccccctttggcttagagtggcggcgccagcacctgggtaagggccatctgctgctggcagccaccccaggattaaatggccagatgcccgccgcccaggagggtgccgtggccttcgcggcctgggatgacgacgagccatgggggccctggacaggcaatggaacgttttggctgcccacggtccagcccttccaagagggcacttatctcgccacaattcatctgccctacctgcagggtcaggtgactctggagttggctgtgtataaacctcccaaggtctcgctgatgccagcgacattggcaagagccgcccctggcgaggccccacctgagctcctctgtcttgtctcacacttctatccgtccggtggcttggaagtggaatgggaacttaggggaggccctggcggcaggtcccagaaggctgaggggcagagatggctctccgctctaaggcaccatagcgatgggtccgtgtctctgtcaggtcaccttcagccgccccccgtgacaaccgagcagcatggagctcgatatgcatgtcgaattcaccaccctagcctgcccgctagcggcagatccgcggaagtaaccctggaggtggccggattgagcggaccctcactggaggactctgtgggactgttcctgagcgcgtttctcctcctcggactcttcaaggctcttgggtgggccgctgtgtacctttcgacctgtaaagattctaaaaagaaggcagagtag

SEQ ID NO: 137240 - DNA, 1347 bp, synthetic construct
  misc_feature 1..1347: note = Description of Artificial Sequence: Synthetic coding sequence
  source 1..1347: mol_type = other DNA
atgaaaagcctaagtctgttgctagccgtcgcactgggcctggcaactgcagtgagcgctgggcctgctgtcattgagtgctggttcgtcgaggacgcaagtggaaaaggactcgccaagcgccctggcgcgctcctccttcggcagggacccggggagccacctccaaggcccgacctggaccccgagctctatctgtccgtccacgaccccgcaggcgcacttcaggctgcttttcgccgctacccccgtggagctcccgccccgcattgcgaaatgagtcgcttcgtgccactccccgctagcgcaaagtgggcttctggcctcacccctgctcaaaattgtccaagggcccttgatggagcgtggcttatggtcagcatatcctccccggtgctctccctatcctccctcttaaggccacagccggagccgcagcaggaaccagtcctgataaccatggcgacagtggtactgactgtcctcacccacacaccagctcctagggtgagactcggacaggatgccctgttggacctgagcttcgcctatatgcctccaacttcagaagcagcatccagtcttgcccccggcccacccccgttcggcttggagtggcgccggcaacatctgggaaagggtcatcttctgctcgccgccacacccggattaaacgggcaaatgcccgccgcccaggagggcgccgttgccttcgcagcatgggatgacgatgagccttggggcccctggactggaaacggaacattctggttgccccgtgttcaaccatttcaagaggggacctatttagccaccatccacttaccatacttgcaggggcaagtgaccctggaactggcggtttacaagccgcctaaagtcagcctgatgcccgctactttggctcgtgcggccccaggagaggcgccacccgagctgctctgccttgtgtctcatttctatccttccgggggactcgaagtggagtgggagctcagaggcggacccggaggacgcagtcagaaagccgaagggcagcgctggcttagtgctttgaggcaccattccgacggatccgtgtcgctatccggacacttgcaacctccacccgtaacaacagagcagcatggggcccgctatgcctgtcgcatccaccatccttcccttcctgcctcaggtagatccgcggaggttactttagaagtggccggcctgagtggcccctctcttgaggacagtgtgggactgtttctgtcagccttcctcctcctgggactgtttaaagcgcttggatgggccgccgtgtatctgtcgacgtgtaaagattcaaaaaaacatgctacctag

SEQ ID NO: 137241 - DNA, 1086 bp, synthetic construct
  misc_feature 1..1086: note = Description of Artificial Sequence: Synthetic coding sequence
  source 1..1086: mol_type = other DNA
atgaagtctttaagcctcctccttgccgtcgccttggggctggccactgcagttagcgccggtccggccgtcattgaatgctggttcgtagaagacgcgtcgggtaaaggccttgcgaaaagaccaggagccttgcttctgcgtcaaggacccggagagccccccccaagaccagacttggatccagagttgtacctcagtgtccacgtggttctgacggtcctgacacacacaccggcccctcgcgtccggctcggccaggatgcactccttgacctcagtttcgcctatatgcctcccacttcggaggctgcgtcctcactagccccagggccaccccctttcggtctagagtggagacgccagcatctgggtaaagggcatctccttctggccgcaacacccggccttaatggtcagatgccagcagcacaggagggggcagtggccttcgccgcctgggacgacgatgagccttgggggccatggacaggaaacggtaccttttggctgcctagggttcaaccattccaggaggggacatacctggctactattcacttgccttatctgcagggccaggttactctcgaattagcggtgtataaaccccctaaggtgtcccttatgcccgcaacactggctcgggcagcccccggagaagcaccgcccgagctgctgtgcctagtcagccatttttaccccagtggtggcttagaagttgaatgggagctcagagggggcccgggagggcggtcacagaaggctgagggacaacgttggctcagtgccctgcgacaccacagcgacggctcagtgagcttatccggacatcttcaacctcctccagtcaccaccgagcagcatggggcacgatatgcatgccggattcatcaccccagccttccggcaagtgggcggtcggccgaggtcaccctggaggtggctgggctatccggaccttctctagaggactcagtaggcttatttctgtctgctttcttgttgcttggcctcttcaaagcccttggctgggctgcagtgtacctctccacatgcaaagattccaaaaaacatgcaacatag

SEQ ID NO: 137242 - DNA, 2037 bp, synthetic construct
  misc_feature 1..2037: note = Description of Artificial Sequence: Synthetic coding sequence
  source 1..2037: mol_type = other DNA
atgctgctggaggctgagcgcagaagaggaggaggggccgccggcgcacggttactcgagagatatcgccgtgtgcccggggtgagggcactgcgcgccgactctgtactaatcattgaaaccgtgcccggtttccctcctgctccccctgcaccgggggccgcccaaattcgggctgctgaggtactcgtgtacggagcaccacccggccgcgttagtcgccttctcgaaaggtttgacccaccggccgcaccccggcggcgggggtccccagagagagcccgtccccccccaccgcctccacccccagctccgcctagacctccacctgctgccccttccccaccagcggcgcccggccccaggggcggaggagcttccccaggagccaggcggtcggacttcctccagaaaaccggtagcaacagttttacggtccacccccgcggcttgcacagaggagccggcgcacgccttctaagcaatggccacagcgcacccgagccacgcgccggccctgctaatcgcttggccgggtccccccccggctcaggccagtggaagccgaaggtggaaagtggagacccctctttgcacccccccccttcacccggcacccccagtgctacacccgcctcgccacctgcctctgccaccccgagccagcgacagtgtgtgtcagccgctacatctactaatgactcctttgagattagaccggcccctaaacccgtgatggagactattcccctcggagacttgcaggccagggccctggctagcctgcgggctaactcacgcaacagcttcatggttatccccaaatctaaggccagtggagccccacctccagaggggcgccagagcgtcgaactaccaaaaggggacctaggtcccgctagccccagccaagaactgggtagccaacccgtaccagggggggacggagctcccgcattgggcaaatcacccttagaagtagaggcccagtgggcagtggaggagggagcgtgtccccggacagccacggctcttgccgaccgagctataaggtggcaaaggccaagctcccccccaccattcctgcccgccgcttctgaagaagcagagcccgccgaaggcttgcgggtacctggattagctaaaaattcacgggagtatgtacggcccggcctgccagttacttttatcgacgaggttgattctgaagaagccccccaagctgcaaaactcccttacctgcctcatccggctcggcctctgcacccagcgcgccccgggtgcgtggctgagctgcagcctcggggtagcaacacattcacagtagttccgaaaagaaagcccgggaccctgcaagatcaacacttcagtcaagctaatagggagcctaggcccagagaagcagaggaagaggaggctagctgcctgttaggcccaaccttgaaaaagcgataccccaccgtccacgagatcgaagtgataggcggctacctggctctccaaaaatcatgtttgacgaaggccggcagctcccggaagaagatgaaaatctctttcaatgacaagtcgcttcagactacctttgagtacccgtccgagtctagcctcgaacaggaggaggaggtggatcaacaggaggaagaggaagaagaggaggaagaagaggaagaagaggaggaaggctctgggtccgaggagaagccattcgcattgttcctgccccgggcgacatttgtaagcagtgtgagacccgagagtagtcgcctccccgagggttcctccgggctgagctcctacaccccgaaacactccgtcgcttttagcaagtggcaggagcaggcgttggaacaggcgcctagggaagcagagcctccccccgtggaagcaatggtcaggtgcggaggagtggagcggtggggggagtccgataccagggcatccccttgcgtgcacatcctgtcatcccatttccaactcacacccgcatctcaaaatgacctgtctgacttcagatctgagcccgccctgtatttctag

SEQ ID NO: 137243 - DNA, 2136 bp, synthetic construct
  misc_feature 1..2136: note = Description of Artificial Sequence: Synthetic coding sequence
  source 1..2136: mol_type = other DNA
atggcagccttggggagaccaggaagtgggccccgggcagccgtcccggcctggaaacgggaaatcctcgagcgcaagagagcgaagttggctgccttaggtggcggggctggtcctggcgctgctgagccagaacagcgcgtgctggctgaatctttggggcccctgcgcgagaatccttttatgctcctggaggcggagcgtcgacgtggcggcggagcagccggtgctcgcctccttgagaggtataggcgcgttccaggtgtgcgggcgctcagggccgacagtgtgttgatcatcgagacggtgcctggctttccaccagcacctccagcccccggcgctgcccagatcagggctgccgaagtgctggtctacggtgcccctcctggtagggtcagccggctgcttgaacgattcgaccccccggcagcgccccgccgccgagggagtccggaacgagctaggccccccccccccccaccccctcctgcccctcccagaccaccccccgcggctccatctccacccgctgccccaggacctaggggcggtggcgccagtcccggggctcgcagaagtgattttctacaaaaaaccggcagcaattccttcacggtgcacccaagagggctgcaccggggtgccggggctcggctgctgtccaatgggcattctgccccagagccacgcgctggtcctgccaacaggctcgctggttccccgcctggaagtggacagtggaagccgaaggtggaatcgggagatccgtcccttcatccacctcccagtcccggtacaccctccgccacccccgcaagcccacctgcctctgccacaccttcccagagacagtgcgtttctgccgctacatccacgaatgatagcttcgaaatcagaccagctcccaagcctgtcatggaaacaattcccctgggagatctccaggcccgggctctggcatccctcagggctaattctcgcaactcttttatggttattccaaagagcaaggcctcgggggctcctccccccgaaggtcgtcagtcagtggagctgcctaagggcgatttgggacccgcaagtccctcgcaagagcttggaagccagcctgtgcccgggggagacggtgcgccagccctcggcaaatcacccctggaggtggaagcccaatgggcggtcgaagagggtgcctgtcctcggactgcgaccgctcttgcagaccgagccattagatggcagcgcccctcaagccccccacccttccttcccgctgcctctgaggaagctgaaccagcagagggtctgagagtgccaggtctcgctaagaactccagggaatacgtgcgtcccggactccctgtgacttttatagacgaggtggattcggaagaagccccgcaggccgctaagcttccatacctgccgcatccggctagacctctgcatcctgccagaccagggtgcgttgcagaacttcagcctaggggttccaacacctttactgtggtacccaagaggaaaccaggtaccctgcaagatcagcacttcagccaggcgaatagagaacctagacccagggaagccgaggaggaggaggccagctgtctgctgggcccgactttaaagaagcgctatcctaccgtgcatgagattgaagtgattggcggttacctggcacttcagaaaagttgtttaacaaaggccggctctagtcggaaaaaaatgaagatcagcttcaacgacaaaagcctgcagacaaccttcgagtacccatctgagtccagtctggagcaggaggaggaggtggatcagcaggaagaggaagaggaggaggaagaagaagaagaggaagaagaagagggctctggcagcgaggagaagccgttcgccttatttctgccccgcgcaacatttgtgtcctccgtgaggccagaatcatcacggctgcccgaagggagcagcggactctcctcgtacactcctaagcacagcgtagcattttccaagtggcaggagcaggcactggaacaggctcccagagaagccgaaccaccacctgttgaggctatgctgactcctgccagtcagaacgatctatccgattttaggagtgaaccggccttgtacttctag

SEQ ID NO: 137244 - DNA, 4866 bp, synthetic construct
  misc_feature 1..4866: note = Description of Artificial Sequence: Synthetic coding sequence
  source 1..4866: mol_type = other DNA
atggagtgggtgctggcagaggctttactctcccagtctcgcgatccacgagcactgttgggagcactgtgtcagggcgaagcatcggctgagcgcgtagagaccctgcgctttctgttgcagagacttgaagatgaggaagctagaggaagtgggggggcaggcgccttgccggaagccgctcgggaggtcgctgcggggtacttagtgccattattacgatctctccgggggagacccgccgggggaccagatccatccctgcagcccaggcacagacggagagtgctcagggccgccggtgcagcgctgcgctcctgtgtgcgcctggctggacgtccacagctcgcagctgccttggcagaggaggccctgagagatctgctggccgggtggagggctcctggtgctgaggccgcagtggaagtgctggcagccgtcggtccttgtttgcgcccccgggaggacggccctttactggagcgcgtcgctggcaccgctgtagcccttgcgttagggggaggtggtgacggtgacgaggccggtcccgccgaggatgccgcagccctcgtggccggaagactcttgccagttcttgtgcagtgtggtggcgccgccttacgagcagtttggggcggactagccgctccgggggcttccctcggctccggtcgagtggaggaaaaactgctcgtgttgagtgcactcgccgagaagttactacccgagccaggaggagacagagctcgcggtgccagggaggctggtcctgacgcacggcgctgctggcggttctggagaacagtgcaggcaggtcttggccaagcagatgctctcacacgcaaacgcgccagatacttattgcaacgggccgtggaggtcagcgctgagttgggagccgattgtacatgcggacctcaggaaggaaatggaccgtcgctgttctggtggagcgagaggaaaaaggacgagcttttaaagttctgggagaactatatcctcatcatggagacgttagagggcaaccagatccacgtaatcaaaccagtgctgccaaaacttaataacctgtttgaatacgccgttagcgaagagaacgggtgttggctgtttcatcccagctggcacatgtgcatatacaagaggatgttcgagagcgaaaacaagatcctgtctaaggaaggagtgattcatttcctcgagctgtacgaaacaaaaatattgcccttttctccagagttctctgagtttatcattgggcccctgatggacgcactgagcgagagttctctgtattccaggagtcctggccagccaattggctcttgctctccattgggcctcaagctccagaagtttctggtgacatacataagcctcctgcctgaagagattaagtcgtcatttctgctgaagtttatccggaaaatgacctcccgacactggtgtgcagttcccattctgttcctgagtaaggctttagccaacgtgccccgtcacaaggccctgggtatagacggtcttctcgccttaagagatgttatacactgtaccatgattacacatcaaattttattgcggggagctgcgcagtgctacttgctccagactgccatgaatctgctagatgtagaaaaggtaagtctgtctgatgtcagtacctttttaatgtctttaaggcaggaggaatctctcggacggggcacgtccctttggaccgagctctgtgactggcttcgcgtgaatgaatcatatttcaagcccagccctacctgttcttctattggattgcacaagacctctctgaatgcatatgtgaaatccatcgtccaagaatacgtgaagagctctgcctgggaaactggggagaattgtttcatgccagactggttcgaagcaaagctggtgagtcttatggtcctgctggccgtggatgtcgagggcatgaaaacacagtatagtgggaagcagcggactgaaaatgtactaaggatctttttggatccccttctcgatgtattgatgaagttttcaaccaacgcctacatgcctctgctgaaaactgatcgctgcttgcagttgctacttaagctcttgaacacatgtcgtctcaaggggagttccgctcaagatgatgaagtttccaccgtgttacagaacttcttcatgtcaactacagagtccatctctgagtttatacttagacggctaaccatgaatgagctaaattctgttagcgatctcgaccggtgccatctgtatcttatggtccttactgagcttatcaacctacatctgaaggtgggttggaaacggggtaacccgatctggcgtgtgattagcttgctaaaaaatgcttctatccaacacctgcaggaaatggacagcggccaggagcccaccgttggatcacagatccagagagtcgtgagtatggctgcgctcgccatggtttgtgaagctattgatcagaagccggagctgcagctggattcactgcatgccggaccactggagtcattcctgagttcccttcagctgaaccaaacactgcaaaagccccatgctgaagaacaaagctcttacgctcaccctcttgaatgcagctccgtcctggaggaatccagtagctctcagggatggggaaaaattgtcgctcaatatattcatgatcagtgggtctgtctcagcttcctgcttaagaagtaccataccctgattccaaccacgggatccgaaattttggagccctttttacccgccgtccagatgcccatcagaactttgcaatccgctctcgaggctctgaccgtcctgtccagcgaccaggtcttgcccgttttccactgcttaaaggtgctcgtccctaagctgctgacatcctcagagagcttatgtatagaaagtttcgacatggcatggaagatcattagctctctgtccaatactcagcttatattttgggcgaacctgaaagcattcgtccagtttgttttcgacaacaaagtgctgacaatagccgccaagattaaggggcaggcctacttcaagattaaagagattatgtacaagatcattgaaatgtcggcaatcaaaacaggagtcttcaacacactcataagttattgttgtcaatcttggattgtctccgcgtccaacgtgagccaggggagcctctcttcggcaaaaaattactcagaactgatactggaggcgtgtatctttggcacggtcttccgtcgggatcaaaggcttgttcaggacgtgcagacttttattgagaatctcggacacgactgtgccgccaatatcgttatggaaaacactaagcgggaggatcactacgtccgcatctgtgctgtgaagttcttgtgtttgttggatggttctaatatgtcccacaagctcttcattgaggacctagcaatcaaacttttggataaagatgagctggtgtccaaaagtaagaagcgctattatgtgaattccttgcaacatagagttaaaaacagagtgtggcagaccctccttgtgctctttccgcggctggaccagaattttctgaacggcattattgatcggatctttcaggctggctttacaaacaaccaggcaagtatcaagtactttattgaatggatcatcatcctaattcttcataagttccctcagttcctgccaaaattttgggattgctttagttacggggaggaaaatctgaagacatctatatgtaccttcctggctgtgctttctcatctcgacattatcacccaaaatatccccgagaaaaagcttatactgaagcaggccctcatcgtcgttctgcagtggtgtttcaatcacaattttagcgtgcggctgtacgcgcttgtggccctcaagaagctttggacagtctgtaaagtgctctcggtcgaggagtttgatgcacttacccccgtcattgaaagcagcctgcaccaagttgagtcaatgcacggagcagggaatgcaaaaaaaaactggcagagaatccaggagcactttttctttgccacattccatcctctgaaggactattgtctggagacgatcttctacattttgccacgcctgagtgggctgattgaggacgaatggataacaatcgacaagttcaccagattcaccgacgtgccattggccgccggatttcagtggtaccttagtcaaacccagctgtcaaaactgaaacctggcgactggtcccagcaggatattggaactaatttggtagaagctgacaatcaagccgagtggactgacgtgcagaaaaaaattattccctggaatagtagagtctccgatttggatctggagctgttattccaagatcgcgccgctcggctcggaaaatctattagccgactcatagtggttgcaagccttatagacaaaccaacaaatttaggaggtttgtgcagaacatgcgaagttttcggcgcttcagtcctggtggtggggagcctgcagtgcatttctgacaaacaattccaacacctgtctgtgtccgccgaacagtggctccccctggtagaagtgaaaccacctcagctaattgattacttacagcaaaaaaaaactgagggttatactattattggggtagagcagaccgcgaagagcctcgatctgacccaatactgttttcccgaaaagagcctccttttgctcgggaatgagagagagggaattccagccaatctcattcagcaacttgacgtttgtgtggagatccctcagcaaggcataatccgcagtctgaacgtgcacgtgtcgggcgcactgttaatatgggagtatactagacagcagctcctttcccatggggataccaagccctag

SEQ ID NO: 137245 - DNA, 1101 bp, synthetic construct
  misc_feature 1..1101: note = Description of Artificial Sequence: Synthetic coding sequence
  source 1..1101: mol_type = other DNA
atgtcagaagaagagcagggcagcggtaccaccaccggctgtggcctcccatccatcgagcagatgcttgctgctaaccccgggaaaacccccatctccctgttgcaggagtatggaacgcggatcgggaaaacccccgtgtatgatctgttaaaagctgagggacaagcacaccagcccaacttcacattcagagtgaccgtcggagacacgtcatgtactggtcagggtcccagcaagaaggctgcaaaacacaaggcggcagaggtagctctgaagcatttaaaagggggcagcatgctcgaacccgcactggaagattcctccagcttttcccctctggattcctccctccctgaagatattcccgtgttcaccgccgctgcagcagctacaccagttccctctgtagtgctgacccgatctccacccatggaattgcagcctcccgtgtctcctcagcagtccgagtgtaaccctgttggcgccctgcaggagttggttgttcaaaagggatggcggctgcccgaatacaccgttacacaggagagcggacctgctcatagaaaggaattcaccatgacttgcagagtcgaaagattcatcgaaatcggctctgggacttctaaaaagcttgcgaagcggaacgccgccgcgaaaatgctcctgagggtgcacacagtccccctggacgcacgagatggaaacgaggttgaacctgatgacgatcacttttctatcggtgtggggtctcgattggacggcctcaggaaccgaggtcccgggtgcacatgggattctctgcggaactccgtgggagagaagattctgtctctgcgctcctgtagcttagggtccctgggagccctgggaccagcttgttgtagggttttatcagagctgagcgaggagcaggcttttcacgtgagttacctcgatatcgaggaactaagtctctccggcctgtgtcagtgtttggttgagctcagcacccagcctgcaaccgtatgccacggctcagccacaaccagggaggccgcacggggggaggctgccagacgtgcattgcagtaccttaagataatggccggcagcaaatag

SEQ ID NO: 137246 - DNA, 1038 bp, synthetic construct
  misc_feature 1..1038: note = Description of Artificial Sequence: Synthetic coding sequence
  source 1..1038: mol_type = other DNA
atgctggctgcaaaccccgggaagacaccaatctcactgcttcaggagtatggcacgaggatcggaaaaactcccgtgtacgatctgttgaaggccgaagggcaggcacaccagccgaattttacgttcagggtcactgtaggggacacctcttgtacagggcagggaccatcaaaaaaggcagctaagcataaggccgcagaggttgctctaaaacacttgaagggcggctctatgctggaaccagctttagaggatagttcttctttcagcccattagactcctcactgccagaagatattccagttttcaccgctgccgcagctgccacgcccgtgccaagtgtcgtgctcacccgctctccccctatggagctccagcctcccgtaagcccacagcaatccgaatgtaatcccgtaggggctctccaggaactggtggtccagaaagggtggagactgccggagtatactgtgacgcaggagtcaggacctgcccaccgcaaggagttcactatgacgtgtcgagtggagcgatttatcgaaatcggcagtggaacatctaagaagcttgctaagcgcaatgccgctgcgaagatgctgcttcgcgtacacacagtacccctggatgcacgggacgggaatgaggtggaacccgacgacgaccatttttccatcggcgtgggcagccgactggacggcttacgcaatagggggcctggctgtacttgggatagtctgagaaacagtgtgggagagaagatcctctcccttcggtcttgcagtctcgggtcacttggcgccctgggcccagcctgctgtcgggtgctgagtgagctgtctgaagaacaggcattccacgtatcctatcttgacatcgaggagctgagcttgagtggcctgtgccagtgcctcgtggaactgtccacgcagcctgcaacagtgtgtcacgggtctgccactacaagagaggcagcacggggtgaagctgcccgtcgagcattacagtatttaaaaattatggcagggtccaagtag

SEQ ID NO: 137247 - DNA, 1038 bp, synthetic construct
  misc_feature 1..1038: note = Description of Artificial Sequence: Synthetic coding sequence
  source 1..1038: mol_type = other DNA
atgcttgcagctaatccaggaaaaacgccgatcagcctcctacaggagtatggtacaaggattgggaagacccccgtgtatgatctcctgaaggccgaaggtcaggcccatcaaccaaatttcacttttcgggtgaccgtgggagatacctcatgtaccgggcagggcccctccaagaaggcggccaaacacaaggctgccgaggtcgcattaaagcatcttaagggcggtagcatgctggaaccagccctcgaggactccagcagtttttctcccctcgacagctcattgcccgaagatatcccggtcttcaccgcagcagccgccgcgacacccgttccgtccgtagtgctgacccgctccccgcccatggagttgcagcctcctgtcagtcctcagcagagcgaatgtaatcccgttggagccctacaggagctcgttgtgcagaagggctggcgtttgccggagtatacagtgacgcaggagtccggccctgcccacagaaaggagttcaccatgacctgtagagtcgagagatttatagagattgggagtggaaccagtaaaaagctcgctaagagaaatgccgcagctaagatgctgctgcgtgtgcatacagtgcctttggatgcacgggacggcaatgaagtagagcctgatgacgatcatttctctataggagtgggtagccggttagacggtctaagaaaccgtgggcccgggtgtacatgggactcacttcgcaatagcgtaggcgagaagatcctgagcctaagatcttgttctctggggtctctcggagctttgggccccgcctgctgcagagtgcttagcgaactaagtgaagaacaggcgtttcacgtgagttatcttgatatcgaagaactcagtttgagcggcctctgccagtgcctcgtggagcttagcacccagccagcgaccgtgtgtcacgggtccgccacaacaagagaggcagcccgcggtgaggcagcaagacgcgctctccagtatctgaaaatcatggccggaagtaagtag

SEQ ID NO: 137248 - DNA, 1245 bp, synthetic construct
  misc_feature 1..1245: note = Description of Artificial Sequence: Synthetic coding sequence
  source 1..1245: mol_type = other DNA
atgagcgaatatattcgagtgaccgaagacgagaacgatgaaccgattgagattccctcagaggatgatggaacagtgttgcttagcactgtgaccgcacagtttccaggtgcctgtggcctgaggtaccggaatcccgtgtctcagtgtatgcggggggtcagactagtggaggggatcctgcacgcaccagacgccggctggggaaatttagtgtatgtcgtgaactacccaaaggacaataaaaggaaaatggatgagaccgacgcaagctctgccgtgaaggtgaagcgtgccgtgcaaaagacctcagatcttattgttttgggcctaccatggaagactactgagcaagacctgaaggagtacttcagcacatttggcgaagtgctgatggtacaggtgaagaaagacctaaagactggccattcgaaaggcttcgggtttgtacgcttcactgaatatgaaactcaggtgaaagtgatgagccagcgccacatgatcgacggcagatggtgcgattgcaagttgcccaactctaagcagtcgcaggatgagccactgcggagccggaaggtgttcgtgggacgctgtaccgaagatatgacggaagatgagttgcgtgaatttttcagccagtatggtgacgtcatggacgtgttcatccctaaaccattcagagcattcgccttcgtgactttcgctgatgaccaaatagcccaaagcctctgcggtgaggatttgataatcaagggaatttctgtccatatttccaacgccgagccgaaacataacagtaacaggcagttggaacgcagcggtaggttcggcggcaatcctggcggtttcgggaatcagggaggtttcggcaacagccggggcgggggcgccgggttaggaaacaatcagggaagcaacatgggaggcggtatgaactttggtgcattcagcatcaaccccgccatgatggcggccgcccaggctgccctgcaaagctcttgggggatgatgggcatgttggcctcccagcaaaatcagtccggccccagcgggaataaccaaaaccagggcaatatgcagagggaacccaatcaggctttcgggagtggaaataacagttacagtggttccaactccggagctgctataggctggggaagcgccagtaatgcgggatcgggatcgggatttaacggcggtttcggatcttccatggattcgaagtcttccggatggggaatgtag

SEQ ID NO: 137249 - DNA, 888 bp, synthetic construct
  misc_feature 1..888: note = Description of Artificial Sequence: Synthetic coding sequence
  source 1..888: mol_type = other DNA
atgtctgagtacatccgagttacggaagacgagaacgacgagcccatcgaaatcccatccgaggatgacggaacagtgctgctgagcactgtcacagctcagtttccaggcgcttgcggtctgagatatagaaatccagtttctcagtgcatgagaggggtccggctggttgaggggatacttcatgcccccgacgccggttggggtaatctggtatatgttgtcaattatcccaaagataataagcggaagatggatgaaactgacgctagctcagcagtaaaagtgaagagggccgtgcagaagacatctgatcttattgtgctgggactgccttggaagaccacggaacaggacctcaaggagtatttttccacgttcggggaagtgctaatggtacaagtcaagaaagacctcaaaacaggccactcaaaagggtttggcttcgtaaggttcaccgagtacgagacacaggttaaagtcatgagccagagacatatgattgacggacgctggtgcgattgcaagctgccgaactctaaacagagtcaggacgagccgctccgatcccgcaaggtgttcgtggggagatgcactgaggatatgacagaggacgagctgcgcgaattcttttctcagtacggagatgtcatggacgtgttcatccctaaacctttccgagcgttcgcatttgtgacattcgcagacgatcaaatagctcagtcactgtgtggtgaggacctgatcattaaaggtatctccgtccatattagcaacgccgagccaaagcacaattccaacagacaactggaacgctcaggacggtttggggtccacctgatctctaatgtttacggccggagcaccagcctgaaggtagtgttatag

SEQ ID NO: 137250 - DNA, 897 bp, synthetic construct
  misc_feature 1..897: note = Description of Artificial Sequence: Synthetic coding sequence
  source 1..897: mol_type = other DNA
atgccgcagatgctagcaggggagatttggtgcatgctgtccacaattcagaaggttaagaaggacctgaagactggacacagtaaggggttcggcttcgtgcggtttaccgagtacgagacccaggtgaaggtcatgtcacagagacatatgatcgacgggcgttggtgtgactgcaagctgcccaatagtaagcagtctcaagatgagcctctaaggtcacgcaaagtttttgtaggcagatgcaccgaagacatgacggaagatgagctgagagagttcttctcccagtacggcgatgtaatggatgtgttcattcccaaacctttcagggccttcgccttcgtgactttcgccgatgaccaaatcgcccagtccctctgtggagaggacttaattatcaagggaatctccgttcatatttccaatgcagagcccaagcacaacagcaataggcagctggagcgctctggtcgctttggcggtaatccaggaggttttggtaatcagggcggcttcggcaactcacgcggtgggggggctgggctgggaaataaccagggtagtaatatgggtggagggatgaactttggcgcgttttctataaacccagctatgatggccgctgcccaggccgcgctgcagtcgtcatggggaatgatgggtatgctggcttctcagcagaaccagtccggccctagcgggaataatcagaatcaggggaacatgcagcgcgagccgaaccaggcctttggtagcggaaataactcctacagcggcagcaatagcggtgccgccatcgggtggggtagcgcgtccaacgccgggagtggctctgggtttaacgggggcttcggctcctccatggatagcaaatcatccggctggggcatgtag

SEQ ID NO: 137251 - DNA, 1533 bp, synthetic construct
  misc_feature 1..1533: note = Description of Artificial Sequence: Synthetic coding sequence
  source 1..1533: mol_type = other DNA
atggcggcagattcagacgacggagctgtcagtgcacccgctgctagcgacggcggagtgtctaaatccactacttcgggcgaggagctggtggttcaagtccctgtggtcgatgtccagtccaacaattttaaggaaatgtggccttcactgctactggccatcaaaacagccaatttcgtcgctgtagacacggagctatctgggctcggtgaccgcaagtcattactgaatcaatgcattgaagaacggtacaaggcagtgtgccacgcagcccgaactcggtctatcctgagcctcggtctcgcgtgttttaagcgtcagcctgacaagggtgagcacagctatttggctcaagtttttaaccttacactgctgtgcatggaggaatacgtaattgagccaaaaagtgtgcagtttctgatccagcacggattcaatttcaaccagcagtacgcgcagggcatcccttatcacaaaggcaacgataagggggacgaatcacagtctcaatccgtacggacgctgttcctggaattgattagggctcggcgtcctctggtgcttcacaatgggctcatcgacctggtgtttctctaccagaacttttatgcccacctgcccgaatccctggggacttttaccgccgacctgtgcgagatgttccccgccggcatctatgataccaagtatgcagccgagttccacgcgcggttcgtcgctagctatctcgaatatgccttccggaagtgcgagagagagaacggcaaacaacgcgccgcaggatccccccatctgacactcgagttttgtaactacccatcatcaatgcgagaccacatcgattaccgctgctgtctgccgcccgccacgcaccgaccacatcctacctctatctgcgacaatttctctgcgtatggctggtgcccgctcgggccccagtgccctcaatcacatgatatcgatctgatcatcgataccgatgaagctgctgcggaagacaaacggcgccgaagacgtcgcagggagaagcgcaagagagccctgttaaatttgccgggtacccagacctctggtgaggccaaagacggtccacccaagaaacaggtgtgcggcgattcaattaagcctgaggaaaccgaacaagaagtagccgcggatgagacccgaaatttgccccacagtaagcagggcaacaagaatgatttggagatggggataaaggcggctcgccccgagatagccgaccgcgccacctccgaggtgccaggttctcaggcatctccaaaccccgttcctggcgatggattgcatcgcgccggtttcgatgcttttatgaccggatacgttatggcttacgtcgaagtgtctcagggaccgcagccttgtagcagcggtccgtggttaccagagtgccataataaggtctacctgagtggcaaagcggtgccgctgacagtggcgaaatcacaattcagcagaagcagcaaggcacacaaccaaaagatgaaactgacctggggcagcagctag

SEQ ID NO: 137252 - DNA, 1293 bp, synthetic construct
  misc_feature 1..1293: note = Description of Artificial Sequence: Synthetic coding sequence
  source 1..1293: mol_type = other DNA
atggctgccgactccgacgacggcgccgtgagcgccccagctgcatccgacggagcagaatgggcctgggggcaagaagaattcgcagagccaggggagcatagttatttggcccaggttttcaatctgacactcctttgtatggaggaatatgtgatcgaaccaaagtctgtccagtttttaattcaacatggttttaatttcaatcagcagtacgcacagggcatcccgtaccacaaggggaatgataagggggacgaaagccagagccagtcagttcgcactctgttcttggagctgatccgcgctagacgcccactggtgcttcacaacgggctgattgatctcgtgttcctgtatcaaaacttctatgcgcatctccccgagtcattgggaacctttactgcagacctgtgcgagatgtttccagcaggtatctacgacaccaaatacgccgccgaattccacgctaggtttgttgcaagctacctggaatatgcttttagaaagtgcgagcgggaaaacgggaagcaaagggccgccggcagtccccatttgacgttggagttttgcaattacccatctagcatgcgagatcatatcgattacaggtgttgcctgccgcccgccacacatagaccacatccaacatctatatgtgacaacttcagcgcttacggatggtgtcccctcggtccccagtgtccccagagccatgatatagacctgattatagacaccgatgaggccgctgcggaggacaaacggcgacggaggagacgccgtgagaagcgcaaacgtgcattgctgaatctcccaggcactcagacctccggcgaggcgaaagatggacctcccaagaagcaggtttgtggtgatagcattaagcccgaagaaactgagcaggaagtcgccgcggacgagacgagaaacctcccccacagtaagcagggtaataaaaacgacttagaaatgggaataaaagctgcaaggcctgagatcgctgatagggctactagcgaggtcccgggcagccaggcctcccccaaccctgtgccgggagatggtctgcatcgggccggcttcgatgcgttcatgactggttacgtgatggcctatgttgaggtaagccaaggacctcaaccttgtagctccggcccttggctcccggaatgccataacaaagtgtacctgtctgggaaggccgtacctcttactgtcgccaagtctcaattctcccgttcctcaaaggcccataatcaaaagatgaagttaacatggggcagcagctag

SEQ ID NO: 137253 - DNA, 1263 bp, synthetic construct
  misc_feature 1..1263: note = Description of Artificial Sequence: Synthetic coding sequence
  source 1..1263: mol_type = other DNA
atgaccatggagaagggaatgtcctcaggcgaaggcttgccatcgcgctccagccaagtgtccgccggtaaaattacggccaaggaactggagaccaagcagtcgtataaggaaaaacggggagggtttgtgcttgttcacgctggggccggataccatagcgaatctaaggccaaagaatataaacatgtgtgcaaacgggcctgtcagaaagcaattgagaaactccaggcgggggctttggcaactgatgcagtcaccgcagccctcgtggagcttgaagattccccctttaccaatgccggtatggggtcaaatctgaacctgctgggagaaatcgaatgcgatgcctctatcatggatggtaagagtctgaacttcggcgccgtgggtgcattgtcaggcataaaaaaccccgtttcagtcgccaatagactcttatgtgaaggccaaaaaggaaagctctctgctgggcgtatcccaccctgcttcctagtcggcgaaggcgcctaccggtgggccgtagatcatggcatccccagctgtccaccaaatatcatgacaactcgattctctctggccgcattcaaaagaaataaacgtaagttggagctggccgaaagagtcgataccgattttatgcaactgaaaaagagaagacagagtagcgaaaaagaaaacgactcaggcacccttgatacagttggggcagtagtggtggaccacgaggggaacgttgcagctgcagtgtcgagcggcggtttagctctcaagcatccggggcgagtcggacaggccgcactgtacggatgcggatgctgggctgagaatactggagctcataatccatacagcactgccgtaagcacgtcaggctgtggcgagcatctggtgcgtacaattttggccagagagtgcagccatgctctgcaggctgaggatgctcaccaggctctgctggaaaccatgcagaacaagtttatctccagtccctttctcgcgagtgaagatggcgtgctgggaggggtgatcgtactgcggtcctgtaggtgttccgctgagccagatagctctcagaataagcagactttgctggttgagtttctatggtcgcacactaccgaatctatgtgtgtagggtacatgagtgcccaggacggcaaggcaaagacgcatatttctcggcttccccccggcgctgttgccggacaatccgtggcaattgagggaggcgtgtgccgcctggagtctccagtgaactag

SEQ ID NO: 137254 - DNA, 918 bp, synthetic construct
  misc_feature 1..918: note = Description of Artificial Sequence: Synthetic coding sequence
  source 1..918: mol_type = other DNA
atgacaatggaaaagggaatgagctccggtgagggtctaccctcacggtcttctcaggtgtcagctggtaagattacagcaaaagagctcgagaccaagcagtcctacaaagagaaacggggtggatttgttttggtgcatgccggtgcagggtatcactccgaatcaaaagcaaaagaatacaaacacgtatgtaagcgggcatgtcagaaggattccccatttacgaacgccggcatgggcagcaatctcaatctgctgggggaaattgaatgcgatgcctctatcatggatggaaaatctctgaactttggagcagtcggcgctctgagcggcatcaagaacccagtgagcgttgccaacagactcctatgcgaaggacaaaagggcaaactctctgccggcaggatccccccgtgctttctggtgggcgagggtgcataccgctgggcagtggaccatgggattcccagctgcccaccaaacatcatgaccaccaggttctctctcgcagctttcaagcgcaacaagaggaagttggaactggcagagagggtcgacactgatttcatgcagctaaaaaagcggcgccaaagttccgagaaagagaatgatagtgggactttggatacagtaggcgcggtggtcgtcgaccatgagggaaatgtggcagcagcggttagcagtggcggcctcgcgcttaaacatcctggacgggtgggtcaagcagcactctatggctgcggatgttgggctgagaatacaggagcccacaatccatatagtactgcggtgtcaacctcaggatgcggcgagcacctggtccggacgatacttgctagagagtgtagccatgcccttcaggctgaggacgcccaccaggcactactggagactatgcagaacaaatttatatag

SEQ ID NO: 137255 - DNA, 333 bp, synthetic construct
  misc_feature 1..333: note = Description of Artificial Sequence: Synthetic coding sequence
  source 1..333: mol_type = other DNA
tgaaagatcactgccaaggaattggaaacgaagcaaagctacaaggagaaacgaggagggtttgtgctcgttcacgcaggggctgggtatcatagcgagtctaaagctaaagaatataagcacgtgtgcaagcgggcatgtcagaaggccatcgaaaagctccaagccggtgccctcgccacggacgcggtcactgccgccctcgttgagttagagctgatgtggaaagggcaattccaggtcctttgcgtgctgaccaatctgtttttggatattatcaaaaatcccacgaaaactaagttcaagacaattagcaacgtcaaagtgtactag

SEQ ID NO: 137256 - DNA, 918 bp, synthetic construct
  misc_feature 1..918: note = Description of Artificial Sequence: Synthetic coding sequence
  source 1..918: mol_type = other DNA
atgaccatggaaaagggcatgagtagcggggaaggacttcctagtcggtcctctcaagtgtctgccggaaagatcaccgccaaagaactggaaacaaagcaatcatacaaggagaagcgaggagggtttgtgctcgttcatgccggtgcagggtatcatagcgaatctaaggctaaggagtacaagcacgtgtgtaaaagggcttgccaaaaggattccccgttcacgaatgctggaatggggtctaatcttaacctgctcggtgaaattgagtgcgacgcctccatcatggatggtaaaagcttgaacttcggagcagtgggcgctttaagtgggattaagaatcctgtgtctgtggccaacagactattatgcgagggccagaagggtaagctttccgcagggagaataccaccatgctttctagtgggggagggggcctacaggtgggccgtggaccacgggataccttcttgcccacccaacatcatgactacgcgcttttcactggcagcctttaagcggaataaacggaagctggaattagcagagagagttgatactgattttatgcaactcaaaaagcgcagacagagctccgagaaggaaaatgactctgggacactcgataccgtgggagccgtcgttgttgatcatgaggggaacgtggcagccgcggtgagtagtggcggcctggcactgaaacaccccggccgagtcggccaggccgccttgtatggctgtgggtgttgggctgaaaataccggagcacacaatccgtattccacagccgtgtcaactagcgggtgcggcgagcatctggtgcggacgatcctcgcccgtgagtgctctcacgccctgcaggcagaagatgctcaccaggcactcctggaaaccatgcagaacaagttcatctag

SEQ ID NO: 137257 - DNA, 438 bp, synthetic construct
  misc_feature 1..438: note = Description of Artificial Sequence: Synthetic coding sequence
  source 1..438: mol_type = other DNA
atgacgatggaaaagggaatgagctccggtgaaggcttacccagtcgttcaagccaggtcagcgccgggaaaatcacggccaaggaattggagactaagcaatcctacaaagaaaaaagaggtgggtttgtcctggtccatgccggagccggctaccatagcgaatcaaaagccaaagaatataaacacgtgtgtaagagagcatgccaaaaggctatcgaaaaactgcaggctggcgcgctggccactgacgccgttaccgcggccctggttgagctggaagacgtagaatccatcctgtgtgccccctactggctggagaacgttcatatgctctacaagctgcgcatgctgacaaaaccttgctggcggttgtgtaaaacatcactgtccgtccacctaagcctgcccgtgaaaatggcatgcttagctgaatag

SEQ ID NO: 137258 - DNA, 390 bp, synthetic construct
  misc_feature 1..390: note = Description of Artificial Sequence: Synthetic coding sequence
  source 1..390: mol_type = other DNA
atgacgatggaaaaaggcatgagtagcggcgagggattgccgtcgcgcagcagtcaggttagcgcggggaagattaccgcaaaagagctagagaccaaacagagctataaagaaaagcgggggggctttgtattggtgcacgcaggcgcaggctaccattcggagagtaaagccaaagagtacaagcatgtttgcaagagggcctgtcagaaggcaatcgagaaacttcaggccggcgcactcgcaacagacgcagtgactgctgctttggtcgagctggaagtgtacacgcattcttacactagctggtcctgcattcaaccaagtatacatgtgctgctcgttaagagacaacgcaagagtccactaccaaggatcagcactttttag

SEQ ID NO: 137259 - DNA, 1443 bp, synthetic construct
  misc_feature 1..1443: note = Description of Artificial Sequence: Synthetic coding sequence
  source 1..1443: mol_type = other DNA
atgctcctttgcacagcaaggttagtgggtctacagctgctgattagctgttgttgggccttcgcttgccactcgacggaatcatcgcccgatttcactctaccaggtgactatctgctggcgggcctcttcccactgcactctggctgtctccaggttcgtcacagacccgaagttacgctctgcgaccgttcttgcagttttaacgaacatggttaccatctatttcaggcaatgcgcctgggggtcgaagagatcaacaattccaccgccctcctccctaacattacactcgggtatcagctctacgacgtgtgtagcgattcagcaaatgtctatgccacacttagggtactgtccctgcccgggcagcatcatatcgagctccaaggcgatttactgcattattcacccacagtactggccgtgatcggccctgattctaccaacagagcggccaccaccgctgcactgctgtctccgttcctagtgccaatgattagttatgcggcttcttctgaaaccctgtcagttaaacgccagtacccaagctttctcagaaccatccccaatgataaatatcaagttgagactatggtattgcttctccagaagttcggttggacctggatctcccttgtgggctcttctgatgactatgggcagctgggcgtgcaggccttagaaaaccaggccaccggccagggtatatgcattgccttcaaggatattatgccattctctgctcaggtgggtgacgaaagaatgcaatgcctaatgaggcatttagctcaggctggtgccacagtcgttgtggtgttctcgtcaaggcaactcgcacgtgtattctttgaaagtgtggtgctgaccaacttgactgggaaggtttgggtggccagcgaagcttgggccctgtcacgccacattactggcgtccccggtatacagaggatagggatggtgctgggagttgccatccaaaagcgggcagtccccggcttaaaggccttcgaggaagcttacgccagggccgataagaaggccccgaggccgtgccacaagggctcttggtgctccagtaatcagctttgcagagaatgtcaagcatttatggcgcataccatgcccaaactgaaagcgttttcaatgtcctctgcctacaacgcatacagagctgtatacgctgtcgcccatggtcttcatcagttactcggatgcgcatctggagcatgcagcagaggccgcgtctacccctggcagacctcgacagacgcgtcactggttggtaagaagtccggccacctgcgcgaagctagaccagcctcccgagcgctctggtgtttctggctgtgcgtgagcacgcccctcgggtgttgttggcagctgacccggtgctgttgttgttgttgcctggggttgctcgcctgcttgcccgggacctag

SEQ ID NO: 137260 - DNA, 2526 bp, synthetic construct
  misc_feature 1..2526: note = Description of Artificial Sequence: Synthetic coding sequence
  source 1..2526: mol_type = other DNA
atgctgttgtgtacggccaggctagttggattgcagttgcttattagctgctgctgggccttcgcatgccactcaaccgagtccagtcctgattttactctccctggcgattatctcctcgcgggactgttccctttgcactctggctgtctgcaggtgcggcaccgccccgaagtcacgttgtgtgaccgatcctgcagctttaacgaacacggctaccatcttttccaagctatgcggctcggtgtggaggaaattaacaacagtaccgctctcctgccaaatattaccctgggctaccagctgtatgacgtttgttcagactcagctaacgtttatgctactttgcgagtcctcagcttgcccggacagcaccatatcgagttacagggagacttactccactactctcctaccgttcttgctgtgattggcccggattccaccaatcgggcggctaccacagccgctctgctgagcccgttcctggttccaatgatctcatacgccgcctcaagcgaaactctatccgtgaaaagacaatacccaagctttctgagaacaatccccaacgacaagtaccaggtcgagacaatggtgctgttgttacagaagttcggatggacctggatctcccttgtgggctcgtctgacgattatggccagttgggcgttcaagctttagaaaaccaggcaacaggtcaagggatctgtatcgcattcaaagacattatgccttttagtgcacaggtgggcgacgaacggatgcagtgcctcatgcgtcatctcgcacaggcgggtgctactgtagtggtcgtattctcttcccgacagctagcccgcgttttcttcgagtccgtcgtccttactaatctgactggaaaagtttgggtcgcctcggaggcttgggccctgtccaggcatatcactggcgtgcccgggatccagcggattggcatggtgcttggtgtcgctatccagaagcgtgctgtccccggactgaaagcctttgaggaagcgtatgctagagccgataagaaggccccacgaccttgccataaagggtcgtggtgttcctcaaatcagctgtgccgagagtgccaagccttcatggcgcatacaatgcctaagctaaaggcctttagcatgtcctccgcatataacgcgtacagagccgtgtatgcagtcgctcatggacttcaccagcttcttgggtgtgcttcaggcgcatgtagtagaggaagggtgtatccatggcaactcctcgaacaaatccacaaggtacacttcctcttgcataaggataccgtggcattcaatgataaccgggatccactttcttcttacaatataattgcctgggactggaacggcccaaagtggactttcacggtgctcggctcatcaacctggtccccagtgcagttaaacatcaacgagaccaaaatccagtggcatggtaaggataaccaggttccaaagtctgtgtgcagtagcgattgtctggaggggcatcagagagtcgtgacggggttccaccactgttgctttgagtgcgtgccatgtggcgccggcaccttcctcaataaaagtgacctctaccgatgtcaaccctgcgggaaggaggagtgggctcccgagggaagtcagacctgcttcccccgtaccgtggtctttcttgcactgagggaacatacatcttgggttctgctggccgcaaacaccttactgctgctgcttctgctcggaacagccggcctgttcgcatggcacttggatactccagtcgtgagatcagccggtggcagactgtgcttcctcatgcttggcagcttggccgctgggtcaggatctttatacggattctttggggaacccactagaccagcctgcttgctcagacaggcgctttttgctctcgggtttacaatttttctaagctgtcttacagtcaggagtttccaactgattatcattttcaagttcagcaccaaggttcccaccttctatcacgcctgggtgcaaaatcatggggctggtttgtttgtgatgattagctccgcagcacagcttctgatatgtctgacgtggttagtcgtgtggacgcctttaccggccagagaataccaacggttccctcatttggtgatgctcgaatgtactgagaccaacagtcttggctttatcctcgcatttttgtataatgggctcctgtctatcagtgcctttgcctgtagctacctgggcaaagacttgccagagaactataacgaggctaaatgtgtgacatttagcctgcttttcaacttcgtatcttggatcgccttctttacaaccgccagcgtctatgatggaaagtacctcccagctgctaacatgatggcaggactgtccagcctgagcagcggttttgggggatatttccttcccaagtgctatgtcattctgtgccggcccgacctcaactcaaccgagcattttcaggccagcatccaggactacacacgaagatgcggcagcacgtag

SEQ ID NO: 137261 - DNA, 1764 bp, synthetic construct
  misc_feature 1..1764: note = Description of Artificial Sequence: Synthetic coding sequence
  source 1..1764: mol_type = other DNA
atgttgttatgtactgccagactggtgggcctgcagctgcttattagttgctgctgggctttcgcctgccatagcactgagagctctccagatttcacgctccccggcgattacttgctcgcggggcttttcccgcttcactctgggtgcttgcaggtgagacaccggcccgaggtcactctgtgcgaccggagctgctctttcaatgagcatgggtatcatctgtttcaggcgatgcgccttggcgtcgaagagatcaacaactctacagcgttgcttccaaatataactctgggctatcagctgtacgatgtttgcagcgacagcgccaacgtctatgctaccctcagagtgcttagcttaccaggccagcaccacatcgaactccagggggacctactgcattattcccccaccgtgttggcagttatcggccctgatagcactaaccgtgcagccacaaccgctgcgctgctgagcccttttctcgttcccatgctgcttgagcagatacacaaagtgcactttcttctccacaaggacactgtggcctttaacgataacagggacccactctctagttacaatatcattgcttgggattggaacgggccaaagtggacgttcacagtcctcgggagcagcacctggtctccagtgcagctgaacataaatgagaccaagatacaatggcacggaaaggataaccaagtgccaaaatccgtgtgttcctctgattgtctggagggacaccaaagggtcgttactggtttccaccactgctgttttgaatgcgttccctgtggcgcagggacattcttgaacaagtcagatctctatcgttgccagccctgcgggaaagaagaatgggctcctgaaggcagccagacctgttttcctcggaccgtggtcttcctggcccttcgtgagcatacctcctgggtccttctggcggcaaatacgctcttgctcctactgctccttggtacggctgggttgtttgcctggcatcttgacactcccgttgtgcggtccgctggggggcggctgtgtttcttgatgctagggagtctggccgctggttctggaagtctgtacggtttttttggagagcctacccgccccgcgtgtttgctgcgtcaggcgctattcgcgctgggcttcaccatctttctgtcttgccttaccgttcggtcgtttcagcttatcattatatttaagttcagtacaaaggtgccaaccttctaccacgcctgggtacaaaatcatggggccggactgttcgtgatgatctcctccgcagcacagctgttgatttgcctcacatggctggtcgtatggacccctcttcctgcccgggagtaccaaaggtttccacacctcgttatgctggaatgcaccgagaccaacagtctggggtttatcttggccttcctctacaacggtctgctgagtatctccgccttcgcatgtagctatctcgggaaagacttgccagaaaattataatgaagcaaaatgcgtaacattcagtctattgttcaatttcgtgtcctggattgctttcttcacaacggccagtgtttacgacggaaaatatctcccagcagcgaacatgatggccggcctctcttctctgtcttcgggctttggcggatattttctgcccaagtgctatgtaattctgtgtcgcccagacctgaactccacagagcactttcaggcctccattcaggactatactagacgttgcggaagcacctag

SEQ ID NO: 137262 - DNA, 921 bp, synthetic construct
  misc_feature 1..921: note = Description of Artificial Sequence: Synthetic coding sequence
  source 1..921: mol_type = other DNA
atgaggctcggggtggaggaaattaataatagcaccgccctgctccccaatatcactctggggtatcaattgtatgatgtctgcagcgactctgccaatgtgtacgctacgttgagagtgctgagcctgcctggtcagcaccacatcgaactgcagggggacctgctacattacagtccaaccgtgttggccgttatcggtcctgattctaccaaccgcgcggctacaactgcggcactgctatccccgtttctggtccccatgctcctggagcaaattcacaaggtgcatttccttctccacaaggatacagtggccttcaacgacaacagggaccctctgtcgtcatataacattattgcgtgggattggaacggaccaaaatggacctttaccgtgctagggtcatcaacctggtccccggttcagttgaacataaacgagaccaaaattcaatggcacgggaaagacaatcaggttccaaaaagcgtgtgttcgagcgactgtcttgaagggcatcagcgggtggtgacgggcttccaccattgctgtttcgaatgcgtaccatgtggcgccggcacatttctcaataaatctgatctgtaccgatgccagccctgtggcaaagaggaatgggccccggagggcagtcagacatgcttccctcgtacagtcgtcttcctcgcactccgcgagcacacctcttgggtactcctggctgcaaataccctactgttgctgctactgctgggcactgcaggcctgttcgcctggcatttggatactcccgtggttagaagcgccggcggccggctgtgctttctcatgctgggttcactggcggccggatccggttccttgtatggttttttcggcgaacccagtctgccactggtttccccgagcagttgtcccgcatag

SEQ ID NO: 137263 - DNA, 2520 bp, synthetic construct
  misc_feature 1..2520: note = Description of Artificial Sequence: Synthetic coding sequence
  source 1..2520: mol_type = other DNA
atggggccgcgagctaaaacaatcagctctctgttcttcctgctttgggttctggccgaacctgccgaaaactccgacttttatctcccgggcgactacctcttgggcggtctattttcattacacgccaacatgaagggaatcgtgcatcttaattttcttcaggtgcccatgtgtaaggaatacgaggtgaaggttatcgggtataatctgatgcaggccatgagattcgccgtggaagaaatcaataatgactcaagtttactacccggcgttctcctggggtacgaaatcgtggacgtctgttacatctcaaacaatgtgcaaccagtgctgtatttcctggcccatgaagataacctactgcccatccaggaggactactccaactatattagtagagtggtagcagtaatcggtcccgataactcggagtcagtgatgacagtcgctaacttcttgtccttgtttcttctgcctcagataacgtattcagcaatcagtgacgagctgcgcgataaagtacgtttccctgcactgctgcgcacgaccccgagcgccgaccaccatatcgaagccatggtgcaacttatgttacatttcaggtggaactggatcattgtgctggtctcttctgatacatacggcagggataacgggcaactgctgggagagcgggtggccagacgagacatttgtattgcgttccaagaaacactgcctacccttcaacctaatcaaaatatgacatccgaagagcgtcagcggctggtgaccatagtggataagctccagcaatcgaccgcccgggtggtggtagtgttttctccggacttaacactttaccatttctttaacgaggtgctgcggcagaatttcaccggcgcagtgtggatcgcaagcgaatcttgggcaatcgatcctgttctgcacaacctcaccgaactgcgccaccttggcaccttcttgggcataacgatacagtccgtccccattcccggattcagtgaatttagggaatgggggccacaggcagggccccctcctctgtctcggacttcccagagttatacatgtaatcaagaatgcgacaattgtcttaacgcgaccctgtcttttaacaccatcctgcgtctctcaggtgagcgcgtggtgtactccgtgtacagtgccgtgtatgcagtggctcacgctttacacagtctgttgggttgcgataagagcacttgtacgaaaagggtggtctatccctggcagctcctggaggaaatatggaaagtgaacttcactcttctggatcatcagattttttttgacccgcaaggagacgtggcacttcatctggagatcgtgcagtggcagtgggaccgctctcagaacccgtttcagtcggtggcatcctactatccactgcaacgacaattgaaaaatatccaggacattagctggcatactataaataataccattccaatgtcaatgtgcagcaaacgatgccagtcagggcaaaagaaaaaaccagtgggcattcatgtttgctgttttgaatgtattgactgcctccccggaaccttcctgaaccacactgaggatgaatacgagtgtcaagcatgcccgaacaatgaatggtcttatcaatccgagaccagctgcttcaaaagacaactggtattcctcgaatggcatgaggcgcccacaattgctgtagcgctcctggcggcccttggattcttgtcgacattagccatcctggtgatcttttggcgccacttccagactcccattgtacgatcggcggggggaccaatgtgttttctcatgctcactctgttactggtggcctatatggttgtgcctgtttacgttggtccgccaaaagtgagtacatgcctttgccgccaggctctattccctctgtgctttaccatctgtataagctgtattgcggtgcgtagcttccagatcgtgtgtgcattcaaaatggcatcaagattccctagggcatattcttactgggttcggtaccagggtccttacgtgtccatggcgtttattacagtgctgaaaatggtgatagtagtgatcggaatgttagccacggggctcagccccacgactcgcaccgatcccgatgacccaaaaattacaatcgtttcttgcaacccaaattacagaaattccttattattcaacacttcactggaccttctcctctccgtggtgggtttctcatttgcatacatgggcaaggaactccccactaattataacgaggcaaaatttataaccctgtctatgacgttttactttacctcatccgttagcctgtgcaccttcatgtcagcttacagtggggtcctggtcaccatcgttgacctgttggtaactgtccttaacctcctggctatctcactgggatattttgggccgaagtgttatatgatcctcttctacccagagcgtaacacgcccgcctacttcaactccatgattcagggctatacaatgagaagagattag

SEQ ID NO: 137264 - DNA, 2559 bp, synthetic construct
  misc_feature 1..2559: note = Description of Artificial Sequence: Synthetic coding sequence
  source 1..2559: mol_type = other DNA
atgctcgggcctgccgtgctaggtctgagcctttgggctctcctacaccctggtactggtgcccccctttgtctgtcccagcaactcagaatgaagggagattatgtccttgggggtctcttccctctcggcgaggcagaagaagctgggctgcgttctcggacaaggccctcatctcccgtttgcactagatttagcagtaatggactgctgtgggccctggctatgaaaatggccgtggaagagattaataacaaatctgatttgctccccggattgcgcctcggatatgacctatttgatacgtgctcagagcctgtcgtagccatgaagccttcacttatgttcctggccaaagccggatcaagagatatcgctgcgtattgtaattacacccaataccagccacgggtgctagctgtaattggtccacacagctccgaactcgctatggtgacgggaaaatttttttccttcttcttgatgccccaagttagctatggtgcttcaatggaattgctgtccgcgagggagacgtttccctcattttttagaacagtgccgtccgatagagtacagttgacagctgctgctgagcttcttcaggagttcgggtggaattgggttgctgccctcggatcagacgatgaatacgggcgacagggactctcaattttctccgctctcgcagctgcgcgcgggatctgtattgcccatgaaggccttgtgcctttaccccgagcagatgattcgcggctgggcaaggtccaggatgtattgcatcaggtgaaccagtcatccgtccaggtagtcctacttttcgcgagcgtccatgctgcgcatgccctgttcaattacagcataagcagccgcctgagtcccaaggtctgggtggccagcgaggcctggttaacctcagatctggtcatgggtctccctggcatggcgcagatgggcaccgtcctgggcttcctgcagaggggcgctcaattgcatgaattcccccagtatgtcaagacacatcttgccttggccacagaccccgccttctgctcagccctgggtgaacgtgagcagggtcttgaggaagatgttgttggccaacgttgccctcagtgcgactgtattacactgcaaaacgtctctgcgggactcaatcaccatcaaacattttctgtgtacgcggccgtgtatagtgtggcccaggctttgcacaacactctgcagtgcaacgcctcaggatgccctgctcaggaccctgtcaaaccttggcagttactcgaaaatatgtataacctgaccttccatgtgggcggactcccccttcgattcgattcttcaggtaatgtcgatatggaatatgacctgaagctctgggtttggcagggcagtgtgcctcggctgcatgacgtgggaagatttaacggatcactccgtaccgagcggctgaagattcgttggcatactagcgacaatcagaagcctgtgtctagatgctcccgacagtgtcaggagggacaggtcagaagagtgaaaggcttccattcttgctgctatgattgcgtagactgtgaggctggctcctataggcaaaacccggatgatatcgcttgcacattttgtggacaggacgagtggtcccccgaacgttcgacccgttgcttccggcggcggagccgttttttggcatggggggagccagcggtcctgttgctgctgctcctcctgtcactcgcactcggactggtgctcgcagcactgggcttatttgtccaccatcgagattctcctctggtgcaggcatctggcgggccacttgcttgtttcggcttggtgtgtttaggcctggtttgtctcagtgttctgctgttcccagggcaacctagtccggcccggtgtctggcacagcagcctctttctcacctccccctgaccggctgtctgtcgaccctgtttctgcaagcagccgaaatatttgtagaaagcgagttacccctttcctgggccgaccgactgagcggttgtttgcggggcccctgggcatggctggtagttctgttggctatgttagtggaggtggccctgtgcacatggtatttggttgcctttccccctgaagtcgtaactgattggcacatgctgcctacagaagcattagtgcactgccgcacacggagctgggtttcatttggacttgctcatgctacgaacgccactctggcattcctttgcttcctggggacatttctcgtgaggtctcaacctggatgctacaacagggctaggggcctgaccttcgctatgttagcttattttataacatgggtgagctttgtgccactattagccaatgttcaggtcgtcttacgaccggctgtccaaatgggggccctgctgctatgtgtgttgggaatcctggccgcattccatcttcctcggtgctatctcctgatgcggcagcctggactgaatacgcccgaattcttcttgggcggggggcccggtgacgcacagggccagaacgacggtaacactggcaatcaaggaaaacacgagtag

SEQ ID NO: 137265 - DNA, 876 bp, synthetic construct
  misc_feature 1..876: note = Description of Artificial Sequence: Synthetic coding sequence
  source 1..876: mol_type = other DNA
atgatccccattcaactcacggtctttttcatgattatctacgtgttggagtctctgacaataatcgtgcagagctcattgatagttgctgtgctcggtagggagtggttacaggtgcgcaggctcatgcccgttgatatgatactgatcagcctcggaatatcccgattttgcctgcagtgggcatccatgctaaataacttctgctcctacttcaacctgaattacgtgctgtgtaatctaacaatcacttgggagtttttcaacattctgaccttctggctgaactcactgctcactgtgttctactgtattaaggtttccagcttcactcatcacatctttctctggttgcggtggaggattctgaggcttttcccctggattctgctgggctcgctgatgattacatgtgtcacaattatcccctctgccattggtaactatatacaaattcagcttctcacaatggagcatcttcctagaaattccaccgttacggacaaactggaaaacttccatcagtaccaatttcaggctcatactgtggcacttgtgattccatttatactttttctcgcgagcacaatctttttgatggcttcactgacaaagcagattcagcaccacagcactggtcactgcaatccttctatgaaagcccgttttaccgcactgcgatccttggccgtgctttttatcgttttcacttcctattttcttacgatccttataacaatcattggaacgctatttgacaaaagatgctggctttgggtgtgggaggcattcgtctatgcattcatactgatgcactctacaagcctgatgttgagcagccccacactgaaaagaattcttaagggcaaatgctag

SEQ ID NO: 137266 - DNA, 900 bp, synthetic construct
  misc_feature 1..900: note = Description of Artificial Sequence: Synthetic coding sequence
  source 1..900: mol_type = other DNA
atgatgtgcttcctgttaatcatttccagcattctggtggtgttcgcatttgttttgggaaacgtggccaacgggttcattgcgctggtcaacgttatcgactgggtaaatactcgcaaaatcagcagtgcagagcagatcttaacagccctcgtcgtgtcacggatcggcctcctgtgggtgatgctgtttctctggtacgcaaccgtctttaacagcgctttgtatggtttggaagtgaggatcgtggccagcaacgcttgggctgttacaaaccacttttccatgtggcttgctgcaagtctctctatcttttgcctgctgaagattgccaatttctctaacctaatcagtttacaccttaaaaaacgcattaaaagcgtggtactcgttatcttgttagggccactcgtatttctcatttgcaacctggctgttattaccatggatgaaagagtgtggaccaaggagtatgaggggaacgtgacttggaaaatcaaactgaggaatgcgattcatctgtctagtttgaccgtgaccacgctcgccaacctcattcctttcaccctaagcctgatttgcttcctgctgctgatctgctccctatgcaagcatctgaaaaagatgaggcttcactcgaagggatctcaggacccttctaccaaggtacacattaaagccctccagaccgtcactagtttcctgatgctgtttgcaatctattttctttgtattatcacctctacatggaatctccgtacacagcaatcaaaactcgtgctccttctttgtcagactgtagccattatgtacccttccttccattcctttatactcataatgggctccaggaagctcaaacagacctttctttcagtcttatggcagatgacacgttag

SEQ ID NO: 137267 - DNA, 930 bp, synthetic construct
  misc_feature 1..930: note = Description of Artificial Sequence: Synthetic coding sequence
  source 1..930: mol_type = other DNA
atgatgtcttttctgcacatcgtcttctctatcctcgtggtcgtcgccttcatcctgggaaactttgcaaacggattcattgcccttatcaatttcatcgcttgggtgaagcggcaaaaaattagttctgctgaccagatcatagccgctcttgccgtgtccagagtgggacttctgtgggtgatactgctccattggtatagcactgtgcttaaccccacgagcagcaacctaaaggttataatcttcatatctaacgcttgggctgtcacaaatcacttcagcatttggttggctaccagtttaagcatattctatcttttgaagattgtgaacttcagccgtctgatctttcatcacctgaagcgtaaagccaaatcagtcgtgctggtgattgtgttgggaagcctatttttcctcgtttgtcacttggttatgaaacacacatacataaatgtgtggaccgaggaatgtgagggaaatgtgacttggaagatcaagttgaggaatgctatgcatctctcaaacctgaccgtggctatgctggcaaatctcattccttttacgcttaccctcatcagctttctacttcttatttattctctatgcaagcaccttaagaaaatgcaattacacggcaaggggtcccaggaccccagcaccaagatccatatcaaggccctgcagaccgtaacgtcctttctcatcctcttggcgatttactttctttgcctgattattagtttctggaatttcaagatgcgcccaaaagaaatcgtgctcatgctctgtcaggcctttggaatcatctaccctagtttccactcctttatcctcatctggggcaacaaaacgctgaagcaaacttttttatccgtcctgtggcaggttacatgctgggcgaagggccagaatcagagtacaccgtag

SEQ ID NO: 137268 - DNA, 951 bp, synthetic construct
  misc_feature 1..951: note = Description of Artificial Sequence: Synthetic coding sequence
  source 1..951: mol_type = other DNA
atgatgggtctcactgaaggagtgttcctgattctgtcaggtacccaattcaccctggggatcttggtgaactgtttcatcgaattggttaatgggtccagttggtttaaaaccaagagaatgagcctgagtgacttcataattactaccctggcgcttctgcggattatactcttgtgtatcatacttaccgattcttttctgattgagttcagtcctaacacacacgatagcggcattatcatgcagattattgacgtgtcatggacattcacaaaccacctgagcatttggctggccacttgccttggagtgctctactgcctgaagatagcctctttttcacatccgacattcttgtggctgaagtggcgtgtgtccagagtgatggtgtggatgctgctgggggccttgctgctgtcttgtggaagtacagcatccctgatcaacgaatttaaactgtacagtgtatttagaggtattgaggcaacaagaaatgtgacggagcactttaggaagaaacgaagtgaatactacctgatccatgtcctagggaccttgtggtacctgccccctctgattgtgtctctggcttcatatagcctcctcatcttcagcctgggcagacacacacgtcagatgctgcagaacgggacatcaagtagggatcccacaactgaagcccacaagcgcgccattaggattatactctcattctttttcctatttctactttactttcttgcattccttatcgcatcatttggtaacttcctacctaagaccaagatggctaaaatgattggcgaagtaatgacgatgttttaccctgctggccactcttttattctaattctcggaaattctaagcttaagcagacctttgtggtgatgctacgctgcgagtccggacatctgaagccaggtagtaaaggccctatcttttcctag

SEQ ID NO: 137269 - DNA, 960 bp, synthetic construct
  misc_feature 1..960: note = Description of Artificial Sequence: Synthetic coding sequence
  source 1..960: mol_type = other DNA
atgataactttcttgccaattattttttcgatcctgatcgtggtgatctttgtgattggcaactttgctaacggatttattgcattggtgaatagtattgaatgggtgaaacggcagaagataagcttcgtggatcaaattctgacggctttagccgtgagccgcgtcggactactgtgggttcttctcctgcattggtacgctacccaactgaacccagccttctactccgtagaggtccggatcaccgcttacaacgtttgggccgtgactaaccacttttcaagctggctggcgacatccctcagcatgttctacctcctacggatcgccaactttagcaatctgatattcctccggataaaacgacgtgtaaaaagcgtggtgctggtcattctgctggggcctctactgttcctggtctgtcaccttttcgtgatcaatatggatgaaaccgtctggactaaagagtacgaaggaaacgtcacttggaagatcaagttgcggtctgcaatgtaccacagcaacatgaccctcactatgctcgccaactttgtgcctctgacccttacgttgatctcatttttactacttatctgctctttgtgtaagcacctgaaaaaaatgcagctgcacggcaagggcagccaggacccttctactaaggtccatattaaagccctccagactgtgaccagttttttgctgctctgtgcgatttattttctgtccatgattattagtgtctgcaatttcggcagactcgagaagcagcccgtctttatgttttgccaggcaattatcttttcctacccttctacgcatccattcatccttattctgggaaacaaaaaactgaagcagatttttttgtcagttctacgccacgttcgctattgggtgaaggatagatctctaagactgcatcgctttactcgtggcgcgctttgcgtcttctag

SEQ ID NO: 137270 - DNA, 930 bp, synthetic construct
  misc_feature 1..930: note = Description of Artificial Sequence: Synthetic coding sequence
  source 1..930: mol_type = other DNA
atgaccacttttataccaatcatcttttcctctgtggttgtggtcctcttcgttataggtaacttcgccaacgggttcattgccctggtcaattccattgaaagagttaagagacagaagatcagcttcgcagatcagattctgacagctctggccgtatcacgtgtcggcctcctctgggtcctcctgctgaactggtactccactgtgttcaatcctgcgttctactcagtggaggtacgaaccacggcctataacgtgtgggccgtaacaggccacttctctaattggctcgccacatcactaagtatcttctatctgctaaaaatcgccaattttagcaacctgatttttctccacctcaaacgccgagtcaagtctgtgatattggtgatgctcctcggtcccttactgtttctggcctgccagctgttcgtaattaacatgaaggaaatagttcgtaccaaggagtatgagggcaacctgacttggaaaatcaaactcagatccgccgtgtacttaagcgacgctacagtcacgaccctgggaaatctggttccctttacactgactctgttgtgctttctcctactgatttgcagcctgtgtaaacacctcaaaaagatgcagctacacggcaaaggctctcaggacccctcaacaaaagttcacataaaagccctacaaaccgtgattttctttcttctactctgtgcggtatacttcctgtcaatcatgataagcgtctggtcatttggttctctggagaacaagccagtgtttatgttttgcaaagccattagatttagctatccatctattcacccgtttatcttgatatggggtaacaaaaagctaaagcagaccttcctttctgttctaagacaggtgcggtattgggtcaaaggagagaagccatcttcgccctag

SEQ ID NO: 137271 - DNA, 1002 bp, synthetic construct
  misc_feature 1..1002: note = Description of Artificial Sequence: Synthetic coding sequence
  source 1..1002: mol_type = other DNA
atgttgactctaacgcgaatccgcactgttagctacgaagtgagatctacttttctattcataagcgtgcttgaatttgccgttggcttcctcaccaatgctttcgtgtttctcgtcaacttttgggacgtggtgaagagacaggccttgagtaattccgactgtgtgctgctgtgtcttagtatctcgcgtctcttcctccacgggttgctgttcctttctgccatacagctcacccactttcagaagctttccgagccactgaatcactcttaccaggcaatcattatgctgtggatgattgccaatcaggcaaacctatggctcgcagcatgtctcagcttgctgtactgtagcaagctgatccggttctctcacactttcctgatttgtttagcttcttgggtgtcccggaagatctcgcagatgctgcttggcatcatcctctgttcctgtatttgtaccgtgctgtgcgtctggtgcttcttctcccgcccgcattttactgttaccaccgtgctttttatgaacaacaacacacgccttaattggcagattaaggacctgaatttattttactcattcttattctgctacttgtggagtgtacctccgttccttctattcttagtgtcctcaggaatgttgactgtgagcctgggacgacatatgaggaccatgaaggtgtacactcggaactctcgtgacccaagcttggaagcccacattaaggcactcaaaagcctcgtgtccttcttctgcttcttcgttatttcctcctgtgccgcatttatctccgtccctctactgatactgtggcgcgacaagattggggtcatggtttgcgtcggaattatggcagcctgcccaagcggccacgcggcgatcctgattagtggaaatgccaaattgcgacgggctgtgatgacaatcctcctatgggctcagagctccctaaaagtgcgggcagatcacaaggccgatagccgtacattgtgctag

SEQ ID NO: 137272 - DNA, 900 bp, synthetic construct
  misc_feature 1..900: note = Description of Artificial Sequence: Synthetic coding sequence
  source 1..900: mol_type = other DNA
atgctgaggctgttttatttctctgccattattgcctcggtgatcctgaactttgtgggcattattatgaatctctttatcacagtggttaactgcaaaacctgggttaagtcacaccgaatttcatccagcgataggattctgttctctctcggaattactagatttttaatgcttggcctctttctcgtgaacacaatatacttcgtgtcaagcaatactgagaggagtgtgtacctcagtgccttcttcgtcctgtgttttatgttcctagacagctcatcagtctggttcgtgactctactgaacattctgtattgcgtcaagatcactaactttcagcattcagtcttcctactgctcaagagaaatatcagccccaagatcccacggctgctcctggcctgtgtcctcatttccgccttcacaacatgcctttacattacacttagtcaggcatcccctttcccagaacttgtgacaaccagaaataacacgagcttcaatatcagcgaaggtattctgagtctagtggtgtcactagtattaagctccagcctgcagtttattattaatgtgacgtccgcatccttactgattcattccctgcggcggcacattcagaaaatgcagaaaaacgctaccggattttggaaccctcagacagaggctcacgtgggagcgatgaaactcatggtttatttcctgattctgtacattccttactcagtagctacccttgttcagtatctgcccttctacgccggcatggatatgggaactaaatcgatctgcctgatttttgcgacgctatatagcccgggccacagtgtgttgatcattataacccaccccaagctcaagactacggctaaaaaaatactctgtttcaagaaatag

SEQ ID NO: 137273 - DNA, 972 bp, synthetic construct
  misc_feature 1..972: note = Description of Artificial Sequence: Synthetic coding sequence
  source 1..972: mol_type = other DNA
atggctaccgtcaacactgacgcaactgacaaggatatcagcaagtttaaggtcacttttacccttgtggtttccggcatcgaatgcattactggcatcctggggtcaggcttcatcactgccatctacggtgcagagtgggcacggggaaagacgctgcccactggggataggatcatgctgatgttgtctttctccagactgctcctccagatttggatgatgctcgagaatatattttccctactgttccggatcgtgtataaccagaacagcgtgtatatattgttcaaagtgattactgtgttcttgaatcactctaatctctggttcgcagcctggctcaaggtgttctactgtttaaggatagcaaattttaatcatccgctgttcttcctaatgaagagaaagattattgtcctgatgccctggttattgagacttagcgtgcttgtgtccctttcatttagttttcccctaagtagagatgtgttcaacgtgtacgtcaatagctcaatacccatcccatcttcaaatagcactgaaaagaaatatttttcagaaactaatatggtgaacctcgttttcttttacaatatgggcatattcgtgcctctgatcatgttcattctagcagccaccttgcttattctcagcctgaaaagacatacactccatatgggcagtaatgcaacaggatcacgtgatccgtctatgaaggcgcatatcggcgccatcaaagctacctcttattttctcatcctgtacatttttaacgccatcgccctttttctgtccacttcgaacatttttgacacttatagttcttggaacatactgtgtaaaatcatcatggcagcttaccctgccggtcattccgtgcagcttatccttggcaatccaggactgcgaagggcatggaaaagattccagcaccaggtccccctgtatctaaaagggcagacgctttag

SEQ ID NO: 137274 - DNA, 924 bp, synthetic construct
  misc_feature 1..924: note = Description of Artificial Sequence: Synthetic coding sequence
  source 1..924: mol_type = other DNA
atgcaggctgcactgactgcctttttcgtgctattgttctccttgctgagccttcttggaatagccgccaatggattcatagtcctagtcctgggaagagagtggctgcgctacggccgtctcttgcccctggatatgattctgatctcactcggggctagtagattctgcctccagctggttggcacagtccataacttttactacagtgcgcagaaggttgaatattccgggggcctgggaaggcaatttttccaccttcactggcacttccttaatagtgcaaccttctggttctgtagctggttatcggtattattttgcgtcaagattgctaacattactcatagtaccttcctttggctgaagtggcgatttccggggtgggtgccttggctcctcctgggtagtgtcttaattagttttatcattacgctgctgtttttctgggttaattacccagtgtaccaggaatttctgatccggaagttcagtggtaacatgacttataagtggaacactcgcatcgagacgtattatttcccatcactgaagctagtcatttggtccatacccttctcagtttttctggtgtccatcatgctgctgatcaactcgctgaggcgccatacacagcgcatgcagcacaacggccacagcctccaagacccctctacacaagctcacacgagggctctcaaatcgctgatctccttccttatcttgtatgccctaagcttcttaagcttgataatagacgcggccaagttcattagcatgcagaatgacttttactggccctggcagatcgctgtctacctctgtattagcgttcacccgtttattctgatcttttcgaacctgaagctgaggtccgtcttctctcagttgctgttgcttgcccgtggattctgggtcgcctag

SEQ ID NO: 137275 - DNA, 945 bp, synthetic construct
  misc_feature 1..945: note = Description of Artificial Sequence: Synthetic coding sequence
  source 1..945: mol_type = other DNA
atggcaacagagctggacaagatcttcttaatcctggccatcgccgaattcatcatcagcatgcttgggaacgtctttatcggcctggtcaattgttccgaaggtattaagaaccagaaagttttcagtgccgacttcatcctcacatgtttagctatcagtacaataggccagctcttggtgatcctcttcgattcatttttggtgggcctggcaagccatctgtacaccacctataggctgggcaagacggtgattatgctgtggcatatgacaaaccatctgaccacctggctggccacctgtcttagcatcttttatttcttcaagatcgcacattttccccactcgttattcctttggttacgatggaggatgaacggaatgatcgtcatgttgctcatcctctctttgttcttattgatctttgactccctcgtccttgaaatttttatcgatatttccctgaatattattgacaaatccaatctcactctttacttggatgagagcaagaccctatacgacaagctcagcatcctaaagaccctcctcagtttgacgtccttcataccattcagtctatttttgactagtctgctgtttctgttcctgagtctggtgaggcataccagaaacctgaagctgtcctctcttggtagtagggacagctcgaccgaagctcaccgaagagcgatgaagatggtgatgtccttccttttcctgtttattgtgcacttcttcagcctgcaggtcgccaacgggatcttctttatgctgtggaataacaaatacatcaagttcgtcatgctggcgctgaatgcatttccctcatgccattcattcattctcatcctaggcaattccaagctgagacagacagccgtgcgcctgttatggcatttgaggaactacacgaagactcctaacgcgttgccactttag

SEQ ID NO: 137276 - DNA, 930 bp, synthetic construct
  misc_feature 1..930: note = Description of Artificial Sequence: Synthetic coding sequence
  source 1..930: mol_type = other DNA
atgattaccttcttgccaatcatctttagctcgcttgtggttgttacattcgtcattgggaattttgccaacggtttcattgcactggtcaactctatcgagtggtttaagaggcagaagatctctttcgctgatcaaatcttgacagctctcgctgttagtcgtgtaggcctcctctgggtgttgttgctcaattggtactctaccgttctgaatcccgcctttaattccgtagaggtacggaccacggcttataatatctgggccgtaatcaatcattttagcaattggctggccaccactttatcaatcttttacctgctgaaaatcgccaatttctccaattttattttcctgcaccttaagcggcgcgtgaaatctgtaatcctggtaatgttgctgggtccactactgttcctcgcttgtcacttatttgtgattaatatgaacgagattgtccgcaccaaggagttcgagggcaatatgacttggaagattaaactgaagtctgcaatgtacttttctaacatgaccgtcacaatggtggccaatcttgttccattcactttgaccctgttgtcattcatgctactgatttgttccctgtgtaagcacctgaaaaagatgcaactacatggcaaaggctcccaggacccttccacaaaggtgcatatcaaggcgctccagacagtgatttcctttttgctgctctgcgcaatttacttcttaagcattatgatttctgtgtggtcttttggtagcctcgaaaacaaacccgtctttatgttctgcaaggccatccgattctcctatccaagcatccatcctttcatactgatttgggggaataagaagttaaagcaaacattcctgagtgtcttctggcaaatgaggtactgggtgaaaggcgaaaaaactagttccccttag

SEQ ID NO: 137277 - DNA, 930 bp, synthetic construct
  misc_feature 1..930: note = Description of Artificial Sequence: Synthetic coding sequence
  source 1..930: mol_type = other DNA
atgatcaccttcctccctattatctttagtatcctgatagttgtgacgttcgtgattggtaactttgcaaacgggttcatcgccctggtgaactcgatcgagtggttcaagcgtcaaaagatttccttcgccgatcagatcctcactgctctggcagtcagccgagttggtctgctgtgggtcctggtgctcaactggtatgctacagaactcaatccggcctttaatagtattgaggtccggatcacggcttacaacgtgtgggccgttattaaccatttcagcaactggctggcaacaagtctgtctatattctatctactgaagatagccaacttcagcaatctcatttttctccacctgaaaaggcgcgtcaagagcgtggtgttggtcatcttactggggccattgctctttctcgtgtgtcatctcttcgtgatcaacatgaatcagatcatctggacaaaggagtatgaaggcaacatgacctggaagatcaagctgcgcagtgccatgtatcttagcaataccactgttaccatcctggcaaatttagtacccttcaccctgacactgataagctttctgctcctgatttgcagcttgtgcaaacatttgaagaagatgcagctccacggcaaggggagtcaggaccctagtatgaaggtgcacattaaagccctccagacagtgacttcctttctgctcctgtgtgctatatactttctctctatcattatgtctgtgtggtctttcgaatcactcgagaacaagccggtattcatgttctgtgaagcaatagccttctcatatccaagcacccacccctttatcctgatatggggcaacaaaaagcttaagcagacattcttgagcgtcctgtggcatgtgcggtactgggttaagggtgaaaaaccaagctcctcatag

SEQ ID NO: 137278 - DNA, 900 bp, synthetic construct
  misc_feature 1..900: note = Description of Artificial Sequence: Synthetic coding sequence
  source 1..900: mol_type = other DNA
atgctctctgctggcctggggctgttgatgctcgtagcggtcgtggaatttttaataggactgatcgggaacgggtcgctggtggtgtggtcttttagagagtggattagaaagtttaactggagctcctacaatcttataatcctggggttggcaggctgccggttcctcctgcagtggctaatcattctagacctcagcttgttcccactcttccaaagcagccgttggctcaggtacctgagcattttctgggtgctggtgtcccaggcatcgctgtggttcgccaccttcctttcagttttctattgtaaaaagattacaaccttcgacagaccagcctatctctggttaaaacagcgcgcatataatctcagcctgtggtgtcttcttggatacttcattatcaacctcctcctgacagttcagataggactgaccttctatcaccccccccagggaaattctagtataaggtatccgtttgagtcatggcaatatttgtacgccttccagctaaattctggatcctatctgcctctggtggtctttctggtgagcagtggcatgctcatcgtctccctgtatacccatcacaagaaaatgaaagtgcatagcgcaggaagacgggatgtgcgtgctaaggcccatattacagcactcaaaagcctcggatgttttttactgcttcacctcgtctacattatggcaagcccttttagcatcacctcgaaaacttaccccccagacctgacctcggtgtttatctgggagacactcatggcagcttatcctagcctccatagtctgattcttattatggggattcctagagtaaaacagacatgccagaagattttgtggaagacagtgtgcgctcggaggtgttggggtccatag

SEQ ID NO: 137279 - DNA, 900 bp, synthetic construct
  misc_feature 1..900: note = Description of Artificial Sequence: Synthetic coding sequence
  source 1..900: mol_type = other DNA
atgatcactttcctctacatttttttttcgattctgatcatggtgctgtttgttttgggaaactttgccaacggattcatcgcactcgtgaacttcattgattgggtcaaacggaagaagatatccagcgccgaccaaatattgactgcccttgcagtgtcgcggattgggctcctgtgggccctgcttctgaactggtacctgacagtgcttaaccccgcattctacagcgtagaactgaggattactagctataatgcatgggtcgtgaccaatcacttcagtatgtggttagccgccaacttaagcatcttttacttactgaaaatagcaaatttctctaaccttttattcctccatctaaaaaggcgcgtccgctcagtgatccttgtcattctcctggggacactgatctttctggtttgtcatttactcgtggccaatatggatgagtccatgtgggctgaagaatacgagggaaacatgaccggtaagatgaagcttagaaacaccgtacacctgtcatatctgactgtcacgaccttgtggagttttatccctttcaccctatccctgattagtttccttatgctcatctgcagcctgtgtaagcatctgaagaaaatgcaattacacggagaaggcagccaagacctttctactaaggtgcacattaaggcgctccaaactctgataagctttctgctgctttgcgcgattttctttctgtttctcattgtgagtgtttggtcccccaggagattgcggaacgatcctgtggtcatggtgtcgaaagccgtgggaaacatttatcttgcttttgattctttcatccttatctggagaacgaaaaaattaaaacacacatttctcttgatactgtgccaaattcgttgctag

SEQ ID NO: 137280 - DNA, 957 bp, synthetic construct
  misc_feature 1..957: note = Description of Artificial Sequence: Synthetic coding sequence
  source 1..957: mol_type = other DNA
atgaacggggatcatatggtcctgggttcaagtgtaacggataaaaaagcgatcattctcgtcacaatcttgcttctgctgaggttggtggctattgccgggaacggtttcatcacagctgcactgggagtggaatgggtgctgcggaggatgctcttgccttgcgataaactgctcgttagcctgggtgccagcaggttttgtctgcagtcagtagtgatgggcaaaactatttacgtgtttctgcacccgatggctttcccctataaccctgtactccagttcctggctttccagtgggattttctcaatgctgctaccttgtggtccagcacttggttgtctgttttctactgcgtaaagatcgcaacattcacacatcccgtgtttttttggctgaagcacaagctcagtggatggctcccctggatgctcttttccagcgtgggccttagttctttcaccaccatccttttctttatcggtaaccacaggatgtaccagaattacctccgcaaccacctgcagccttggaacgtcaccggggattccattcgctcatattgtgagaaattctatctgttccctctgaagatgatcacatggaccatgccgacagccgtgttcttcatctgtatgatcctgctgatcacttccttagggcgccacagaaaaaaagccttgctgaccacatccgggttccgcgagccaagcgtccaagcccacataaaagcgctgttggccctactgagtttcgcgatgctgtttatctcgtactttctgagccttgtgttctctgcagccggcatattcccacctctggattttaagttctgggtatgggaatcggtgatttacctatgtgccgctgtgcaccccatcatccttctgttcagcaactgccgattaagggccgtgcttaagagcagacggagctccagatgcggtacaccctag

SEQ ID NO: 137281 - DNA, 1314 bp, synthetic construct
  misc_feature 1..1314: note = Description of Artificial Sequence: Synthetic coding sequence
  source 1..1314: mol_type = other DNA
atgcctaaatttaaggctgcaaggggcgtgggagggcaggagaagcacgcccctcttgccgaccagattctcgctggcaacgccgtgcgggcaggtgtccgcgaaaagcgtcgaggaaggggtaccggcgaggctgaagaggagtatgtcggccctagactcagccgtaggatcctgcagcaagcgaggcagcagcaagaagagttagaggccgaacacggcacaggagacaaacccgctgcccccagagaacgtaccacacgcctcggaccacgaatgccccaagacggaagcgacgatgaagacgaagagtggcctacgctggagaaggcggccacaatgactgccgccggacaccatgccgaagtcgtggtggatcccgaggatgagagagccatcgagatgttcatgaataagaacccccctgcccgccggacactcgccgatatcatcatggaaaaactcactgagaagcaaacagaggtggaaactgtaatgagtgaggtgtctgggtttcccatgccccagctggatcctcgggttctcgaagtgtaccgcggcgtccgcgaggtgctgtctaaatatcggagtggcaagttgccaaaagcatttaaaatcatacccgctctctccaattgggaacagatattatacgtcacagagcccgaggcgtggaccgctgctgctatgtaccaggccaccagaatcttcgcaagcaatttaaaggaacgcatggcgcaaagattttacaacctggtactgctccctcgggtccgcgatgatgttgctgagtacaaacgtctgaatttccacctctatatggccttgaaaaaggccctgtttaagcccggggcttggttcaaaggtatactgatcccactgtgcgagtccggcacctgcactcttagggaggccatcattgtgggaagcatcataacaaaatgttctatccccgttctccattccagtgccgcaatgttaaaaattgctgagatggaatacagcggggccaacagcatcttcctgcggctgcttttggataagaagtatgcgctgccctacagggtgctggacgcattggttttccattttcttggtttcagaacagagaagcgggagcttcccgtgctatggcatcagtgcctcctgacacttgtccagaggtacaaggctgatcttgctacagatcagaaagaagccctgctggagctgctccggctccaaccgcacccacaactgagcccggagatccgaagggagctgcaaagcgcggtcccacgggacgtcgaagatgtcccaatcacggtggagtag

SEQ ID NO: 137282 - DNA, 951 bp, synthetic construct
  misc_feature 1..951: note = Description of Artificial Sequence: Synthetic coding sequence
  source 1..951: mol_type = other DNA
atggaccagaacaatagtctgccaccatatgcgcaaggcttggcgagtcctcagggcgcgatgacccccggaatacctatcttctcgccaatgatgccttatggcaccggtttgacgcctcagccaatccagaacacgaattcattgtccatacttgaggagcagcagagacagcaacagcaacaacagcagcagcaacagcagcaacagcagcaggcggtggccgctgccgctgtgcaacagtctacatcgcaacaggccactcagggaaccagcgggcaggcccctcagctcttccactcccagacattgacaactgcgcccctgcctggcactaccccactgtatccttcccctatgacaccgatgacacctatcacgcccgccaccccagccagtgagtcatctggtattgtgccacagcttcagaacatcgtctccacagtgaatttgggatgtaaattagacctgaagacaattgcactcagagcaagaaacgctgagtataaccccaaacgtttcgcggcagttatcatgagaattcgcgagccgagaacaaccgctttgattttctcgtcgggtaaaatggtctgtacaggggctaagtccgaagagcagtcgagactcgcggctagaaagtacgcccgggtggtgcagaagttaggcttccccgctaagtttttagatttcaagatccagaacatggtaggaagctgcgacgtcaaattccccatcaggctggaaggcttggtcctgacccatcagcagttcagtagctacgagccagaactgtttcccggcctgatctataggatgatcaagcccaggatcgttcttctgattttcgtctctggtaaggtcgtcctgaccggcgctaaagtgagagcagagatatacgaagcattcgagaatatctatccaatcttaaagggttttagaaagactacctag

SEQ ID NO: 137283 - DNA, 1020 bp, synthetic construct
  misc_feature 1..1020: note = Description of Artificial Sequence: Synthetic coding sequence
  source 1..1020: mol_type = other DNA
atggatcagaacaactcactcccaccatatgctcagggcttggcctctcctcaaggagccatgacacccggcattcccattttctcccccatgatgccttatggaactggattgaccccacagcccatccaaaataccaatagcttatccattctggaggagcagcagcgacaacagcagcagcaacaacagcagcaacagcagcaacagcagcagcaacagcagcaacagcagcagcagcagcagcagcagcagcagcagcagcagcagcaacagcagcagcaggctgtagcagcagcagctgtccagcagagcacctcccaacaggctactcagggaacctcaggacaggccccacaactcttccattctcaaaccttaactaccgccccattgcccggcacaacaccactgtacccaagcccgatgactcctatgactcccatcacaccagccacccccgccagcgagtcctctgggattgtgccccagctccagaatatcgtcagcacagtaaatctgggctgtaagcttgaccttaaaaccattgccctgcgagctcgcaacgccgagtacaaccctaagcgattcgctgcagtgatcatgcggatcagagaacccagaaccacagccctgatcttttctagcgggaaaatggtgtgtaccggggcgaagtcagaggaacagagccgcctggccgctaggaagtacgctcgagtcgtgcagaaactcgggtttcctgccaagttcctggatttcaaaatccaaaatatggtggggagttgtgatgtgaagtttccgataaggctggaggggctggttttaacacaccaacagttcagcagctatgagcccgagctcttccctgggctgatctatcgcatgataaaaccacggatagtgctgctgatcttcgtttctgggaaagtggtcttgactggagcaaaagtgagggccgagatatatgaggcttttgagaacatctaccctattctgaagggcttcagaaaaacgacgtag

SEQ ID NO: 137284 - DNA, 627 bp, synthetic construct
  misc_feature 1..627: note = Description of Artificial Sequence: Synthetic coding sequence
  source 1..627: mol_type = other DNA
atggaccagaacaactccctgccaccatatgcccaaggcttggcctctcctcagggagctatgacgccaggcataccaatcttctctccaatgatgccatacggcacgggcctgaccccccagcctattcaaaatacgaattcactgagcatcttggaggaacaacaaaggcaacagcagcaacagcagcaacagcagcaacagcagcagcaacagcagcaacaacagcagcagcaacagcagcagcagcaacaacaacagcagcagcagcaacagcagcagcaagcggtcgccgccgccgcggttcagcaaagtacttcccagcaagcaacgcaaggcacctccgggcaggccccccaactgttccatagccagacactgacaacagctcccctgccaggcacaaccccactatacccatcccctatgaccccaatgactccaattacacccgccacacctgcaagcgaaagttccgggatagtacctcagttacaaaatattgtgtcaaccgtgaatctcgggtgtaagctggacctgaagacaatagccttgagagcgcgcaatgccgaatacaatccaaagagatttgcggccgtgatcatgcgaatacgagaaccacgatag

SEQ ID NO: 137285 - DNA, 456 bp, synthetic construct
  misc_feature 1..456: note = Description of Artificial Sequence: Synthetic coding sequence
  source 1..456: mol_type = other DNA
atggatcagaataactccctgccaccatacgcgcaggggctggctagtccacagggcgctatgactcctgggattcccatcttctctccaatgatgccctacgggacaggccttacaccccaaccaatccagaacacaaactctctcagtattctggaagaacagcagcggcagcagcagcagcagcagcagcaacagcagcagcaacaacagcagcagcagcagcagcagcaacagcagcagcagcaacagcagcagcagcagcagcagcagcagcagcagcaggctgtggctgctgcagccgtgcaacagagtacctctcagcaggccacccagggcacgtctggccaagccccacagctcttccattctcagactcttaccactgcccctttacctggcacaaccccgctatacccttcccctatgaccccgatgacccctattaccccatag

SEQ ID NO: 137286 - DNA, 306 bp, synthetic construct
  misc_feature 1..306: note = Description of Artificial Sequence: Synthetic coding sequence
  source 1..306: mol_type = other DNA
taagaggaacagagtaggttggcagctcgtaaatatgcaagagtggtgcagaagttagggttccccgccaagttcctagactttaaaatacagaacatggtcgggagctgcgacgttaagtttcccatctcctacgagcctgagctgtttccaggacttatttatcgcatgataaagcccagaatagtgctgcttatcttcgtgtctggcaaggtagtgcttaccggtgccaaggtgagggccgaaatctacgaagccttcgaaaatatctaccccatcctgaaaggttttcggaaaacgacatag

SEQ ID NO: 137287 - DNA, 960 bp, synthetic construct
  misc_feature 1..960: note = Description of Artificial Sequence: Synthetic coding sequence
  source 1..960: mol_type = other DNA
atgactcccggcatccctatcttctctccaatgatgccctatggaactgggttgacaccacagccaatacagaacaccaatagcctgagtatcctggaagagcagcagcgccagcagcagcaacagcaacagcagcagcagcagcaacaacagcagcaacagcagcaacaacagcagcagcaacagcagcagcaacagcagcagcagcagcagcagcagcaacaggccgtggctgcggctgcggtacagcaatctaccagtcaacaggcgacccagggtacctctgggcaggctccgcagctgtttcattcacagacactgaccaccgccccactacccggcacaacaccactgtatccctccccaatgacacctatgacacctatcactccagcgaccccggcatccgaatctagtggcatagtcccccagctccagaacattgtatcaactgtgaatcttggctgtaaacttgatcttaaaactatagccctgagagctaggaatgcagaatacaatccgaagcgcttcgcagccgttattatgcggataagagagccacgaactactgcgctgatcttctcaagtggtaaaatggtgtgcaccggagctaaatctgaggaacagagcagattggcagcacggaagtatgcacgggtcgttcagaagctcggctttcccgccaaatttttggactttaagatccaaaatatggtaggtagttgcgatgtgaaatttcctatccgactggagggcttagtgcttacccaccagcagttctcttcttatgagcccgaactcttccccggcttgatttaccgaatgattaagccaaggattgtcctgctgatctttgtgagtggcaaggttgtcctgaccggtgctaaggtcagagctgagatttacgaggcctttgagaatatttacccgatcctgaagggatttcggaagactacctag

SEQ ID NO: 137288 - DNA, 2610 bp, synthetic construct
  misc_feature 1..2610: note = Description of Artificial Sequence: Synthetic coding sequence
  source 1..2610: mol_type = other DNA
atggatttccccagtagtttgcggcccgccctctttcttactgggccactggggttgtcagatgtacctgatctgagctttatgtgttcatggcgagatgcactcaccctgcctgaagctcagcctcagaatagcgaaaatggcgccctgcatgtgaccaaggatttactatgggagccagcaacacctggtccactcccgatgcttccccccctgattgacccatgggaccccggccttactgcgagggatctgctgttccgggggggttgcaggtacaggaaaaggcctcgggtcgttttagatgtaaccgaacaaattagcagattcctgttggaccatggcgatgttgcatttgcccctctgggtaaattgatgctcgaaaatttcaagctcgaaggcgctggcagccggacaaagaaaaagactgtcgtttccgtaaagaaactgctccaggatcttggaggacaccagccatggggctgcccatgggcatatctgagtaaccggcagagaaggttctctatcttggggggtccaatattgggcactagcgtcgcaagccacctcgctgaactgctccacgaagagctcgtgctaaggtgggagcaactcctactcgatgaggcgtgtacaggtggcgcactggcatgggtgcctggcaggacccctcagttcggccagctcgtgtatcccgcgggtggcgctcaggacagattgcattttcaagaggtggtgttgaccccgggggacaacccgcagtttctggggaaaccagggaggatccaattgcagggcccggtgagacaagtggtcacctgcacagttcagggagagagcaaggccctgatctacacctttctccctcactggctgacttgctatcttacacctggcccttttcaccctagctcagcactgctcgccgtccggagcgactaccattgcgcagtgtggaagttcggaaagcagtggcagccgaccctgctccaagcaatgcaagtggaaaagggggctaccggtatctccctgtctccacatctgccgggcgagctggcgatttgcagccgcagcggtgctgtctgtctatggtcccctgaagacggactgcgccagatctacagggaccccgagacgctggtgtttagagactcctcaagctggaggtgggccgacttcaccgcccacccccgagtcctgaccgtcggagaccgtactggtgtcaagatgctggatacacagggacctcctggctgtggtcttttgttattccgcctgggtgcggaggcttcatgccagaagggggaacgcgtgctcctgacacaatatctaggccattcttcccctaaatgtctgccaccaactctgcatctcgtatgcacgcaattctcattatatctagtcgatgaacggctcccactcgttcccatgctcaaatggaaccatggcctgccttcaccgctcttattggctagactcctccccccaccccggccttcctgcgttcagcctctgttgctaggaggacagggcggtcagctgcagcttttacacctcgctggagaaggagcttctgtgcctaggctggctggaccaccgcagagtctgccctcacgaattgattcgctccctgcttttcccttgctcgagccaaagattcaatggagactacaggaacgcctcaaggcccctaccatcgggctggccgccgtggtgcctcccctccctagtgccccaacacctggcctagtattgtttcagcttagtgctgctggcgatgtgttttatcaacagctgcgaccccaagtagattcatcactccgccgggatgcgggcccccccggcgacacgcagccagactgccacgcccctacggcgagctggacttcacaggatacggcaggttgttcgcagtggctgaaggctctgctgaaggtgccactggccccccccgtgtggacagccccaaccttcacacacaggcagatgctgggcagcaccgaactgagacgggaggaggaagagggccagagactgggagtgctccgcaaggccatggcccgtggccaactgctgctacagcgtgacctaggaagtcttcccgccgcagagcctccacccgcacctgagagtggtctggaagacaaattgtccgaacgacttggggaagcttgggcaggccggggggctgcgtggtgggaacgtcagcagggacgaacctctgaacctggaaggcaaacgcgccgccccaaacggcgaacacaactgtcctcctcatttagcctctcagggcacgtggacccctctgaagatacttcaagtcctcacagtcctgagtggcccccagcagacgcactgccgctgccccctacaacgcccccatcacaggagctgaccccagatgcatgtgcacagggcgtcccgtccgagcagcgtcagatgttgagagattacatggccaagctgccgccccagcgggacacacccggttgcgctactacgcctccccactctcaggccagcagtgtacgggcaacccgcagccagcagcacacccccgtgctgagttctagtcagcctctgcggaagaagcctaggatgggcttttag

SEQ ID NO: 137289 - DNA, 1353 bp, synthetic construct
  misc_feature 1..1353: note = Description of Artificial Sequence: Synthetic coding sequence
  source 1..1353: mol_type = other DNA
atgagcgactttagcgaggagctgaaaggacctgtgacagatgacgaggaggtcgaaaccagtgtgctctcaggtgcagggatgcacttcccctggctccagacgtacgtggagaccgtagccattggaggaaagcgccggaaagattttgcacaaactacctccgcgtgcctgagtttcatccaggaagcgcttctcaagcaccaatggcaacaggccgctgaatacatgtacagctacttccaaaccctcgaggatagtgattcctacaaacgtcaagccgcccccgagatcatttggaagttaggcagcgaaatcctcttttatcacccaaaatcaaatatggagtctttcaacaccttcgcgaaccgtatgaaaaacataggggtcatgaattacctgaaaatcagtctgcagcacgccctttatcttctccaccacgggatgcttaaggacgctaagaggaacctcagtgaggctgaaacctggagacacggcgaaaacacttcaagtagggagattttaatcaatttaattcaggcttataagggacttctgcaatactatacctggagtgagaagaaaatggaactgagtaaactcgataaggatgactatgcctacaacgccgtggcacaggatgtcttcaaccacagttggaagacatctgcaaatataagcgccctcatcaagataccaggggtgtgggacccattcgtgaagtcgtacgtggaaatgttagagttctatggtgatcgcgatggtgcgcaggaggtactgaccaattatgcttacgatgaaaagtttccttcaaatccaaacgcgcacatctacctgtacaatttcttgaaacgacaaaaggcacctcggagtaagctgattagcgttcttaagattttataccagatcgtgccttcccataagcttatgctcgaattccacactctgctgcggaaaagcgaaaaggaagagcaccgcaagttaggcctggaggtgcttttcggcgtcctcgatttcgccgggtgcactaagaacatcacagcttggaagtacctcgcaaagtatttaaagaacatcttgatgggtaatcacttggcatgggttcaagaggaatggaacagccgcaagaattggtggcctgggttccatttctcttatttctgggccaagtcggactggaaggaggacactgctctggcgtgcgagaaggcgttcgttgctggcctgctcttgggtaagggctgtcgatatttccgctatatcctgaagcaagaccaccaaattcttggcaaaaagatcaagaggatgaaaagatccgtcaaaaaatattccattgtgaatccccgactatag

SEQ ID NO: 137290 - DNA, 1353 bp, synthetic construct
  misc_feature 1..1353: note = Description of Artificial Sequence: Synthetic coding sequence
  source 1..1353: mol_type = other DNA
atgagcgacttctccgaggaactcaagggcccagtgaccgacgacgaagaggttgagacttcggtgctgtcgggtgccggcatgcattttccttggctacagacttacgtagagacagttgccattgggggcaagaggagaaaggactttgcacagactacgtccgcttgtctgtcatttatccaggaggcactgttgaagcatcaatggcagcaggcagcagaatatatgtacagctacttccagaccttagaagacagcgattcctataagaggcaagcagcccctgaaatcatctggaaattggggtctgagatccttttttatcatccaaagagtaacatggaaagcttcaatacttttgcaaataggatgaaaaacataggggtgatgaattacttaaagatctcactgcaacatgctctttacctactccatcatgggatgctcaaggatgctaagagaaacctgtctgaagctgaaacgtggcgccatggcgagaatacttcttcacgcgaaatcctcatcaacctgatacaggcttacaaaggccttctgcaatactacacttggagcgaaaaaaagatggagcttagcaaactggataaagacgactatgcctataatgccgtggcccaggacgttttcaatcactcgtggaagacctccgctaacatcagtgccctcataaagatccccggagtgtgggaccctttcgttaagagttatgtggagatgctagagttctacggcgacagagatggcgcccaggaggtgctgaccaattatgcatacgacgaaaagttcccctctaatcccaatgcccatatatacctgtacaacttcctaaagcggcaaaaagctccgcgcagcaaactcatctcggtcctcaagattttataccagatcgtcccaagtcacaagcttatgctcgagtttcacaccctcttacgcaagagcgagaaggaagaacacaggaagctgggcttggaagtcctcttcggggtgctggattttgccggatgtaccaaaaacataactgcctggaagtatctggccaagtatctgaagaacatccttatgggcaatcacctggcttgggtgcaggaggagtggaatagcagaaagaattggtggcctggtttccatttctcctacttttgggcaaaatcagactggaaggaagatacagctttggcctgtgagaaggccttcgtcgccgggcttctgttggggaagggctgtagatactttaggtacatactgaagcaggaccatcaaattttaggaaagaagattaaacgcatgaagagatccgtgaagaaatacagcatagtaaatccaagattatag

SEQ ID NO: 137291 - DNA, 1011 bp, synthetic construct
  misc_feature 1..1011: note = Description of Artificial Sequence: Synthetic coding sequence
  source 1..1011: mol_type = other DNA
atggagagctttaacacatttgccaacaggatgaaaaacatcggggtgatgaactatctgaaaatatccctccaacatgccctgtacttgctgcaccacggaatgcttaaggatgcgaagagaaatttgtccgaggcagagacatggcgacacggcgaaaacacatcttccagagagatcctcataaacctgattcaggcttataaaggactgctccaatactatacatggagcgagaagaagatggagctctccaagcttgacaaggacgattacgcttataatgccgtcgcacaggacgtgttcaatcattcatggaaaacatcagccaacatctccgccctgatcaagattcctggcgtctgggacccatttgtgaagtcatacgtggaaatgcttgagttttatggggacagagatggagctcaagaggttctgacgaactacgcgtacgatgagaaattcccatcaaacccaaacgctcacatttacttgtataactttctgaaaaggcagaaggctccccgctccaagctgatcagtgtactgaaaattctgtaccagatcgtgccctcccataagctgatgctagaattccacaccttactgcggaagagtgagaaagaagaacacagaaaattgggactggaggttttatttggtgtattggatttcgccggatgcaccaagaacattactgcatggaagtacctggctaagtatcttaagaatattctgatgggcaatcatctcgcctgggtgcaggaggaatggaacagccgaaagaactggtggcccggattccatttctcgtacttctgggctaagagcgactggaaagaagacaccgcactggcctgtgagaaggcatttgtcgccggtcttctcctgggcaaagggtgtcgatacttccgatacatactgaagcaggatcatcagatccttgggaagaagattaaaaggatgaaacgcagcgtgaaaaaatattccatagtcaacccacggttgtag

SEQ ID NO: 137292 - DNA, 1011 bp, synthetic construct
  misc_feature 1..1011: note = Description of Artificial Sequence: Synthetic coding sequence
  source 1..1011: mol_type = other DNA
atggaaagcttcaatacgttcgcgaaccgaatgaaaaatattggcgtaatgaactatctgaagatctctctgcagcatgcactatacctactgcaccacggaatgctcaaggacgctaagaggaacctctctgaggcggagacctggagacacggggagaatacctcttcccgggagatcctgatcaatctgatccaggcttacaaaggactacttcagtactatacttggtccgagaagaaaatggagctcagtaagctcgataaagatgactatgcctacaatgccgttgcccaagacgtgttcaaccactcctggaagacctcagcaaacatatccgctctgataaagatccctggggtctgggatccttttgtgaagagttacgttgagatgctcgaattctatggtgaccgcgatggcgcccaggaagttctgactaattacgcctatgatgaaaagttccccagtaacccaaacgctcatatatacctttataacttcctcaagagacagaaagctccccggtcaaagctgatctccgtgctgaaaatcctctatcaaattgtccccagccataagctgatgcttgagtttcacactcttctgcgcaaaagcgaaaaggaggagcaccgcaagctgggactggaagtgctgtttggagtgctcgacttcgccgggtgtactaaaaatatcactgcgtggaagtatctcgcaaaatacttgaaaaatattctgatgggtaaccacctggcctgggtccaagaggagtggaactctcgcaaaaattggtggccggggtttcacttctcctacttttgggctaaaagcgattggaaggaggataccgccctagcgtgtgagaaggccttcgttgctggactgcttttgggtaagggctgcagatatttccggtacattcttaaacaggaccatcagattctgggaaagaaaatcaagcggatgaaaagatctgtcaaaaagtattccatcgtaaacccgagactttag

SEQ ID NO: 137293 - DNA, 861 bp, synthetic construct
  misc_feature 1..861: note = Description of Artificial Sequence: Synthetic coding sequence
  source 1..861: mol_type = other DNA
atgagcgacttttctgaggagctcaagggacctgtcaccgatgacgaggaagtagagacatccgtgctatcaggggctggaatgcacttcccctggctgcagacctacgttgagacagtggcaatcggtgggaagcgcaggaaggatttcgcacaaacaacttccgcctgcctgtccttcatccaggaagccctcctgaaacatcagtggcagcaagctgcggaatacatgtattcctacttccagacacttgaggactctgattcctacaagaggcaagccgcgccagagattagtcttcagcacgcactttatcttctgcatcacggcatgctgaaagacgccaaacgaaatctgtccgaagccgagacttggagacatggcgaaaacactagttcacgggagatactcatcaatctgatccaggcgtataagggacttttacagtactacacctggtcagagaagaaaatggagttatcaaagctggacaaggacgattacgcctataatgccgtggcacaggacgtattcaaccacagttggaagacaagcgctaacataagcgcgttgatcaaaatcccgggagtttgggatccatttgtgaaatcctacgtggaaatgttggagttttatggggatagggatggcgctcaggaagtgctgaccaattatgcttatgacgagaagttcccaagtaatccaaatgcacatatctatctctacaatttcctgaaacgccagaaggctcctcgatctaaactgatcagtgtcttgaagatcctgtatcagatcgttccatcccataagctgatgctagagtttcatacactcctgcggaagtcggagaaggaagaatag

SEQ ID NO: 137294 - DNA, 849 bp, synthetic construct
  misc_feature 1..849: note = Description of Artificial Sequence: Synthetic coding sequence
  source 1..849: mol_type = other DNA
atgtcagactttagtgaggaactgaaaggtccagttaccgatgacgaggaagtggagacatctgtcctctctggggctggcatgcattttccctggctccagacttatgttgaaactgtggctattggtggaaaacgccgcaaggattttgctcaaacaacatccgcatgccttagttttatccaggaggcgcttctcaaacatcagtggcaacaggccgcagaatatatgtacagctacttccagacgctcgaggatagcgactcgtataagaggcaggcagctccagaaatttccttgcagcacgctttatacttattgcatcacggcatgctcaaggacgctaagcggaacttgtcagaggctgagacttggcgccacggggaaaatacatcatccagggaaatcctcataaaccttatccaggcttacaagggtcttttgcaatattatacatggtcggagaagaagatggaactctcaaagctcgataaggacgattatgcgtataacgccgtggcacaagacgtgttcaaccactcgtggaagacaagtgctaatatatcggctctgatcaaaatccccggtgtctgggacccatttgtaaaatcatatgtcgagatgttagagttctatggtgatcgagacggagctcaggaggttctgaccaactacgcctacgatgaaaaattcccctctaatccgaatgcacacatctacctctacaatttcctgaagaggcaaaaggcccccaggagtaagctcatatcggtgttaaaaattctgtatcagattgtgccaagccataaattgatgctggaattccatacactattacgcaaatcatag

SEQ ID NO: 137295 - DNA, 936 bp, synthetic construct
  misc_feature 1..936: note = Description of Artificial Sequence: Synthetic coding sequence
  source 1..936: mol_type = other DNA
atgtccgatttcagtgaggagttaaaaggaccagtgaccgatgatgaggaggtggagacctcagtgctcagtggggccgggatgcatttcccttggctgcaaacctacgtggaaaccgtcgcaatcggcgggaaacgacggaaagattttgcccaaactacctctgcctgtctttcattcatccaagaggctcttcttaaacatcagtggcagcaagcagcagagtacatgtatagttatttccagaccctggaagatagcgactcgtataaacgtcaggccgctcccgaaattatttggaagctgggtagtgagattctcttttaccatcccaagtccaacatggaatctttcaacacgtttgcaaacaggatgaagaacattggggtgatgaactacctcaaaatcagtcttcagcatgctctgtaccttctgcaccatgggatgctgaaagatgcgaaacgtaatcttagcgaggccgaaacctggcgacatggcgaaaacacctcttcaagagaaatactgatcaatctgatacaggcctacaaaggactgctgcaatactatacttggtcggaaaagaaaatggagttaagcaagttagataaagatgactacgcatataacgcggtggcacaggacgtctttaaccacagctggaaaacgagcgcaaacattagtgcgctcatcaagatccccggcgtgtgggacccctttgtcaagagctatgttgagatgctggagttttacggagatagggacggcgcccaggaggtgttaaccaactacgcatatgatgagaagtttccttccaacccgaacgcacacatatacctgtacaacttcttaaaaagacagaaagctccaaggtcaaagctgatctccgttctgaagcacctgcagaagatctcaatcatgtattctacgcttaggtag

SEQ ID NO: 137296 - DNA, 2328 bp, synthetic construct
  misc_feature 1..2328: note = Description of Artificial Sequence: Synthetic coding sequence
  source 1..2328: mol_type = other DNA
atgctccctcccctgattgacccatgggacccaggtctgactgcgcgggacttgctgtttaggggtggctgccggtataggaagcgtcctcgcgtggtgctggacgtgaccgagcagatatcccgatttttattagaccacggtgacgtagccttcgcgcccttaggaaaattgatgttggaaaatttcaaactcgaaggggccggaagtcgtacaaaaaaaaaaacagtggtcagtgtgaagaagcttcttcaagatctcggcggacatcagccttggggatgcccctgggcctatctttctaaccggcagcgccgtttctcaattctgggcggacccattctcgggacgtctgtcgcaagccatttggctgagctgttgcacgaagagctggtgctcagatgggagcagctcttgctagatgaggcctgtaccggcggagcgctggcctgggtgccggggagaacaccccagtttggacagctggtctatccagcagggggcgcacaagaccgtctgcactttcaagaggtagttctgacccccggagacaatccccaatttctaggcaaaccagggcgcattcagctccaaggccctgtgcgccaagttgttacttgcaccgtgcagggcgagacgctactggcggttcggtcagactaccactgtgcggtgtggaaattcgggaaacagtggcagcccaccttactccaagcgatgcaggtggagaagggggccactggtattagtttgtcaccacacctgccaggagaacttgctatctgttcccgaagcggcgccgtgtgcctctggtctccggaggatggactccgacagatctatagagatcccgaaactttggtgttccgggattcctctagttggcggtgggcagattttacagcccatccccgcgtgctgacagtgggggataggacaggtgtgaaaatgctggacactcaagggccacctggctgtggcctgcttttgtttagactaggagctgaggcatcctgtcaaaagggtgagagggtgctactcacccagtatctcggccacagcagccccaagtgtttgccacctacgctgcaccttgtgtgcacacagttctcactgtatctggtggacgagagattacccctcgtgcccatgctgaagtggaatcatggattaccatcacccctcctcctggcccggctgcttcccccaccacggccatcctgtgttcagcctttgttgctggggggacaggggggccaactccagcttctgcatctggccgagggggcttctgtgccgcggcttgccgggccaccgcaaagtctcccgtcccggatcgactcactgcctgcttttccactgctggaacctaagatccagtggagactccaagagcgtttgaaagccccaacgatcggattagccgccgtggtgcctcccctgcccagcgcccctacacccggactagtcctcttccagctgtcagccgccggcgacgttttctaccagcagcttcgcccgcaggtcgacagctcactgaggcgtgacgcaggtcctccaggcgacacacaacccgactgccacgccccaacggcttcttggacttctcaggacacagccggctgctcacagtggctgaaggcgctgctaaaggtgccactggcacccccagtttggacggctcccacttttacacataggcaaatgttggggtccaccgagctgcggagggaggaggaagagggccagcgcttaggggtgcttcggaaggcgatggcgagaggccagcttctcctgcagagagatctgggttcattgccagctgcagagccacctcctgccccagagtccggtctggaagacaagctgagcgaaaggctcggggaagcatgggcgggcaggggggctgcatggtgggaacgccaacaggggcgaacaagcgagccaggccgacaaactagaaggccaaaacggcgtacccagctctctagcagcttttccctgagcggacatgtcgacccgagcgaggacacgagcagcccccacagcccagagtggcccccggccgacgcccttccccttccacctaccacgcctccctctcaggagcttacaccagatgcctgtgcacaaggagtgccttcagaacaaaggcagatgctgcgggactatatggctaaactccctcctcaacgcgacacaccagggtgcgccacaacacccccacattcccaagcctccagcgtgagagctacccggtcccagcagcatacgcctgttttaagtagcagtcagccacttaggaagaagccgcgtatgggcttctag

SEQ ID NO: 137297 - DNA, 2610 bp, synthetic construct
  misc_feature 1..2610: note = Description of Artificial Sequence: Synthetic coding sequence
  source 1..2610: mol_type = other DNA
atggactttccctcctctcttcgaccagctctgtttttgaccggacccctgggcctatcggacgttcccgacttgtcattcatgtgctcctggcgcgatgccctcacccttccagaggcccagccccagaattcagagaacggcgccttgcatgtaacaaaggaccttctgtgggagcccgccacgcctggaccacttccgatgttaccgcccctgattgacccgtgggatcctgggctgactgcccgcgaccttctttttaggggcggatgccgctatcgtaaacggccgcgtgtcgttctcgacgtcacagagcagataagcaggttccttcttgaccacggtgacgtggcgttcgcccccctgggaaaattgatgctagagaatttcaaactcgagggtgccggatcaagaacgaagaaaaagaccgttgtgtccgtgaagaaacttttacaggacctgggagggcaccagccatggggatgcccgtgggcatacctctccaataggcagcgccggttcagtattctggggggtcctatcctggggacttcggtggcctcccatcttgcagagctgctccacgaagagctggtgcttagatgggagcaattactgctcgacgaagcgtgcaccggtggggctctggcatgggtccctggacggacgccacaattcggccagttggtttatccggccggtggagcccaggatagactccacttccaggaagttgtgttaacacccggggacaatccccagtttttgggaaaacccggccggattcagttgcagggcccagtaaggcaggtcgtcacttgtacagtgcagggggaatctaaggcactgatctatacctttctgccccattggctgacatgttacctcacgccaggtccatttcatccgtccagcgccctgctcgctgtccgcagcgactaccactgtgcggtttggaagttcggcaaacagtggcaaccaacactgctgcaggctatgcaggtggagaaaggagctactggtatctccctgtcacctcatctgcctggtgaactggcaatctgttcaaggtctggggccgtgtgcctttggagcccggaggatggattgaggcaaatctatcgagacccggagacattagtgtttagggacagttcttcttggcggtgggctgatttcacagctcatcctagggttttgaccgtgggagacaggacgggcgtaaagatgctggacacccagggtcccccaggatgcggattgctgctgttcaggcttggtgccgaggcgtcttgccagaaaggggaacgagtcctgctgactcagtacttggggcatagcagtcctaagtgtctgccccccactctgcacttagtctgtacacagttctcgctatatttagtcgatgaacgtctcccacttgtgcctatgctgaaatggaaccatggcctgccctctccactcctcctggcgcgtctgttaccccccccccgtccttcctgtgtgcagcccttactgctgggggggcagggaggtcagcttcagttgctgcacctggcaggggagggagccagtgttcctaggctggccggcccgccgcaaagcctccctagcagaattgattccttacccgccttcccgctgctggagcccaagatccagtggcgccttcaggaaaggctgaaggcgcctaccatcggacttgctgccgtcgttcctccactgcctagtgcaccgacccccggtttggtgctgttccagctgagcgctgctggcgacgtgttttatcaacagctgagacctcaggttgattctagcctccgccgagacgccggaccgcctggggacactcagcctgattgtcacgcccctacagcaagctggaccagccaggacaccgccggctgtagccagtggctgaaggccctgcttaaagttcctctcgctccacccgtatggacggcccccaccttcacccacaggcagatgctgggaagcacagaactccgcagggaggaggaggagggacaacggttaggcgtgctgcgtaaggcgatggcaagaggccagttgttactgcagagagatcttggtagcctaccagccgccgaaccgccccccgcaccagagtctggactcgaggacaaactgtccgagcgtcttggagaagcctgggccggcagaggagcagcctggtgggaaaggcaacaaggccgcactagcgaacccggccgtcagactcgcaggcccaagcggcggacccagctgtcaagctccttctcactctctggccacgtggatccctctgaggacacatcgtcgccccactccccagaatggcctccagctgacgcattacccctgcccccgactacaccgccgagtcaggaactgactcctgatgcctgtgcccagggggtgcctagcgaacaacgacaaatgctgagagactacatggctaagttgcctcctcagcgcgacaccccgggctgcgctactaccccgccacacagccaggcctccagcgttcgcgcaacaagatcccagcaacacacaccagtgctatcatctagccagccactgaggaaaaaacccagaatgggtttctag

SEQ ID NO: 137298 - DNA, 1047 bp, synthetic construct
  misc_feature 1..1047: note = Description of Artificial Sequence: Synthetic coding sequence
  source 1..1047: mol_type = other DNA
atggactttccaagctctctcagacccgccctgtttttaactgggccacttggtctgtcagacgtgcctgacttaagcttcatgtgttcttggagagacgccttgacgctcccagaagcacagccacaaaattccgaaaatggtgctttgcacgtcaccaaagatctcctctgggaacccgctactccgggaccacttccaatgttaccacccctcatcgatccttgggaccccggcctcaccgcacgtgatttgctctttagaggagggtgcaggtataggaaacgccctagggtagtgctcgacgtgaccgagcagatctctcgcttcctgctcgaccacggtgatgtagcatttgcaccactggggaagctcatgcttgaaaactttaagctcgaaggtgctggatcacggactaagaagaagacagtagttagcgtgaagaagttgcttcaagacctggggggccaccagccatggggatgtccctgggcgtatctatccaatagacagcgaaggttctcgatcctgggtggtcctattctggggacttccgtagcatctcatctggcggagctcttgcatgaggagttagtgcttcggtgggagcaactgctattagatgaagcttgcaccggtggggctctggcttgggttcccggacgtactccgcagtttggccagttggtgtacccggccggtggggctcaggatcggctccatttccaggaagtggttctcactccaggagataatccacagtttctgggcaagccaggacgcatccagctgcagggccctgtgaggcaggtggtgacatgcaccgtacagggtgaaacactcctcgccgtgcgttcagattatcattgtgcagtgtggaaatttggtaaacagtggcagccaacactgctccaagccatgcaggtggaaaagggagctaccggaatatccttgagtccgcacctgccaggggaattagccatatgtagccgtagcggggctgtatgtctatggtctcctgaggacggctaccggaggttcctgtag

SEQ ID NO: 137299 - DNA, 2331 bp, synthetic construct
  misc_feature 1..2331: note = Description of Artificial Sequence: Synthetic coding sequence
  source 1..2331: mol_type = other DNA
atgttaccccccctcattgatccgtgggaccccggtcttaccgccagggacctcctattccggggaggatgccgatatagaaagcggcctagggtagtgctggatgtaaccgaacagatttctcgcttcttgctggatcacggtgacgtggcttttgcaccactgggcaaacttatgcttgagaatttcaagctggagggggctgggtcgcgaaccaagaagaagacagtagtgtctgttaaaaaattactccaggatctcggaggacaccaaccctggggctgtccgtgggcttatctgagcaatcggcagaggcggttctccatcctcgggggaccaatcctgggaacaagtgtggcatctcacctagcagagctcttgcatgaggagctggtgcttagatgggaacagcttctattagatgaggcgtgtacagggggtgcccttgcatgggtgccaggccgaacccctcagttcggacagttagtctatccagccgggggggctcaggatagactccatttccaagaagtcgtcctcacgccaggagacaatccacagtttctgggcaagccgggaaggattcagctgcagggacctgtaaggcaggtcgtgacctgtactgtccagggggagacgctgctcgcagtgcggtccgattaccattgtgccgtctggaaatttgggaagcagtggcagcctacattattgcaggcgatgcaggtggaaaaaggcgccaccggaatatccctatccccccacctgccgggtgaactggctatctgctcccgatccggtgcagtgtgcctatggagtccggaagatggactgcgccagatctatagagaccccgaaacgctggtgttccgggactcaagttcatggcggtgggcggacttcacagcccacccgagggtgctcactgttggcgatcggaccggtgtgaagatgctcgacacccagggaccgccggggtgcggcctccttctgttccggttaggggccgaagcttcctgccaaaagggggagagagtcctgctgacgcagtatctgggccactctagccctaagtgtctgccccccacattgcatcttgtgtgtacccagttctctctgtatctagtagatgaacgcctgcctctggtgcccatgcttaaatggaaccatgggctgccatccccccttttgctggccaggttgttgcccccacctcgcccatcatgcgtgcaaccactgttgctgggagggcagggcggtcaactgcagctgttgcatctcgctggcgagggggctagtgtacctagactggccggtccaccacagtcactgccctcccggatcgacagtttgccagcttttcctctgctcgagccaaagatccaatggaggcttcaggagcgcctgaaggcccccacaatcggcctggctgcagtggttccccctcttccttcagcccccacgcctggcctggttctattccagctgtccgccgcaggagacgttttttaccaacagctgcgccctcaagtcgattccagtctcaggcgcgacgcaggtcccccaggagacacccaacccgattgccatgctccaaccgccagttggacgagtcaggacaccgctggatgttcccagtggctgaaagcactcctgaaggttccacttgctcccccagtgtggactgcccccacattcacacatcggcagatgctgggttcaaccgagctgcgccgggaagaggaggagggccaaaggctgggagttctgagaaaagcaatggctaggggacagctcctcctgcaacgcgacctgggttcactacccgcagcggaaccccctccagccccagagagcggactggaagacaaactcagtgagaggctcggtgaagcctgggccggtagaggggcggcatggtgggagcgccagcagggacgcaccagcgagccgggtaggcaaacgaggcggccaaagcgcagaacgcagctgagcagcagtttttccctgtctggccatgttgacccttcggaggacacaagctcaccccacagccccgaatggccacctgcggacgccctccccctaccgcccacgaccccgcctagccaggagcttactccagatgcctgtgcccagggggtgcccagcgagcagagacagatgctccgcgactatatggcgaagctgcctccccaaagggacacgcccggatgcgcgaccactcctccacacagccaagcctctagcgtgagagccacacggtcacaacaacatactcccgttctgtcgtcatctcagcctctgcggaaaaaaccgaggatgggcttctag

SEQ ID NO: 137300 - DNA, 1179 bp, synthetic construct
  misc_feature 1..1179: note = Description of Artificial Sequence: Synthetic coding sequence
  source 1..1179: mol_type = other DNA
atgctgaagtggaaccacggcctaccgagcccactcctcttagctagactcctgccgccgccaaggccctcttgtgttcagccgcttctcctgggagggcaaggcggacagctgcagctcctacatctggctgagggcgctagcgttccgcgattagcagggccaccacagagcctgccaagcagaatcgactcgcttcccgccttccccctgcttgaaccaaagatccagtggcggttgcaagagcgcttgaaggcaccaacgatcggcctggctgcagtggtgcccccattgccctctgcccccactccaggccttgtactctttcagttatcagcagcaggagatgtgttttaccagcaattgcggccccaggtcgacagtagtctgcggagagacgccggacctcccggggacacacaacccgactgccacgcgccaaccgcgtcctggacgagtcaggacactgcaggatgctctcagtggttgaaggccctgctcaaagttcccctggctcccccggtctggaccgcccccaccttcacccacagacagatgctgggctctaccgagctcagacgggaagaggaagaggggcagcgactcggtgtgctacgcaaagcaatggcccgagggcaacttcttctccagagggatttggggagcttacccgcagcggaacctccgcctgccccggaatccggcctggaagataagttgagcgagagattaggcgaggcatgggcaggcaggggagctgcgtggtgggaacgccagcagggacggacctccgagcccggacgccaaacgagaagacctaagcgcaggacccagttgagcagtagtttttctcttagtggacatgtagacccttctgaagacacttcctctccccatagtcccgagtggccccctgctgacgcgctgcccctgccacccactacccccccgagccaggaattgacccccgacgcttgtgctcagggggtaccatcagagcaacggcagatgctgcgggactacatggcaaaattgccaccacagcgcgacaccccaggttgcgccactacaccgcctcatagccaggcctcttccgtcagggccactcggtctcaacagcacacccctgttctgtcatccagccagccccttaggaagaagccgcgaatgggattctag

SEQ ID NO: 137301 - DNA, 837 bp, synthetic construct
  misc_feature 1..837: note = Description of Artificial Sequence: Synthetic coding sequence
  source 1..837: mol_type = other DNA
atggacaaatcagggatcgactcgttggaccatgtgaccagcgacgcagtggagttagccaataggtccgacaacagcagtgactcctcgctgtttaagacacaatgcattccttactcgcctaaaggagagaagcgcaatcctattcgcaagttcgtacggacccccgagagcgttcatgccagtgattcttcatctgactcctcattcgaaccaatcccgttgactatcaaggccatcttcgagaggttcaaaaaccggaagaaacgctacaagaaaaagaagaagcgaaggtatcaacccaccggccgccccaggggacgccctgagggtagacggaatcctatctattctctgatcgataagaagaaacagtttagatcccgcggcagcggattcccatttctggaatccgaaaacgagaaaaacgccccttggcgcaagattttgacttttgaacaagcagtggcgcgtggattcttcaattacattgaaaagctaaagtacgagcatcatctgaaggagtcattgaagcagatgaatgttggcgaggacctggaaaacgaggatttcgatagccgcaggtataaatttttggacgacgacgggagcatctcccctatcgaggaatcgactgctgaggatgaggacgcaacacacctggaagacaacgaatgcgacataaaattggctggagattcctttattgtttctagtgagttcccagtgcgactctccgtttacctggaagaagaagatataactgaggaggccgccttgagcaaaaaacgggcaactaaggctaagaacacgggtcagcggggcctgaaaatgtag

SEQ ID NO: 137302 - DNA, 837 bp, synthetic construct
  misc_feature 1..837: note = Description of Artificial Sequence: Synthetic coding sequence
  source 1..837: mol_type = other DNA
atggacaaatcgggcatcgacagccttgaccacgtcacctctgacgccgtagagcttgctaaccgcagtgacaactcctcggatagttccctcttcaaaacccagtgtatcccatatagtcctaaaggggagaagagaaatcctatacggaagttcgtaagaaccccagagagtgttcacgcatccgacagtagttccgactcaagcttcgagccaattcctctcactatcaaagctattttcgaaaggtttaaaaataggaaaaaaagatataagaagaagaaaaagcgccgctatcaacccacggggcgaccacgcgggcggcctgagggccggcgcaacccgatttactccctgattgacaagaagaaacagtttaggtcccgtgggagtggcttccctttcctggagagcgagaacgagaagaacgctccctggagaaagatcctgacgtttgaacaggccgtggccaggggtttctttaattacatcgaaaagctaaagtatgagcaccatctgaaagagagcctgaagcagatgaatgtaggtgaggatcttgaaaacgaagactttgattctaggcgttataaatttctcgacgacgacgggtccatttctcctatcgaggagtcaacagctgaagacgaagacgccacgcatctagaggacaatgagtgtgatataaaacttgccggggattcatttatagtgtcgtccgagtttccagtccggctgtcggtctacctggaagaggaagatatcaccgaggaggctgcattaagtaagaaaagagcgacgaaggcaaaaaacaccggccagcgcggtctgaagatgtag

SEQ ID NO: 137303 - DNA, 837 bp, synthetic construct
  misc_feature 1..837: note = Description of Artificial Sequence: Synthetic coding sequence
  source 1..837: mol_type = other DNA
atggacaaaagcggaatagattccctggatcatgtgacctctgacgccgttgagttggcaaaccgctcagacaattcctccgattctagcctcttcaagactcagtgcattccttattccccaaaaggtgaaaagagaaatccaatccggaagttcgtgcgaactccagagagcgttcatgcctctgactcctcatcagacagctcgttcgagcccatcccactcacaattaaggcgattttcgaacggttcaaaaaccgcaaaaagcggtataaaaagaagaaaaaaaggcggtaccagcctacagggcggccacgagggcggcctgagggtcggcgtaatcccatttattcattaattgataagaagaagcagtttagatcccggggctctggcttccccttcttggaatccgagaatgaaaagaacgccccatggcgcaaaatcctcacattcgagcaggccgtcgctcgcggattctttaattacatagagaagctcaagtacgagcatcacttaaaagaaagcctcaaacagatgaatgtgggggaggatttggaaaatgaggatttcgactccaggcgctacaaattcctcgatgatgatggatccattagtcccatcgaggagtctaccgccgaggatgaggacgccacacatttagaggataacgaatgtgatatcaagctcgcgggcgattcctttatagtatcaagtgagttccccgtcaggttgagcgtgtacctcgaggaagaagacatcactgaagaagccgcgctctcaaaaaagagagcaacgaaggccaaaaatactggacagcggggcctcaagatgtag

SEQ ID NO: 137304 - DNA, 27 bp, synthetic construct
  misc_feature 1..27: note = Description of Artificial Sequence: Synthetic coding sequence
  source 1..27: mol_type = other DNA
atggacaagtctggcatcgacagttag

SEQ ID NO: 137305 - DNA, 3030 bp, synthetic construct
  misc_feature 1..3030: note = Description of Artificial Sequence: Synthetic coding sequence
  source 1..3030: mol_type = other DNA
atgtcatggtttaacgcctctcaactgagctccttcgccaaacaggctctgagtcaggctcagaagagcatagaccgcgttttggacatccaggaggaagaaccttctatctgggcggagaccatcccctacggagaaccgggaatttcatccccggtgagtgggggatgggacacgtcaacttggggtttaaaatcaaatactgagccgcagtctccccctattgcctctccgaaggctattaccaagcctgtgcgccgaacagttgtagacgagagcgaaaatttcttttctgcctttctgtctccaacagtgtccctgaaggtcagcgaatccgtcattgacgtgaagactactatggaatcaattagcaataccagcacccaaagccttactgcagagactaaggatatcgcactggagccaaaggaacagaaacacgaggacaggcaaagcaacacgcccagcccgcccgtgagcacattctctagtggaacttcaacaacatcagacatcgaggtgctggaccatgagagtgtgatctctgagtccagcgctagcagtcgacaggaaactactgatagcaaatctagcttacatctgatgcagacatcatttcagttgttgagcgctagcgcctgccccgagtataataggttggacgacttccaaaaactcaccgaatcttgctgtagcagcgatgccttcgaacggattgacagcttcagcgtgcaatccctggattcgagaagcgtgtcagaaattaactcagacgacgagctgtctggaaaggggtacgccctggtgccaattatcgttaatagctctacgcccaagagcaagactgtggaatccgctgagggcaagtccgaagaagtgaacgagactctggtcatacctaccgaggaagctgaaatggaggaatccgggcggtccgctactcctgtgaactgcgaacagccagacattctagtgagctcgacaccaattaatgagggtcaaacggtgcttgataaggtggctgagcaatgtgaacctgccgaatcacagccggaggcgctgtcagagaaggaagatgtctgcaaggtgactcttaccgtcgaattcttaaacgaaaagctagaaaaaagagaggcccagctgcttagcctatctaaagagaaagcccttctggaagaggcatttgacaacctcaaggatgaaatgttcagggtgaaagaagaaagttcctccatctcatcccttaaagatgagtttacacagaggattgcagaggccgagaaaaaagtacagctggcctgcaaggaacgcgacgccgcgaagaaggaaattaagaacatcaaagaggagcttgccacaagattgaacagttccgagactgccgatctgctgaaggagaaggacgaacagatcagggggctcatggaggagggcgagaagttgagcaaacagcagctgcacaactctaacatcattaaaaagctgagagcaaaggacaaggaaaacgagaacatggtggctaagcttaataagaaggtgaaggagctggaagaggaactgcaacatctgaaacaagtcctagacggaaaggaagaagtcgaaaagcagcacagggagaatataaaaaaactgaacagcatggttgagagacaggagaaagacctgggtcgacttcaggtcgatatggatgagctggaggagaaaaacagatccatccaggcagcgcttgacagcgcctacaaggaacttaccgacctgcacaaggctaatgctgcgaaggatagcgaagctcaggaagccgctctttccagagagatgaaggcgaaagaagaactttctgcagcacttgagaaggcccaagaggaagccaggcagcagcaggaaactttggctatccaggtgggagacttgaggctggcattacagcggactgagcaagctgccgcccgcaaggaagactacctgcgacatgaaatcggagagttgcagcaacggctccaggaggctgagaatcggaaccaggaattgtcacagtccgtgtcctcaaccaccaggccactgttacgccagatcgaaaacttacaagcaactttggggtctcagacaagtagttgggaaaaactggaaaaaaatctctccgaccggttgggcgagagccagaccctgctggccgccgcagtggagcgggaaagggccgctaccgaggagctgctcgctaacaaaatccagatgtcctccatggaatcacagaatagcctgttgaggcaagagaatagccgtttccaagcccagctcgagtctgaaaagaacaggctgtgtaagcttgaagacgaaaataatcgttaccaggtggaattggagaatctgaaggacgagtatgtgagaacactagaggagacacggaaggagaagactctgctgaattctcagcttgaaatggagcgaatgaaggtcgagcaggagaggaagaaagccatattcacccaggaaacgattaaggaaaaggagagaaaacccttcagcgtctccagtacgccaactatgagcagatcctcatccatatctggtgtggacatggcgggtcttcaaacctcctttctctcccaagacgaatcacacgatcactcattcggaccaatgcctatttctgctaacgggtccaatctgtacgatgcagtgcgaatgggtgcgggaagttccataattgaaaacctgcagagccagttaaagctgcgggagggggaaataacccacttgcagctcgagataggaaatctggagaagactcggtctatcatggccgaggagctcgttaaactgactaatcaaaacgacgagcttgaagagaaggtgaaagaaattccaaaactacggacacagctgagggaccttgatcaaaggtacaacactatcctgcagatgtacggcgagaaagccgaggaggccgaggaactgcgtctggacttggaggatgtaaagaatatgtataagacgcagatcgacgaactcttgcgacagagcctctcctag

SEQ ID NO: 137306 - DNA, 3282 bp, synthetic construct
  misc_feature 1..3282: note = Description of Artificial Sequence: Synthetic coding sequence
  source 1..3282: mol_type = other DNA
atgtcatggtttaacgctagccaactgtcttctttcgccaagcaggcgctgtctcaggcgcagaagtcaatcgaccgcgttttagacatccaagaagaagagccctccatatgggccgagactataccctatggcgaacctggcatttcatcccccgtttctgggggctgggacacgtccacctggggccttaagagcaatacagaaccacagagcccacctatcgcatcacctaaagcaatcaccaaaccggtgaggcgaactgttgtcgatgagtctgaaaattttttctccgcattcttgtcgcccactgatgtccagacaatccaaaagtcccctgtcgtttccaaaccccctgcgaaaagtcagcggcctgaagaggaggtaaaatcatccttacacgagagcttgcatattgggcagagccggacacccgaaaccaccgagtctcaagtgaaggatagcagtctgtgtgtcagcggcgagaccttggccgccggaactagctctccaaagacagaaggaaagcatgaggagacagtgaataaagagtctgacatgaaggttccaacagtgagccttaaagtttcagaaagtgtgatcgatgtgaaaaccaccatggagagcatttctaatacctccacgcagagccttacagctgagactaaagacatagccctggagcctaaagagcagaaacatgaagatcggcagtcaaacacaccctcacctcctgtgtctaccttcagttccggtacgtctacaacgtcagatattgaagttctggatcacgagtccgtgatctccgaaagtagtgcaagctccagacaggagacgactgatagtaagtcctccttgcatctgatgcagacatcctttcagctgctgtcggcctccgcttgtcctgaatacaacagactggatgactttcagaagctaacagaatcatgctgtagcagcgacgcattcgagagaatcgattcctttagcgtgcaatctctggacagcaggtctgtgtcggaaattaactcagacgatgaactctcaggaaaaggttacgcgctagtgccaattatcgtaaattcctcaacgccaaaaagcaaaaccgtggaaagcgctgaaggcaaaagcgaagaggtgaacgaaacactggttatccccacagaagaggcggagatggaagaaagtggtaggtccgctactccagttaactgtgaacagcctgatatcctggtgagctctactcccattaatgagggccagaccgtcctggataaggtagccgagcagtgcgagcccgcagagagccagccagaggcgttgtctgaaaaggaagatgtgtgcaagaccgtggaatttctcaacgagaagttagaaaaaagagaggcccagttgctctctctatccaaagaaaaagcactgcttgaagaggccttcgacaatctgaaagacgagatgtttcgagtaaaagaggagagttcctccatctccagtctgaaggatgaattcacccagcgcatcgcagaggcagagaagaaggtccagctggcatgtaaggaaagagacgccgccaaaaaagaaatcaagaacattaaagaggagctcgcaaccaggctcaatagcagcgaaacagctgacctcctgaaggaaaaggatgaacaaatcagggggctgatggaggaaggcgaaaagttgtccaagcaacaattacacaactccaacattataaaaaaactgcgggcaaaagacaaggagaacgagaacatggttgcaaagctgaacaaaaaggtgaaagaattagaagaagagctgcagcacctcaagcaagtcctggatggaaaggaagaggtcgaaaagcagcacagagaaaacatcaagaagttgaactcaatggttgaacgccaggaaaaggacctggggaggctgcaggtcgatatggatgagctggaggagaagaaccgttccatccaggccgcgctggactccgcctacaaagaactcaccgatctccacaaggccaacgctgccaaggatagcgaagcccaggaagcagctctgagtcgggaaatgaaggcgaaggaagagctgtctgccgccctggagaaggcccaggaagaggctaggcagcagcaggagactctggcaatccaggttggggatctgcggttggccctccagagaactgagcaggctgccgccaggaaggaggattatctccgtcatgagataggggagctccaacagagactgcaggaggctgaaaataggaatcaagaactgagccagtctgtgagtagcactaccaggcccttactccggcagatcgaaaacttacaggccacactcggttcccagacatcgtcatgggagaaacttgagaaaaatctttccgatcggctaggagaatcacagactttgcttgcagcagcagtggagcgagaaagagctgcgacagaggaactgctcgccaataaaattcagatgagctctatggaatcgcagaactctctactacgtcaagagaattcacgcttccaagctcagcttgaatccgaaaagaataggctttgcaaattggaagacgagaataataggtaccaggtggaattggagaacctgaaagatgaatatgtccggactctcgaggagacgcggaaggagaagacactattgaacagccagttggagatggagcgcatgaaagttgaacaagagcggaagaaagccatttttacccaggagacgataaaagaaaaggagaggaagccattctctgtaagtagcacacccactatgtccagaagctcttctatatctggggtggatatggccggcctccagacaagtttcctgagccaggacgagagccacgaccacagttttggcccaatgcctatttctgccaacggatccaatttatacgatgctgtgaggatgggtgcgggaagttcaatcattgagaatcttcagagtcaactgaagctcagagaaggggagataacccaccttcagctcgagattggcaatctcgaaaagactaggtcgattatggccgaagagctggtgaagctcacaaatcagaatgatgaactggaagaaaaagtgaaagagattccaaaattgcggacgcaactcagggacctggatcagcgttataatacgattttacaaatgtatggggaaaaagctgaagaagccgaggaactgagactggatctggaggacgtgaagaacatgtataaaacccagatcgacgagcttctacgacagtccctgtcttag

SEQ ID NO: 137307 - DNA, 1602 bp, synthetic construct
  misc_feature 1..1602: note = Description of Artificial Sequence: Synthetic coding sequence
  source 1..1602: mol_type = other DNA
atgtcttggtttaatgcatctcaactctcaagtttcgccaagcaggcgctttctcaagctcaaaagtccattgatagggtgctcgacattcaagaagaagagccatctatctgggccgaaaccataccctatggggaaccaggaatcagctcccctgttagtgggggatgggataccagcacctgggggctgaagagcaacacagagcctcagtctccaccaatcgcatccccgaaggcgatcaccaagccggtgaggcggaccgtcgtcgatgagagtgaaaacttcttttcggcttttcttagtcccaccgacgttcaaacgatccagaaaagtccagtggtgtctaagcctcccgccaaatcccagcgtccggaagaagaggtcaagagctccctccatgagagtctgcatatcggacagagcaggacacccgagaccacagagagtcaagtgaaagactctagcctgtgtgtctccggggagaccttagccgctggaaccagcagtcctaagaccgaagggaaacacgaagaaaccgtgaataaggaaagcgacatgaaggtgcccaccgtctccctaaaggtttccgagtccgttatcgacgtgaagactactatggagtccatttctaacacgtcaacacagagtctaactgcagagaccaaggatattgccctggagcctaaggagcagaagcacgaggaccggcagagtaatactccaagtccacctgtaagtaccttctctagcggcacgagtaccacctctgatatcgaggtgctggaccacgaatccgttatctcagagagtagcgcctctagcaggcaagagacaacggacagcaagtctagtctccacctgatgcaaacaagtttccagctgttatcagctagcgcgtgccctgagtataacaggctggatgactttcaaaaacttacagagagctgttgcagtagtgatgctttcgaacgcatcgatagcttctcagtgcaatctctggattcccgatccgtatccgaaatcaactccgatgacgaactatccgggaaagggtacgccctcgtgcccatcatcgtcaattcatccacccccaagtctaagaccgtcgagagcgcggaggggaaatcagaagaagtgaatgagaccctggtgatcccaaccgaggaagccgagatggaggagagcggtcgaagcgccactcccgtcaactgtgagcagccagatattctggtgagcagtacccccatcaatgagggacagacagtcttggataaggttgcagagcagtgtgaaccggccgaatctcagcccgaagccttaagcgaaaaagaagacgtctgcaagacagtggagtttctcaatgaaaagctggagaagagagaggcccagctattaagcctcagcaaggaaaaggccttgctcgaagaggcctttgacaacctcaaggacgaaatgttccgagtgaaggaggagagctctagtatatcgtcattgaaggacgagtttacacaacgtatagcagaggccgagaagaaagtacagcttgcctgcaaagagcgcgacgcagccaaaaaggaagtaaaaaggaagaaaaggtag

SEQ ID NO: 137308 - DNA, 3291 bp, synthetic construct
  misc_feature 1..3291: note = Description of Artificial Sequence: Synthetic coding sequence
  source 1..3291: mol_type = other DNA
atgtcttggtttaacgcatcccagctgagctcgttcgcgaaacaggccctgtcacaggcacagaagtcaatcgatcgggtgctggatattcaagaggaagaaccctcgatatgggcagaaacaatcccttatggagaaccagggattagttcccctgtctcaggcgggtgggatacaagcacatggggactgaagtccaatactgaaccacagagccccccaattgccagcccaaaagccataaccaagcctgttcggaggactgtcgtggacgagtccgagaacttcttctcagcatttcttagccctactgacgtacagaccattcagaaatcgccagtggtatctaaaccgcccgctaaatcccaacgacccgaggaggaggtgaagtcttccctgcatgaaagcctacacattggtcagtcccggacccccgaaacaactgaatcccaagtgaaggatagtagtctgtgcgtgagcggggagactctcgcagccggtacatctagccccaagacggagggcaaacacgaggaaacggtgaacaaggagtctgatatgaaagtgcccaccgtcagtttaaaggtatctgaatctgtgattgacgttaagacaacaatggaaagcatttcgaacacgagtacacagtcactgactgcggagacgaaggatatcgcccttgaacctaaagagcagaagcacgaagacaggcaatctaatacaccttccccaccagtgtcaactttctcaagcgggacttcaacaaccagtgacatcgaggttctggatcacgagtccgttatatccgagtcttctgcgagttctcggcaggaaacaaccgatagcaaaagcagcctacatcttatgcaaacgtcttttcagctcctctcagctagcgcctgccccgaatacaataggctggatgatttccagaagttaactgaaagctgctgctcttccgacgcctttgaaaggattgattccttcagtgtccagtccctggattctaggtccgtgagtgagatcaattccgatgacgaattaagcgggaagggctatgctttggtgccaattattgtaaactcgtcaacccccaaatcaaagacagtcgagtcagccgagggcaagtccgaggaggtaaacgaaactctggtaatccccacagaggaagccgagatggaggaatccggaaggtccgcaacacctgtcaactgcgaacaaccggatatactcgtaagctccacccctataaacgagggccagacggtactggataaggttgcagagcaatgtgaacctgccgagtcccaacccgaggctctgtctgagaaagaggatgtgtgcaaagtgacacttacagtggagttcttgaacgagaaactggaaaagagagaagcccagctcctgtccctgtcgaaggaaaaggccctattagaggaggccttcgacaacctgaaagacgaaatgttccgcgtgaaagaggagagttcaagcataagcagcctgaaagatgaatttactcagcgaatcgccgaggcggaaaaaaaggttcaactggcttgcaaagagcgggacgccgcaaaaaaggaaataaaaaatataaaagaggaactagctacacggttaaattcctctgagactgcggatcttttgaaagagaaggacgagcagattagggggcttatggaagaaggggagaaactctctaagcagcaactgcacaactccaacatcataaagaagctcagggcgaaagataaggagaacgaaaacatggtcgctaagctcaacaagaaagtgaaggagttagaggaagagctgcaacacttgaaacaggtgctagatggcaaggaagaagtggaaaagcaacaccgcgagaacatcaaaaagctgaatagcatggtcgaaaggcaggagaaggacctgggtcgtctgcaggtggatatggacgaattagaagagaaaaataggagcatccaagcagcactggatagcgcctacaaggaattgactgatcttcacaaggccaacgccgcgaaagatagtgaggctcaggaggcagcactttcgcgggaaatgaaggccaaggaggaactcagcgctgccctcgagaaggcccaggaagaggcaagacagcagcaagagacactagccattcaggtgggcgacctaagattagcgctccagcgcacagagcaggcggcagcaaggaaggaggactatctgcgccacgaaattggtgagctgcaacagaggctgcaggaggcggagaacagaaaccaggagttatcccaaagtgtgtcaagcacaacgagaccactgttgaggcagatcgagaatttacaagccacattgggatctcaaaccagttcgtgggagaagctagagaaaaacctttctgatagacttggcgaaagccaaacccttctggccgctgcagtggagagagagcgagccgccactgaagagctgctcgccaacaagatccagatgagtagcatggagtcacaaaacagcctcctcagacaggagaattcacggttccaagctcagttggaaagcgaaaagaaccgcctttgcaaactggaggatgagaacaataggtaccaggtggaattagaaaacctgaaagacgagtacgtacggacattagaagagaccagaaaagagaaaactctgctgaattctcaattggaaatggagaggatgaaggtcgaacaggagagaaaaaaggctatcttcacacaagagactattaaagagaaggaacgcaagcctttcagcgtgtccagcacccccaccatgtcacgcagctcttctatttccggcgtcgatatggctggactccagacatccttcctgagccaggatgaatcccacgaccatagcttcggacctatgccgatttctgccaatggtagtaatctttatgatgccgtgaggatgggcgccggtagctctattatcgaaaatctgcaatcccagctcaagcttcgggaaggagaaattacacaccttcagctggaaataggaaatctggagaagaccagaagtattatggcagaagagttggtcaaactcacaaaccaaaatgacgagctggaagagaaggtcaaggagattcccaagctgcggactcaattacgcgacctggatcaacggtacaacaccatactgcagatgtacggtgaaaaagccgaggaggcagaggagttgcgcttagaccttgaggacgttaaaaacatgtacaagacccaaatagatgagctgctgagacagtcactatcttag

SEQ ID NO: 137309 - DNA, 4950 bp, synthetic construct
  misc_feature 1..4950: note = Description of Artificial Sequence: Synthetic coding sequence
  source 1..4950: mol_type = other DNA
atggagagcgtcgaaaaagattggggctggggtctgtggagaaacctgcgttgtctgggccatgcacatcaagggaagtgttgtaccgaaggcggcattagcagtaccaccaaaacatctagtgagaacggcagttgctgttttgaaaaagccgctcggaaagaccacgtttgccgctttatagggtgtggtcgaaatgatcgatttaattacgtggtcatgcagctccagggcagaaatctggccgacctgagacggagccagtctcgcggcacgtttacgatttcaaccaccttaagactgggccgccagatccttgagtcgatcgagtccattcattctgtcggatttttgcatcgggacattaagccctctaactttgccatgggcaggttcccatcgacatgtagaaagtgctacatgctcgattttggtctcgcaagacagtttaccaatagttgcggagacgtccgtccacccagggcggtagcgggctttcgagggactgtgcggtatgcctcgatcaacgcccataggaaccgcgaaatgggaagacacgatgatttgtggtcccttttctacatgctggtagaattcgtggtcggccagttgccttggcggaagatcaaagataaagagcaggttggatccatcaaggaacgatatgatcacagattgatgcttaaacacttgccccccgaattttccatcttccttgatcacatctccagtctggattacttcaccaaaccagattatcagatgtccattagagttacaagaaagagctataaggtgagtactagcggcccccaggcattcaattccctgagctacaccagtggacccggcgcgtgcattagtagtagcagcttctcacggatgggctcttcctcatttcgcggcggtttaggggctggttatggcggagcctccggggggattaccaccatcacagtcaatcagtccctgctgtcacctctgaacctcgaggtggatcctaacatacaggccgttaggacccaggaagagaagcagataaaaaccctgaataataaattctttagctttattgacaaggtgaggtttctcgagcagcagaacaagatgctggagacgaagtggtcactcgtacagcagcagaagatggcccgcagtaatatggataacatgtttgaatcctacattaacaacttaaaatggcagctggagaccctcggtcaggagaagttgaagttggaagctgagctgggcaacatgcacggattggttgaagatttcagaaacaagtacgaagtagagatctccaaatgcaccgagatggagaacgagtttgtccttattaaagaatatgttgatgaagcttacatgaataagatggaactggaaagctctctgaaagagcttactgcaaagatttcttttctgagacagctctatgaggaagagattggaagctgctcacccaggtcaagaatacacttgtggtgctgctcttggaccacagcagccagttggacctggacagcctctagtctccgcagtcgtcccgagggttttccaggagggtgccatgccgacaccgagcagcgcggggagttagccatcaaggatgcaaacgctaaactgtctgaactggaggcagcattgcagctcgcgtcacaggatatggcgcgacagttgcgggaataccaggaactgatgaatgtcaagctcgcgcttgacataaagatcgccacttacagaaagctcctggagggggaagagtcgtggttggaatcagggatgcagaatatgtcaatccacatgaaaacaacgtctagctatgcaggagggcagtctctcgcgtatggtgggctcacaagccccggtttaagttacggactgggatccagtttcggcagtggcatgggctcgtcttccttctcacacacctcttccagccgggcggtggttatgaagaaaattgaaacccgcgatggtaaattggtctctgaaagctcaaatgtactgcctaatctgcgcatcacagcaacactgctcacctccgtatttgacaattctattaagactttcggggtaatcgaaagcgaccctttcgattgggagaagacagggaatgacggatctctgacaacaaccaccaccagtaccacccctcagttgcataccagactcacccctgctgctatcgggatagcaaacgccacccctattccaggggacttacttcgcgagaacactgacgaagtcttcccggacgagcaactcagcgacggcgagaacggcatacccgtcggagtatcacccgataagctgcccggtagtttgggccacccacgacctcaggaaaaggatgtgtgggaggagatggatgccaataaaaacaaaataaagctgggcatctgtaaggccgcaacagaggaggagaactctcatggtcaggcaaatggtctcctgaatgccccttctcttggctctcccataagagtgagatccgaaattactcagcctgaccgagacatccctttagtcagaaagctaaggagcatacattcatttgagttagagaagcgcctcacactggaacctaagcccgacaccgataaatttctggaaacgtgcctcgaaaagatgcagaaagatactagcgccggtaaggaatctatcctccccgctttgctgcataagccctgtgtcccagcagtgagccggacggaccatatatggcactacgatgaagagtatctcccggacgcgtcaaaacctgctagtgccaacaccccagagcaagccgacggcggaggctccaatggctttatagccgtgaacttgagtagttgcaagcaagaaattgattccaaagagtgggttattgttgacaaagagcaagatttgcaagatttccgaacgaacgaggccgtaggtcacaaaaccaccgggtccccttccgacgaggaaccggaagtcttacaggtcctggaggcaagcccacaggacgagaagctgcagctgggcccatgggccgagaacgaccatctgaaaaaggagacatcgggagttgttctggccctgtctgcagaaggcccacctaccgccgcttccgagcagtacaccgatcgcctcgaactccagcccggcgccgcaagtcagttcatcgcggccacgccgacttcccttatggaggcccaggcagaaggtccgctcaccgccatcaccatcccccggccttcagtcgcatcgacccagtccacatcaggaagcttccattgcgggcagcagccggaaaagaaagatctgcagcctatggagcccactgtggaactatatagcccacgtgaaaatttttctgggctggtggttactgagggtgaacctccctcagggggctcgcgcacagatcttggactccagattgaccacatcggccacgatatgctgcctaatattcgggaaagcaacaagagtcaggacttggggcctaaggagctgccagatcacaatagactcgtggtccgcgagttcgagaacttgccaggggagaccgaagagaaatctattcttctggaatccgacaacgaagacgaaaaattatcacgcgggcagcactgcatagaaatctcttcattgcctggcgatcttgtaatcgttgaaaaggatcactctgcaaccaccgagcctcttgacgtgacaaagactcagacttttagcgtggttcccaaccaagacaaaaataatgagataatgaagctgctcactgttggaacaagcgaaatcagtagtagggacatagacccacacgttgaaggccaaattggacaggtggccgaaatgcagaaaaacaagatcagcaaggatgatgacataatgagcgaagacctgccagggcaccaaggggacttgtctaccttcctgcaccaggagggaaagagggagaaaatcaccccaaggaacggtgagctgttccattgtgtgtccgaaaatgaacacggagccccaacacggaaggacatggtgaggtccagcttcgttaccaggcacagccggattcctgtccttgcgcaggaaatcgattccaccctcgaatcttcatccccagtctcggccaaggagaaacttctacagaagaaggcgtatcagccagacctagtgaagctgctagtggagaaacggcaatttaaatccttcctcggcgatctttcctctgccagcgacaagctattggaagagaaactcgccaccgtcccggctcccttctgtgaagaagaagtgctgacaccctttagccgtcttacggtggattcccatttaagccgctcagccgaggatagctttctgtctcctatcatttctcagagtcgaaaaagtaagattccaaggccagtgtcctgggtcaataccgatcaggtcaatagctcgacaagctcacagttctttccaagacccccaccaggtaagccccccactagaccgggcgtagaagcacgcctccggaggtacaaagtgctcgggagttccaattcggacagcgatcttttcagtcggttggcgcagattctacaaaacggctcacaaaagccccgcagcacaacgcagtgcaagtctccgggctcacctcataaccctaagacgcctcccaaatccccagtcgtgccccggagatccccttctgcgagccctcggagtagctcccttccaaggactagttcaagctcacctagtcgggcaggacggcctcaccatgatcagcgtagcagttccccccacctgggcagatctaaatccccgccatcacattccggctcgtccagtagccgccgatcttgccagcaggagcactgcaagccctccaagaacgggctgaagggctcaggctcgctacatcatcacagcgcctctaccaagaccccacaggggaagtccaaaccagccagtaagctgtccaggtag

SEQ ID NO: 137310 - DNA, 3735 bp, synthetic construct
  misc_feature 1..3735: note = Description of Artificial Sequence: Synthetic coding sequence
  source 1..3735: mol_type = other DNA
atgagtggtggcggcgagcagctcgatattctgtctgttggtatcttggtgaaagaaagatggaaagtactacgaaaaatcgggggggggggtttcggggaaatctacgatgcattggatatgctcacacgggaaaacgttgcattgaaagtcgagagcgcccagcagcctaaacaggtcctgaaaatggaagttgctgtgctgaagaagctccaagggaaggaccatgtctgccgctttatcggatgcggaagaaacgaccggttcaattatgtggtgatgcagcttcaaggtagaaatttggccgacctccggcgatcacagtcccgggggacttttacaatttcgacaactcttcgcctggggaggcagatcctggagtctatcgagagcattcactctgtgggctttcttcacagggacattaagccatctaactttgctatggggcgctttcctagcacttgtcgaaaatgctatatgcttgatttcggattggctcgccagtttacgaactcttgtggggacgttagaccgcctcgcgcagtggccggttttagaggaacagttcgctacgcaagtattaatgctcatcggaacagagagatgggccgacatgatgacctttggtcacttttttatatgctcgtggaatttgtggtggggcagctgccatggcggaaaatcaaagacaaagaacaggtgggctccatcaaagaaagatatgaccatcggttgatgctcaaacacctacctcctgaattctcaattttcctggatcatatttcttcactcgactacttcaccaagccagactatcagttactcacatccgtcttcgacaactcaataaagacattcggggtcattgaatcagacccattcgattgggagaaaactggcaacgatgggtctctcactactacaacaactagcacgactccacagctgcatacacggttgacaccggccgccataggaatcgccaacgctacccctattcctggagatttgctgagagagaatacagatgaggtgttccctgatgagcagttatccgatggagaaaatggtattcctgtgggcgtgagtcctgacaagcttccaggttccctggggcacccacggcctcaggaaaaggacgtttgggaagaaatggatgctaacaaaaataaaatcaagctgggcatctgcaaggccgccacagaagaagagaatagtcacggccaagctaatggcctccttaatgcaccaagcctgggcagtccaattagagttcgttccgagatcacccagcctgaccgcgatattcccctggtgcgtaaactgcggagtatccatagtttcgagctagagaaacggctgaccctggaacctaagcccgataccgacaaattcctggaaacttgtctggagaagatgcaaaaagatactagtgcaggaaaagaaagcatccttcctgctctattacataagccctgcgtgcccgcggtctcgaggactgaccacatttggcattatgacgaggagtaccttccagatgcatctaaaccagcaagcgccaatactcccgagcaggctgatggtggagggtctaacgggttcatcgccgtgaacctatcgagctgtaaacaggaaatcgatagtaaagaatgggtgatagttgacaaggagcaggaccttcaggactttagaaccaacgaggccgttggacacaagacaacaggaagcccatcagatgaagagccggaagtgctgcaggtcttagaggccagtccacaggatgagaagctgcaactgggaccatgggccgaaaatgatcacctgaagaaggagaccagcggcgtggtcttggcgctgtccgcggagggccctccaaccgccgccagcgaacagtatactgataggctggaactccagccaggcgccgcgtcacagttcatcgccgcaacacccacaagtctaatggaggcacaggccgagggaccacttaccgctataactatccctagaccctcagtggcttcgacacaaagtacttccggcagttttcactgcggccagcagccagaaaaaaaggatttgcagcccatggaaccaacagttgaattatatagtcctagagagaacttctctggtctagtggtgaccgagggagaacctccttcaggcggtagcaggactgatctggggctccagatcgaccacatcggccacgacatgctcccaaatattagagaatccaacaaaagccaggatctggggcctaaggaacttccagatcataatcgtctggttgtccgggaatttgaaaatctgcccggggaaaccgaagaaaaaagcatacttctggagagcgacaatgaggacgagaaattgtctagagggcagcactgcattgagattagctctcttcccggggacctggtaatcgtggagaaagaccactcagccacaactgagccactcgacgtgacaaaaacccaaacatttagtgtggtgcccaaccaggataaaaacaacgaaataatgaaactgctgaccgtcggtacctccgagattagttctagagacatcgaccctcatgttgagggccagattggccaggtggccgaaatgcagaagaataagataagcaaagacgacgatattatgtccgaggacttgcctggtcaccagggagatcttagcaccttcctgcatcaggaaggcaaaagagaaaagattacaccacgaaacggggaactattccattgcgtcagcgaaaacgagcatggagcaccaaccaggaaggacatggtgagatccagcttcgtgacccgtcactcaaggatccccgtgctggcccaggaaatcgactccacgctggaatccagttcaccggtaagcgcaaaagagaaactccttcagaaaaaggcctatcagcccgaccttgtcaagttgctggtggagaagagacagttcaagtcgtttctcggggatctctcctccgcttccgacaagttgcttgaagagaaactggccaccgtccccgcccctttttgtgaggaggaagtactgactcccttttctcgcctcacagtcgactcacacctgtccagatctgcggaggacagctttctcagccccattatctctcagagcagaaaaagtaaaattccacgacctgtaagttgggtaaatacggaccaggtcaattcctctacgtcttcccagtttttccctagaccaccacccggcaaaccccctaccagacctggggtcgaggccagactccggcgatataaggttctaggctccagcaactccgacagcgatctcttctctcgcctggcccagatactgcagaacggctctcagaagccgagatctacaactcaatgtaagtctccgggaagcccacacaacccaaaaacccctccaaagagcccagtagttcctagaaggtcaccaagcgccagcccacgatcatcctccctaccaaggacaagcagttcatctccttcccgggctgggagaccacatcatgatcaaaggagttctagccctcaccttggcagatctaagagtcctccttcacattccggctcttcttctagcagacggtcttgtcagcaggagcactgcaagccctccaaaaatggtcttaaaggttcaggcagcctgcaccatcactccgcctcaaccaagacccctcaagggaaatcgaagcctgcttctaaactgtcccgttag

SEQ ID NO: 137311 - DNA, 3525 bp, synthetic construct
  misc_feature 1..3525: note = Description of Artificial Sequence: Synthetic coding sequence
  source 1..3525: mol_type = other DNA
gagccgggcaaggatcacgtgtgcaggttcatcgggtgcggaagaaacgacaggttcaactacgtcgtgatgcagctgcagggcagaaatcttgctgaccttaggcgatcacaatcacgggggacctttactatcagcacaaccttgagattaggtagacagatactcgagagcatagagagcattcatagtgtgggatttctccatcgcgatatcaagccctccaatttcgctatgggccgcttccctagtacgtgtcgcaagtgctatatgttggactttgggctggcacgccagtttaccaattcttgcggagatgtcaggcctccacgggcggtggcaggatttcgcggcacagtgaggtacgccagcataaacgcgcaccggaaccgtgagatgggacgccacgatgacctttggtcactgttctatatgctggtggaattcgtcgtgggccaactgccatggcgtaaaataaaagataaggagcaggtgggcagtataaaagagcgttacgatcacagactgatgttaaaacacctcccacctgagttttctatctttttggaccacatctcttctttggactacttcactaaacccgattatcaattgctgacctctgttttcgacaacagcatcaagaccttcggggtgattgagagcgacccatttgattgggaaaagacggggaatgacggaagtctcaccaccacaactacatccaccactccccaattacatacacgtttaacacctgcggcaatcggcattgcaaatgcaactccgatccccggtgatctgctgcgcgaaaacaccgatgaagtgttcccggatgaacagctgagcgacggagagaatggcatccccgtcggggtcagccccgacaagctgcccggaagccttggccatccgagaccacaggaaaaagacgtgtgggaagaaatggatgcaaataagaacaagatcaaactaggtatttgtaaggccgccacagaggaagagaacagccacgggcaggctaacggtctcctgaacgctccaagcctgggaagccccattagggtcagatctgaaattacacaaccggacagagatatacctctcgtgcggaaactgaggagtatccattcgtttgagcttgaaaagcgcttgacccttgaacccaaacctgacaccgacaagtttttggagacctgtttggaaaaaatgcagaaggatacgagtgcaggcaaagagtccattctccctgccctcctccataaaccctgcgtgcccgctgtttctcgtactgatcacatttggcattatgatgaagaatacctcccagacgcgtccaagccagccagtgccaataccccagagcaggctgacggcggcggttcgaatgggtttattgcagtgaatctgtccagctgtaagcaggagatcgacagtaaggagtgggtgatcgtggataaagaacaggacctgcaagacttccgcactaacgaggctgtgggacacaagactaccggttctcccagcgatgaagagccggaagtactgcaagtgctggaggcttcaccacaggatgagaaactacagttgggtccgtgggctgaaaatgatcacctgaaaaaggaaacttctggcgtagttctcgccttgtctgctgaagggcctcccacagccgcttcagagcagtacaccgaccggcttgagttacaacctggggccgccagtcaatttatcgcagcgacgccgacatccctgatggaggcacaggccgaaggtccgctaacagcaatcactatcccacggccttcagtggccagtactcagtccacatccgggagctttcactgcggccagcagcccgagaaaaaggacctccagccaatggaacccacagtcgaactgtattctccccgagaaaatttttctgggttagttgtgactgagggagagcctccttcaggtggctcgcggacagatcttggcctgcagatcgaccacatcggacacgatatgctgccaaacatacgtgagtcgaataagtcccaggacctggggcctaaggaattgcccgaccataaccgcctggtggttcgggagtttgagaatttacctggagagacagaggagaagtccatcctccttgaatcggacaatgaggacgaaaaattaagccggggacagcattgcattgaaataagttctctcccgggcgacctcgtcattgtagagaaagatcactctgcaactacagagccgctggacgtcaccaagacacagacctttagtgtcgtcccaaatcaagataaaaacaacgaaataatgaaactcctcaccgtggggacctcagaaatctcctctcgcgatattgacccgcatgtggagggccaaattggccaggtggccgagatgcaaaagaacaaaatctcaaaggacgacgatattatgtcagaggatctgcctgggcaccagggcgacttatccacttttctccatcaggaaggcaaacgcgaaaagattactccccgcaatggtgaactttttcactgtgttagcgagaatgagcatggggctcctacacgtaaggatatggttaggagcagcttcgtgacccggcactctcgtattccggtcttagcccaggaaattgattccacactcgaaagctcctccccagtgtccgcaaaggagaagctgttgcagaagaaggcctaccaacctgacctggttaagctcctggttgagaaaagacaatttaagtcgtttttaggagatctctcatctgcctcggataagctcctggaagagaaactggcaaccgtgcctgcaccgttttgtgaggaagaggtgttgactcccttcagcagactgactgtggactctcatctgagccgcagtgccgaagacagcttcttatcccccatcatctctcagtctagaaaaagcaagattccccgtccagttagttgggttaatacagatcaggtgaacagttccacgagttctcaatttttcccaaggcccccacctgggaaaccacctacgcgccccggggtagaggccagattgcgaaggtataaagttctgggtagtagtaatagtgactcagacctgttctctcgcctcgcgcagattttacagaatggctctcagaaaccacgaagcactactcagtgcaaaagtcccggctcccctcataaccccaaaacaccacctaagagtcctgtagtcccccgtagatcaccgtccgctagtcccaggagctcctcgctgccacgcaccagtagttcgtcacctagccgagcaggtcgtccacaccacgatcaacggagtagttcacctcacctgggtcgtagcaagagtcctccctctcactccgggagcagctctagcagaaggtcgtgccaacaggagcattgcaaaccatccaagaacgggcttaagggatcagggtcgcttcatcaccactctgcctccaccaagactcctcagggaaagagcaaacctgcctccaaattgtcgagatag

SEQ ID NO: 137312 - DNA, 2244 bp, synthetic construct
  misc_feature 1..2244: note = Description of Artificial Sequence: Synthetic coding sequence
  source 1..2244: mol_type = other DNA
atgacgagtttccaagaagtgcctctgcagacatccaattttgcccacgtcatcttccagaacgtggcaaaaagttacctgcccaacgcccaccttgagtgtcattatacattgactccgtacattcacccacacccgaaggattgggtcgggatcttcaaggtgggctggtccacagcacgcgattattacacattcctttggtcccccatgcctgagcactatgtggaaggaagcaccgttaactgtgtgctggccttccaggggtattacctgcccaacgacgatggggaattctatcagttttgttacgtgacacataaaggcgagataagaggggccagcactccattccagttccgggcttctagcccggtcgaggaattactgaccatggaggacgagggaaattcggatatgctagtggtaaccacgaaggccgggctgcttgaactcaagatcgaaaaaactatgaaagagaaggaagaattgcttaagctgatcgccgtactcgagaaagagactgctcagcttcgcgaacaagtgggtaggatggaacgagaactgaatcatgagaaagagcggtgtgatcagctgcaggccgagcagaaggggctgacggaagtgacccagtccctcaagatggagaatgaggagtttaagaagcgattttctgatgctacgagcaaggcccatcaactggaggaggacatcgtctctgtgactcataaggccatcgagaaggagacggagctggattccctgaaagataagctgaagaaggctcagcacgagagggagcagctcgaatgtcagcttaaaactgaaaaagacgaaaaagaactatataaagtgcacctgaagaatacagagatcgaaaacacaaagttgatgagtgaagttcagactttgaagaatttagacggaaataaggagagtgtgattacgcatttcaaagaagagataggaagactccaactctgcttagctgaaaaagagaatttgcagcggacgtttctcctaacgactagttccaaagaggacacatgcttcttaaaggaacagctccgtaaggcagaagaacaggtccaggcaacacgccaggaggtagtgttcctagccaaagagctatcagacgctgtcaatgtgcgggatcggactatggctgatcttcacacagcaaggctggagaacgagaaggtaaagaagcagttggcagacgcagtagctgaactgaaactgaacgcaatgaagaaggaccaagacaaaaccgacactcttgagcacgagctgaggcgcgaagtggaagacctgaagctgcggttacagatggcggcagatcactataaggaaaaatttaaggaatgccaacgtctacagaagcaaatcaataaactgtccgaccagtccgcaaacaacaataacgtgttcacgaagaaaacagggaaccaacagaaggtaaatgacgctagcgtgaataccgaccctgcgaccagcgcctcaaccgtagatgtgaaaccctccccttccgctgccgaggccgactttgacatcgtcaccaaaggccaggtgtgcgagatgactaaagagatcgccgataagacagaaaagtacaacaagtgcaagcagctgttacaggacgagaaggctaagtgcaataaatacgcagatgaacttgccaagatggagttgaagtggaaggagcaggttaaaatcgccgaaaatgtgaagctggagcttgccgaggtgcaggacaattacaaggaactcaagcgctccctggagaacccagccgaacgtaagatggaggatggggccgatggagccttctaccctgacgagatccagagaccaccagttagagtgccgagttgggggctggaggacaatgtggtgtgcagtcaacccgctcgcaattttagcaggccagatggattagaggactctgaggactcaaaggaagatgaaaacgttcccaccgctccagaccccccatctcagcatctgcgaggccatggaacaggcttctgctttgactcgagcttcgatgtccataagaaatgtcccctgtgcgaactgatgtttccgccaaactatgaccagtcaaaattcgaagagcacgtggagtcacactggaaggtgtgccccatgtgctcagagcagtttcctcctgattatgaccagcaggtgtttgagaggcacgtgcagacccatttcgaccaaaatgtcctgaatttcgactag

SEQ ID NO: 137313 - DNA, 2370 bp, synthetic construct
  misc_feature 1..2370: note = Description of Artificial Sequence: Synthetic coding sequence
  source 1..2370: mol_type = other DNA
atgaccagctttcaggaggtgccactccagacctcaaacttcgcacatgtgatcttccagaatgtagcgaaatcctatcttccgaacgcacacctggaatgtcactatacgcttaccccatatatacatccccacccaaaggactgggtcggcatctttaaggttggctggtcaaccgctcgggactattatactttcctctggagccccatgccagaacattacgtggaaggaagcactgtcaattgcgtgctggctttccaaggatactatttaccaaacgatgacggcgaattttatcagttttgttacgtcacccataaaggcgagatcaggggcgctagtactccgttccagttcagagccagcagtccggtggaagaacttttaaccatggaagacgagggaaacagtgacatgctagtcgttacaacaaaggcagggcttttggagttgaaaatcgagaaaactatgaaggagaaggaagaactgctcaaactcattgccgtacttgagaaagagactgcacagctgcgagaacaggtgggaaggatggagagggaactgaatcatgagaaagaacgctgcgatcagctccaagcagagcagaaaggactgaccgaagtgacacagtccctgaagatggagaatgaggagttcaaaaagcgtttcagtgatgcaacctcaaaagctcaccagctggaggaagacattgtatccgtgactcataaggcgatcgaaaaggagacggaactggactctctgaaagacaagctgaaaaaggcccaacatgagcgggagcagctcgagtgtcagcttaaaactgaaaaagacgagaaggaattgtataaagtgcatttgaagaacacagagattgagaatacaaaacttatgtccgaggttcaaacgttgaagaacttggatgggaataaggaaagcgtgatcactcacttcaaggaggagataggacgcttacagctgtgcctggctgagaaggaaaaccttcagaggacttttctccttaccacatcgagtaaggaagacacctgctttctgaaggagcagctgcgtaaagctgaagagcaggttcaagctaccagacaggaggtagtgttcttggcgaaagagctgtccgacgctgtgaatgtgagagataggacgatggcggacttacataccgctcggttggaaaatgaaaaggttaagaaacaactggcggatgccgtagccgaattaaagctgaatgccatgaaaaaggaccaagacaagaccgataccctggagcacgaactgaggagagaagtagaggatctgaaactgagattacagatggccgctgaccactataaggagaagtttaaggagtgccagagactccagaaacagatcaataaattaagcgatcagtctgcgaacaacaataacgtgttcacaaaaaagacaggaaatcagcagaaagtgaacgacgcaagcgtgaacaccgatccagccacctccgcttccactgtggatgtgaaacctagcccttccgcagccgaggccgactttgacatagtgacaaaagggcaggtctgcgagatgactaaggagatagccgacaagacagagaagtacaataagtgcaagcagttgctgcaggatgaaaaagccaagtgtaacaagtacgccgacgaacttgccaagatggaacttaagtggaaggagcaggtgaagatcgctgagaatgtcaagctggaacttgcagaggttcaggataattacaaggaactgaagagatccctcgagaacccagctgaaaggaaaatggagggccagaactctcagtcaccgcagtgctttaagacgtgctccgaacaaaacgggtatgtgctcactcttagtaatgctcagcccgttttacagtatggcaatccttatgccagccaggagaccagggatggcgcggatggagccttctatcctgatgaaatccagcggcctcctgttcgggtgccgtcatggggccttgaagacaacgtcgtgtgtagccagcctgccaggaattttagcagaccagacgggcttgaagacagtgaggacagcaaggaagatgaaaatgtgcctacagcgccagaccctcccagtcagcacctgagagggcatgggaccggcttctgtttcgactcctcctttgacgtccataaaaaatgtccactgtgcgagctcatgttccctcctaattatgaccagagcaagttcgaggaacatgttgagagccattggaaggtgtgtcctatgtgctccgagcaatttccgcccgattacgaccagcaagtgtttgaaagacatgtccagactcatttcgatcagaacgtgctcaacttcgattag

SEQ ID NO: 137314 - DNA, 417 bp, synthetic construct
  misc_feature 1..417: note = Description of Artificial Sequence: Synthetic coding sequence
  source 1..417: mol_type = other DNA
atgaccagttttcaggaggtgccactacaaacttccaacttcgcacacgttatcttccagaatgtggctaagtcttatctgccaaacgctcacctagagtgtcactataccctaactccctacatccatccacacccaaaggattgggtcggcatcttcaaggtcggttggagcactgcccgagactattatacattcctatggtcacctatgcccgagcactacgtagagggtagtaccgtcaactgcgtgctggctttccagggctactatctcccaaatgacgatggtgagttttaccagttctgctacgttacacacaaaggggagattcgaggtgcttctacgcccttccagtttagggcctccagtccagtggaggagctccttaccatggaagatgagggaaatagttag

SEQ ID NO: 137315 - DNA, 297 bp, synthetic construct
  misc_feature 1..297: note = Description of Artificial Sequence: Synthetic coding sequence
  source 1..297: mol_type = other DNA
atgacctccttccaagaggtgcctctgcagacctctaacttcgctcacgttatcttccagaacgttgctaaatcttacctgcctaatgctcacctggaatgccactacaccctcactccctacatccacccgcacccaaaggactgggttggaatattcaaggtgggctggtcgactgcaagggactactatacattcctgtggagtccgatgcctgaacattacgtcgaaggtagcaccgtgaactgtgtcctcgctttccaggggtattatctaccaaatgatgacggtgagtag

SEQ ID NO: 137316 - DNA, 1773 bp, synthetic construct
  misc_feature 1..1773: note = Description of Artificial Sequence: Synthetic coding sequence
  source 1..1773: mol_type = other DNA
atgaaggagaaggaagaattactgaaactgattgcagtactagagaaagagacagctcagttacgggaacaggtgggcaggatggaacgcgagctgaaccacgaaaaggagcggtgcgaccagctgcaggctgagcagaagggactgacggaggtgacacagtccttgaaaatggaaaacgaagaattcaagaagcggttttccgacgccacttctaaggctcatcaactagaggaggacatcgtatctgtgacacataaggcaattgaaaaggagactgagctggactccctgaaagataaactaaagaaggcgcaacatgagagagaacaactggaatgccaactgaagaccgagaaagacgagaaggagctgtataaagttcatctaaagaacactgaaatcgagaacacgaaactcatgtctgaagtccagaccctaaagaatttagacgggaataaggagtccgttatcactcactttaaagaggaaatcggtcggttacaactgtgcctcgccgagaaggaaaacctccaaaggactttccttcttaccacgtcttcaaaggaggatacgtgcttccttaaagaacaattgaggaaagcagaggagcaggtacaagcaaccaggcaagaagttgtgtttctcgccaaggagctgagcgacgccgtgaacgttcgtgatcggacaatggccgacctccatactgcgagactcgagaatgagaaggtgaaaaagcaattggcagatgccgttgctgaacttaagctgaacgccatgaagaaagatcaggataagaccgacacgctcgaacacgaactcagacgggaagttgaggatctgaagctccggctccagatggccgcggaccattacaaagaaaagtttaaagaatgtcagagacttcagaaacaaattaataagctatctgatcagagtgccaataataacaacgtgttcactaagaagaccggcaaccaacagaaagtgaacgatgcatcggtcaataccgaccctgccacatcggcctccaccgtggacgtcaaaccctctccctccgccgccgaagcagattttgacatcgtcacaaagggtcaggtgtgcgagatgacaaaggagatcgctgacaagactgaaaaatacaacaagtgtaagcagcttctacaggacgagaaagccaagtgtaacaaatacgccgacgaactagctaaaatggagttgaaatggaaagagcaagttaagatagctgagaacgtcaagttagagttagcagaggtgcaagacaattacaaggagctcaagcggagtctagaaaatccagcggagagaaagatggaagatggcgccgatggcgctttttatcccgacgagattcagcggccaccagtgcgcgtcccctcatgggggctggaggacaatgtggtctgctctcagccagcccggaatttcagcaggccggatggcctcgaagactcggaagacagtaaggaagacgaaaacgtgccgaccgcccccgatcctccctcacagcacctgcggggccacggtacaggtttttgctttgattctagctttgacgtacacaaaaaatgtccgctttgtgagcttatgtttccccctaactacgaccaaagtaagtttgaagagcacgttgagtcacactggaaggtgtgccctatgtgttccgagcaatttccccccgactacgatcaacaggtctttgaacgccatgtgcagacccattttgatcagaacgtcctgaattttgactag

SEQ ID NO: 137317 - DNA, 2244 bp, synthetic construct
  misc_feature 1..2244: note = Description of Artificial Sequence: Synthetic coding sequence
  source 1..2244: mol_type = other DNA
atgacatcattccaggaggtaccactgcaaacctctaatttcgcacatgtcatctttcaaaacgtggcaaagtcctacctgcccaacgctcatctggagtgtcactatacactgaccccctatattcatccgcacccgaaggattgggtcgggatatttaaagtaggctggtctactgctcgagattactatacgttcctgtggtcaccgatgcctgaacattatgtggaaggctcaacagtgaattgtgtcctcgcctttcaaggatactatctgccaaacgatgatggcgaattttatcagttttgttacgtcactcacaagggcgagattcggggcgcgtctacccctttccagttccgagcaagctccccggtagaggagctcctaacaatggaggacgaggggaacagtgacatgctggttgtgaccaccaaggcaggattgttggaacttaagatcgaaaaaactatgaaggagaaggaggagttacttaagctgattgccgtcttggaaaaggaaacagctcagcttcgagagcaggtaggccgcatggagagagagttaaaccatgaaaaagagaggtgtgaccaacttcaagcggagcagaaggggctgacagaagtcacacaaagcttgaagatggaaaacgaggaattcaaaaaaagattttccgatgccacttccaaagcacatcaactggaggaggatatcgtctcggtcacgcacaaagctatcgagaaggaaactgagctggactctctgaaggacaagctcaagaaggcacagcatgaacgcgaacaactggagtgtcagcttaaaaccgagaaagacgagaaagagttatataaagtccacctgaaaaatacagagatcgaaaataccaaactgatgtctgaggtacagacacttaagaaccttgacggaaacaaagaatccgtgatcacgcattttaaggaggaaatcggacggctccagctttgcctggcagagaaggagaatcttcaacgcacgttcctcctgaccacttcctcgaaagaggacacttgctttctgaaggagcagttgagaaaggctgaagaacaggtccaggcaacccgccaggaagtggttttcttggctaaggagctgtctgacgctgtcaacgtccgcgatagaacgatggccgatcttcacacagccagattggaaaacgagaaagtgaagaagcaactcgctgacgccgtggccgaacttaagctaaacgccatgaagaaggatcaggataagactgatacacttgagcatgaactgcggagagaggtggaggacttgaagctacggttacaaatggccgcggatcattacaaagagaaatttaaggaatgtcagaggttgcagaaacagataaacaaactaagcgatcagtcagcaaacaataacaacgtttttactaaaaagactggcaatcagcaaaaggtgaatgatgcgagtgttaacacagaccccgctaccagtgcgagcactgtggatgtgaaaccttctcctagcgctgcagaggccgattttgacatcgtgaccaaaggccaagtctgcgaaatgactaaggaaatcgccgacaagactgaaaagtataataagtgcaaacagctgctgcaggacgaaaaggccaaatgcaataagtatgccgacgagctggcaaagatggaactgaagtggaaagagcaggtgaaaatcgctgagaatgtcaagctggaattagccgaggtgcaagataactataaagaattaaaacgatcgcttgagaacccggccgaacgtaaaatggaagacggcgctgacggggccttctatcccgacgaaattcaaaggccccccgtgagagttcccagctgggggctggaagataatgtggtttgttctcagcccgctaggaatttctctaggccggacggcctggaggattccgaggattctaaggaggatgagaacgtgcccacagccccggacccaccgagccagcatctacgcgggcacgggacagggttctgtttcgattcatccttcgatgtccataaaaaatgtccattgtgtgagctgatgttccccccaaattacgatcagagcaagttcgaggaacatgtcgagtcccattggaaagtgtgcccaatgtgcagtgagcagtttcctcctgactatgatcaacaagtctttgagcgccatgtccagacccatttcgaccagaacgtgctgaatttcgattag

SEQ ID NO: 137318 - DNA, 3480 bp, synthetic construct
  misc_feature 1..3480: note = Description of Artificial Sequence: Synthetic coding sequence
  source 1..3480: mol_type = other DNA
atggagccaatcacattcacagcccggaagcatctgttgtccaacgaagttagcgtagactttggcctgcagctggtgggttccctccccgtccactctctgacaacaatgcctatgctgccctgggttgttgccgaggttagaagattgtcaaggcaatccacaagaaaggagccagtgactaagcaagtgaggctctgtgtgtccccgtcagggctccgttgcgaacccgagcctggtaggtcacaacagtgggacccactgatttattccagcatctttgaatgcaagcctcagcgggtgcataagctcattcataactctcacgatcctagctacttcgcctgtctcattaaggaggatgccgttcaccggcaaagcatttgttacgtcttcaaagcagatgatcagaccaaggtcccagagattatcagcagcatcagacaggccgggaaaattgcccgacaggaagaactgcactgcccatcagaattcgacgacacttttagtaaaaaattcgaagtgctgttttgtggaagggtcaccgtcgcccataagaaagccccgcccgctctcattgatgaatgtatcgagaagttcaatcacgtgtccggatcacgaggatctgagagtcctcggccaaatcccccccatgctgcccccactgggagccaggagcccgtgcgccgcccaatgaggaagagtttctctcagccgggactgcgatcactggctttcaggaaagagctgcaggacggggggctgcgctcatccggcttcttctcctcttttgaggaatccgacatagagaaccatctgatctcaggtcataatattgttcagcccaccgatattgaggagaaccgaacaatgctctttactattggacaatcagaggtgtatttgatctctccagatactaaaaagatcgcattggaaaaaaatttcaaagagatctctttttgtagccaggggatccggcatgtggaccatttcggttttatctgccgcgaaagctcaggaggaggggggttccatttcgtctgttatgtctttcagtgtacaaacgaggctctggtggatgagataatgatgactctgaagcaggccttcactgtagccgccgttcagcagacggcaaaggcaccagctcagctgtgtgaggggtgtcccctgcagtctttacacaagctctgtgagcgtatcgagggcatgaactcctcaaagaccaaacttgaactgcagaaacacctgacaaccttaacaaaccaagaacaggccaccatctttgaagaagtccagaaactacggcccagaaatgaacagcgagaaaacgaactgatcatttcctttctgcgctgcctgtacgaggagaagcagaaggagcacatccatattggagagatgaagcaaacatctcaaatggcagctgagaatatcgggtccgagctgcctccaagcgccactagattccggctcgacatgcttaaaaacaaagcaaagaggagtctgacagaatctctggagagcatactgagcagggggaacaaagcccgcggcctgcaggaacatagcatcagcgtggacctcgattcctcattgtccagcactctgagcaatacctccaaggaaccatctgtgtgtgaaaaagaggccttgccaatctcagaatctagctttaagttgctcggaagtagtgaagacctctccagtgacagtgagagccatctgcctgaagagcctgcccccctctcccctcaacaagcatttcggagacgggcaaataccctcagtcactttccaatcgagtgccaggagccgccacagccagcgagaggatcgccaggcgtatcacagcgaaaactgatgcgataccacagcgttagcacggagacgccacatgaacgaaacgtcgaccctagccctgtcggggagagcaagcacaggcccggtcagtctagcgctccggctcctccgcccaggctgaaccccagtgcttctagccctaatttctttaaatatctgaaacacaactcctccggcgaacagtccggtaacgccgtaccaaaatcaatttcttatcggaacgctctgcgcaaaaagctgcattcaagcagctccgtgcccaatttcctgaagtttctggctcctgtggacgaaaacaacacatccgatttcatgaacacaaagcgagactttgagagcaaggccaaccaccttggcgattcagggggcacgccagtgaagactcgccgacatagctggaggcagcaaatctttctgcgagtggccactccccagaaggcctgcgactcaagctctcggtacgaagactactccgaactgggtgagttgccacctcgcagccctctggaacccgtgtgcgaagatggaccattcggcccaccaccagaggaaaagaagaggacttctcgggagctcagggagttgtggcaaaaggctattctgcagcagattctgctactccgcatggagaaagaaaaccagaaattgcaggcctctgagaatgaccttcttaataagcggctcaagctggattatgaagaaatcacaccatgtctcaaggaggttactactgtgtgggagaagatgctgagtacaccgggtcgatcaaaaatcaagtttgatatggaaaaaatgcacagcgccgtgggccagggagtgcccagacaccaccggggagagatatggaaattcctggctgagcaatttcatctcaaacatcagttcccaagtaagcagcagcctaaggatgtcccctataaggaattattgaagcaattgacaagccagcagcacgccattctcattgatctggggcgcacttttccaacacatccatactttagtgctcagctaggcgcaggccaactgagcctctataacatcctgaaagcttatagcctgctggaccaggaagtgggctattgtcagggactctcttttgtggcagggatcctcctgctccatatgtctgaagaagaagctttcaaaatgctgaaattcctcatgttcgacatgggattgcggaagcaatataggcctgatatgatcattctccagatggagaagaccatcaatcaggtgttcgagatggatatcgcaaaacagctgcaggcctatgaggtcgaatatcacgtcctgcaggaggaactaatagactcatcccccctgtccgataatcagagaatggataagctggaaaaaacgaattcctccctgcgaaagcagaacttagacttgctggaacagctgcaggttgctaatggaagaattcaaagcctcgaggctactattgaaaagctcctgtcaagtgagagcaaattgaagcaggccatgttgactctcgaactggaacgctcagcgctacttcagaccgtagaggagctcaggaggcgcagtgctgaaccctcagatagagaaccggaatgtacccaaccggagcccaccggggactag

SEQ ID NO: 137319 - DNA, 3507 bp, synthetic construct
  misc_feature 1..3507: note = Description of Artificial Sequence: Synthetic coding sequence
  source 1..3507: mol_type = other DNA
atggagcctataacattcaccgcgaggaagcacctcctctccaacgaagtgagcgtggacttcggacttcaattggtgggcagtctgcccgttcactcgctcacaaccatgcccatgctcccttgggtcgtggccgaagtaagacgtttgagtaggcaatcaacacgtaaggaaccagtgacaaagcaggtcaggttatgcgtgagtccctccggcctgaggtgcgagcctgagcctggcagaagccaacaatgggaccctctgatatattcatcgatatttgagtgtaaacctcaaagagtgcataaactgatccacaactcccacgatccgagctacttcgcatgcctcattaaagaggatgccgtacaccgacaaagcatctgttacgtgttcaaggccgacgatcagactaaggttcctgagattataagcagtatccgccaggctggcaaaatcgcccgtcaggaagaactgcactgtccaagcgaatttgacgatacgttctcgaagaaatttgaggtgctcttctgtggcagggtcactgtggcccacaaaaaggctcctccagccctgatagacgagtgtatcgaaaaattcaatcatgtgtctggcagtagaggcagcgagagcccaaggcctaatccacctcacgcagcccccaccggatcccaagagcccgtaaggcgaccaatgaggaagagcttttcacaacccggtttacgttctctcgccttccgcaaggagttgcaggacgggggactgaggtcctcaggattcttttcctccttcgaggagtctgatatcgagaaccatctgatcagtggccacaatatcgtgcagcccaccgatattgaggagaacaggactatgttgtttacaattgggcaaagcgaagtttatctcatttccccggataccaagaaaattgctctggagaagaattttaaggaaatttcattttgctctcaaggcattcgtcatgtggaccattttggtttcatctgtcgggaatctagcggtgggggcggctttcattttgtgtgctacgtgtttcagtgcacgaacgaggcactggtggatgaaatcatgatgaccctgaagcaggccttcacagtcgctgctgtgcagcagaccgcaaaggcaccagcccagctatgcgagggctgtccgctgcagtctctgcataagttgtgcgaacgaattgaggggatgaattctagcaagactaagctcgaactgcagaaacacctgactaccttaacaaatcaagagcaggccactatcttcgaagaagtccagaagctcagacctcgtaatgagcagcgagaaaacgagctgataattagcttcctgagatgtttgtacgaggagaagcagaaggaacacatacacatcggcgaaatgaaacagacaagtcaaatggccgccgaaaatatcggcagcgaattgccaccctctgcgacaagatttcgtctggatatgctgaaaaacaaagccaaacgcagtctgacagagtccctcgagtccatcctgagcagaggaaataaagcccgtggtctgcaggaacatagcatatccgtcgatttggatagcagcctctcctcaaccctgtctaatacctctaaggagccatccgtatgtgagaaggaggccctaccaatttctgaaagctcatttaaactcctcggatcaagtgaggacctcagttcagatagcgaaagccacctgcccgaagagccagcccccctctcaccccagcaagcattccgccggcgcgccaatactctcagtcactttccgatcgagtgtcaggaaccaccccagccagcgaggggctccccaggcgttagccagcgaaagctgatgcgctatcactccgtgtccacagaaacccctcacgaaaggaaagatttcgaatctaaggcgaaccacctgggagattctggggggacgcccgtgaagacccgacgccattcctggcggcagcagattttcttgcgcgtcgccacccctcagaaggcttgcgattcttcctcccgctacgaagactactcagaactaggagagttacctccccggtccccacttgagcctgtgtgcgaagatggaccatttggaccacctcctgaagaaaaaaaacgcactagccgcgaactaagggaactctggcagaaggctattcttcaacagatcctcctgttacgcatggagaaggaaaatcagaagctacaagcaagcgagaatgatttgctgaataaaaggttgaaactcgactacgaggagataaccccttgtctgaaggaagtcaccaccgtttgggaaaaaatgttatcaacaccaggacgctctaagattaaatttgatatggagaaaatgcacagtgccgtcgggcagggagtgcctaggcaccacagaggggagatctggaagtttttagccgagcagtttcatctgaagcatcagttcccgtcaaagcagcagccaaaagatgtgccctataaggagctgctaaagcagctgactagtcagcagcatgctatcttaatcgacctgggacgcacttttcccacacacccctattttagtgctcagctgggcgccggacagctatctttgtacaacattctcaaggcatactctttacttgaccaggaggtcggctattgtcaggggctcagcttcgtggccggtatcctcctgctgcatatgagcgaagaggaagcattcaaaatgctgaaattcctgatgtttgatatggggttaaggaaacagtatcggcctgatatgatcattttgcagatccagatgtatcagctttcacggctcctacacgattaccatcgagatttgtataaccatttggaggagcacgagatcggcccttcactctatgcagctccatggtttctgactatgttcgcgagccaatttcccttaggctttgtggcgcgcgtgtttgacatgatctttctccagggcaccgaggtgatatttaaggtggccctcagtctgctcggtagccacaaacccctaatcctgcagcacgagaatctcgagaccatcgttgactttatcaaatccactctgcccaatctgggactggtgcagatggaaaagacaattaaccaggtctttgaaatggacatcgcaaaacagttacaggcatacgaggtcgagtaccatgttctgcaagaggagcttatcgattcttcaccgctcagtgacaaccaaagaatggataaacttgagaaaacaaattccagtctgcgcaaacagaacctggatctattagagcagttgcaggtcgcgaatggccgaattcaaagtctggaggcaacaatcgaaaaactgcttagttccgaatctaaactgaagcaggccatgctgacactcgaattggaacgatccgctctgctacaaaccgttgaggagctgcgcaggcgttcagcagaaccgagtgatagggaacctgagtgtacacaaccagagccaaccggcgactag

SEQ ID NO: 137320 - DNA, 1299 bp, synthetic construct
  misc_feature 1..1299: note = Description of Artificial Sequence: Synthetic coding sequence
  source 1..1299: mol_type = other DNA
atggagaaggagaatcagaagctacaggcttcagagaatgatctgctcaacaagaggttgaagttggactatgaggagatcacgccctgcctcaaagaagtcacgaccgtttgggaaaaaatgctgagtactcccggccgctcaaaaatcaaatttgacatggaaaagatgcacagtgcagtgggccaaggggttccaaggcaccaccgcggagagatatggaaattcctggccgagcagtttcatctaaagcaccagtttccgagcaaacagcaacccaaggacgtgccatataaggagctcctgaagcagctcacctcccaacaacatgccatcctgattgacctgggcaggacattccccacacacccttatttttcagctcagctaggagccgggcagctatccttgtacaacatcctgaaagcatactccttactagatcaggaggtaggctactgtcaaggtctgtcgtttgttgccgggatcctgcttttgcatatgagtgaggaagaagcctttaagatgctgaagtttctcatgtttgacatgggtctgcggaagcaatatcgcccagacatgattatccttcagattcagatgtatcagctgtcccgcctcctccacgattaccaccgcgacctttataaccatcttgaggaacacgagattggaccctcattgtacgcagcaccttggtttcttaccatgtttgcttcacagttccctcttggtttcgtggcacgggtgtttgatatgatatttctgcagggaaccgaagttattttcaaagttgcacttagtctgctgggctcacacaaaccccttattctgcagcatgagaacctggagacaattgttgattttattaaatccactcttccaaatttaggcctggtccagatggagaagacaattaaccaagtttttgaaatggacattgcaaagcagctccaagcttatgaagtcgagtatcatgtgcttcaggaagagctgatcgacagctccccactgagcgacaaccaacgtatggacaagcttgaaaagacaaattccagtctgcggaaacaaaacctggatctcctggagcagctccaggtggccaatgggagaatccaatcactggaagctaccattgagaagctgctgagcagcgaatctaagctgaagcaggctatgctgactttagaactcgaacggagcgcgttgcttcagactgtggaggagttgcgaaggagatcggcagaacccagtgatagggagcctgagtgtacccagcctgagccaacgggggattag

SEQ ID NO: 137321 - DNA, 933 bp, synthetic construct
  misc_feature 1..933: note = Description of Artificial Sequence: Synthetic coding sequence
  source 1..933: mol_type = other DNA
atggcccaagctctgggcgaggacctggtccagccccccgagctacaggatgactcttcaagcctcggaagcgactccgagctcagcggcccaggcccttaccgtcaggctgaccgctatggatttatcggcggaagttcagctgaaccagggccgggacacccacccgccgacctcattaggcagcgcgagatgaagtgggtcgagatgacttcccactgggagaaaaccatgagccggaggtacaagaaagtgaagatgcaatgtcgcaagggtatcccttcggctctgcgcgccaggtgctggcccttgctttgcggggcccacgtatgccagaaaaattcgcccggaacataccaggagttggctgaggcgccgggggacccacaatggatggagacaattggaagggatctgcatcgtcagttccctcttcacgagatgtttgtctcacctcaaggacacggacggggatcgtgtaggtgtagcagaccgactccttgcatcgaccgctcacgggctaccgcaaggccgcggggtccctggctcctgtgttgctcctgcacatgcccgcagcggcgtccgtcaggcgcttggtgtcgatcagtccggtcaacctccctgggcacaacaggcccgacttggtgccagtccactgtaccctgcggggccgatacaggcgcccccggtgcaggccattgcagggccgctcggggtttgccctggccgcccggtgacaccggttccccgtcctcacatcccccgcgcgctgccgcggggggcggcctgcatgtgacgggagcccagcgcggcgctgtgcgtgccgggcccgctgccggagatcagggccccgccggtcccgccgcccgatttagggccggcacaccagcccccgcaacaggaccgccccgccgggggccttcacacctctag

SEQ ID NO: 137322 - DNA, 1662 bp, synthetic construct
  misc_feature 1..1662: note = Description of Artificial Sequence: Synthetic coding sequence
  source 1..1662: mol_type = other DNA
atggattcaccagggtataactgtttcgttgacaaagacaaaatggacgcggccatccaggacctggggccgaaagaattgtcgtgtaccgagctgcaggaactaaaacaactggctcgccaaggctactgggcgcagtctcacgccctgagaggcaaagtgtatcagcggttaatcagagatatcccctgccgcaccgtaacacctgatgccagtgtatattcggacattgtcggtaaaattgttggcaagcatagctcctcatgtttgcctctgcctgaatttgtggataacactcaggtgccttcttactgcctcaacgctcggggggaaggagctgtgaggaagatactgttgtgtctggcgaatcagtttcctgatatctcattctgccccgcactgcccgctgtcgtcgcactgctcttacattacagcattgacgaagcagagtgttttgaaaaagcttgtcgtatcttggcctgtaatgatcctggacgtagactgattgatcagtcgttcctggcctttgagagtagctgtatgacttttggtgatctggtcaacaaatattgccaagccgctcataagctgatggtggcagtgtccgaggacgtactgcaggtctacgctgattggcaaaggtggcttttcggggaactccctttgtgctatttcgccagagtgtttgacgtgtttttagtggaggggtacaaagtgctgtacagagtcgctctggcaatccttaaattttttcataaggtccgagcaggccagccactggagagcgattcagtgaaacaagacatacgaacttttgtgagggatattgccaagaccgtgtccccagaaaaactgctggaaaaggcatttgcaattagactgttcagtagaaaagaaatccagcttctgcagatggcaaacgagaaagccctgaagcagaaaggtataactgtgaaacagaagcgtcaattcgtccatctggcagtgcacgccgaaaattttcggagcgagatcgtgtctgtccgcgagatgcgagatatctggtcttgggtacccgaaagatttgctctgtgtcagccactgttgctgtttagctctctacagcacgggtatagccttgcaaggttttactttcagtgcgaggggcatgaaccaacgttgctcttgataaaaactactcagaaagaagtctgcggcgcttacctaagtaccgactggtcagaaagaaacaagtttggcggtaaactcggattcttcgggactggtgagtgcttcgtgtttcgcctgcagccggaggtgcagcggtacgaatgggtggtcattaagcaccccgagctaacaaaaccaccacccctgatggccgccgaaccaactgcgcccctcagccacagcgccagcagtgacccagctgaccgcttgagcccttttctggctgctagacattttaacctcccatcgaagaccgaatctatgtttatggccggaggaagcgactgtctgattgtcggcgggggcggcggacaggccctgtacattgacggagatctgaacagaggtcgcacctctcattgcgacacttttaataatcagcccctgtgctcggaaaacttcctgatcgccgcagttgaagcatggggattccaagatccagacacacagtag

SEQ ID NO: 137323 - DNA, 759 bp, synthetic construct
  misc_feature 1..759: note = Description of Artificial Sequence: Synthetic coding sequence
  source 1..759: mol_type = other DNA
atgggcgtcttgttgacccagcggaccctgcttagtcttgtgctggctctccttttcccatcgatggcctcaatggcagcaattggaagttgctcaaaggaatatcgcgtcttactggggcagctgcaaaaacaaacagatctgatgcaggacacgtctagactcctagacccttatatccgaattcagggccttgatgtgcctaagctgcgtgagcattgtagagagcggcctggggcctttccttccgaggagacattaagaggtttagggcgccgggggttcctacagacgctgaatgctacccttggttgcgtgttacatcggttggccgacctggagcagcggttaccgaaagcacaggatctcgaacgtagcggactcaacatcgaagacctagagaaacttcagatggctagaccgaatatcttaggcctccggaacaatatctactgtatggctcagttgctggacaactccgataccgccgagcctaccaaggctggccgcggggcatctcaaccacctacaccgactcccgccagcgacgcctttcaaagaaaactcgagggctgtcgcttcctgcatgggtatcaccgttttatgcactctgtggggagggtgttctccaaatggggcgagtctcccaaccgatcgcggcgccacagccctcaccaggccctccggaagggagtccgccggactcggccgtcccgtaagggaaagcgcctgatgacgcgagggcagctgcctagatag

SEQ ID NO: 137324 - DNA, 1263 bp, synthetic construct
  misc_feature 1..1263: note = Description of Artificial Sequence: Synthetic coding sequence
  source 1..1263: mol_type = other DNA
atgttaaacaattgggacaagtggatggccaaaaagcacaagaaaatcagactgcggtgccagaaggggatccctccctctctgcgagggagggcgtggcagtatttgagtggggggaaggttaagctgcagcaaaatcctggaaagttcgacgaactggacatgtccccaggagacccaaagtggctagatgtgatcgaacgggacctccataggcaatttccgttccacgaaatgtttgtgagtaggggcggccacggccagcaggacctgttcagagtgctcaaggcttatactctctacaggcccgaagaaggctactgccaggctcaagcacccattgcggctgtgctcctcatgcatatgcctgctgaacaggccttctggtgcctggttcaaatatgcgagaagtacctgcccgggtattactcagaaaagctagaggccatacaattagatggggaaatcctcttcagtttactccagaaagtgtctcccgttgcccacaaacacttgagccggcagaagatcgaccctttactgtatatgacggagtggttcatgtgcgctttcagccgaactttgccatggtctagtgtcctgcgtgtgtgggacatgttcttttgtgaaggggtaaagataatctttcgagttggtctcgtgctgctcaagcatgcactggggtcaccagagaaggtaaaggcttgtcaaggacagtatgaaactatagagagactgagaagtctgtcacccaaaataatgcaggaagcattccttgtgcaggaagtggtggagctgccggttaccgagaggcagatagaacgggagcacctaattcagctacgtagatggcaggagacccgcggcgagttgcagtgccggtcacctccaaggctgcacggagctaaggcgattctggatgccgagcccggccctagacctgccctacagcccagcccttctatcagactgccgctggacgctcccctgcctgggtccaaggcgaaacccaaaccccctaaacaggcccagaaagaacaacgaaagcaaatgaaggggagaggccaattggagaagccacccgcacccaaccaggccatggtcgtcgcagcggccggcgacgcatgccctccccagcacgtgcctccaaaggattcggcccctaaagactccgcgcctcaggacctggcacctcaagtgagcgctcatcataggtctcaggagtctctcacttcccaggagtcagaggatacatacctgtag

SEQ ID NO: 137325 - DNA, 1548 bp, synthetic construct
  misc_feature 1..1548: note = Description of Artificial Sequence: Synthetic coding sequence
  source 1..1548: mol_type = other DNA
atggccaagagcaacggcgaaaatggcccccgggcccctgctgctggagagagccttagtggcactcgggagagtctcgcacaaggaccggatgccgccaccaccgatgaactgagcagtctgggaagcgacagcgaggccaatgggtttgcagaaaggagaatcgacaaatttgggttcattgtgggaagccagggggccgaaggcgctccatgtcctttactccacagactcgaggaggttccccttgaggtgctcaggcaacgggagtcaaaatggctcgacatgttgaacaactgggataagtggatggcaaagaaacacaagaaaatccgcctgcgttgccagaagggaatccctccgagtctgcgggggcgtgcatggcagtacctgtccggtggaaaagtaaagttgcagcaaaacccggggaagttcgacgaacttgacatgtctccgggagatcctaaatggctggatgttattgagcgggacctacaccggcaatttccgtttcatgaaatgtttgtctctagaggagggcacgggcaacaggatcttttcagagtgctaaaagcttataccctgtatcgcccagaagagggttactgccaggctcaggcacctatagcagcggtgctgttaatgcacatgcccgcagaacaggcattctggtgtctggtgcagatctgtgagaaatacctgccaggttactattccgagaaattagaggccatccaactcgacggggagattctcttttctttgttacagaaagtctctccagtggcacacaaacatctgagcaggcagaagatcgaccccctgctttatatgacggagtggtttatgtgtgccttcagtcgcacgctaccctggagctccgtactacgggtttgggatatgttcttctgtgagggagttaagatcattttccgagtgggcctcgtgctgttgaaacacgccttgggttcccctgaaaaggtgaaagcatgccagggccagtacgagacgatcgagcggcttaggagcttgagccccaagatcatgcaagaggcttttttggtgcaggaggtcgtggagctcccggtaacggaaagacagatcgaacgcgaacacctaattcagctccgcagatggcaagaaactcgcggcgaactccaatgccggagccctcctcggctgcatggtgcgaaggctattttggacgccgagcccgggccccgaccagccctgcagccctctccgtccatcagattaccgctggacgccccgctgccaggaagcaaagcgaagccgaaacctccgaaacaggcacagaaggagcaaaggaagcagatgaagggcagaggacagctagagaagccaccggcacctaaccaagctatggtggtggcagcagcaggcgatgcctgcccgcctcaacacgtacctcctaaggacagtgctcctaaggactcagctccccaggatcttgccccacaagtgtcagcccaccaccgttctcaggaaagcctcacaagtcaggagtcagaggacacttacctgtag

SEQ ID NO: 137326 - DNA, 2427 bp, synthetic construct
  misc_feature 1..2427: note = Description of Artificial Sequence: Synthetic coding sequence
  source 1..2427: mol_type = other DNA
atggaaactggtaccgccccacttgtagcccctcctagacgccatggtgcccccgccgcccctagcccccctcccaggggtagccgtgcgggaccggtcgtcgtcgtagcacccggcccaccagttaccacagctacaagcgcccccgtcacgctggtcgcccccggagaagcccgtcccgcctgggtgcccggaagtgctgaaacttccgctcctgcacctgcaccagccccagctccagcccctgccgtaacagggtcgacagttgtggtcctgacgctggaggctagccccgaggctcccaagccacagctgcctagcgggcccgagtctcctgaacctgcagcggtggctggtgtggaaacatcccgtgctctcgccgcaggagcggattcaccgaaaacagaggaggcgcgtccttctcccgcacccggaccaggaacgcctaccgggactccaacacgcactccctcgcgaactgctcccggagccttgacagctaagccaccgttggcacctaagcctgggaccaccgtggccagcggtgtgactgcacggagcgcctcagggcaggttacgggagggcacggtgctgccgccgctacaagtgcgtctgccggacaggctccagaggacccgtctggaccaggcaccggcccttcggggacctgcgaggctccggttgccgttgtgacagtgactccggccccagaaccagcggaaaactctcaggacttagggagcactagcagcctcggccccggtatttctggaccaaggggacaggcccccgataccctgagctatctggattcagtctctctgatgagtgggacattggagagcctggcagatgacgtgagcagtatgggaagcgatagcgaaattaacggtctggccctgaggaaaacggacaagtacgggtttctgggaggcagtcaatacagcggaagcttggagtcaagtatcccggtcgacgtggcgagacaacgtgaacttaagtggctcgacatgttctctaactgggacaaatggctgagcagacggttccagaaggtgaagttaaggtgtcggaaggggattccgagcagcctgagagccaaggcctggcaatatttgtccaatagcaaggagcttctcgagcagaatcctggcaaatttgaggaactggaacgcgccccaggggatcccaaatggttagacgtcattgagaaggatctccaccggcagtttccctttcacgagatgttcgctgctaggggcggccatggccagcaggatctgtacagaatactgaaggcctacactatctataggcccgacgaagggtattgccaggcgcaagccccagtagctgccgtcttgttaatgcatatgcccgcagaacaggctttctggtgcctcgtgcaaatctgtgacaagtaccttcctggctactattcagccggactcgaagccatacagctagacggggagatattcttcgcactgcttcgaagggcttctccacttgctcaccgccacctgcgcaggcagcggatagatcccgtactgtatatgaccgaatggtttatgtgcatctttgctagaaccctaccatgggcgtctgtcctgcgggtctgggacatgttcttctgcgaaggtgttaagataatcttccgagtagctctggttctactccggcacactctcggaagcgtcgagaagttgaggtcatgccaaggcatgtatgaaacaatggagcagctcaggaacttgcctcagcagtgtatgcaggaagactttctggtccatgaagtcacaaacctccccgtgacggaggccctcattgagagagagaatgcagcacagcttaaaaaatggcgggagactcggggtgagctacagtatagaccgtctagacggctgcacgggagtcgggccattcatgaggaaaggagacgacagcagcccccacttggtcctagttcatccctactatctcttcccgggttgaagtcacgcggatcaagagctgctggtggtgccccttcgcccccaccaccggtaagacgcgcctccgctggcccggcaccaggccccgtcgtgactgcagaaggtctgcacccttcccttccttctcctacagggaatagcactcctctgggaagtagtaaggaaactcgtaaacaggagaaagaacgacagaagcaggaaaaagagagacagaagcaagaaaaagaacgagagaaggagagacagaaacaagaaaaggagcgagaaaaacaggagaaggaacgggagaaacaggagaaggagaggcagaaacaagagaagaaggcccaggggaggaagttgtcccttcgccggaaagcagatgggcctcccggaccccacgatggcggggaccgcccctcagccgaagcccgtcaggacgcatacttctag

SEQ ID NO: 137327 - DNA, 1341 bp, synthetic construct
  misc_feature 1..1341: note = Description of Artificial Sequence: Synthetic coding sequence
  source 1..1341: mol_type = other DNA
atggcgcaggcactcggcgaggacctggtgcagccacccgaattgcaagatgactcctcgtctctgggttcagactctgaactcagcgggcctggaccataccgacaagccgataggtatggttttattggcggaagctctgccgaacccggacccggacatcctccagctgacctgataagacagagagagatgaaatgggtggagatgacctcccactgggaaaaaacaatgtctcgcagatacaaaaaggtgaagatgcaatgtagaaagggcattccaagtgcactccgggctaggtgctggcctctcctctgtggagctcacgtctgtcagaagaactcgcccggtacctaccaggagcttgctgaggcacccggagatccacagtggatggaaacgatcggacgtgacctccatagacaattccccctgcatgaaatgtttgtgtctccacaaggccatgggcagcagggtctattgcaggtcttgaaggcatacaccctttatagaccagagcagggatattgccaggcacagggaccagtcgctgctgtcctgcttatgcatctgcctcctgaggaggccttttggtgtctagtccagatttgcgaggtctatttaccaggatattacggacctcacatggaagccgtcaggctggatgccgaagtcttcatggcattgctgcgaagactgttgcctcacgttcataaacatctgcagcaggtaggagtaggtcccctcttatacctgccggagtggtttctctgtttgtttgcccggagtctcccatttcctacagtgttgagagtgtgggatgcattcctgtcagaaggcgccagagtcttattcagggttggacttactctcgtgagactggcgctggggaccgccgagcagagaggcgcctgccctggacttctggaaaccctaggcgccctaagagctatccccccagctcaactgcaagaggaggcctttatgtctcaggtgcatagtgtcgtgctaagcgagcgggatctgcagagagaaatcaaggcacagttggcccaacttcccgactctgcccccggcccccctcctcggccccaggttcgtctggctggcgcccaggcaatcttcgaggcacaacagctggcaggcgtacgtcgaggagctaagccagaagtacctcgcattgtcgtgcaaccgcccgaggagccccgccccccacgtcgaaagccacagacaagagggaagactttccatggcctcttaacgagggcccgcggcccacccatagagggaccccccaggcctcagaggggatctacgagttttctcgatacgcggttttag

SEQ ID NO: 137328 - DNA, 1341 bp, synthetic construct
  misc_feature 1..1341: note = Description of Artificial Sequence: Synthetic coding sequence
  source 1..1341: mol_type = other DNA
atggctcaggccctcggagaggatcttgttcagccccctgaacttcaggacgactcaagctccctgggatctgactcagagctctcaggcccggggccttaccggcaagctgacagatatggtttcatcggaggcagcagcgccgagccaggaccaggacatcccccagcggatttgatcagacaacgggagatgaagtgggtcgagatgacgagtcactgggagaagaccatgagccgtaggtacaaaaaggtgaaaatgcagtgtcgcaagggcatcccaagtgcactgagggctaggtgttggccactgctgtgtggtgctcacgtttgtcaaaaaaattcccctggcacttaccaggagctagcagaggcacccggggaccctcagtggatggagacaatcggcagggacctgcaccgccaattcccactgcacgagatgttcgtgagtccacaggggcacggacaacagggactgctgcaagttcttaaggcctataccctttatcggccagaacagggatattgtcaggcacagggccccgtggcagccgtgttacttatgcacctgccccccgaggaggcattttggtgcttggtgcagatttgcgaggtgtacctgcccggctattacggccctcatatggaggccgtgcgcttggatgccgaggtgtttatggcactgctgcgtcgactcctgcctcatgtccataaacacttgcagcaagttggcgtggggccactgctttatctgccggaatggtttctctgcctgtttgcaagatctttgccttttccaacagtactgagagtttgggacgccttcctgtctgagggggccagggtcctctttagagtcggactgacgctagtgcgcctggccctcgggactgccgaacagagaggagcatgccccggtctgctcgagaccctgggagccctgagagccattccccccgcccagctgcaggaggaagcattcatgtctcaagtgcatagcgttgtactcagcgaaagggatttgcagcgagagatcaaagcacagcttgctcaactcccagacagcgcgcctggtccgcctcctagacctcaggtccggctggctggagctcaagccatattcgaggcacagcaactagctggtgtgcgcaggggagccaaaccagaggtgcctaggatcgtcgtgcagccaccagaggaaccgcggcccccaagacgcaaaccccaaaccaggggcaaaacatttcacggtcttctgaccagagcacggggcccccctattgaggggccgccaagaccccaaagaggatcaacctcattcctggacacgaggttttag

SEQ ID NO: 137329 - DNA, 2049 bp, synthetic construct
  misc_feature 1..2049: note = Description of Artificial Sequence: Synthetic coding sequence
  source 1..2049: mol_type = other DNA
atgtgtccaggactctacccatatagctctttgcttgaatacggacgttccatgatcatttatgaacaggaaggcgtgtatatccacagctcctgcggcaagactaacgaccaagatggcctgatatcaggcatactccgggtgctcgaaaaggacgccgaagtaattgttgactggcggccactagacgacgcgctggacagttcatcaatcctctacgccagaaaggactcaagtagcgtggtcgagtggactcaggcaccaaaagaacgcggacatcgaggatcagaacatttgaattcttatgaagccgagtgggacatggtgaacaccgtgagctttaagcgcaagccacacactaatggggatgcaccatcccatcgcaatgggaagtccaagtggtctttccttttttcactgacagatttaaagagtattaagcagaataaggaagggatgggctggtcctacttggttttctgtctgaaagacgacgtggtgctgcccgcactccacttccaccaaggtgattcaaaactcctcattgagtctctggaaaaatacgtggtgctgtgtgaatcccctcaggacaaacgcaccttgctggtcaactgccaaaataaatcactaagccagtcttttgaaaatctgctggacgagcccgcctacgggcttatacaaaaaattaaaaaggatccttatacggcgacaatgattggcttcagcaaagtgacaaactacatttttgatagcctgcgtgggtcagatccttccacccatcagcgaccccctagtgagatggccgatttcttgtcagatgcgatccctgggctcaagattaaccaacaggaagagcccggcttcgaggtgattacgaggatagacctaggcgagcgtcccgtggtgcaacgccgggaacctgtatctcttgaggagtggacaaagaacatcgatagcgaaggtcgaatcctaaatgtagacaatatgaaacaaatgatcttcaggggcgggctgagccacgccttgagaaagcaggcatggaagtttcttctcggctactttccctgggattccacaaaagaggaaagaacgcagctgcagaaacaaaagaccgatgagtacttcagaatgaaactgcagtggaaatccattagccaagagcaagaaaagcggaattcacgtctgagagactatcgttctttgatcgaaaaggacgtgaatcggaccgaccgcaccaacaaattctatgaagggcaggacaatccaggcctgattctgcttcatgatatcttaatgacatactgtatgtatgattttgacctagggtacgtccaaggcatgtccgacttgctgtcgcccctgttgtatgtaatggagaatgaggtggatgctttctggtgcttcgcatcctatatggatcagatgcaccagaactttgaagaacagatgcagggaatgaaaacgcagctaatccagttgtctactctcctccggctgctcgacagcggattctgctcatacctcgagagccaagacagtggctatctgtacttttgcttccggtggctgctgatccggtttaaacgggaattctccttcctggatattctaagactgtgggaggtgatgtggacagaactcccctgcacaaattttcacttgttattgtgttgtgctatactcgaaagtgaaaaacagcaaattatggagaagcattacggcttcaacgaaatccttaagcacattaacgagctctctatgaaaattgatgtcgaagacatcctttgtaaggcagaagcaattagtctgcaaatggttaaatgtaaggagctcccccaagcagtatgtgaaatcctgggactgcagggctcagaggtgactacaccggactctgacgttggagaggacgaaaacgtggttatgaccccttgtcctaccagcgctttccaatccaacgctttacccacactgagcgcgtctggcgctagaaatgattcccccactcaaatcccggtgtcctccgatgtgtgccggctgacaccagcctag

SEQ ID NO: 137330 - DNA, 1338 bp, synthetic construct
  misc_feature 1..1338: note = Description of Artificial Sequence: Synthetic coding sequence
  source 1..1338: mol_type = other DNA
atgataggcttctccaaagtcacgaattacatcttcgactccctccggggtagtgatccgagcacacaccagaggccccctagtgagatggctgatttcctctctgatgctatacccggtttgaagattaaccagcaggaggaaccagggttcgaggtgattacccggatcgacttaggagagaggcccgttgtgcaaagaagagaacccgtgtcgttagaggagtggacaaagaacatcgatagcgaaggtagaatcctcaatgtagataacatgaaacaaatgattttcaggggggggctcagccacgcactgagaaagcaagcatggaagttcttactgggctactttccttgggacagtactaaagaggagcgaacccagctgcagaaacagaaaaccgacgagtatttccgaatgaagcttcagtggaagagcatttcacaggagcaagagaaaagaaattcccggctccgcgactatagatctttgatcgaaaaggacgtgaaccggaccgataggacaaacaagttctacgaggggcaggataaccctggccttattcttctgcatgacattctaatgacgtattgtatgtatgactttgatctggggtacgtgcagggaatgtctgatttgctgtctccactgctctatgtgatggaaaatgaggtcgacgcgttttggtgtttcgcatcatacatggatcagatgcatcaaaatttcgaagagcagatgcagggaatgaagacccaactaatacaactctctactctcctgcggcttctggactctggcttttgttcttatctcgagtctcaggacagcggatatctttatttttgttttagatggctgcttatccggttcaaacgcgaattttcattcctcgacatcctccgcctctgggaagtgatgtggactgaacttccctgtactaatttccacctgttgctttgttgcgctatcctggaatcagagaagcagcaaatcatggaaaagcactacggctttaatgaaattttgaagcacatcaatgagctgagcatgaagattgacgtggaagatattttgtgtaaggccgaggccatctcccttcagatggtgaaatgtaaagaactgccccaggcggtctgcgagatccttggcctgcagggatcagaagtgacaacacccgatagcgatgtcggagaagacgaaaatgtagtgatgacaccttgcccaacgtctgcattccagagcaatgccttgccaacactttccgcctccggcgccagaaacgattcccccacacaaatcccggtgtcgtccgacgtttgccgcctgaccccagcctag

SEQ ID NO: 137331 - DNA, 2025 bp, synthetic construct
  misc_feature 1..2025: note = Description of Artificial Sequence: Synthetic coding sequence
  source 1..2025: mol_type = other DNA
atggctgccgctggagtagtgtcaggtaagatcatctatgagcaggaaggagtctatatccactcaagttgcggcaagaccaacgatcaggatggcctgatttctggtatccttagggttctggagaaggatgctgaggtcatcgtcgattggcgccctcttgatgatgctcttgacagtagttcaattttgtacgctcggaaggactctagctctgtcgtggagtggacacaagcccccaaggaacggggccatagaggctcggagcacttaaatagctatgaggccgaatgggacatggtgaacaccgtctcattcaagcggaagccacacactaacggtgatgcgccttctcacagaaacggtaagagtaagtggtcatttctcttctcccttacagacttaaagtccattaagcagaacaaggagggaatgggctggtcatacctcgtcttctgtctcaaggacgacgtcgtactgcccgccctgcactttcaccagggcgattcaaagcttctcatcgagtctcttgagaagtacgtggtgctgtgtgaatctccacaggataaacgaactctgttggtcaattgtcagaacaagagcctgtcccaatcattcgaaaacctcttggatgagccagcttatgggctcattcagaagatcaagaaggatccatacaccgccaccatgataggcttcagcaaggtcaccaattatatttttgactccctgcgcgggagcgacccttctactcatcaaaggcccccgagcgagatggcagactttctaagcgatgccatccccggtctgaagatcaaccaacaggaggagcctggttttgaagttatcactaggatcgacttaggagagaggccagtagtgcagagacgcgagcctgtgagcctggaagagtggaccaaaaacatcgacagcgaaggccgaattttgaacgtagataatatgaaacagatgatttttagaggaggtctctcccatgccctccggaagcaagcgtggaagttcctgctgggatattttccctgggacagcaccaaagaagaaagaactcagctgcaaaaacagaagaccgacgaatatttccgtatgaagctgcagtggaagagtatatcccaggagcaggaaaaaaggaactcaagactgcgtgattaccgttcattaattgaaaaggacgtgaatcgtactgaccgaactaacaagttctacgaggggcaggataatccgggactaatccttttgcacgatatcttaatgacctactgcatgtatgatttcgacctcggctacgtacagggaatgtctgacctgctgtcccccttactgtatgtcatggaaaatgaggttgatgccttttggtgtttcgcttcctatatggatcagatgcaccaaaacttcgaagagcagatgcagggcatgaagactcagctcatccagctaagcacgcttctccgtctactggattccggattttgttcatacctggagagtcaggactctggctatctgtacttctgcttcagatggcttttaatacggtttaagagagaattcagctttttggacatcttgagactgtgggaggtgatgtggacagagctgccctgtacaaactttcatctccttctctgctgtgccattttggagtcggaaaagcaacaaatcatggagaagcactacggtttcaacgaaattctgaaacacataaacgagcttagtatgaaaatcgatgtggaggatattttgtgcaaagccgaagcgatatccctgcaaatggtgaagtgcaaggaactcccgcaggccgtatgcgagattttgggactgcaggggagtgaggtgactacacccgacagtgatgttggagaggatgaaaatgtcgtgatgactccatgccctacctcagccttccaaagtaacgcgctaccaactcttagtgcctcaggagctcggaatgactcacccacacagatccctgtgtcttcagacgtgtgtaggctaactcctgcctag

SEQ ID NO: 137332 - DNA, 2076 bp, synthetic construct
  misc_feature 1..2076: note = Description of Artificial Sequence: Synthetic coding sequence
  source 1..2076: mol_type = other DNA
atggctgctgcgggcgtggtatcaggcaagattatctatgaacaggagggggtgtatatccacagctcatgtggcaagacgaacgaccaagacggcttgattagtggcattctgagagtactggagaaggatgccgaagtgattgtcgattggagaccattggacgatgctctggactcttcctcaatcctttacgcgagaaaggactcctcctccgtggtagagtggacgcaggctccgaaggaaaggggccaccgcgggtccgagcatcttaattcctatgaggcagaatgggatatggttaatacagtgtccttcaaaagaaaaccacataccaatggcgatgccccctcccataggaatggcaagtcaaagtggtccttccttttctctctgactgacctgaaatctataaagcagaacaaggagggcatgggttggagttacctggtgttttgcctcaaagatgacgtcgtgctccccgcgttacacttccaccagggcgatagcaaactactgatcgaatctctcgagaaatacgttgtactgtgtgaaagcccccaagacaagcgtactctccttgtcaactgtcagaataaatccctctcccaatcttttgagaatctactagacgaaccagcctacggccttattcaagctggcctcctggatcgtaggaaacttctttgggctatacaccattggaagaaaatcaagaaggatccatacacagcgacgatgatcggatttagtaaggtcacaaactatatcttcgattccttgaggggaagtgatccaagcacacaccagcgccctccatcagaaatggccgattttctgagcgatgctatcccgggtctcaaaatcaaccaacaggaagagcccgggtttgaggtgattacacgaatagatctcggagaacgtccagtggttcagcggagagaacctgtgtcactcgaggaatggactaagaacatcgattccgagggccggatcctgaacgtggataacatgaaacagatgatctttcgagggggactctcccacgccttaagaaagcaggcatggaagttcctgctgggatatttcccttgggattctacaaaggaagagcgaactcagctccagaagcagaaaacggatgagtactttcggatgaagctgcaatggaaaagtatttcacaggagcaggagaagagaaatagtcgcttgagagattatcgaagcctgatcgaaaaagatgtcaacaggaccgacaggaccaacaagttttacgaggggcaggacaacccggggctaattctgctacatgatattttaatgacatactgcatgtatgactttgatctgggctacgtgcagggaatgtccgacttattatcccctcttctgtatgtaatggagaacgaggtggatgccttttggtgtttcgcgtcatacatggaccagatgcaccagaatttcgaagagcagatgcaagggatgaaaacgcaactgattcagttgtcaaccttgctaaggttactggactctggattttgctcttatctagaatcacaagacagtggctatttatacttctgttttaggtggcttcttatccggttcaaacgcgagttttcattcctagacatcttgcggctttgggaggtaatgtggaccgagctgccgtgcacgaacttccatctgctcctttgttgcgctatcttggaaagcgagaaacagcaaatcatggaaaaacactacggctttaatgagattctgaaacatatcaacgagctttcaatgaagatcgacgtagaggacatcctgtgcaaggccgaggccatttctctgcaaatggtgaagtgcaaagaactgcctcaggccgtctgtgagatccttgggctccagggcagtgaagtcactacgcccgattccgacgtaggggaagatgagaatgtggtgatgactccctgccctacttcggccttccagtccaacgccctaccgaccctgagtgcgtccggggcgcgcaatgactctccaactcagattccggtgtccagtgacgtctgtcgacttacaccggcttag

SEQ ID NO: 137333 - DNA, 2133 bp, synthetic construct
  misc_feature 1..2133: note = Description of Artificial Sequence: Synthetic coding sequence
  source 1..2133: mol_type = other DNA
atgcacaatatcaggggcaataagcaggcgcaggggacgggtcacgaaccgccaggagaggacagtcctcaaagtggagagccgcagcgggaggagcagccactcgcaagcgacgcttccacaccagggagggaacccgaggacagcccaaagcccgccccgaaacccagcttaacgatcagcttcgctcaaaaggcgaaaaggcagaacaatacatttcccttcttcagcgaaggaattaccaggaacaggactgcacaggagaaggtggcagctcttgagcagcaagtgcttatgttgacaaaagagctaaaatcccagaaagaactggttaagatactacacaaggccttagaagcagcgcagcaggagaaacgcgcctccagcgcctacctggccgcggcagaagataaggaccgtttagaactggtgcggcacaaagtccggcagatcgccgagctcggtaggagggtggaggccctcgaacaggaaagggaaagtctagcacacacggctagcctgcgggaacagcaggttcaggagttgcaacaacacgtgcaactactgatggataagaatcatgcaaaacagcaggtaatttgtaagctttccgaaaaggtgacacaggatttcacccatccgcccgatcagagtcctttacgtcccgatgccgcaaaccgggactttctgagccagcagggcaagatcgaacacctgaaagacgatatggaggcatacaggactcagaattgcttcctgaactcggaaatccatcaggtgactaagatatggcgaaaagtggctgagaaagaaaaagctctgctgactaagtgtgcatacttgcaggcaaggaattgtcaggtggagagtaagtatctggccggtttacggcgcctccaggaggctcttggagatgaggcttctgaatgcagtgagctcctgaggcaactggtccaggaagctctccagtgggaggcaggcgaagcttcaagcgacagtattgaactaagtcctatcagtaaatacgacgaatacgggtttctgactgtacctgactatgaggtggaggatctgaagttgcttgcaaagattcaggcattggaatcacgaagccatcatttactcggactggaggccgtagatcgaccactgcgtgagagatgggctgctctgggcgatctggtcccttccgccgagctcaaacagctgctgagagcaggggttcctcgagagcacagaccccgggtttggcggtggctagttcacctgcgtgtgcaacacttacatactccaggatgctaccaggaactcttatccaggggacaagctagagagcacccagctgctagacagatagagctggacttgaataggaccttccccaacaacaaacactttacttgtcccacctcctcttttcccgataagcttagacgagtcctactggctttctcctggcagaaccctacaatcggctactgccaagggctgaataggctcgccgcaattgccctcctagttctggaggaagaagagagtgccttctggtgcctggtagctatcgtggagactatcatgcccgccgactattattgcaataccctaacggcatcacaggttgatcaacgggtcctgcaggacctgctctccgagaagcttcctcggttgatggctcacctgggccagcaccatgttgacctgtccctggttaccttcaactggttcctagtcgtcttcgccgactctctgattagcaatattctcctccgggtgtgggatgcttttttatacgagggcacaaaggtcgtgtttcgttacgccttggcgatattcaaatataatgagaaggagattctcaggctacaaaacggtctagaaatttatcagtacctcaggttttttactaagactatcagtaattctcggaagctgatgaacattgcgtttaacgacatgaaccccttcaggatgaaacagctgaggcagctgagaatggtacatagagagcgcctggaggccgagttacgagagttggagcagctgaaagccgaatatctggaacgtcgcgcgtcccgcagacgggctgtctctgaaggctgcgctagcgaggatgaggtcgagggagaagcctag

SEQ ID NO: 137334 - DNA, 1407 bp, synthetic construct
  misc_feature 1..1407: note = Description of Artificial Sequence: Synthetic coding sequence
  source 1..1407: mol_type = other DNA
atggaggcctaccgcacccaaaattgcttcctgaattcggaaattcatcaggttactaaaatttggcgaaaagtagctgagaaagagaaggctcttcttaccaaatgcgcatacctgcaggctaggaattgccaggtggagtcaaaatatctcgccgggctgcggagactacaggaagcgctgggagacgaggcttccgagtgcagtgaactgcttaggcagctggtgcaggaggctctgcagtgggaagccggcgaagctagcagcgattctatcgaactttcccccatcagcaaatatgacgaatatgggtttcttacagtgcccgactatgaagtcgaagatttgaagttgttagccaaaattcaggccctggagtcacggtctcaccatctattgggtttggaggctgttgacagacccctcagggagcgttgggcggcgctgggcgacctcgtccccagcgctgaattgaagcaactgcttcgcgccggggtgccccgggaacaccggccccgcgtgtggcgttggcttgtgcatcttagagtgcagcatctccatacgcctggatgctaccaagaactgctgagcagaggccaggctcgggaacatccggccgcacgtcaaattgaactggatctcaatcgaacttttcccaataataaacatttcacttgtcccactagttctttccccgataaactcagacgagtactgctggcattctcatggcagaaccctaccatcggatactgtcagggcctgaatcggcttgctgcaatagccctgcttgttcttgaagaggaagagagcgctttttggtgccttgtcgccattgtggaaactatcatgccggcagactactactgcaacacattaactgcttcccaagttgatcagcgcgttttacaggatctgctttcagagaaactgccaagattgatggcccaccttggccagcatcatgtagacctgtctctggtgaccttcaactggttcctagtagtttttgccgattctctgatctcaaatatcttactgcgcgtgtgggacgccttcctctatgagggcacaaaagtggtctttagatacgcactggcgatattcaagtataatgagaaagagattttacggctgcagaatgggctggaaatctatcagtacctccggttttttacaaaaaccatctctaattcgcggaagctgatgaacattgccttcaatgacatgaatccctttagaatgaagcaactgagacaattacggatggtgcacagagaacgccttgaagctgaactgcgggaactcgagcagctgaaggcagagtacctggagcggcgggcaagccggcggcgcgcagtctccgagggctgtgcctctgaggatgaagtggaaggcgaggcctag

SEQ ID NO: 137335 - DNA, 2583 bp, synthetic construct
  misc_feature 1..2583: note = Description of Artificial Sequence: Synthetic coding sequence
  source 1..2583: mol_type = other DNA
atggaaggggcgggagaaaatgcacccgaatcgtcatcaagcgcccccggctcagaagagagcgctcgtgacccgcaggttcctccaccggaggaggagtccggcgattgtgcacggagtctcgaagccgtgccaaaaaaattgtgcggttatctctccaaattcggtggaaaaggcccaatccgggggtggaagtcaagatggttcttctacgacgaaaggaaatgtcaactgtattattcaagaactgctcaggatgctaatccacttgattctatcgatttgagctcggcagtcttcgactgtaaggccgacgccgaagaaggcatctttgaaatcaagactccttcacgagttattacgctgaaagcagccacgaaacaggcaatgctgtactggctccaacagctccagatgaagcggtgggaattccataacagcccccctgccccacccgccacgccagatgccgccctggccggcaacggtcctgtgctgcatctggagctgggccaggaggaagcagagctggaagaattcctctgtcccgtcaagacccctccaggactggtgggagttgcagccgctttgcagccttttccagccttacagaacattagcttgaagcatctgggtacggaaatacagaacacgatgcacaacatccggggcaataaacaagctcaaggcactggacacgaacctccgggagaggacagcccccaatcaggggagccccagcgagaggagcaacccctggcatcagacgcttctaccccagggcgggagccagaagattcccctaaacctgcccccaagccgtcactgacaatatcctttgcccagaaggccaagcgtcagaataatacattcccctttttctctgaggggattacgaggaatagaaccgcccaggaaaaggtagccgctctggagcagcaggtgttgatgctgactaaggagctcaagagtcagaaggaactcgtcaaaattctccacaaggctctggaagccgctcagcaggaaaagcgcgcttcctctgcataccttgctgccgcagaggataaggacagactggaattggtccgacataaagttcggcagatagctgaactgggcagaagggttgaagcactggagcaagagcgcgagtcgcttgcacatacagcttccctgcgggagcagcaggtccaggagctccagcagcacgtgcagctgctcatggacaaaaaccacgcgaagcagcaggtgatctgcaaattgtcagaaaaagtaacgcaagacttcactcatcctcccgaccagtcaccattgaggcctgatgctgccaacagagattttctgtctcagcagggaaagatcgagcacttaaaagatgatatggaagcctataggactcagaattgctttcttaattctgaaatccaccaggtgaccaaaatctggcgcaaagtggctgagaaggagaaagcactcctgacaaagtgcgcctacctgcaggcccggaactgtcaggttgagagcaaatatcttgcaggcttgaggagactgcaagaggctctgggcgacgaagcctcagaatgctctgagctgttgcgacaactagttcaggaagccctgcagtgggaagccggagaggcaagctccgactccatcgaactcagcccaatctcaaagtacgacgagtacggctttctaaccgtgccggattatgaagtggaagatttaaagctgctagctaagatccaggctcttgagtcacgatcacaccatctgctcggcctggaagctgtagatcggcctctgcgagaaagatgggctgctctgggtgatctggtacctagcgcagaattaaagcaactgcttagggccggtgtccctcgcgaacacaggccgcgtgtttggaggtggctggttcacctcagagtccagcatttgcacaccccgggatgctaccaggaactattgtcccgggggcaggccagagaacatcccgcagcccgtcagatcgaattggatctcaataggacattccctaataacaagcactttacctgtcctacgtcaagtttccccgataaacttagaagagtgctgctggccttttcgtggcagaatcctaccattggatattgtcagggattgaatagactggccgccatagctcttctcgtgctggaagaggaggagagtgccttctggtgtcttgtggctattgtggaaacaatcatgcccgccgattattattgcaacacactgacagcctctcaggtggaccagagggtcctccaagacctgctttccgagaagctgccacggctgatggctcacctgggccaacaccacgttgacctctctttggttactttcaactggttcctcgtggtgttcgcagactcccttatcagtaatattcttctgcgagtttgggatgccttcctatatgaaggtacaaaggtagtatttcggtacgctctagcaatcttcaagtacaacgaaaaggagattttgagattgcaaaatggcctcgaaatctatcagtatctccgcttcttcacaaagaccatcagtaatagccgctag

SEQ ID NO: 137336 - DNA, 2754 bp, synthetic construct
  misc_feature 1..2754: note = Description of Artificial Sequence: Synthetic coding sequence
  source 1..2754: mol_type = other DNA
atggagggcgctggcgagaatgcccccgagtcctcatcttccgcacctggatctgaagagtccgctagggatcctcaggttccacccccggaggaagaaagcggagactgcgcacgatcactggaagctgtacccaagaaactgtgtggctacctttcgaagttcggtggaaaaggccctatccgagggtggaagtctaggtggtttttctacgacgaaaggaaatgtcagttgtattactctcggaccgcccaagacgccaacccactagattccatcgaccttagtagtgctgtcttcgattgcaaggccgacgccgaggaggggatcttcgagataaagaccccttcccgagtgataacgctgaaagctgccacgaagcaagcgatgctgtactggttgcagcagcttcagatgaaacgatgggagttccataattcacccccagctcctcctgctacccccgacgccgcgctggcgggaaacggccccgtccttcacttagaattgggccaggaagaggccgaactggaagaatttttatgtccagtgaaaaccccacccggtctggtgggagttgctgcagccctccaaccatttccagctctgcagaacatctctcttaaacatttgggcacagagattcagaatacgatgcataacattagggggaataaacaggcccaaggtactggtcacgagcctccgggcgaggattcccctcaatctggtgagcctcaacgtgaggaacaaccactggccagtgacgccagtacccctggccgtgaacccgaagactcccctaagcctgcccctaaaccaagtttgaccatctcatttgcgcagaaagccaagcggcagaacaacacattcccattttttagtgaaggtatcacccggaacagaacggcccaggagaaagtcgccgcattggaacagcaagtcctaatgctgaccaaggagctgaaatcccagaaagaactcgtcaagatactccataaggctctcgaagccgctcagcaggaaaaacgcgccagtagtgcctatttggctgccgccgaggataaagatcggctggaattagtacggcacaaggtcaggcaaattgcagagctcggccggcgtgtggaagcccttgaacaggagagggagtccttggcccataccgcttctttgagagaacaacaagtgcaggagcttcaacagcacgtacagttgctgatggacaaaaatcatgctaagcagcaggtgatctgcaagttgtctgagaaggtgacacaggatttcacccaccctccagatcagagcccacttcgtccggacgccgctaatagggatttcctgtcccagcaaggaaagattgagcacctgaaggacgacatggaagcctataggacccagaattgtttcctgaatagcgaaattcaccaggtgacgaagatatggcgcaaggtcgcagagaaagaaaaagcgcttctgacgaagtgcgcctatctccaggcacggaactgtcaggtagagtccaaatacctcgctgggctgaggcggctccaagaggccctgggggacgaggcttccgagtgttccgagctcttgcggcagcttgtccaggaggccttgcagtgggaagctggggaagcctcttccgactccatcgagttaagcccaatctcaaagtacgatgagtatggattcctaactgtgccggattacgaagtagaggacctcaagctcttagctaagatccaagctttagagtcccggtcacatcaccttcttggccttgaggctgtagaccgccctctaagggaaaggtgggcagccttaggagatctagtgccaagtgcagaacttaaacagctcctgcgggctggagttccaagagagcaccgcccacgggtgtggcgctggctcgtccaccttcgcgtgcagcacctgcacacacctgggtgttaccaggaactgttgagtcgaggccaggctcgcgagcatccagcagctcggcaaatagaactggatctaaacaggacctttcctaataataaacattttacatgtcctacgtctagcttccccgataaacttagacgggttctgcttgcatttagttggcagaacccgacaatcggttattgccagggactaaacagactggccgccatagccctgcttgtactggaagaagaagagtcagctttctggtgtctggttgcaattgtagaaacaatcatgccagctgattattactgtaacacgctgactgcttcccaggtggaccagagagtgctgcaggacctgttgtctgagaagctcccgcggttgatggcgcacctgggacagcatcacgtggacctctcgttggtcacctttaattggttcctggtagtattcgcagactctctaatttctaacattttgctgcgcgtatgggacgcttttctgtatgagggcacgaaatacaatgaaaaagaaatcttgagacttcagaacggtcttgaaatctaccaatacctgagattctttacaaagaccatcagtaattcccgtaagctgatgaatatagcattcaacgacatgaacccgtttcgtatgaagcagcttcggcaactcagaatggttcacagagaaaggctggaagctgagctcagggaactagagcagctgaaagctgaatacctggaaagacgtgccagccgtcggagagccgtctctgaaggctgtgcttcagaggacgaggtggagggggaggcttag

SEQ ID NO: 137337 - DNA, 1287 bp, synthetic construct
  misc_feature 1..1287: note = Description of Artificial Sequence: Synthetic coding sequence
  source 1..1287: mol_type = other DNA
atgccaagtggttgttatgtgcctaggagcgaaccccgcctgctgccagcaccaccaccggcgggagcccgggtgggggcactgcgctcagctcaaggtgacgggcctacctctgggcactgggatgggggagcagaaaaggctgattttaacgctaagagaaaaaaaaaggtggctgagatccaccaagcgctcaattcagatcctacggatgtcgcggctctccgaagaatggcgatctcagagggaggtcttttaactgacgaaattaggcggaaagtgtggcccaagctgctaaacgtgaacgccaacgacccccctcctatctcaggtaaaaatctgcggcagatgtccaaagattaccagcaggtcctgcttgacgtccgccgctcccttaggagatttccccctggcatgcctgaggaacagcgcgagggcctgcaagaggagttaatagatatcattttactaatcctcgaaagaaacccgcagctgcattactaccaggggtatcatgacattgttgtaacctttctgcttgtggtcggcgagcgtctggcgacctcactggtggaaaagctttccacccaccacttgagggacttcatggaccctaccatggataacacaaaacacattctaaattatctgatgcctatcatcgatcaagtcaatccagagctgcacgattttatgcagtctgctgaggtcggaacgatcttcgcactctcatggcttataacctggttcggtcatgtgctcagcgacttccggcatgtggttcggctgtacgatttcttcctggcctgtcaccctctgatgcctatttacttcgccgcggtcattgtcctctatagagagcaagaagtcctggattgcgactgcgacatggctagcgttcaccacttgctgtcccagatccctcaagacctcccatatgagacacttatctcaagagccggcgacctttttgtgcagttcccaccaagcgagcttgctcgcgaagccgctgcgcaacaacaagctgagaggacagctgcgtctaccttcaaagattttgagttggcctctgctcagcagcgaccagacatggtgctgcgccaaaggtttcgcgggcttcttcgccctgaggacaggacaaaggacgtcctcactaaaccccgcaccaacagatttgtgaaactcgctgtcatggggctaacggtggccctgggcgcggctgcgttagccgtggtaaaaagcgccctagagtgggctccaaagtttcagctgcagctgtttccatag

SEQ ID NO: 137338 - DNA, 1212 bp, synthetic construct
  misc_feature 1..1212: note = Description of Artificial Sequence: Synthetic coding sequence
  source 1..1212: mol_type = other DNA
atggcactgcgatcagctcagggagatggtccaacttctggccactgggacggaggggcagaaaaggccgacttcaatgctaagagaaaaaagaaggtggctgagattcatcaggccctcaacagcgaccccaccgacgtggctgccctgcgacggatggccatcagcgaaggcggtctgctgactgacgaaatcaggagaaaagtctggcccaagctcctgaacgtaaacgcaaatgatcccccccctatctcagggaagaacctgagacaaatgtctaaggactaccagcaggtgctgctggatgtcaggcgctcccttcgaagatttccacccggcatgcctgaagagcagagagagggtttgcaggaggagctgatcgacatcatcttgctaatccttgagcgtaaccctcagctccactactaccaggggtaccacgatattgttgtgacttttcttctggtagtcggagagagactggccacctccctagtagaaaaactcagcacgcaccacctaagggactttatggatccaacgatggataacacaaagcatatcctcaactatctaatgcccatcattgatcaggtgaacccggagttgcatgacttcatgcagtccgcggaggttggaacaatctttgcactgagttggttaatcacttggtttggccatgtcctgagcgacttcaggcacgtggtgaggctgtacgactttttcctggcatgccaccccctgatgccaatctatttcgcagcggtgatcgtgctgtaccgcgagcaggaggttctggactgcgactgcgacatggcaagcgtccaccatttgctgtcacaaatccctcaagatctcccttacgaaacacttataagtagagccggggacctgtttgtccaattccctccgagcgagttggctcgcgaagccgcagcacagcagcaagccgaacggactgcggcttccacgttcaaggacttcgaactcgcctcagcccagcaaaggcctgacatggtcctccgccaaaggtttagaggcctgctccgcccggaagaccgaacaaaggacgtgctgacaaaaccccgaacaaatcgttttgtgaagctggcagtaatgggactgacagtcgcgctgggcgccgccgctctggctgttgtcaaaagcgcattagaatgggcccccaaatttcagctgcaactctttccatag

SEQ ID NO: 137339 - DNA, 1212 bp, synthetic construct
  misc_feature 1..1212: note = Description of Artificial Sequence: Synthetic coding sequence
  source 1..1212: mol_type = other DNA
atggctctgcggtcagcccagggtgatggaccgacatccggccactgggacggcggagcagaaaaagctgatttcaatgcaaagagaaaaaaaaaagtggctgaaatccaccaggctctgaattcggaccccacggacgtcgctgccctgcgtaggatggcgatttcagaggggggactactgacagatgaaatccgaaggaaggtgtggccaaaactgctgaacgtgaatgctaacgacccccctcctatttcgggcaagaaccttcgccagatgtccaaggactaccagcaggtgctgttggacgtgcgtagaagcctgagacggttcccccccggaatgcctgaggagcagagggagggcttgcaggaagagctcatcgacattatccttctaatcctggagaggaatccacaactgcattattatcagggctaccacgacattgtcgttacattcctgttggttgtgggcgagcggctggccacctccctcgttgagaaactatcaacccatcatctgagagatttcatggaccctaccatggataataccaagcatattttgaattatctgatgcctattatagatcaggtgaatcctgaactgcatgactttatgcaatcggccgaggtgggcacgattttcgcccttagttggttgatcacatggtttgggcatgtgctgagcgacttccgtcacgttgtgcggctgtacgattttttccttgcctgccaccctctgatgcccatctatttcgccgctgtaatagtgctgtacagagaacaggaggtcctcgactgtgattgcgatatggccagcgtccaccacttgctgtcgcagattcctcaggatctgccatacgagactctgatctcgagggctggggatctgttcgtgcaattcccacctagtgagctggcacgggaagcagcagcccagcaacaagcagagagaacggctgcatcgacgttcaaggactttgagttggcctctgcacaacagcgcccagatatggtactgaggcagaggttccgaggcctgctccgcccagaagacaggacgaaggacgtcctgaccaaacctcgtaccaaccgctttgtaaaacttgccgttatgggactcacagtggcgctgggtgccgccgcgcttgccgtcgtcaaaagtgccctagagtgggcccccaagttccagcttcaactttttccttag

SEQ ID NO: 137340 - DNA, 1662 bp, synthetic construct
  misc_feature 1..1662: note = Description of Artificial Sequence: Synthetic coding sequence
  source 1..1662: mol_type = other DNA
atggacagccccgggtacaactgttttgtggataaagataagatggatgcagctattcaggatctcggccctaaggaactctcgtgcacagagctgcaggaacttaaacagttagctcgacaggggtactgggcacagtcccacgctctgcgtgggaaagtgtatcagagattgatccgcgacatcccttgtagaaccgtgaccccggatgcgagtgtctatagtgatattgtaggcaagattgtcggcaagcactcctccagctgtcttcccctaccggaatttgtcgacaatacccaagtcccgtcatattgtctgaacgcgcgaggagaaggtgcggtgcgtaagatattgctgtgtttggccaaccaatttcccgacatctcgttctgcccagccttaccggccgtggttgccctactattacactactcaattgatgaagcagaatgtttcgagaaggcctgtaggatcttggcgtgtaatgacccaggacgccgcttgattgatcagtcgttcttagccttcgaatcttcatgcatgactttcggagatctggtcaataagtactgccaggccgcgcataaactgatggttgcagtcagtgaggatgtgttgcaggtgtatgctgattggcaacggtggctgttcggagagctccccctgtgctactttgcgagagtttttgacgtgttcctggtggaaggctacaaggtgctgtaccgagtagcccttgccatcctgaagttctttcataaagtgcgtgccggccagcccctggagtctgatagcgtgaagcaagacatacgcacttttgttcgggacattgcaaagacagtatctccggagaagctcttagaaaaagcctttgctatccgtctcttctcccggaaggaaattcagctgctgcagatggccaacgagaaggcgctgaaacagaagggcattacagtcaaacagaaaaggcagtttgttcaccttgcggtacacgccgagaacttcaggagtgagatcgtttcagtcagggagatgagggatatatggagctgggttccagaacggttcgccctttgccagccgttgcttctgttttctagcctccagcatgggtatagtctggcccggttctacttccagtgcgaaggccacgaaccaaccctgttacttatcaaaaccacacaaaaggaggtttgcggcgcctatctctccaccgattggtccgagagaaacaagtttggagggaaactaggtttcttcggaaccggggagtgttttgtgtttcgacttcaacccgaagtccagcgctatgaatgggtagtgatcaagcaccccgagctgaccaagccaccacccctgatggccgccgagcccaccgcacccctgtcccatagcgctagtagcgatcccgccgaccggctatcccctttcctcgcagcccggcactttaatttgccgagcaaaacagaaagcatgtttatggccggtggaagcgactgtctcatcgtgggggggggcgggggccaagcactgtacatcgacggggacctcaatcgcggaagaacatcacactgtgacacctttaacaatcagccgttatgcagtgaaaatttcctgattgcagccgttgaggcttggggtttccaggatcctgatacccagtag

SEQ ID NO: 137341 - DNA, 1680 bp, synthetic construct
  misc_feature 1..1680: note = Description of Artificial Sequence: Synthetic coding sequence
  source 1..1680: mol_type = other DNA
atggactctcctgggtataactgctttgtggataaggacaagatggacgccgccatccaggatctgggtcccaaggaattgtcttgcacggagcttcaggaattgaaacaactggcccggcaggggtattgggcccaatcccacgctttgagaggtaaagtgtatcagaggttaatcagggacataccctgtaggacggttacgcccgatgcaagcgtttacagtgatatagtcggcaaaattgtggggaaacattcaagctcatgtctacctcttcccgaatttgtcgataatactcaagtgccatcctactgcctgaacgctagaggggagggcgcggtgcgaaagattcttttgtgtctcgccaatcagtttcccgatatatctttttgtccagcgctccctgccgtggttgctctcctcttacactactcaattgacgaggctgaatgcttcgaaaaggcatgtaggatacttgcctgtaacgaccctggccgtagacttatcgatcagagctttctcgcatttgaatcatcctgcatgacttttggcgacctagtgaataaatactgtcaggccgctcacaagcttatggtggctgtctcggaggatgtgcttcaggtctatgccgactggcaacgttggctgttcggagaactccctctgtgctacttcgccagagtttttgatgtgttcctggtagaggggtataaagtgctgtatagagtggccttggccatactgaagtttttccataaggttcgggccggacaacctctggagtcggacagcgttaaacaggacatacggactttcgtacgcgatattgcaaaaactgtctctcccgagaaattgctggaaaaggccttcgccattaggctgttcagccgcaaagagattcagcttctccagatggcgaacgagaaagctctgaaacaaaaaggaatcaccgtgaagcagaaaagtgtctcattgtccaagcgccagttcgtgcatttggcggtgcacgccgagaattttagatctgagatagtttctgtgcgggaaatgagagatatttggagctgggtgccagaacgtttcgccctgtgccagcctctactgctcttttcatcacttcaacatgggtactccctggcaagattttactttcaatgcgaaggccatgaacccacactactcctaataaagaccacacagaaggaggtgtgtggagcctacctctcgactgactggtctgaaagaaataagttcggcgggaaactcggattcttcggaactggagagtgctttgtcttccggctgcaaccagaggtacaacggtacgagtgggtcgttattaagcatccagagctgaccaaaccacccccactaatggcagctgagccaaccgcccctctctctcactctgcatccagcgaccccgccgaccggttatcgccttttttggcagctcggcactttaatctacctagcaagacagagtcaatgtttatggctggggggtccgactgtctgattgttgggggtggtgggggccaggccctgtatatagatggggatctcaatagaggccggacttcccactgcgatacttttaataaccagcccttgtgcagtgagaacttcctgatcgctgctgttgaagcgtgggggttccaggacccggatacacagtag

SEQ ID NO: 137342 - DNA, 2067 bp, synthetic construct
  misc_feature 1..2067: note = Description of Artificial Sequence: Synthetic coding sequence
  source 1..2067: mol_type = other DNA
atggctacagcatctggcgcttctgacctctccgggagcggtgctccaccccctggtgtgggtgcccaagctgctgcagccgctgaggaggaggagcgagaagtggtgcgggtcagagttaaaaaatgtgagagttttcttccccccgagtttagatctttcgctgttgacccccagattacctccctcgacgtcctgcagcacatcttaatcagggcattcgacctcagtgggaagaaaaactttggaatttcctatttaggccgggaccgtcttggccaggaagtttacctctcacttctctcagactgggacctttccaccgccttcgctaccgcctctaagccttatctccagctgagggtggatattcgccccagtgaggattcgccactgctggaggattgggacattatcagtccaaaagatgttatagggtccgatgtgcttctagcagaaaagagatccagcttgacaacggccgcactgccattcactcagtctatactgacccaagtaggtcgaaccttgagtaaggtgcagcaggtcctcagctggtcttacggggaggatgttaaacccttcaagccccccttgtccgatgccgagttccacacatatcttaatcatgagggtcagctcagccggcccgaagaacttcgactgaggatttaccacggcggtgtggaaccttctctgcggaaggtggtatggagatacctgctgaacgtctacccggatggactgacaggccgcgaaagaatggattacatgaaacgcaaatcccgcgagtacgagcagcttaagtccgagtgggcacagagagccaatcccgaggatcttgagtttatcaggagcaccgttctgaaggacgtcttacgaaccgacagggcccatccttattatgcaggcccagaagatggcccgcacttgcgggctctgcacgatttgctgaccacttacgctgtgactcatccccaggtcagctactgtcagggtatgtctgacctggcgtctccaatcctggcagtgatggaccatgaaggccacgcatttgtctgtttttgcgggataatgaaacggctcgccgcaaattttcaccctgacggccgcgctatggcaactaaattcgcgcaccttaaactcctcctgcgacacgccgaccccgatttttaccagtatctgcaggaggccggcgccgacgatctgttcttctgctatagatggctgcttctggagctcaaaagagagtttgcctttgatgacgcattgcgaatgctggaagttacatggtcctcgctgccccccgacccccccgagcatgaggtggaattggtgggcccaccttcccaggtagccgacgccggctttggtggccatagaggatggccagtcaggcagcgtcacatgctgcgtcccgctggcggaggaggttcaacatttgaagacgcagtggatcacctagcaacagcctcccagggacccggaggcgggggtcggctcctccggcaggcttctctcgacggtctgcaacaactccgagataacatgggtagcagaagggaccctcttgttcaattaccccaccccgctgctttgataagttctaaatcactctctgaacccctactcaatagcccggacccgctcctctccagcttttcccatccagattcccccagttcgtccagtccaccctcgacacaggaagcttctcccaccggcgacatggccgtgggatcccctctgatgcaagaggtggggtcacctaaagaccccggcaaatcactgccccccgtcccacccatgggccttccacctccccaggagtttggccgggggaatccgttcatgctctttctctgcctcgcgatcctgctggaacatcgggatcatataatgagaaatggacttgactacaatgagctggccatgcacttcgaccgtctagtgagaaagcatcatctgggacgcgtactcaggagggcacgggccttgtttgcagactacttgcaaagcgaagtgtgggatagcgaggagggcgcggaagccactgctgcaagttag

SEQ ID NO: 137343 - DNA, 693 bp, synthetic construct
  misc_feature 1..693: note = Description of Artificial Sequence: Synthetic coding sequence
  source 1..693: mol_type = other DNA
atggcaaccgctagtggggcctctgacctgtcaggatcaggcgccccccccccaggagtcggggctcaggccgctgccgctgcagaggaagaggagcgggaggtcgtccgtgtcagagttaagcacggggatggcgcacctggcggcttgccacatgttttttcaccgcaaaagtgcgagtctttcttgccgcctgagtttcgctcttttgcagtcgaccctcagattacttcactggacgtcctccagcacatcctgattcgcgccttcgatctgagcggcaaaaagaacttcggaatcagttatctgggccgggacaggttgggtcaagaagtgtacctgtccttgctaagcgactgggacctttcaactgccttcgctaccgccagcaaaccttatcttcagttgagggtggatatcaggccatctgaagacagccctcttctggaagactgggatattatttcacccaaggacgtgattggctctgacgtgttactggctgagaaacgcagtagcttgaccacagccgcactcccttttacacagtccatcttgacccaggtgggtagaactctgtctaaagttcaacaggtgttgagctggagctatggcgaagacgtgaagcctttcaagccacctttgtctgatgccgaattccacacctatctgaaccatgaaggacagttgtag

SEQ ID NO: 137344 - DNA, 303 bp, synthetic construct
  misc_feature 1..303: note = Description of Artificial Sequence: Synthetic coding sequence
  source 1..303: mol_type = other DNA
atggcaaccgcttcaggcgcatcagatctaagcggttcgggggcccctccaccgggagtgggcgcccaagcggctgcggccgcggaagaggaggaacgtgaggtggtacgggttagagtgaaaaagtgtgagagcttcctcccccccgaatttaggagcttcgccgtggatccgcagataacttctctggatgtcctgcagcacatcctgattagagctttcgatctctccgggcccattgctagaagacttggtcacaaccagccgcagcggtgtcattggctgcggcgcgtcgctggctag

SEQ ID NO: 137345 - DNA, 1305 bp, synthetic construct
  misc_feature 1..1305: note = Description of Artificial Sequence: Synthetic coding sequence
  source 1..1305: mol_type = other DNA
atggattacatgaagcggaagtcaagggaatacgagcagttgaaatcggaatgggcccaaagagctaacccagaagaccttgagtttatcagaagcacagttcttaaggacgttcttcggaccgatcgagcacatccctactatgctggccctgaggatggaccacatctcagggcacttcacgacttgcttaccacctatgccgtgacacatccccaggtctcctactgccagggaatgtctgacctggcgtccccgattcttgccgtaatggaccatgagggccatgcctttgtgtgcttctgcgggatcatgaagcgcttagcagctaattttcatccggacggacgggctatggcaactaaattcgctcacttgaagctgctgctccgccatgcagatccagacttctaccagtaccttcaagaagctggagcggatgacttgtttttttgctatcgatggctgctcctggaactgaaacgtgagttcgcattcgacgacgcactccggatgctggaggtgacttggtccagtcttcccccagatccccctgagcacgaggtggaactggtggggccaccttcccaggtggctgacgccggatttggagggcatagaggatggcctgttcgacagagacatatgctgcgtcccgccgggggcgggggttctacatttgaagatgccgtggaccatctggccacggctagccagggccctgggggaggcggccgcctgttaagacaagcttcacttgatggactacagcagctcagagacaatatggggtcacggagggacccactggtacagctcccccacccagcggctctgattagctctaaatccctgtccgagccgctccttaacagtccggatccgctgctcagctccttttcccatccagatagtcctagttcttcctcaccaccgagcacccaggaggccagccctacaggggatatggccgtagggtctccgctgatgcaggaggtgggctcccccaaggatcctggtaaaagcctaccccctgtgccccccatgggcctgccacccccacaagagttcggcaggggtaatccatttatgctgttcctctgtttggccatcttgctggagcacagagatcatatcatgaggaacggcttagactacaatgagctggccatgcactttgacagactggtgcggaagcaccatctaggaagggtcctgcgccgggcccgggccctcttcgcggactatttgcaaagcgaggtgtgggattccgaagaaggggctgaggcaacggcggctagctag

SEQ ID NO: 137346 - DNA, 876 bp, synthetic construct
  misc_feature 1..876: note = Description of Artificial Sequence: Synthetic coding sequence
  source 1..876: mol_type = other DNA
atggatgtggtggaggttgctggctcctggtgggctcaggagcgagaggatattatcatgaagtatgagaagggacacagagcaggcctgccggaagataagggccccaaacccttccgcagctataacaacaatgttgatcatctgggaatcgtgcacgaaacagagcttcctcccctgactgctagagaggcaaagcagatcaggagggagattagtaggaaatccaaatgggttgatatgctcggagactgggaaaaatacaagtcttcccgcaagctaatcgatagggcttataaggggatgcccatgaatattcgagggccgatgtggagtgtactgctgaacattgaggagatgaagctgaaaaaccctgggcgatatcagattatgaaggaaaaaggaaaaaggtcctccgagcatatacaacgcatcgacagggacgtttctggcacacttcggaagcacatcttctttagggatcgatatggaactaaacaaagggaattgttgcatattctgctggcctacgaagagtataatcccgaggtgggctactgtagggatctctcacacattgcggcactctttctgttatacctccccgaagaggacgccttctgggctctggttcagctgctggcatccgagaggcacagtctgcagggtttccactctccaaatggcggtactgtgcagggtctccaggaccagcaggagcatgtggtggccacctcccaacctaaaactatgggacaccagtcagcatctcggcgccgccccggggtggccaggggccacgttttcgccactggatccctcatccccggaccgggaatgagaacactctgcagcagtatcctgggcccactgtag

SEQ ID NO: 137347 - DNA, 1650 bp, synthetic construct
  misc_feature 1..1650: note = Description of Artificial Sequence: Synthetic coding sequence
  source 1..1650: mol_type = other DNA
atggacgtcgtggaagtggcggggtcttggtgggcccaagagagggaggatattattatgaagtacgagaagggacacagagcaggtcttcccgaggataagggccctaagccattcagatcatataacaacaacgtagaccatctcggtattgtccatgaaacggaactgccacctctgaccgcccgggaggctaaacaaataagacgggagatttcaaggaaatccaaatgggtcgacatgctgggcgactgggagaaatacaagtcatcaaggaagctgatcgaccgggcatataagggcatgccgatgaacatcagagggccaatgtggtccgtgctcctaaacattgaagagatgaaactgaagaatcctggaagatatcagataatgaaggaaaaggggaaacggtctagtgagcatatccagagaatcgaccgggatgtgagtggcacactgcgcaagcatatattctttcgagataggtacggtacaaagcagcgggagctcctgcacatcttactggcttacgaggagtacaaccccgaagtggggtattgcagggacctcagccatattgccgcactttttctgctgtacttgccagaagaggatgccttctgggcgctggtgcagctgctcgcctctgagagacactcactacaggggttccatagcccaaatggaggtacggttcagggcttacaggaccagcaggagcatgttgtggcaaccagccagccaaagaccatgggccatcaagacaagaaggatctctgtgggcaatgttcccctctgggttgcctaattcggatcctcatcgacgggattagcttggggctcactcttcggctctgggacgtgtatctggtggagggcgaacaggcactcatgcccatcacgagaatcgctttcaaggttcagcaaaagcgcctgaccaaaacatcacgttgtggaccatgggcccgcttttgtaatagattcgtggacacctgggccagagacgaggacaccgttttgaaacacctgagagctagcatgaagaagctgaccaggaagcagggcgacctccctccgcccgccaaaccggagcagggaagtagcgcatcaagaccggtgcctgcctcccgtggcggcaaaactctgtgcaagggcgaccgccaggccccacctggccctccagcccgctttcctagacccatatggtccgcctcacctccgcgcgccccaaggtcatctaccccatgccctggcggagcagtacgggaggacacatatcccgtcggcactcagggggtcccctccccagcgctcgcgcaaggtgggcctcagggatcctggaggtttctccagtggaactccatgcctagactgccaactgatctggacgtggaaggcccttggtttcggcattacgactttagacagagctgttgggtcagggcaatctcccaggaagatcagcttgccccgtgctggcaggctgaacacccagcagaacgggtccgctcggccttcgcagccccatctacagactccgatcaaggcacgcccttccgggcaagagatgaacagccctgtgcccccacctcagggccgtgtctctgtggattgcaccttgaatcaagccagtttcccccaggattttag

SEQ ID NO: 137348 - DNA, 900 bp, synthetic construct
  misc_feature 1..900: note = Description of Artificial Sequence: Synthetic coding sequence
  source 1..900: mol_type = other DNA
atgggccaccaagacaaaaaagatctctgcggccagtgctctccactcggctgcttgatccgtatcctcatcgatggcattagcctgggcctgacattaagactctgggacgtttatctggttgagggcgagcaagctctcatgccaatcacacgcattgcattcaaagttcagcagaagagacttacaaagacatcgcgttgcggtccctgggctagattctgtaaccgttttgtggacacctgggcaagggatgaggacaccgttctgaaacacttaagggcgagtatgaagaaactgacacggaagcagggggacctgcctccaccagcaaaaccggaacagggctcctccgcctcgcggcccgtgccagcctctcggggcggcaaaacgttatgcaagggagaccggcaggcgccacccggtccccccgccaggtttccaagaccaatttggtccgcctctcctcccagagctccgcgctccagcacgccgtgccctggcggcgccgtccgtgaggacacttatccagtagggactcagggggtccccagtcccgctttagcacaaggcgggccccaaggatcttggaggttcctccagtggaattctatgccgaggctccccactgatctcgacgttgagggaccttggttccgacactacgactttcgccagagctgttgggtgcgggccattagccaggaggaccagctggccccatgctggcaagccgaacaccctgcggaaagggttcgaagcgcattcgcagctccttccacggatagcgaccagggaacccccttccgcgctcgggacgagcagccatgtgctccaacctctgggccttgtctttgtggactacaccttgagagctctcaatttccacctggcttctag

SEQ ID NO: 137349 - DNA, 1584 bp, synthetic construct
  misc_feature 1..1584: note = Description of Artificial Sequence: Synthetic coding sequence
  source 1..1584: mol_type = other DNA
atggacgtggtcgaagtggcaggctcttggtgggcgcaggagcgcgaggacattataatgaagtatgaaaagggccatcgcgccggtcttccagaagataaaggacctaagcccttcagatcatacaataacaatgtggaccatctcggtatcgtgcacgagactgagttacccccacttacagctagggaagcgaagcagattcgtagggaaattagccgtaaatcgaagtgggtggacatgctaggagattgggaaaagtataaatcttctcgcaaactgattgatcgcgcttataaaggcatgcctatgaatatccgtggtccaatgtggagcgtgcttcttaacatcgaagaaatgaaattgaagaaccccggtaggtatcagatcatgaaggagaaggggaagcgcagcagcgaacatatccagaggatcgaccgtgatgtttcaggcacacttaggaagcatatattcttccgtgatcgctacggcactaagcaaagggagctcttacacatcctgctggcttatgaggagtataaccctgaagtggggtattgtagagatctgtcccacatagctgccctgttcttactgtaccttcctgaggaggacgctttttgggctctggtacagcttcttgcctctgagcgccacagtcttcagggatttcatagtcccaacggcggtacagtccagggcctgcaggaccagcaagaacacgtagtggccacctctcaacctaagacaatgggacatcaaatctctcttggcttgacattgaggctgtgggacgtttacctggtcgaaggtgagcaggctctgatgccaatcacacgcattgccttcaaagtgcaacagaagcggctgacgaagacctccagatgcggaccatgggctcgcttctgtaaccggtttgtagacacatgggccagagatgaggataccgtattgaagcatctccgagcatctatgaagaagctgacacgcaagcagggggatttgccaccaccggctaaaccagagcaaggctcatccgccagtcggcccgttccagcctctaggggaggtaagactctctgtaaaggagaccgacaggcaccaccggggccacctgcccggttccctcgccccatttggagcgcttccccccccagggcccctcggagttccaccccatgtcctggtggcgccgtgagagaagacacctacccagtgggtacccagggggtgcctagccccgccctagcgcagggaggcccacagggatcttggcggtttctccagtggaactcaatgccccgacttcccactgacctcgatgtggagggtccctggttccggcattatgacttcaggcagtcgtgctgggtcagagctattagccaagaggatcagcttgctccctgttggcaggccgagcatccggccgaacgggtaaggagcgctttcgctgccccttctactgattcagatcaaggcaccccctttcgcgctcgggacgaacagccttgcgcacctactagcggaccctgcctgtgcgggctgcacctcgaatcgagccagttccccccaggcttttag

SEQ ID NO: 137350 - DNA, 1650 bp, synthetic construct
  misc_feature 1..1650: note = Description of Artificial Sequence: Synthetic coding sequence
  source 1..1650: mol_type = other DNA
atggatgtcgtggaagttgccgggtcttggtgggcacaggagagagaggacatcatcatgaagtatgagaaggggcaccgcgccggccttccagaggacaaaggcccgaagcctttcagatcatataacaataatgtagatcacctgggaattgttcacgaaactgaactccctccattgaccgcacgggaagcgaaacaaatcaggcgcgaaatttcacggaagtcaaagtgggtcgatatgttaggcgactgggagaagtacaagagtagtcgcaagctgatagatagagcttataaggggatgcctatgaatatacggggccctatgtggagtgttctgttgaacatcgaggagatgaagctgaaaaatccaggaaggtaccaaattatgaaagaaaaaggaaaaagaagcagcgagcatatccagagaattgatcgagacgtgtctggcacactacggaagcatatctttttccgggaccgatatgggaccaagcaacgagaactgctgcatattcttcttgcttacgaggaatacaatcccgaggtgggttactgtagagacctgtctcacatcgccgccctcttcctgctatacctccctgaggaggatgctttctgggccctcgtgcagctgctcgccagcgagcggcattcactccaggggttccactcacctaatgggggaaccgtgcagggcctgcaagaccagcaggagcatgtcgtagcgacctcacagcctaagactatggggcaccaggataagaaggatttatgcggtcagtgttcacctctgggctgcctcatcaggatactgatcgacggaatatctctgggtcttaccctccgactctgggatgtgtacctggtggagggtgagcaagcacttatgcctatcacgaggatagctttcaaggtccagcagaaaaggttgacgaaaacctcacgttgcggtccgtgggctcgcttctgcaaccggtttgtagacacttgggctcgagatgaggatacagtattgaaacatctgcgggcaagcatgaaaaagcttacgcggaagcaaggtgacctacccccccctgccaagcctgagcaaggcagctccgcttcacgcccggttcccgctagcagaggggggaaaaccctctgtaagggcgacagacaggcccctcccgggccgccggcacggtttcccaggccaatttggtcggcctctccaccaagagcaccacggtcgagtacaccgtgtccaggcggggcagtccgcgaggacacctatcccgtgggcactcaaggagttccctccccggccctggcacagggaggacctcagggctcttggaggttcttacaatggaattcaatgccccgcctgccgaccgaccttgacgttgagggtccctggttcaggcattatgatttccgtcaaagctgctgggtcagagcgattagccaggaggatcaactggcaccctgttggcaagccgaacaccccgctgagcgcgttagaagcgcatttgccgcaccaagtaccgactccgaccagggaacccctttccgggccagggacgagcagccgtgtgcccccacctccggcccgtgtctgtgcggcctgcatctggagagttctcagttcccgccagggttttag

SEQ ID NO: 137351 - DNA, 1584 bp, synthetic construct
  misc_feature 1..1584: note = Description of Artificial Sequence: Synthetic coding sequence
  source 1..1584: mol_type = other DNA
atggatgtcgtggaggtcgcgggatcttggtgggctcaagaacgggaagatataattatgaagtacgaaaaggggcacagagcaggacttcccgaggataagggacccaagccattcagatcttacaacaacaacgtcgaccacctcgggattgtgcatgagacagagctgccccccctgaccgccagagaggctaaacaaattagacgggagatatcccgcaaatccaaatgggtcgacatgctgggagattgggagaagtacaagtctagtcgaaagcttatcgacagagcatacaaaggaatgccgatgaacatacgtggccccatgtggtcagtgctgctcaatatagaagagatgaaactgaagaatcctgggagataccagataatgaaggagaagggtaagcgctccagtgagcatatccaacggattgatcgcgacatctccgggactctccgtaagcacatgttttttcgagaccgctacgggactaagcagagagagctgcttcatatcctgttggcatacgaagagtacaatcccgaagtgggctattgcagggatctctcacacatcgcggcactgttcctcctgtactttcccgaagaggacgcattctgggcactggttcagttactcgcatccgaacgtcatagtctgcaaggctttcactccccaaacggcggaaccgttcagggtctgcaggatcagcaggagcatgttgtcgccactagccagtccaaaaccatggggcaccaaatttcactgggccttactctgcgcctgtgggacgtgtatctggtagagggagagcaggctttaatgcctataacccgtattgccttcaaagtgcagcaaaaacgactgaccaagacatccagatgcggtccttgggcaagattctgcaataggttcgtcgacacttgggcccgagatgaggacaccgtcctgaaacacctgcgtgcttctatgaagaaattgactcgcaagcagggcgacctgccaccccccgctaagcctgaacagggctcttctgcgtcccggcccgtgccagcaagtagaggaggcaagaccctgtgtaagggcgaccgccaggctccacctggccctccagcgagatttcctagacctatctggagtgccagccctccccgggctcccagaagtagcacaccttgtcccgggggtgctgtgagggaagatacttaccctgtgggtacccaaggcgttccatccccagctctggctcaagggggtccacaaggatcttggaggtttttacagtggaattctatgcctaggctgcccactgatctggacgttgaaggcccctggtttagacactacgatttccgccagagttgttgggtgcgggccatcagtcaggaggaccagttggcaccttgttggcaagccgagcatccagcagaaagggtacggagcgctttcgctgctccttctactgactcagatcagggcactccctttcgcgcaagagacgagcagcaatatgcccctacatctggcccttgtctgtgtggcctgcacttagaatcttcgcaatttccaccaggcttttag

SEQ ID NO: 137352 - DNA, 1650 bp, synthetic construct
  misc_feature 1..1650: note = Description of Artificial Sequence: Synthetic coding sequence
  source 1..1650: mol_type = other DNA
atggacgtggttgaggtcgccggatcctggtgggcacaggagagagaagacataattatgaaatatgagaaagggcatagagcaggcctcccagaagacaagggccctaagccgtttagatcgtataacaataatgtggaccatctgggaatagttcatgaaactgaactccctccacttacagcccgggaggccaagcagatcaggcgggagatttcgagaaagtctaaatgggttgacatgctcggggactgggaaaaatataaatcctcgagaaaattaattgatcgggcctataaaggcatgcctatgaacataagggggcctatgtggtccgtcctgctgaacatcgaggagatgaaacttaaaaatccaggcaggtaccagataatgaaggaaaaagggaagcgtagctccgaacatatacagcgcatcgatagggacatcagtggaacgctaagaaagcacatgtttttccgagatcggtacggaacaaagcagcgagaactcctgcatattctccttgcctacgaagaatataaccctgaggtcgggtattgtcgggacctgtctcacatagctgccctgttcttgctgtactttcccgaggaggatgcattctgggccctcgtccagctgctggctagcgagaggcattctctccaaggcttccattcccctaacggggggacagttcagggcctgcaagaccagcaagaacatgtggttgccacatcccagtccaagaccatgggacaccaggataaaaaggatttatgtggtcagtgctccccactagggtgccttatcaggatcttaatcgatggcatttccctgggactgaccctgcgtttgtgggacgtttacttggtcgagggcgaacaagccctgatgccgattactaggattgcttttaaagtgcagcagaaaaggctcaccaagacctcccgatgtggcccatgggccaggttttgcaatcggtttgtggatacctgggcgcgggacgaggatacagtactgaagcacctcagagcttctatgaaaaaattgacaagaaagcagggcgatttaccccctccagctaagcccgagcagggatcgtccgccagtcggccagtccctgcaagccggggtggtaagaccctgtgcaagggtgacagacaggctcctcctggccctccagcgcgctttcccaggccaatctggtctgcatctcctccccgagctcccagatcttccaccccatgtcctgggggcgctgtgcgcgaagatacttaccccgtcggaactcaaggtgtgccgagccccgcactggcgcaaggcggccctcagggatcatggcggtttctgcagtggaattccatgcctcggctcccaaccgacttggacgttgaaggcccgtggttccggcattatgattttagacaatcatgttgggtgagagcgatttcacaggaagaccagctggctccttgttggcaagccgagcatcccgcagaacgggttaggtctgccttcgcagctccttcgactgatagcgatcaagggactcctttccgcgccagggatgagcagcagtacgctccaacgtcagggccttgcctgtgtgggctgcatctcgagagctctcaatttccccctggcttttag

SEQ ID NO: 137353 - DNA, 1650 bp, synthetic construct
  misc_feature 1..1650: note = Description of Artificial Sequence: Synthetic coding sequence
  source 1..1650: mol_type = other DNA
atggacgtagtggaagtggcaggctcatggtgggcccaagaacgggaagacattatcatgaaatatgagaagggccatagagcaggcctgcccgaggacaagggtccgaaaccttttcgatcgtacaataacaatgtcgatcatctgggtatcgtgcacgaaaccgagctgcctccccttactgccagagaagctaagcaaataagaagagagatatcaagaaagtcaaaatgggtcgacatgcttggagactgggaaaaatataaaagcagtcgcaaactgatcgacagggcctacaaaggaatgccaatgaacatccgggggcccatgtggtccgtgctgctcaatatcgaagaaatgaaactgaagaaccctggacgttatcagatcatgaaggagaagggcaagagatcttccgaacacatccagaggattgatcgggatatttccggcacacttcgtaaacacatgttcttcagggacaggtatgggactaaacagcgcgagctcctgcatattctgctggcatacgaggaatataaccccgaggtggggtattgtcgtgatctctcgcatatcgccgctttgttcttactttacttccccgaggaggatgctttttgggctttggtccagctgctggcctcagaaaggcactcacttcagggctttcattcccccaatggcgggaccgtccagggtctgcaagaccagcaggagcacgtcgtagccacctcccagagcaaaacaatggggcaccaagataagaaagatctctgtgggcagtgctctcctttgggttgtttgatacggatcttaatcgacggcatttcgcttgggctgactctgaggttatgggatgtatacctggtcgagggagagcaggctctcatgccaataacaaggatagcctttaaggtccaacagaagaggctgacaaagacctcccggtgcgggccttgggcacggttttgcaacaggttcgtggatacttgggcgcgcgatgaagacactgtcctgaagcatctgagagcgtctatgaagaagctgactagaaaacagggtgatctgccaccacctgccaagcctgagcagggctcatccgcttcccgcccagtgcccgcaagccgaggggggaaaacactgtgtaagggtgatcgccaagctcccccaggtccgcccgcacggtttccacggccaatatggtctgccagtccccccagagcaccccggtccagtactccatgcccggggggtgccgtaagagaagacacatatcctgtgggcacacagggtgtcccaagtccagctctagctcagggcggaccccagggaagctggcggttcctgcagtggaacagtatgccacgccttcctacagatctagatgtggaggggccttggtttcgccactatgactttagacagtcctgttgggtgcgcgctattagccaagaggatcagctggcaccgtgttggcaggcagaacacccagccgaacgtgtacgttctgccttcgctgcgcccagcactgattctgaccagggcaccccatttcgtgcaagggacgagcaacaatatgccccaacttctggcccatgcctgtgtgggctgcaccttgaaagtagccaattccctcctggcttctag

SEQ ID NO: 137354 - DNA, 1650 bp, synthetic construct
  misc_feature 1..1650: note = Description of Artificial Sequence: Synthetic coding sequence
  source 1..1650: mol_type = other DNA
atggatgtcgttgaggtggccggttcatggtgggcccaggaaagggaggacattattatgaaatatgagaaaggacatagagctggccttcctgaagataagggtccaaagccattcagatcttacaataacaacgtcgatcacctaggcatcgtgcacgagaccgagttgccaccactcactgcaagggaggccaagcagatacggcgagagatctcaaggaagagtaagtgggtggacatgctgggcgactgggaaaaatataaatcatcacgtaaactgatcgatcgcgcatataagggtatgcccatgaatattaggggccccatgtggtccgttcttctaaacatcgaagagatgaaactgaagaatcccggacgttaccagattatgaaagagaaaggcaagcgcagctccgagcacatccagagaattgatcgggatatctctggtacgttgcgaaaacacatgttttttcgagatagatacggaacaaaacagcgggaacttctccatatcctgctggcctacgaagagtacaaccctgaggtgggctattgtcgcgacctttcgcacatcgccgccctcttcctactctatctgccggaagaagatgctttctgggcccttgtgcaactcctagcttcggaacgccactctctgcagggttttcacagcccgaatggcggtacagtgcagggcctgcaggaccaacaagagcacgtggtggcaacgtctcagtcaaaaactatgggccaccaggataagaaggatctctgtggacaatgcagcccgctgggatgcctgatcagaattctgattgacggtatatccctcgggctgacccttcggctgtgggacgtgtacctcgtagagggtgagcaggcgttgatgcctatcacgaggattgcatttaaggtccagcaaaaacggcttaccaagaccagtagatgcggaccctgggcccgcttttgtaacaggtttgtagacacatgggccagggatgaggatacagtcttgaaacatctgcgggcttcaatgaagaagctaacccgcaaacaaggtgatctaccccctcccgctaaaccagagcagggatcatcggcctccagacctgtcccggcatcacgaggagggaagacgctgtgcaagggcgacaggcaagctccaccagggcctcctgcctggtttccacgcccaatttggtctgcgtcacccccccgggcgccgagatccagcacgccatgtccggggggagcagttagggaggacacatatcccgtcggaacccagggcgttcccagcccggcactcgcccagggaggaccccaggggtcctggaggttcctgcagtggaacagtatgcccagattgccaaccgaccttgacgtggaaggtccctggttccgccactacgacttccggcagagttgttgggtccgtgctatttctcaagaggatcaactggcgccgtgttggcaggcagaacaccccgccgaacgtgtgcggagtgccttcgccgccccttccaccgactcagatcaggggacgcctttcagagccagggatgagcagcagtgtgcgccgacatctggcccatgtttatgtggcctgcacctggagtcaagccagttccccccgggcttttag

SEQ ID NO: 137355 - DNA, 1584 bp, synthetic construct
  misc_feature 1..1584: note = Description of Artificial Sequence: Synthetic coding sequence
  source 1..1584: mol_type = other DNA
atggacgtggtagaggttgccggcagctggtgggcccaggaacgggaggatattatcatgaaatacgagaagggtcaccgagctggcttacctgaagataagggtccgaaaccatttaggagctataacaacaatgtggatcatctcggcattgtgcacgaaactgagctgcctccacttactgcccgagaggcgaagcaaatcagacgagagataagtagaaaatctaaatgggtcgacatgctgggggattgggaaaagtataagtctagccggaagttaattgaccgggcctataagggaatgccaatgaacattagaggtcccatgtggagcgttctcctgaatatcgaggagatgaaactgaaaaatcctggacggtatcagatcatgaaggaaaagggcaagcgctccagtgaacacatccagcggatcgatcgtgatatctccgggaccctgagaaagcacatgttctttcgagatcggtacggcaccaaacagcgagaactgctgcatattctcctggcttatgaagaatacaacccagaagtgggttactgccgagacctgtcccatatcgctgcccttttcctgctttatctgccggaggaggatgccttctgggccttagttcaactcctggcctccgaacggcacagcctgcaggggttccacagcccaaatgggggtacagtgcagggcttgcaggatcagcaggaacacgtagtggctactagccaatccaagacaatggggcaccagatatccttggggctgacactcagactgtgggacgtgtatctggtagagggtgagcaagcactcatgccaatcacccggattgccttcaaggtccagcagaagagactgacgaagacaagccgctgtggtccctgggcacggttctgtaatagatttgtggacacatgggcgcgcgacgaggatacggtcctaaagcatttacgcgcttctatgaagaagctaactaggaagcaaggtgacctgccacctcccgccaaacctgagcagggtagtagcgccagtcgccccgttccagcaagtcgtggggggaagactctgtgtaagggagaccggcaggctccaccggggcccccggcatggttcccaagacccatttggagtgcctcgccaccacgcgccccccggtcctctaccccatgccccggcggggcggtgcgggaggacacataccccgttggaacacaaggcgtgcctagccctgctctggcccaaggaggtccccaagggtcctggaggttcctacagtggaactctatgccccgactgcctaccgaccttgatgtcgagggaccttggtttagacattacgacttcaggcagagctgttgggttagagcaatttctcaggaggatcagctcgctccatgttggcaggctgaacacccagccgaaagggttcgctccgccttcgccgccccatcaacagattctgatcagggaactccgttccgggcacgcgatgagcagcaatgcgccccaacctcaggtccttgcctgtgcgggttacacctcgaatcatctcagttccccccggggttctag

SEQ ID NO: 137356 - DNA, 1650 bp, synthetic construct
  misc_feature 1..1650: note = Description of Artificial Sequence: Synthetic coding sequence
  source 1..1650: mol_type = other DNA
atggacgtggtcgaagtcgccggcagctggtgggcacaagaaagagaagatatcataatgaaatatgagaagggacacagagctgggctgcctgaggataagggacccaaaccatttcggtcatataacaacaacgtggatcacctgggaatcgtccatgagacggagctcccccctctaactgccagggaagccaaacagatacggcgggagatttctcggaagagcaaatgggtggacatgctgggcgattgggaaaaatacaagtcatccaggaaacttattgaccgggcttacaagggtatgccaatgaatattagaggcccaatgtggtccgttcttttgaacatagaggaaatgaagttgaagaaccctggcagatatcaaatcatgaaagaaaaaggcaagaggtcctctgagcatatccagcgcattgacagggatatttccgggaccttgcgcaagcatatgttttttcgggatcgttatggtacgaagcaacgcgagctgctccacattctactagcatacgaagagtacaaccccgaggtgggatactgtagggacctgagccacattgccgcgctgttccttctgtatctccccgaggaggacgcattttgggctttggtccagctgctggccagcgaaagacacagcctgcaggggttccattccccaaacggaggaacggtccagggattgcaggatcagcaagaacatgtggtggctacttcccaatctaagactatggggcaccaagataagaaagatctgtgtggccagtgtagcccactgggctgtctgatacggatcctcatcgacggcatctcattaggccttacgttaaggctatgggatgtgtacctggttgagggggagcaggccctcatgcccatcacccgcatcgctttcaaggtccagcagaaaagattaacaaagaccagccgctgcggtccatgggctagattctgtaaccgttttgtggacacatgggccagggacgaggacaccgttcttaagcatctgagagccagtatgaaaaagcttacccgaaagcagggggatctgccgcccccagccaaacccgaacagggcagtagtgcctcccgccccgttcccgcttctcgtggggggaaaaccctatgcaagggagatagacaggctcctccaggcccccctgcttggtttcctagacccatctggtctgcaagcccaccccgtgcccctcgatctagcacaccttgtccaggcggagccgtgcgcgaagatacatatcctgttgggacacagggtgtgcctagtcctgcacttgcccagggcgggccccagggatcctggcgctttctacaatggaatagtatgccgaggctgcctactgatctggacgtggaaggaccgtggtttagacactatgattttcgccaaagctgctgggtgcgagcaatctctcaggaggatcagctggcaccctgctggcaggccgagcatcccgctgaacgcgtaagaagcgcatttgctgcccccagtacagatagtgatcaaggaactccattccgggctcgggacgaacagcagtgcgcaccgacttctggaccttgcctctgtgggttacacctggagtcctcccagtttccccccgggttttag

SEQ ID NO: 137357 - DNA, 1650 bp, synthetic construct
  misc_feature 1..1650: note = Description of Artificial Sequence: Synthetic coding sequence
  source 1..1650: mol_type = other DNA
atggacgtcgtggaggtcgcaggtagttggtgggcgcaggaacgtgaagacatcattatgaaatacgaaaaaggacaccgagcaggccttcctgaggacaagggaccgaagccctttcgtagctacaataacaacgttgaccacctcgggattgtccacgaaactgagctcccccctctgacggctcgggaggccaagcagatccgaagagaaatctctagaaaatccaagtgggtggacatgttaggtgactgggaaaaatataagagcagccgcaagctgattgaccgtgcttacaaaggcatgcctatgaatattcgcggccctatgtggtcagtcttgcttaacactgaggaaatgaaactcaaaaatcccgggcgctatcaaatcatgaaggagaagggcaagcgcagcagcgaacacattcagagaatagatcgcgatgtgagtggtaccctccgaaagcatattttcttcagagaccgctacggcactaagcaacgggagttgctacatattttactggcatacgaagaatacaacccggaggttggttactgccgcgatctaagtcacatcgctgcactctttctgctgtatctccccgaagaggatgctttctgggcactcgtgcagttgctggcctctgagagacatagtctgcaaggcttccactcaccaaatggcggcaccgtgcagggccttcaggatcagcaggaacacgtagtggccaccagccaacccaaaactatgggccatcaggataaaaaggacttgtgcggccagtgctccccactcggatgtcttatccggatcttgattgatggaatttccctcgggctgacacttcgcctgtgggatgtgtaccttgttgaaggggaacaggctttaatgcccatcacccgcatcgcctttaaagtgcaacagaaaaggctcacaaagacctcccggtgtggcccctgggctcgtttttgcaatcgctttgtagatacgtgggcgcgcgacgaggataccgtgttgaagcacctgcgcgcctctatgaaaaagctcacgcgcaagcagggtgacctaccaccccctgctaaaccggaacagggcagctcagcgtcccgtcccgtgcctgccagtaggggtgggaaaactctctgtaagggagaccgacaggccccacctggcccaccagccaggtttcccagacctatctggtccgctagcccacctcgggcaccacggtcctcaaccccttgcccagggggcgcagttcgggaggacacctatcccgtgggaacgcagggtgtgcctagtcccgcgctcgcccagggaggacctcagggctcttggcgcttcctccagtggaatagcatgcctagactgcctacggacttggatgtcgagggcccgtggtttaggcactatgacttccggcagtcttgttgggtgagagctatttcccaggaggatcagctggcaccttgttggcaagctgagcatcccgccgagcgtgttagatctgcctttgcagcgccatccacggacagcgatcagggcactcctttcagggcaagggatgagcagccatgtgctcccacaagtggaccatgcctctgcggactgcatcttgagagcagtcagtttccaccaggcttttag

SEQ ID NO: 137358 - DNA, 876 bp, synthetic construct
  misc_feature 1..876: note = Description of Artificial Sequence: Synthetic coding sequence
  source 1..876: mol_type = other DNA
atggatgtggtggaggttgcaggcagctggtgggcacaggaacgggaagacatcattatgaagtatgaaaagggccaccgggctggcctaccagaagataagggaccaaaaccttttcggagctacaacaacaatgtggatcatttaggcatcgtgcacgaaaccgagcttccccctctgacggcaagggaggctaaacagatccggagggagatcagtcggaaatccaagtgggtggatatgctgggggactgggaaaagtataaaagcagtcggaagctaattgaccgggcatacaaagggatgccaatgaacattaggggtcctatgtggtccgtgcttttgaacacagaggaaatgaagctcaaaaaccccggtcggtatcagataatgaaggagaaggggaagcgctcaagtgagcatatccagcgcattgatagagacgtaagcgggactttgaggaaacacattttttttcgggataggtacgggacaaagcagcgggaactactgcacatcctgttggcgtatgaggaatataatcccgaggtcggatactgccgggatcttagtcacatagccgcgctgtttctgctttatctgccagaagaggacgccttctgggccttggtacaactgttggccagcgaaagacatagtctacagggtttccactcaccaaatgggggtaccgtgcagggcctccaggaccagcaggagcatgtggtggcgacttcacagcccaagacaatgggccaccagtctgcatcacgaaggaggcccggagtggcacgcggacacgtgttcgccactgggagtctgattcctggccccggcatgcggaccttgtgttcctccatcctgggcccgctgtag

SEQ ID NO: 137359 - DNA, 900 bp, synthetic construct
  misc_feature 1..900: note = Description of Artificial Sequence: Synthetic coding sequence
  source 1..900: mol_type = other DNA
atgggccaccaggataagaaggacctttgtggacaatgctcgccattgggttgcttgatcagaatccttattgacggtattagcctgggcctgaccctcaggttgtgggacgtatatctggtggaaggagagcaggcgctcatgcctatcaccagaattgccttcaaggtgcagcagaaacggctaactaagacctctcgctgtggcccttgggccaggttctgtaacagatttgtagatacttgggcccgggatgaggacaccgtgctaaaacaccttcgagctagtatgaagaagctgactcggaaacaaggcgacttgcctccacccgcaaagcccgaacagggctcctcagcctctaggcccgtgcccgcatcccgcggcgggaagaccctgtgcaagggggaccgacaggctccacctggcccacccgccaggttcccccgcccgatatggtccgcctcgccacctagggctccgagatcatctaccccatgcccaggcggcgcagtgcgggaggatacttacccagtcggaacccaaggggtcccctccccagctctagcgcagggcggaccccaaggaagctggagattcctgcagtggaatagcatgcccagattgcctactgatctggacgttgagggaccatggttccgccactacgatttccgccagtcatgctgggtcagagcaatctcacaagaagatcagctcgcaccatgttggcaagccgaacaccccgctgaacgggtccgcagtgcatttgcagcaccatctaccgactcagaccagggtacccctttcagggccagggacgagcagccttgcgccccaactagcgggccttgtctctgcggcctccatcttgagtcttcacagtttcctcctggcttctag

SEQ ID NO: 137360 - DNA, 1410 bp, synthetic construct
  misc_feature 1..1410: note = Description of Artificial Sequence: Synthetic coding sequence
  source 1..1410: mol_type = other DNA
atgctcggggactgggagaaatataaatcttcccggaagcttatcgacagagcgtacaagggcatgccaatgaacattagggggcccatgtggtcagtgctcctcaatactgaggaaatgaagctcaagaaccctggacggtaccaaatcatgaaggagaagggaaagcgcagctcggaacatatccagcgcattgatcgtgatgtgagtgggaccctacggaagcatattttttttagagaccgatacgggacaaaacagcgagaacttttacacatcctcctggcttatgaggaatacaaccccgaggtcggctactgcagggacctcagccatatagccgctcttttcctgctctacctcccggaagaagatgcattctgggccctcgtccagctcctcgcctctgagcgtcactctctgcaagggttccactctcccaatggaggcactgtccaggggctgcaagaccaacaggaacatgtcgtggctacttcgcagcccaaaacaatggggcaccaggacaagaaggacctgtgtggccagtgtagtcccctcggctgtctcatcagaatcctgatagacggaatcagcctgggcctgactctgcggctgtgggacgtgtatctggtcgagggggagcaggcccttatgcctattacacggattgcatttaaagtacaacaaaagaggttaactaaaacctcacgctgcggcccctgggcccgcttttgcaaccgcttcgtggatacctgggcgcgcgatgaggacactgtgctgaagcatttgcgggcatcaatgaagaaactgactcgcaaacagggggatctgcctccgcccgcaaaaccagaacaggggtcctctgcttctcgcccggttcctgcatcaaggggggggaaaaccttatgtaaaggggataggcaggctcctccaggcccaccggcgagattcccccggcccatctggtctgccagccccccaagagcgcccaggtcatccacgccatgcccaggaggggccgtgcgggaagacacatatccagtcgggacgcaaggcgtgccctctccggctctcgctcaaggggggcctcaaggttcatggcgattcttgcaatggaactctatgccaaggctgccaacggaccttgacgtggagggtccatggtttaggcactacgattttcggcagtcttgttgggtgcgcgcaattagccaagaagaccagctggcaccctgctggcaagcggaacacccagctgaacgtgtgagatcggcttttgccgctccttctacagacagcgaccagggcacaccctttcgcgccagggatgagcagccgtgcgctcccacaagcgggccctgtctgtgcggtctgcatctggagtccagtcaatttcctcccggattctag

SEQ ID NO: 137361 - DNA, 1650 bp, synthetic construct
  misc_feature 1..1650: note = Description of Artificial Sequence: Synthetic coding sequence
  source 1..1650: mol_type = other DNA
atggacgtcgttgaggttgccggcagttggtgggcgcaggagcgagaggatattattatgaagtacgagaagggccatagggctggattacccgaggataaggggccaaagccttttcgaagctacaacaacaacgtggatcatctgggtattgtgcacgagaccgaattgccacccctcacagctagagaggcgaagcagatccgcagagaaatcagccgtaaaagcaagtgggtggacatgcttggagattgggagaaatataagagctctagaaagcttatcgacagagcatataaaggcatgcccatgaatatccgcggccccatgtggtccgttttgctgaatattgaggaaatgaagcttaagaaccctgggaggtaccagattatgaaagagaaaggtaagaggagttccgagcacatacaacgaatcgaccgggacatcagcggcaccctccgcaaacacatgttcttcagagatcgatatggcaccaagcagcgtgagcttctacatattttactggcctatgaggaatacaacccagaagttggctattgcagggatttatcccacattgcggctttattcctgctctacctgccagaagaggacgcattctgggccctggtccagctgctcgcctctgagagacatagcttgcagggattccactcgccgaacggggggacggtgcagggcctccaggatcaacaggagcatgtagttgctacttcccagcccaaaacaatgggtcatcaggataaaaaggatctctgcggccaatgtagcccccttggatgtctcatccggatcctgatagatggcattagtctcggattgacattgaggctctgggatgtgtacctagttgagggcgaacaagcactgatgccaatcacaagaatcgccttcaaggtgcagcagaagcgattaaccaaaactagccggtgtgggccttgggctcggttttgcaacaggtttgtggacacatgggcaagggacgaggacacagtcctgaaacaccttcgggcctctatgaaaaagcttaccagaaaacagggcgacctcccccccccagcgaaaccagagcaaggttcaagtgcgagcagacccgtgccggcaagccgtgggggtaagacattgtgtaagggcgataggcaggcacctcccgggccgcccgcgaggtttccgcgccccatctggagtgcaagcccaccccgggcgcccagatcctctaccccctgccccggcggcgcagtgcgcgaagatacttatcctgtggggacacagggagtcccctcgcccgctctagctcaaggcggcccccaaggaagctggcggtttctgcagtggaatagcatgccgagactgccgaccgacttggacgttgaaggaccctggtttagacactatgacttccgccagagctgttgggtgcgcgctatatcccaagaggatcaattggcgccatgctggcaggcggagcaccccgctgaaagagttaggagcgcatttgccgcacctagcacggactccgatcagggcacgcccttcagagcacgggatgaacagcagtgtgctcctacctccggcccttgcctgtgcggcttacacctagagagttcccaatttccgccgggattctag

SEQ ID NO: 137362 - DNA, 1650 bp, synthetic construct
  misc_feature 1..1650: note = Description of Artificial Sequence: Synthetic coding sequence
  source 1..1650: mol_type = other DNA
atggatgttgtggaagtggcaggttcctggtgggcccaggagagagaagacataattatgaagtatgagaagggacatcgcgcaggcctgcccgaagacaagggccctaaacctttccgcagttacaataataatgtcgaccatttgggaattgtgcatgaaaccgaacttccccccctcacggcccgggaggctaaacagatccggcgggaaattagtaggaagagcaagtgggtggatatgctcggcgactgggagaaatataaatctagtagaaagctaatagaccgtgcttacaagggtatgccaatgaatattcgtggaccaatgtggagtgtgctgttgaatattgaggagatgaaactgaagaatcccggacggtaccagattatgaaagagaaggggaagagaagttcagaacatatccagagaattgacagagacattagtggtacgctgcggaaacacatgttcttccgggataggtatgggacaaagcagagggagttgctgcacatactcctggcctacgaagagtataatcccgaggttggctactgccgcgacttatcccatatcgctgctctcttcctgctgtacttgccggaagaagatgccttctgggcccttgtgcagcttcttgcgtcagaaaggcattcactgcagggcttccattcccctaacggtgggacagtgcagggattgcaagaccagcaggaacacgtggtagccacttcacaaccgaagaccatgggccaccaggataagaaggacctgtgtggacagtgttctcctttgggctgcctaatccgaattctcattgacggtatctccctgggcttaacgctgaggttatgggacgtctacttagttgagggcgagcaggctctcatgcctatcaccagaattgcctttaaagtgcaacaaaagcgcttgacaaagacttcccgatgcggcccttgggccagattctgcaatcgtttcgtggatacttgggcacgggacgaggatactgtactgaagcacctgagagcatcaatgaaaaaattgacaagaaaacaaggtgacctgcccccaccagccaagcccgagcaaggatcttccgcctcgaggcccgtgcccgcatctaggggcggtaagacactatgtaagggtgatagacaagcgccccctggcccacccgctaggtttccccgaccgatatggagtgcaagcccacctagagccccccggtcctcaacaccttgcccgggtggagcagtgcgggaggacacctatcctgttggcacacagggggtcccatccccagctctggcgcagggcggcccacaggggagctggcgtttcctccagtggaacagcatgccacgattacctactgacttggatgtggaaggcccatggtttcggcattatgactttcgacaatcctgctgggtgcgggccattagccaggaagatcagcttgcgccgtgttggcaggcggaacatcctgccgaaagggtgaggtctgcttttgctgcccccagtaccgactctgaccagggtacaccctttcgggccagggatgagcaacagtgcgcacctacgtccggaccatgtctctgcggccttcatcttgagagttcccaatttccccctgggttttag

SEQ ID NO: 137363 - DNA, 1584 bp, synthetic construct
  misc_feature 1..1584: note = Description of Artificial Sequence: Synthetic coding sequence
  source 1..1584: mol_type = other DNA
atggacgtcgtggaggtggccgggtcctggtgggcccaagagagagaagacatcattatgaagtacgagaaaggccaccgcgcaggccttccagaggataagggacctaagccctttcgtagctacaataacaacgtggatcacctaggaattgtccacgagaccgaacttccaccattaacagcaagggaggcaaaacaaattcgtcgagaaatatcccgaaaatctaagtgggtggatatgctcggggattgggaaaaatacaagtcttcgcggaagctgatcgatagagcctataaaggcatgccgatgaatattcggggcccaatgtggagtgtcctgctgaacatagaggagatgaagctgaaaaatccgggacgttaccagataatgaaagaaaagggcaagcggtcttcggaacacatccagcgcatcgaccgggacatttctgggaccctgaggaagcacatgtttttccgcgaccggtatgggactaaacagcgcgaattgttgcacattttgcttgcctatgaggaatataacccggaggttggctactgcagggacctgagccatatcgccgctctgttcttgctgtacttgcctgaggaggacgcattctgggcactggtgcaactgttggcctcggagcgccatagccttcagggctttcacagcccaaacgggggaactgtacaggggcttcaggaccagcaagagcacgtggtggccacctcccagcccaagacaatgggacatcagataagtttgggactcaccttacgtttatgggacgtgtacctggttgaaggcgaacaggcgctgatgcccattactcggatcgcctttaaggttcaacaaaaacggcttaccaaaactagcaggtgcggaccttgggcccggttctgcaaccggtttgtagatacctgggcccgcgatgaggatactgtcttgaagcatctgcgtgctagcatgaaaaagctcacacgtaagcagggtgatctccctcccccagcgaagcccgaacaggggtcgtctgcaagccggccagtccccgcctctcgcggcggaaagacgctgtgtaaaggggatcgtcaggccccgccagggcctccggccagattcccccgtccaatttggagcgcaagcccccctagagctcctcggagcagcacgccttgtccggggggggcagtcagagaagacacatacccagtagggacacagggggtcccatccccggccctagctcagggaggtccacaaggcagctggcgcttcctgcaatggaatagcatgccacgattgcctaccgacctggacgttgaaggcccttggtttcgccactacgattttcggcagagctgttgggtgcgcgccatatctcaggaggaccaattggctccctgctggcaagccgaacacccagccgagagggtgaggtccgctttcgctgcacccagtaccgacagcgaccaaggcacgcccttccgtgctcgcgacgaacagcagtgcgcgcctacctctggtccttgtctttgtgggttacatttagagagcagtcagtttcctccagggttctag

SEQ ID NO: 137364 - DNA, 1584 bp, synthetic construct
  misc_feature 1..1584: note = Description of Artificial Sequence: Synthetic coding sequence
  source 1..1584: mol_type = other DNA
atggatgttgtcgaggtggctggctcctggtgggcacaggaaagggaagatattattatgaaatacgagaaaggacacagagccggactcccagaagacaaggggcccaagccctttcggtcttacaacaataacgtggaccacctggggatcgtgcacgaaacagagctgcctccgcttactgcacgcgaagccaagcagattagacgcgagatctcgcgtaagagcaaatgggtggatatgctaggagactgggaaaaatacaagtctagccgaaagctcattgatcgagcctacaaggggatgccaatgaacattagaggaccaatgtggagcgtcctcctaaatattgaagagatgaaactcaagaatcctgggcgttaccaaataatgaaagagaaaggcaagaggtccagcgagcatatacaacgaatcgatcgcgacatctctgggactctacggaaacacatgtttttcagggaccgttacggcacgaagcagcgggaattgctccacatactgttggcctacgaagaatacaatcctgaagttggttactgccgggatctgtcacacattgcggccctttttcttctctatctgcctgaagaagatgctttttgggctctggtccagctgttggcgtcagaaaggcactccctgcagggctttcactcaccaaacgggggcacggtccaggggcttcaggatcagcaggaacacgtcgtagctacgtcacagcctaaaaccatgggtcatcagatctccttgggcctgacactgagactgtgggacgtgtatttagtggaaggggagcaggcgctcatgcctatcacccgcattgctttcaaagtgcagcagaaaagactaactaagactagtcggtgcggcccatgggctagattttgtaataggttcgtcgacacttgggccagagacgaagatacggttctgaagcacctcagggctagtatgaagaaactcactcgcaagcaaggcgacttgcctccgcctgcgaagcccgaacagggatcatctgcaagcaggccagttcccgcatcccgaggagggaaaaccctctgtaaaggcgacaggcaggcgccaccaggaccgcctgccaggttccctaggcctatctggagtgcctcgccaccccgggcgccacgctcgtctacaccttgcccaggaggcgccgtaagagaagacacttatccagttggtacacagggagtcccttcccccgccttggctcagggtgggccgcagggctcctggcgctttctccaatggaactccatgccgagacttccgacagatctggacgtcgaaggcccgtggtttcggcattatgacttccggcaatcatgttgggtgagagccatctcgcaggaagaccagctggctccctgctggcaggccgaacacccagccgagcgggtgcgatctgcctttgccgctccatctactgactccgatcaaggcactcctttccgtgcccgggacgagcagcagtgtgccccgactagtggcccttgcctttgtggtctccacctagagagctcccagtttccccctggtttctag

SEQ ID NO: 137365 - DNA, 1410 bp, synthetic construct
  misc_feature 1..1410: note = Description of Artificial Sequence: Synthetic coding sequence
  source 1..1410: mol_type = other DNA
atgcttggcgattgggaaaagtacaaatcttcccggaagctgattgatcgtgcctacaaggggatgccaatgaatattcgtggcccgatgtggagtgtcttactaaatatcgaggaaatgaagttgaagaaccccggacgctatcagatcatgaaggagaaagggaagcgcagctcagagcacatccaaagaatagatagggacatttctggcaccctgcgtaagcacatgttctttagggataggtacgggacaaaacagcgcgagcttctgcacatcctgcttgcctacgaagagtataatcctgaagtgggctactgtagagacctgtctcacattgccgcgttgttcctgctgtacttgccagaggaggatgccttctgggccttggtacagctcctcgcatccgagcggcatagcctacagggctttcattccccaaacgggggaacagtccaggggttgcaagatcagcaggagcatgtagtggctacatctcagccaaagaccatgggtcaccaggacaaaaaagatttgtgtggacaatgctctccccttgggtgcctcatccgaatcctgatcgacggaattagtttgggcttaacactgagactctgggatgtgtatctggtggagggcgaacaggcactaatgcccattacccgaattgcttttaaagtccagcagaaacggctgaccaaaacatccaggtgtgggccatgggcaaggttttgtaatagattcgtggacacatgggccagagatgaggacactgtgctgaaacacttgcgcgcctccatgaagaaactgactcggaaacagggggatcttccaccgcccgcaaaacctgagcaaggaagctcagcgagccgaccagtgcccgccagccgcggtggcaagacgctctgcaaaggagatcggcaggccccacccggccctcctgctagattcccccggcccatatggtctgctagtcccccacgtgcccctaggtctagcactccttgcccagggggtgctgtgagagaagacacctaccccgtcggcacccaaggtgtccctagccccgctctggcccagggaggcccgcaagggtcctggcgctttctgcagtggaattccatgccgagattgcctacagatttagatgtggaaggaccctggttcagacattacgattttcgacagagctgctgggtgagagctataagccaggaagaccagttggcaccctgttggcaggccgaacaccccgcggagagggtccgcagtgccttcgctgcccctagcaccgatagcgaccagggcacccccttcagggcgagagatgagcaacagtgcgctcccacaagcggaccgtgtctttgtggccttcacctggaatcctctcagtttccacctggcttctag

SEQ ID NO: 137366 - DNA, 1410 bp, synthetic construct
  misc_feature 1..1410: note = Description of Artificial Sequence: Synthetic coding sequence
  source 1..1410: mol_type = other DNA
atgcttggggattgggagaagtataaaagcagcaggaagttaatcgacagggcttacaaaggaatgccgatgaatattagggggcctatgtggagtgtgctactcaacatcgaggaaatgaaactgaagaacccaggccggtaccaaatcatgaaggaaaagggcaagcgcagttccgagcacattcagcggattgatcgagacattagcgggacactgaggaaacatatgttcttcagagaccgttacgggaccaagcaaagagagctgttacatattctgctggcttacgaggaatacaacccagaagtggggtactgtagagatctgtcgcacattgccgccctattcctgctttatctgcctgaggaagacgcgttctgggcgctagttcaactgctggccagtgagagacatagtctccagggctttcacagccctaacggcggcaccgtccagggactgcaggatcagcaagagcacgtggtggctacatcccagcccaagacaatgggccatcaagacaagaaagatctgtgtgggcaatgctcaccgctcggttgcctgatcagaattctgattgatggtatctcactgggccttacgttacgtctttgggacgtatatctggtggagggtgagcaggccttgatgcccatcactaggattgctttcaaagtgcaacagaagcgtcttaccaagacatcacgatgtggcccctgggccagattctgcaataggtttgtggatacctgggcacgagatgaggatactgtccttaagcacctccgcgcaagtatgaagaagctgaccagaaagcagggcgacctacccccgcccgctaaaccggaacagggcagctctgcaagccgacctgtccccgccagtcggggcggaaagacactctgcaagggggaccgacaggcacctcctggaccccctgcctggttccctaggccaatctggtctgcatcacctccaagggctcccagatcatcaacgccttgccctggaggtgctgtgcgcgaggacacataccccgtgggtacccaaggtgttccgtcgcccgctttggcccagggcggtccccagggctcctggcgctttctccagtggaacagtatgcctcgactccccacggacctcgacgttgaaggcccttggtttaggcattacgatttccggcaatcatgttgggtgcgcgcaattagccaggaagatcagttggctccttgttggcaggccgagcaccctgcagaaagggtgcgcagtgccttcgctgcccccagtactgactcagaccaggggacacccttcagagctcgcgacgaacagcaatgtgcacctaccagtggtccctgcctgtgtgggctccacctggagtcatcccagttccccccaggcttctag

SEQ ID NO: 137367 - DNA, 1650 bp, synthetic construct
  misc_feature 1..1650: note = Description of Artificial Sequence: Synthetic coding sequence
  source 1..1650: mol_type = other DNA
atggacgttgtggaggttgccggctcctggtgggctcaagaacgggaagatatcatcatgaaatacgagaagggtcaccaggctgggctcccggaggacaagggcccaaaacctttcagaagttacaacaacaacgttgaccatctcggcatagtgcacgaaactgaactcccacccttgactgccagagaggccaagcagattaggagagagattagccggaaatcaaagtgggtcgacatgctgggagactgggagaagtacaagagcagtcgcaagctgatcgaccgggcttataaagggatgccaatgaatattagaggcccgatgtggtccgtgttgctgaatatcgaggaaatgaaactgaagaaccccggccgataccagatcatgaaagagaagggtaagcgtagctcagagcatatccagcggatagatagggacatctctggcaccctgagaaaacacatgttcttcagagataggtatggtacgaaacagcgcgaactgctgcatatacttctcgcatatgaggagtataatcccgaggtggggtactgccgtgatctctctcatattgccgcgctcttcctgctgtatctgcctgaggaagatgctttctgggccctcgtccaactcctggcatccgagagacacagccttcagggttttcactctcccaatggcgggacagtgcagggcctccaggaccaacaagagcatgtcgtggcaactagccagcctaagacaatgggacaccaggacaagaaagatctgtgtgggcagtgctctcccctggggtgtctgatcagaatcctaattgatggaatctctttgggattaactctgaggctgtgggacgtctacctcgttgagggagagcaggccctgatgccaattacccgaattgcattcaaagtgcagcagaaacgccttactaagacaagcaggtgtggcccatgggcacggttctgtaatcgattcgtggatacctgggcaagagacgaggacactgtgcttaagcacctgcgagcctcaatgaaaaaactcacacggaagcagggcgacctgcctccaccagctaagccagagcagggctcttcagcctcgcggccagtaccagctagtcggggtggcaaaactttgtgcaaaggcgaccggcaggcaccccctggtcccccagcccggttcccaaggcccatttggtccgcctcaccaccacgcgctcccaggtcgtctacaccttgtcccggaggggccgtcagggaggacacataccccgttggcacccaaggcgtcccctccccagccttggcccaaggaggtccacagggttcatggaggttcctacagtggaactccatgccacgcctaccgaccgacctggatgtagaaggtccgtggttccgccactacgacttcagacagtcctgctgggtgagagccattagccaggaggatcagctggccccctgctggcaagccgagcatcctgctgaacgcgtgcggtcggcttttgcagccccgagcacggactccgaccagggcaccccgttcagggctagggatgaacagcagtgtgcaccgacctcagggccctgcttgtgtggcctccacttagaaagcagtcagttcccccccggcttttag

SEQ ID NO: 137368 - DNA, 1410 bp, synthetic construct
  misc_feature 1..1410: note = Description of Artificial Sequence: Synthetic coding sequence
  source 1..1410: mol_type = other DNA
atgctcggtgactgggaaaaatacaagtcttcgagaaagctcatcgacagggcctataagggaatgcccatgaatatccggggaccaatgtggtccgtgcttctgaatattgaagagatgaaattgaagaaccctggacgatatcagatcatgaaagaaaaagggaagcgctcaagtgaacacattcaacgtatcgatcgggacataagtggtacactacgtaagcacatgttctttcgggaccgctatgggaccaagcagagagagctcctgcacatcttactggcctacgaggaatacaatcctgaagtaggctactgccgcgacctgtcccatattgccgccctgtttctgctgtatctcccagaagaagatgccttttgggcactggtgcagctactggcctccgagagacactctttacaggggttccactcgccaaatggcggcacagtccagggccttcaggaccagcaagaacatgtggtggccacctcccagcctaagaccatggggcaccaggacaagaaagatctgtgcgggcaatgctctccgctaggctgtttaattcgcattctgattgacggtattagtttggggttaactctgcggctgtgggacgtctatctggtagagggggaacaggccttgatgccaatcaccaggatcgcctttaaagtgcagcagaaacgcctcaccaaaacaagcagatgtggcccctgggcgcggttctgcaatagattcgtggatacatgggccagggacgaagatacggtgctaaagcacctcagagcctccatgaagaagcttacaaggaaacaaggggatctaccccctcctgccaagcctgagcaggggagttctgctagcaggcccgtacctgcttcgcgaggcgggaagaccctgtgcaaaggagatcgccaagcccctcccggcccccctgcctggttccctcgacccatttggtcggcaagcccacccagagctccccgatcctcaactccctgccctggcggcgccgtacgtgaggacacttaccccgtggggacccagggcgtccctagcccggctctcgctcagggagggccgcagggatcctggcgattcctgcaatggaatagcatgccaaggctcccgaccgacctagacgtggaggggccctggtttcgtcactacgattttcgccagtcatgctgggtgcgggctatctcacaggaggatcaactggccccttgctggcaagcggagcaccctgccgagagggtgagaagcgcctttgccgccccaagtacagactcagatcagggtaccccatttagggcacgtgatgaacagcagtgcgctcccacaagtggcccttgcctgtgcggcctgcatctcgaatcctcccagtttcccccggggttttag

SEQ ID NO: 137369 - DNA, 3708 bp, synthetic construct
  misc_feature 1..3708: note = Description of Artificial Sequence: Synthetic coding sequence
  source 1..3708: mol_type = other DNA
atggagcctccctcatgcatccaagatgagcccttcccccacccgctggaacccgaacccggcgtgtcagcgcagccagggcccggcaaaccatccgacaaacgttttagattatggtatgtggggggttcatgtctggatcatagaactacgttgcccatgcttccatggctgatggctgagattcgccggcgtagccagaaaccagaagccggcggttgcggtgcaccagcagccagagaggtgatactggtactctccgccccttttcttcgttgtgttccagctcccggtgccggggccagtgggggaacatccccgagcgcgactcagcctaaccctgctgtattcatttttgaacacaaggcccagcacatttcccggttcatacataatagccatgatctgacttacttcgcttacttaataaaagctcagcccgatgaccccgagtcacagatggcctgtcacgtttttcgggcgaccgaccctagccaggtccctgatgtaatttcctctattcgccagctttcgaaagccgcaatgaaagaggacgctaaacccagtaaggacaatgaggacgctttctacaattcccagaagtttgaggtgttgtattgtggaaaggtcacagtcacccataaaaaagcaccatcatcattaatcgacgattgtatggagaaattcagccttcatgagcagcagagactgaagatccagggagagcaaaggggacccgaccccggcgaggacctggccgatctggaagtcgtcgtcccagggtctccaggggattgtctacccgaggaagccgacggcaccgacacacatctaggactgcctgccggagcttcacaacctgccttgactagttctagggtgtgttttccagagaggatcctggaagacagcggattcgatgagcaacaagagtttcgttcgagatgcagctcagtcactggcgtccagcggcgcgtacacgaaggatcacagaagagtcagccaagacggagacacgcaagcgcacccagtcacgtgcaaccctctgactctgagaagaatcgaaccatgttgtttcaggtcggccgctttgagattaatttgatatctcctgacactaaatcggtcgtgctggaaaagaactttaaagatatcagcagctgctctcagggaataaagcacgtcgaccatttcggcttcatttgtcgggagtctcccgaacccggcttgtctcaatacatctgttatgtgtttcaatgcgcctcagaaagtctagttgatgaggtaatgctgaccctaaaacaagcctttagcaccgccgcagctcttcaatctgccaaaacgcagattaaactctgtgaagcctgccccatgcacagcctgcacaagctgtgtgagcggatagaggggctctatccaccccgcgccaaattagtgatccagagacacctgagtagcttaaccgataacgagcaggccgacatcttcgagagagttcagaaaatgaagcccgtgtctgatcaggaggaaaacgagttggtcatcttgcacctgagacaattgtgtgaggccaaacagaagactcatgtgcacatcggcgaagggccctcaaccattagcaattccaccatccccgagaatgcaacgtcctccggacgttttaaattggatatcttaaaaaacaaggccaaaagatccctcacctcctcgctcgagaatatttttagccgcggagccaacaggatgcgtggacgcctcgggtctgttgatagtttcgaacgcagcaactctttggcatcagaaaaagattatagccctggggatagtcctcctggcacaccccccgcatcaccgcccagctccgcctggcagactttccctgaagaggattctgactccccccagtttagaagacgagcccatactttcagccatcccccttcgtctaccaaacgaaaactgaacctacaagatggccgggcccagggagtcagaagtccactgctgcgccaaagcagttccgaacagtgttcggatggggaggggcggaaacgaacaagttccacctgctccaacgaatcactctccgttggtggcaccagcgtgactcctcgccgaatctcttggaggcaacgcattttcctccgagtggcctcccctatgaacaaaagcccgtcagccatgcaacagcaggatggattggaccgcaacgagctgttacccttaagtcctcttagccctaccatggaagaggagccactggtggtctttctgagcggcgaggacgaccctgaaaaaatcgaagagagaaaaaagtcaaaggaactgcgttcactgtggcgcaaggcaattcatcagcagattctgctgctgaggatggagaaggaaaatcaaaaactcgaggcgtcccgggatgagctgcaatctcgaaaggtgaagttggactacgaggaggtaggggcatgccaaaaggaagtgctcatcacatgggataagaaactcctcaactgtcgggccaagatccgatgcgacatggaagatatccataccttgctgaaggagggcgtgcctaagtcacggaggggcgaaatctggcaatttctggccttgcagtaccggctaaggcatcggctcccaaacaaacagcagccacctgatattagctataaggaacttcttaagcagctcacagcacagcagcatgctatcttggtagatctgggtcgtactttccctacgcatccttacttctccgtgcagttgggaccaggccagctgtccctgtttaatctgctgaaggcctactccctcctcgataaagaggtggggtactgtcagggaatttcttttgtggctggggtgctgctgcttcacatgtccgaggagcaggcctttgaaatgctcaaattcctgatgtacgacctgggttttaggaagcagtacagacccgacatgatgtctctccagatccagatgtatcagctgtcccgactgttgcacgattatcacagagacctatacaatcatttggaagaaaatgagatcagtcctagcttgtacgcggccccgtggttcctgactctgttcgcaagccagtttagcttagggttcgtggctcgcgtgtttgatattatttttctgcagggcacagaagtaatcttcaaggttgcgctctctctgctaagctcccaggagactctgataatggagtgcgaaagctttgagaatatagtggagtttttgaaaaacaccctgcctgacatgaataccagtgagatggaaaaaatcattactcaggtttttgaaatggatataagtaaacagttgcacgcatacgaggttgagtaccacgtccttcaggacgagctgcaggaatcatcttattcctgtgaggatagcgagactctcgaaaaactggagcgggccaactctcaattgaaaaggcagaacatggatttgcttgaaaagctgcaagtcgcccataccaagatccaggccctcgaatccaacctggaaaatttgctgaccagagagacgaagatgaagtccctaattcggacgttggagcaagaaaaaatggcgtatcagaagacagtggagcagctcaggaagctcctcccagccgatgcacttgtgaattgtgatctactgctgcgagacctgaattgtaatcccaacaacaaagcaaaaattggtaacaagccatag

SEQ ID NO: 137370 - DNA, 3897 bp, synthetic construct
  misc_feature 1..3897: note = Description of Artificial Sequence: Synthetic coding sequence
  source 1..3897: mol_type = other DNA
atggagccaccatcttgtattcaggacgagccgttccctcatccactggagccagaaccaggcgtgtcagctcagccagggcctgggaagccatcggataaaagatttcgtctctggtacgtcggcggctcctgtctggatcatcggacaacactaccaatgctgccctggctgatggccgagatcaggcggcgctcccagaaacctgaagctggcggctgcggtgcgccagctgcccgggaggtgatcctagtcttgagcgccccatttctcaggtgtgtaccagcgcctggagccggcgcctccggcggtacttctccgtccgcaacgcagccaaacccagctgtcttcatatttgaacacaaagcgcaacacatcagcagattcatccacaattctcatgatcttacgtactttgcttatctgatcaaggcacaaccagacgatccagagtcccagatggcctgccacgtcttccgagcaacagacccttcacaggttcccgacgtcattagtagtatccgccagctgagcaaagccgccatgaaggaggatgcaaagccttccaaggataatgaggacgccttctacaacagccagaaattcgaggtgctatactgcggaaaggtgactgtcacacacaagaaggccccgtctagtttaatcgacgactgtatggagaaattctccctgcatgaacagcagagactgaagatccagggagagcagagaggtccagaccctggtgaagatctcgcagatctagaggtggtcgtccccgggagccctggtgactgtctcccagaggaagctgacggtactgacacacatttgggtttgcctgcaggagcttcccagcctgcactgacatcttcacgcgtgtgcttcccagagcggatccttgaagacagcggatttgacgaacaacaagagtttcggagccgctgctctagtgtgaccggcgtccagaggcgcgttcatgaaggttcgcaaaagtcccagccccgacggcgccacgcttccgctccaagccatgtgcaacccagcgactccgaaaaaaaccggactatgttgttccaggtggggcggtttgaaataaatctgatttcaccggataccaaatctgttgtccttgaaaagaactttaaagacatcagcagctgtagccaagggataaagcacgtggaccactttggctttatctgtcgtgagagtccagagcccggcctgtctcagtacatttgctacgttttccaatgcgcctcagaatcattggtggacgaggtcatgctcacactgaaacaggctttctcaacagcagccgctctccaatctgcaaagacacaaatcaaattgtgtgaagcgtgcccaatgcattctctgcacaagctgtgtgagagaatcgaaggactgtatcctcctcgagctaagctggtgattcagcgacacctatcctcccttactgacaacgagcaggccgacatctttgaaagagtgcaaaaaatgaagcctgtgagtgatcaagaagaaaacgaattagtgatattgcatttgagacaattatgtgaagccaaacaaaaaactcatgttcacattggcgaggggccttcgacgataagcaacagtaccatcccagaaaatgccacctcatctgggcggtttaagcttgacatactgaaaaacaaggctaagaggtcacttacttcatccctggagaacatattttctaggggcgccaaccgaatgagaggccggctggggtccgtggatagcttcgaaaggtcgaatagcctggccagcgagaaagattattctcccggagactcgcctccagggacgccacctgcttctcctccttcctccgcctggcaaaccttccccgaagaggactcagacagccctcaattccgacgaagggcacacaccttctcacatcccccatcttctactaagcggaagctaaatctgcaggatggacgcgcacaaggagttagatctccactcctcagacagagcagcagcgaacaatgtagtaacctctcaagcgtgaggcgaatgtacaaagaatctaacagtagctcttcacttcccagtttgcacacatcgttttcagccccatcatttacagcaccctcttttttgaaatctttttatcaaaattcaggcaggttatccccgcagtatgagaatgagattcgccaggacacggcatctgagtcttccgacggagagggccgtaaaagaacttcatccacctgcagcaatgaatctttgtcggtcggcggcacctctgtgacacctcgtcggatctcttggcgccaacgcatctttctccgagtggcgtccccaatgaataagagcccgtcagcaatgcagcagcaggacggattggatcggaatgaattgctgccacttagtccgctttcccccactatggaggaagaacccctcgttgtgttcctaagcggcgaagatgatccggaaaagatagaagagaggaagaagtcaaaggagctgcggagtctgtggcgtaaggctatccaccagcaaattctacttttgcgaatggaaaaggagaaccagaaactcgaggctagcagagacgaactgcaaagcagaaaagtgaaactcgactacgaggaggtgggtgcttgtcaaaaggaggtgctcatcacatgggataagaaactgttaaattgtcgtgcaaaaataagatgtgatatggaggacatccatacactgctcaaggagggagttccgaagtctcgaaggggcgagatctggcaatttctcgccctgcagtaccgtctgcggcaccgcctgcccaataagcagcaaccaccagacatttcgtataaggaactactaaagcagctgaccgctcaacaacacgccatcctcgtggatttaggtcgcacgttccctacacacccctatttcagtgtgcagctcggccctggccagttgtctctgttcaatttgctgaaggcctactccctcctggataaggaggtcggctactgtcaggggatcagcttcgtggcgggagtccttttgctccatatgtctgaggaacaggcgttcgagatgctaaaattcttgatgtacgatctgggattcaggaagcagtacaggcctgatatgatgagcttacagatccagatgtaccagctgtcgcggctgcttcatgactatcatcgagatttatataatcacctggaggaaaacgaaattagcccatcattgtacgctgcaccatggttccttaccctcttcgcttcacaattttctttgggtttcgtggctcgggtctttgacattatcttcctccaaggaactgaggtgattttcaaggtagccctctctctcttatccagccaggagaccctgattatggagtgcgagtcatttgaaaacattgtggagttcctgaagaatactttgcccgatatgaataccagtgagatggagaagattatcacccaggtctttgaaatggacatatcaaagcagttgcacgcatatgaagtcgagtatcacgtgttacaagacgagctgcaggaatcctcttattcctgcgaagatagtgagaccctggagaagctggagagagccaattcccagttgaagcggcagaatatggacctgctggaaaaactgcaggtggctcacactaagattcaagctcttgagtcaaacctagagaatctcctgaccagagagacaaaaatgaaatcacttattcgaaccctggagcaagaaaagatggcctaccagaagacggtcgagcagctacggaaactgcttcccgccgatgcactcgtgaactgcgaccttttattgcgcgacttaaactgtaatccaaacaacaaggcgaagattggcaacaaaccttag

SEQ ID NO: 137371 - DNA, 849 bp, synthetic construct
  misc_feature 1..849: note = Description of Artificial Sequence: Synthetic coding sequence
  source 1..849: mol_type = other DNA
gataatgaacaagccgatatcttcgaacgggtccagaaaatgaagcccgtgtccgatcaagaggaaaatgagctcgtgatcctccaccttaggcaactttgtgaggccaagcagaagacccatgtccatatcggtgaggggccctcgaccatttctaattccaccattcccgaaaacgcaacgtcttctggtaggtttaaactggacatcctaaaaaataaggctaaaaggagcctgacttcgagtttggagaacatttttagtagaggagctaataggatgcgaggccgtttggggagcgtggattcgttcgaacgcagtaacagcctggcctcagaaaaggactattcccctggggactcacctcctggaacccccccagcgtccccccctagctcagcttggcaaaccttccctgaggaagactccgactctccacagttcagaaggcgagcacataccttctcccatccccccagcagcaccaaacgtaagttgaacctgcaggatggtagagctcagggagtgcggtctccccttctccgtcagagttcatctgagcagtgttcggatggtgaggggaggaagcggacctctagtacatgctccaatgaaagtctcagtgtggggggcacatcagtaactccacgcagaatctcgtggcgtcagcgcattttcctacgggtagcgagccccatgaacaagtcaccttccgcaatgcagcagcaggatggactcgatcgtaacgagcttttacctctctccccattgtcccccaccatggaggaggaacctctggttgtcttcctgtcgggcgaggacgacccagaaaaaattgaggagcggtag

SEQ ID NO: 137372 - DNA, 1389 bp, synthetic construct
  misc_feature 1..1389: note = Description of Artificial Sequence: Synthetic coding sequence
  source 1..1389: mol_type = other DNA
atgaataagagtccctctgccatgcagcagcaggatggcttggatcgtaatgaactcctgcctctctcacctctcagccctaccatggaggaagaaccactggtggtgttcttgagcggtgaggatgatcctgagaaaattgaagagcgaaaaaagtcaaaagaactccggtcactttggcgcaaagctattcaccagcagatcctccttcttcgcatggaaaaagagaaccaaaaactggagggcgtacccaaatcccgccgaggggaaatatggcaatttctagcattgcagtacaggttgcgccaccgattgcctaataagcagcagccaccggatataagctacaaggagctcctcaagcaactcacagcgcagcagcatgccatcctggtggatctcggacgcacatttcctactcacccctacttttcggtgcaactcggtcccgggcagttgtccctgtttaacctcttgaaggcttacagcctgttggacaaggaagtcggttattgccagggcatatcattcgtcgccggcgtactcctgttgcacatgtccgaggagcaagctttcgagatgttgaaattcctgatgtacgatcttggcttcagaaaacaataccgccctgatatgatgagcctgcagatccaaatgtaccagctcagtagactcctacacgattaccacagagacctgtacaaccatcttgaggaaaacgagattagtccctctctttatgccgcgccttggttccttacactgttcgcctcccagttcagtctcggctttgtcgcccgggtgtttgacattatctttctgcagggcacggaggtgatattcaaagttgccttaagtctgctctcctcacaggaaaccctcattatggaatgcgagagcttcgagaacatcgtggaattcctgaaaaatactctccccgacatgaatacttccgaaatggagaagattatcacccaggtgttcgagatggacatttccaagcaattgcacgcctacgaagtggagtatcatgtgttgcaggacgagctgcaggagagcagctattcttgcgaagatagcgaaaccttggagaagcttgagagagccaactcccagctcaaaagacagaacatggatctcctggaaaaactccaggtggcccacacaaagattcaggctctggagagcaacttagaaaatctgcttacgcgggagactaaaatgaagagcctcatacggacgctggagcaggaaaagatggcgtaccagaagactgttgaacagttaagaaagttgctccccgcagacgcgctcgtaaattgtgacttgctcctcagagatttgaactgtaatccgaataacaaggccaaaattggaaataagccatag

SEQ ID NO: 137373 - DNA, 3873 bp, synthetic construct
  misc_feature 1..3873: note = Description of Artificial Sequence: Synthetic coding sequence
  source 1..3873: mol_type = other DNA
atggaaccccccagctgtatacaggatgaaccttttcctcacccactcgaacccgagccaggcgtaagcgcccagccggggccgggtaagccatccgacaagagattccgcctttggtacgttggcggcagctgcttggatcaccgcactacactgcctatgctgccctggctaatggcggagatcaggcggaggtctcagaagcccgaggccggaggatgtggcgctccggccgcacgtgaagtcatcctcgtcctttccgccccatttctccgatgtgttcccgcgccaggtgccggtgccagtggcggcacaagccccagtgctacccagccaaacccagctgtgttcatttttgagcacaaagcacagcacatcagcaggttcattcacaattcccatgatttaacatatttcgcctacctgattaaggcccagcccgatgatcctgaaagtcaaatggcttgccacgttttccgggcaaccgaccccagtcaagtccccgatgtgatcagttctataaggcagctgtctaaagccgccatgaaggaggacgctaagccgagtaaggacaacgaggatgcattttacaactctcagaaatttgaagttttatattgcggaaaggttactgtaacgcacaagaaggcacctagcagccttattgatgactgcatggaaaagttctcattacatgaacaacagaggctaaagattcagggagagcagcgggggcccgaccctggggaagatctcgctgacctggaggtcgtcgtgcctgggtcccctggcgattgcctgccggaggaagcggacgggacagatactcacctggggcttccagctggggccagtcagcctgccctgacaagctccagagtctgttttcccgagcggattctggaggattccggttttgacgagcagcaagagtttcgctccaggtgttcgagcgtaaccggagtgcagagacgggtgcacgaaggatctcaaaagtctcagccgaggcgtagacacgcttccgcgcccagccatgtgcagccttctgacagcgagaagaaccggaccatgttgtttcaggtgggaaggtttgaaatcaacctcatttcgcccgacacaaaaagtgtcgttctggagaaaaatttcaaagacataagctcctgctcccaggggatcaaacatgtcgaccatttcggtttcatttgtagagagtccccagaacctggcttatcgcaatatatctgctacgtttttcagtgcgcctctgagtcactcgttgatgaagttatgttgaccctaaaacaagccttcagcacagccgccgccctgcaatcagccaaaacccaaataaaactatgtgaagcctgtcctatgcactcactgcataaactgtgtgaaaggatagaagggctgtatccacctagagccaagctggtgattcaacgccatctatcaagccttacagacaatgagcaagctgacatttttgagcgtgtgcagaagatgaagcccgtgagcgatcaggaagaaaacgaattggtaatcctgcatttacgccaattatgcgaagctaagcagaaaacccatgtgcacattggtgaaggacctagcacaataagcaatagtacaatcccagagaatgccacatcttccgggagatttaaactggatattttgaaaaacaaggccaagcgctcactaacatcgagtctggagaacattttcagtcggggcgccaatagaatgcgcgggagactcggcagtgtggattcatttgaacgttcaaatagtctggcttccgagaaagattactcgcccggcgacagtcctccaggcacgccacccgcttctccaccgagtagcgcatggcaaacatttcccgaggaggactccgactctcctcaatttagaagaagggcccatactttttcgcatccccccagcagtacaaagaggaaattgaacctgcaagatgggagagctcagggcgttcgatcgccccttctgcgccaatcatcttctgaacaatgtagtaacctaagcagtgtaaggcggatgtataaggaatctaacagttcctctagtttaccatctttgcacacctcatttagcgctccctcgtttactgcaccatcctttctgaagtccttctatcagaactcgggcagactctctcctcagtatgaaaatgagatctcagacggggaggggcgcaagcgaacgagctccacctgtagtaatgagtcgttgagtgtgggaggaacttcagtgacacctagaaggatttcctggagacagaggatctttctgcgggtcgcttctcccatgaacaagtccccaagcgcgatgcagcaacaggacggtctcgaccggaatgagctcctacctctgtcccctctcagtcctaccatggaggaagagccactggtcgtgttcttgtccggcgaagatgatcctgagaagattgaggaacgcaaaaagagtaaggaactgcggtcactgtggaggaaggccatccaccagcagattttactactgcggatggaaaaagaaaaccagaaacttgaagcttctagggacgaattacagagcaggaaagtgaaactagactacgaggaagtgggagcttgtcagaaggaagtcctgatcacctgggacaaaaagttgctgaattgccgcgccaagatcaggtgtgatatggaagatattcacaccctgctgaaagagggagttcccaagtcacggaggggtgagatctggcagtttctggctctccaatatcggctccgccaccgcctgcctaataaacagcaaccccccgacatatcctataaggaattgctcaagcagctgaccgctcagcagcatgcaattcttgtagacctgggtagaacgtttccaacccatccctatttttctgttcagctggggcctggacagctgtctttgtttaatctactgaaagcctattctttgctggacaaggaagttggatactgtcaggggatcagcttcgtggcaggggtgctcctcctgcacatgagcgaggagcaggctttcgaaatgctgaaattcctgatgtatgatctcggctttaggaagcagtaccggccagacatgatgagtttgcagatacagatgtaccagctcagcaggctgctgcacgactaccatcgagacctctataaccatctggaggaaaatgaaatctctccctctttgtacgccgcaccctggttcctgacactgtttgcaagtcagttttctctgggctttgtcgcaagagtattcgatattatattcctgcaggggacggaagtgatcttcaaggttgccttatccctcctcagctcacaggagacgcttattatggagtgtgaaagcttcgagaacattgtcgagttcctgaaaaacacgctcccagatatgaatacctctgaaatggagaagattataactcaggtgttcgagatggatataagcaaacagctgcacgcatacgaagttgaataccacgtgctgcaggatgagcttcaggagagctcttactcgtgtgaagattctgagacattagagaaactagagcgagccaacagccagctgaagagacaaaacatggatctcctcgagaagctccaagttgcccacaccaaaatccaggcactggaatctaatctggaaaatttattgacccgggaaactaagatgaaatccctgattcgaactctggagcaagagaaaatggcataccaaaagaccgtcgagcagctgcggaaactgctccccgccgacgctcttgtgaattgtgaccttttactgcgagacttaaattgtaacccaaataataaggctaagattgggaacaaaccatag

SEQ ID NO: 137374 - DNA, 1197 bp, synthetic construct
  misc_feature 1..1197: note = Description of Artificial Sequence: Synthetic coding sequence
  source 1..1197: mol_type = other DNA
atgcatttcagcaccgtgactagagacatggaagcctttaccgcatcttcattgagcagcctcggtgcagctggaggctttccaggtgccgcctcccccggagccgacccctacggtccgagagaacctcccccaccaccacctagatatgacccctgcgcggccgcggccccaggtgcccccggaccgcctcccccccctcacgcatacccctttgcacccgctgccggagccgccacgtcagccgctgccgagcccgagggcccgggcgcttcatgtgcggcagccgctaaggcgccggtaaagaagaacgcaaaagtggcgggcgtgagtgtccaactggagatgaaggccctatgggacgagttcaatcagctggggactgagatgatcgtgactaaagctggaaggcgaatgtttcccacattccaagtcaagctgttcgggatggatccaatggctgactacatgttactgatggattttgtccccgtcgatgacaagcgctaccgctatgcctttcattcttcctcttggctggtggccggcaaagctgaccccgctaccccaggacgcgtgcattaccatccagactcacctgcaaaaggtgcccagtggatgaagcagatcgtgtcctttgacaagttgaagcttacaaataaccttttggatgataacggccacattatcctaaattccatgcacagatatcagccccggtttcatgtggtgtacgtcgaccctcggaaggacagtgagaaatacgctgaggagaacttcaagaccttcgtctttgaggaaaccagattcacggcagttaccgcataccagaaccatcgcataacccaactaaaaattgcttcaaatcctttcgcgaaaggttttcgtgattgcgaccctgaggattggccacgaaaccatcgacccggtgctctgccactgatgtctgcttttgctcgtagtcggaatccagtcgcctctccgacacagcctagcgggactgagaagggcggtcacgtcctcaaggataaagaggtgaaggccgagaccagcagaaataccccggagcgggaagtcgagcttttgcgcgacgccggcggttgtgttaaccttggacttccatgccccgccgaatgtcagccatttaacacacagggcctggttgccggacggaccgcaggcgataggctttgttag

SEQ ID NO: 137375 - DNA, 1488 bp, synthetic construct
  misc_feature 1..1488: note = Description of Artificial Sequence: Synthetic coding sequence
  source 1..1488: mol_type = other DNA
atgcacttttccaccgtgacaagggatatggaggcattcacggcctcatccctatcctccctgggagccgccgggggattccccggcgccgcctcccccggagccgatccgtacggtccacgggagcctccccctcctcctcctcgctatgacccatgcgccgctgcagcccctggggctcccggaccacccccgcccccgcatgcttatcctttcgccccagcagcgggggcagctacgagcgctgcggctgagcctgaagggcccggcgccagctgcgccgccgccgcgaaagcgccggtgaaaaagaatgccaaggtcgctggcgtgtccgtgcagctggagatgaaggcgctatgggatgagtttaaccagttggggacagagatgattgttacaaaagccgggaggcgcatgtttcccactttccaggtcaagctcttcggcatggacccgatggctgactacatgttgctgatggacttcgtaccggtggacgacaaacgctatagatatgcttttcattcctcctcttggctggtagcgggaaaagcggacccagcaacaccaggccgtgtccattatcatcccgactctccagcaaaaggtgcacagtggatgaagcagatcgtcagcttcgacaaactcaaacttaccaataacctcctcgacgataacggtcacatcattcttaacagcatgcaccgctaccagccccggtttcatgtggtctatgtggacccccggaaagactccgaaaagtatgctgaagagaacttcaagacattcgtctttgaagaaacccggttcacagcagtaaccgcttatcaaaatcatcgtatcacacagctgaagattgcatccaacccgttcgccaaggggtttcgcgactgcgatccagaggactggccgagaaaccaccgccctggggcgctgcctttaatgagcgctttcgcgcgctctcggaatccggtggccagcccaacacagccctcagggacggagaaggacgccgctgaggcgagacgggagttccagcgtgacgctggaggccctgcagtccttggggatccggctcaccctccacagctgttggcgcgggtgcttagcccttccttaccgggagccggcggagctggtggtctcgtgcctctacccggagcccctggcgggaggccctcaccgccgaacccagagctcaggctagaggcccctggcgcctctgaacctctccaccaccacccctacaaatacccagccgctgcatacgatcattaccttggggccaaaagtagacccgccccctatccactccctggtctcagaggacacggttaccacccacacgcacatcctcatcatcatcaccacccagtctcacctgccgccgcagctgcagcagcagctgcagctgctgccgcagctgccaatatgtacagtagcgcgggggcagcccctccagggtcatacgattactgtcctaggtag

SEQ ID NO: 137376 - DNA, 1119 bp, synthetic construct
  misc_feature 1..1119: note = Description of Artificial Sequence: Synthetic coding sequence
  source 1..1119: mol_type = other DNA
atgcatttctcgaccgtcaccagagatatggaggcatttactgcatcaagtctctctagcctgggggccgccggcggatttcccggagcagcctcacctggggcagatccctatggtcccagagagcctccccctcccccacccagatacgatccctgcgccgccgctgcaccaggcgcccctggccctccccctcccccccacgcttatcccttcgccccagccgccggcgccgccacgagtgctgccgcggagcccgagggaccaggtgcttcctgtgccgctgccgcaaaggcccctgttaaaaaaaacgcgaaggtagcaggggtgtccgtgcagctggagatgaaagcactttgggatgagttcaaccagttggggaccgagatgatagtgacgaaagccgggagacgcatgttcccaaccttccaggtcaagcttttcggcatggaccctatggcagattacatgctgctgatggactttgtccccgtggatgacaaacgataccgctacgctttccactcgagttcttggctggtagctggtaaagccgatccagcaacgcctggacgggtgcactatcaccccgattcccctgctaagggcgcgcagtggatgaagcagatcgtgagttttgacaagctcaagctcaccaataatttgctggatgataatggtcacatcatcctcaacagcatgcaccggtaccaacctaggttccacgtagtctatgttgatcctcggaaagactctgaaaagtacgccgaggagaacttcaaaacatttgtgtttgaggaaacacggtttaccgcagtcaccgcttaccaaaaccatagaattactcagcttaagatcgcttctaatccttttgcaaaagggtttcgggactgcgaccctgaagattggcccaggaaccataggccgggggcccttcctctgatgagtgccttcgcccggtctagaaacccagttgcaagccccacacagcctagtggcaccgaaaagggcctggtgaccgagggatccggccttcagccgggcttactggacgttttgcttaaacccccaagtaagaaatccgagtcgcttcggccaccgcactgtaaggatacctag

SEQ ID NO: 137377 - DNA, 1158 bp, synthetic construct
  misc_feature 1..1158: note = Description of Artificial Sequence: Synthetic coding sequence
  source 1..1158: mol_type = other DNA
atggccgcatttctctcagcgggcctcggaatcctggctccctccgaaacatatcccctccctaccacttcctccggctgggaacccagattgggctctccttttccgtccgggccctgtacatcttcaacaggggcccaggcagttgccgagccaacaggccagggacccaaaaatccacgcgtgtcaagggttactgtgcagcttgaaatgaagcctctatgggaggagttcaatcagcttgggaccgaaatgattgtgacaaaggcgggtcgcagaatgttccctcccttccaggttaagatacttgggatggacagcctcgccgattacgccctcctgatggatttcattcctttggacgataagcgctataggtatgcatttcattcttcggcgtggctggttgcgggtaaagcagaccctgccacacctggccgtgttcattttcaccctgatagccctgctaaaggagcacaatggatgaggcaaatcgtgtcttttgataaactgaagctgactaacaaccttctggacgataacgggcatattatccttaactccatgcaccgctaccagcctagattccacgtagtgttcgttgacccgcgcaaggatagcgagagatacgcccaagaaaattttaagagcttcattttcactgagacacaatttacagccgttaccgcctaccagaaccataggatcacgcagctcaagatcgccagcaaccccttcgcaaagggcttcagagagtccgatcttgacagctggcccgtggccccccgtccactgctatctgttccagcgcgcagccactctagcctgagtccatgtgtgctaaaaggagctactgatcgtgaaaaagatccaaacaaggcttcggcatcaacatccaagacgccggcctggttacatcatcaattgctcccccctcccgaggtgctccttgcacctgccacgtaccggcccgtcacttaccagtcactctactcaggggccccctctcatctcggaataccaaggactcgccccgcgccatatcccctgccaaatatcagggcagacagggaccagggcggacttccgctgcctgcagggcttggtctcctctccccaacagtggtgtgcctcgggcccgggcaggattcccagtag

SEQ ID NO: 137378 - DNA, 2454 bp, synthetic construct
  misc_feature 1..2454: note = Description of Artificial Sequence: Synthetic coding sequence
  source 1..2454: mol_type = other DNA
atgatggatggtcctcggtccgacgtaggccggtggggagggaacccccttcagccacccaccaccccttcacctgagccggagccagagccagatgggaggagtagaagaggggggggtagaagtttctgggcccggtgctgtggctgctgtagttgcaggaacgccgcagatgacgactggggaccagagccctcagatagtaggggaagagggtcctcaagtggcacccgcaggcccggtagtcgcggctctgatagtaggaggccagtgagcaggggatctggagtgaatgcggctggggacggaacaatacgggaaggcatgctcgtagttaatggcgtagatctgctctcttcccggagcgaccaaaatcgcagggaacatcataccgatgaatacgaatatgacgagctgatcgttcggagagggcagccattccacatgctgctgctactgtctcggacatatgaatcttccgaccgtatcactctggagctacttatcgggaacaatcctgaggtggggaagggtacacatgtcataattcccgtgggcaagggaggctccggggggtggaaggcccaagtggtgaaggcctcaggtcagaatctaaacctccgcgttcatacatctcctaacgcaattatcgggaaatttcagttcactgttaggacccaatccgatgcaggagaattccagctgccttttgaccctcgaaacgagatctatattctcttcaatccgtggtgtcctgaagacatcgtttatgtggaccatgaggactggcgccaggagtatgtcttgaatgagtcaggccgtatatactatggcacagaggctcagattggtgagcgcacctggaactacggccagtttgaccatggcgtactcgacgcctgtctgtatatcttagatcgccggggcatgccatatggagggcgcggtgacccagtgaacgtgagtcgagtcatctccgccatggtcaattctttggatgacaatggagtgctgattgggaattggagcggcgattatagtcgaggaacaaacccgagcgcatgggtgggttccgttgagatcctcctttcttatctgcggacaggctacagcgtaccatacggccaatgctgggttttcgccggtgtcacaaccaccgtgctccgttgcctgggactagcaacacggactgtgaccaattttaacagtgcccatgataccgacacttcactcacgatggatatttatttcgacgagaacatgaaaccccttgagcacctaaaccatgattcagtgtggaattttcacgtgtggaacgactgttggatgaaacgccccgatcttccatcaggtttcgacgggtggcaggtcgtcgatgccaccccacaggaaacctcatctggcattttttgttgtggaccttgttcggtggagtcgattaaaaacggacttgtctacatgaaatacgatacgcctttcattttcgcagaggtcaactcagataaggtgtactggcagcgacaggacgatggctcattcaaaatagtttatgtagaagagaaagccatcggtacattaatcgtgaccaaggctataagcagcaatatgagggaagacattacttatctctataaacatcctgaaggctcggacgctgaacgcaaggccgtagaaaccgcggcggcccacgggagcaagccaaatgtttatgccaatcggggctctgctgaagatgttgccatgcaggtggaagcccaggatgctgtgatggggcaagatctaatggtctcagtgatgctcatcaaccactcatcttctaggagaaccgtcaaacttcacctctacctgtccgtgacattctatactggagtgagtggcacaatctttaaagaaacgaagaaggaggtcgagttggcacctggcgcctccgaccgggtcactatgcctgtggcttacaaagagtaccgcccccacctagtggatcaaggtgccatgctactcaatgtgagcgggcacgttaaggaatctggccaggtgctcgccaaacagcacaccttccggctccggacccccgacttaagcctaacgttactcggagctgctgtggttggccaagaatgcgaagtgcagatcgtcttcaaaaatcctctccccgtgactctcactaatgttgtgttcaggctcgagggctcaggtttacagaggccaaaaatcttgaatgtgggtgacattggcggtaacgagaccgttacacttcgccagtcattcgtacccgtgcgccccggacctcgccagctgatcgcctctctggacagcccgcagttaagtcaggttcacggtgtgattcaagtagatgtcgcaccagcgccaggagatggcggcttttttagcgacgcagggggcgactcccaccttggtgagacaatacctatggcctcaagaggcggagcatag

SEQ ID NO: 137379 - DNA, 1200 bp, synthetic construct
  misc_feature 1..1200: note = Description of Artificial Sequence: Synthetic coding sequence
  source 1..1200: mol_type = other DNA
atgcataagtaccagccacgggtccatgtgatacggaaggatttctcgagcgatctgagccctaccaaaccagttcccgtgggcgacggggtgaaaacatttaatttccccgagacagttttcacaaccgtgaccgcttatcagaaccagcaaattactcggctcaaaattgacaggaatccgtttgccaaaggctttcgagattcaggccgtaaccgtactgggctggaggctattatggagacatacgccttctggcggcctcccgtgcgcacactgacctttgaggactttaccacgatgcaaaaacagcaggcttccaagaaaaccagtcaaggctacaccgttaatcaacatagtagcgaaacagacgccattgaactatacgaacggagagtctggcttatggaaaggcggggttccacagggacctcccctacaaccagtagtaccggcactccttctccgtccgctagtagccatttgcttagcccaagctgtagcccccctacattccatctggcgcctaacactttcaacgtcggttgccgcgaatcacagttgtgcaatcttaacctgagcgattatcccccttgcgccaggagcaatatggccgctctgcaatcataccccggtttgtccgattctggctataatcgacttcagtctggtaccacttctgcaacgcagccctccgagacctttatgccgcagcgcacacctagcctgatttccggcattccaactcccccgtcacttcccggcaactctaagatggaggcctacggcggtcagttgggaagttttcccacctctcagttccaatacgtcatgcaggcggggaatgcagcaagcagttcatcctccccacacatgttcggaggcagtcacatgcaacagtctagctataatgcgttttctctccacaatccctacaacctttacggttataattttcctactagtcctagactggcggcgtccccagagaagctttcggcttcacagtccacgcttctttgtagctccccctctaacggagccttcggcgaaaggcagtacttaccaagcggaatggagcacagcatgcacatgattagtcctagccctaacaatcagcaagcgactaacacttgtgacggtaggcaatatggcgccgtgcctgggtcctcatcccaaatgtccgtgcatatggtctag

SEQ ID NO: 137380 - DNA, 1809 bp, synthetic construct
  misc_feature 1..1809: note = Description of Artificial Sequence: Synthetic coding sequence
  source 1..1809: mol_type = other DNA
atgtccgaacggcggcgctctgcagttgctttgtctagtagagcccacgctttttccgtcgaggcacttattggatctaataagaaaaggaaactgagggactgggaggaaaaaggactcgatctgagcatggaagccttgtcgccagctggccctctgggcgataccgaagatgctgccgcccacgggctagagccacacccagactcggaacaatccaccggatcagatagcgaagtgcttactgagcgaacttcttgttccttctcaacacatacagacttggcctcaggcgcggctgggcctgttcctgcagcgatgtcctccatggaggagatccaggtcgaactgcagtgtgcggatttgtggaaacggttccatgacattggaacagagatgatcatcacgaaagccggccgccgcatgttcccagctatgcgggtgaaaatcaccggcctcgaccctcatcagcagtactatatagcgatggacatcgtgcccgtagacaataagcgttaccggtacgtgtaccatagctccaaatggatggtggccggtaacgccgatagccctgtgccccctcgggtgtacatccatccagactcactagccagcggcgacacctggatgcgccaagtggtaagcttcgacaagctgaagctgaccaacaatgagctagacgatcagggccatattatcttgcactccatgcacaaataccagcctagggtgcatgtgattagaaaagatttcagttcggacttgagccctaccaaacctgtgcctgtgggagatggcgtcaaaacttttaactttccagagacagtctttacgactgtgactgcttaccagaatcagcaaatcacacgccttaagatcgaccgtaatcctttcgcaaagggcttccgcgactctgggagaaatcggacaggactggaagcgatcatggagacctacgcattctggagaccccccgttcggaccctgacattcgaggatttcacgaccatgcagaagcaacaggggggctccacaggcacctcccccaccacttcatccacgggcacgcctagcccatctgctagcagtcacctcttgagcccttcctgtagtccaccaacgttccacctcgctcccaatacctttaatgttggatgtcgcgagtctcagctatgtaacctaaacctgtctgattatcccccatgtgcccgcagcaatatggctgcactgcagtcctaccctggactgtcggattccggatacaatcgcctgcaatctggaacgacatctgctacacagcccagcgaaacgtttatgccccaacgtacgcccagtctaattagcggaatccctacccccccctccttaccaggaaattcaaaaatggaagcgtacggggggcagcttggcagctttccaaccagccagttccagtacgtgatgcaggcaggaaatgcggcgagttctagcagttctccccacatgtttggtggctcacacatgcagcagagtagctataacgccttcagcctgcacaatccctacaacctgtacggatacaattttccaacaagccctcgcctggccgcttctccagagaagttgagcgcttcccaaagtacattattgtgttcctccccctctaacggtgcatttggagagagacaatacctcccctctggaatggagcacagcatgcacatgatttctccgagccccaacaatcagcaagccacgaacacctgcgatggccgccagtacggtgcagtgcccgggagtagtagtcaaatgtctgttcatatggtgtag

SEQ ID NO: 137381 - DNA, 762 bp, synthetic construct
  misc_feature 1..762: note = Description of Artificial Sequence: Synthetic coding sequence
  source 1..762: mol_type = other DNA
agggtaagaaccggcctggaggccatcatggagacctacgccttctggaggccccctgtccgcacactgacgttcgaggacttcacaaccatgcagaagcagcaggctagcaagaaaacttcacagggatacacagtaaaccagcacagttctgagaccgacgccatcgagttgtacgagagacgtgtttggcttatggaacgcagggggagcacagggacaagccccaccacctcgtcaacggggacgccttccccgtctgcaagcagccatctgttgtccccgagttgctccccgccaaccttccacctagcccctaacacgtttaacgtgggatgtagagagagtcaactgtgtaaccttaatctctccgattacccaccttgcgctagaagtaacatggctgccttgcaatcataccctggtctcagcgattcaggatacaacagactgcagtcagggactacaagtgccacgcagccaagcgagacttttatgccccagcgtactccctctttgatctcaggcattcccacgccaccctctctgccaaccgcccgatggaaacccactgtagcgagctgggggccttttcccctcccttccttcagcatgagttgccgccaggccatgttaccgccagccccccatcaccacacatgtagtggcgccgctacgtgctcacgtgcgcctacaatgccatctccatttaccaccctgacaacttgtatggacaccatatcaccactgcctctgggatag

SEQ ID NO: 137382 - DNA, 993 bp, synthetic construct
  misc_feature 1..993: note = Description of Artificial Sequence: Synthetic coding sequence
  source 1..993: mol_type = other DNA
ggcagaaaccgcacggggctagaggcaataatggagacctatgctttctggcgcccccctgtgcgtaccctgacgtttgaggatttcacgacaatgcagaagcagcaggctagcaagaagaccagccagggctacaccgtcaaccagcacagctctgagaccgacgccatcgagctatatgaacggcgggtctggctgatggagaggaggggatcaacgggtacatcccccacaacctcgtctactggaacaccttcccccagtgctagcagccacctcctgtccccgtcctgtagtccaccaacattccatctggccccgaacacctttaacgtgggctgccgagaaagccagctttgcaacctaaatcttagtgactatccaccgtgtgcacgatccaacatggccgcactgcaaagttaccccggcctgtctgacagcggatataatcgactgcagtcaggaacaacatctgccactcagccttcagagacctttatgccacaacgcactcctagtctgattagcggaatccctaccccaccttccctgcccggcaattccaagatggaagcatatggcgggcagctcggctctttcccaacttcacagttccagtatgtgatgcaggcaggaaatgctgcctcatctagttcaagtcctcacatgtttggcggatcgcacatgcagcaatcctcctacaacgcgtttagtctccacaacccttataacctgtacggatataatttccctacatcaccaaggctggctgcgtcaccagagaaactgagcgctagccagagtactctgctctgcagtagcccctctaatggggcctttggggagcgccagtatcttcccagtggaatggagcatagtatgcacatgatatccccatcccccaacaatcagcaggctaccaacacttgcgatgggagacaatacggtgcggtgcccggatcttcgtctcagatgtcagtccatatggtctag

SEQ ID NO: 137383 - DNA, 1347 bp, synthetic construct
  misc_feature 1..1347: note = Description of Artificial Sequence: Synthetic coding sequence
  source 1..1347: mol_type = other DNA
atggccatgtcagaactggggactcgcaagccttcagacggtacagtatctcatctgctgaacgtcgtggaaagtgagcttcaggcaggaagggagaaaggcgatcccaccgagaaacagctgcaaattatcctcgaagatgcccccctttggcaacgattcaaagaggtgacaaacgaaatgatagtcactaagaatggcagacggatgtttcccgtgctgaagatctctgtgacgggactggacccgaatgctatgtatagcctgttgctggacttcgtgcctaccgacagtcatagatggaagtatgttaacggagagtgggtcccagctggaaaaccagaagtttctagccacagttgcgtctatattcaccccgattcacccaacttcggagctcattggatgaaggctccgatcagttttagcaaggttaaactgaccaacaaattaaacggaggtggtcagataatgctaaattctctccataaatatgaaccccaggtgcacatcgtccgcgtgggatccgctcaccggatggtgaccaactgctcattcccggaaacccagttcatcgcggtcacagcgtatcagaacgaagagattactgcccttaagatcaagtataacccgttcgcaaaagcattcctggatgccaaggagcgcaatcacctgcgggatgtgcctgaggcaatatccgaatcacagcacgtcacatacagccacctgggcgggtggatcttctcaaacccagatggggtctgtacagcgggcaactcaaactatcagtacgcagctcctttgccgctgcccgctccacacactcaccacggatgtgagcactactcggggttgcggggccatcgacaggctccttatccatccgcttatatgcacaggaatcatagtccaagtgtgaacttgatcgagtcctccagtaataacctgcaggtattctcgggtcccgattcctggacctcattgagcagtacaccccatgctagtatcttgagcgtcccacacaccaacggtcccattaacccaggaccatctccgtatccttgcctctggactatttccaatggtgccggaggcccaagcggacccggccccgaggttcatgctagcacgcccggagccttccttttaggaaaccccgccgtgacaagtcctcccagtgtcctgtctacacaggccccgacgagcgctggagtggaggttctgggcgagccctcactgaccagcatcgcagtttctacctggactgcggtggcctcccacccctttgcagggtgggggggacctggagcaggcggacaccatagtccctcctccttagacggatag

SEQ ID NO: 137384 - DNA, 978 bp, synthetic construct
  misc_feature 1..978: note = Description of Artificial Sequence: Synthetic coding sequence
  source 1..978: mol_type = other DNA
atgatcgtaacaaaaaacgggcggcgcatgtttcccgttctgaaaatcagcgtgactggactggacccaaatgcaatgtacagcttattgcttgatttcgttccaaccgactctcatagatggaagtacgtcaacggcgagtgggtgcccgctggaaaaccagaagtgtcttcacattcatgtgtgtatatccatccagattcacctaatttcggtgctcactggatgaaagcgcccatctcattctctaaggtgaaacttacaaataagctaaatggcggcgggcaaattatgctcaattcactgcacaagtacgagccacaggtgcacatagtgcgtgtcggctccgctcaccgcatggttactaattgctcctttccagagacccaatttatcgccgtgacggcttaccagaatgaggaaattactgccctcaaaatcaaatataatcctttcgcgaaggctttcctggatgcaaaggagcggaatcacctcagggacgtaccagaggccatctctgagagccagcatgtgacttatagccacctaaatctgatagagtcgtccagtaataatctgcaagtcttctcaggccccgactcttggacctcgctttcttctaccccgcatgccagtattctttcggtgccccacacgaacgggcccatcaatccaggaccctccccctacccttgcctgtggaccatatcaaacggcgccgggggtccttccggcccgggacctgaggtgcacgcatcaactcccggggctttccttttaggcaacccggctgtcacttccccaccgagcgtgctcagtacccaggctcccacatctgctggtgtggaggtgctcggtgagcccagtctaaccagcatcgctgtaagtacgtggactgctgtggcaagtcacccctttgctggctgggggggtcccggtgctgggggccaccattccccctcctctttggatggctag

SEQ ID NO: 137385 - DNA, 957 bp, synthetic construct
  misc_feature 1..957: note = Description of Artificial Sequence: Synthetic coding sequence
  source 1..957: mol_type = other DNA
tagcgcatgttccctgtgctgaagatatccgtcaccggcttagatcccaacgctatgtattccctccttcttgacttcgtcccgacagatagccacagatggaagtacgtgaacggtgagtgggtaccagccggcaagcctgaggtgtccagccactcatgtgtttacatccaccccgacagtcctaatttcggtgctcactggatgaaagccccgatttctttcagcaaagtaaagctcaccaacaaattgaacggcggcggacagatcatgctgaattctctgcacaagtatgagccacaggtgcatatcgtgcgggtgggttcagctcatcgcatggttactaattgctcttttccggagacgcaattcattgccgtaacagcctaccagaacgaagaaattactgcattgaagataaagtacaacccattcgccaaggcctttcttgacgctaaagagcggaatcacctgcgagatgtgccggaggccatatcggaaagtcaacacgttacctactctcatctcaatctgattgagagctcatcgaataatctgcaagtgtttagtggcccagatagctggacaagcctcagctcgaccccacatgcgagcatcctatctgtcccccatacgaacggaccaatcaacccaggaccctcaccttacccctgtctgtggaccatcagcaatggcgcaggtggaccgtctggccccggcccagaagtgcacgctagcacgcccggagcatttctccttggcaaccccgccgttacaagcccaccttcagtactcagcactcaggctcccacttcagctggggtcgaggtccttggcgaaccaagcctgacctcaatcgccgtgtctacttggacagcagtggcttcccaccccttcgccggctggggtggaccgggcgccgggggacaccactccccctcttccctggacggatag

SEQ ID NO: 137386 - DNA, 846 bp, synthetic construct
  misc_feature 1..846: note = Description of Artificial Sequence: Synthetic coding sequence
  source 1..846: mol_type = other DNA
tgaaaggaacgcgaactgaactggttctaccgccggcagcgagtactctttgcccacgtctatcccaccttcacaaatacgtcatgcctctgtaaatgcaaaatcacggcgctcaaaatcaaatacaacccctttgccaaggcattcctcgatgcaaaggaaagaaatcatctgcgcgacgtccccgaggccataagcgaatcccagcacgtgacttattcccacttagggggctggatcttctctaatcctgatggggtctgcaccgcagggaatagcaactaccaatatgccgcacccctaccactccccgcacctcatacccatcatggttgcgaacactacagcggactcagggggcaccgccaggcgccatacccttcggcctatatgcatagaaaccactcaccgagcgtgaaccttattgagtcgagtagcaataacctccaggtgttcagtggccccgatagttggacaagcctgagctctacccctcacgcaagcatacttagcgttccccatacgaacggccctataaatccgggaccctccccctacccttgtctttggacaataagcaacggagccggagggcccagcggacccggtcccgaggtgcacgcttcgacgcctggtgccttcctgctgggtaatcctgccgtgacaagtcccccgagtgtgctgtcgacacaggccccaacttccgcaggagtcgaagttctcggggaaccctccctaacctccattgcggtttccacatggacagccgttgcctctcaccctttcgccggatggggcggacccggtgcaggtggccaccatagtccctcttctctggatggatag

SEQ ID NO: 137387 - DNA, 1344 bp, synthetic construct
  misc_feature 1..1344: note = Description of Artificial Sequence: Synthetic coding sequence
  source 1..1344: mol_type = other DNA
atggagttcactgcaagccctaagccgcaactgtcatcccgggccaacgcattctctatagccgctctaatgagttcgggaggcagtaaagagaaagaagccaccgagaatactattaaaccgctggagcagtttgtcgaaaagtcctcttgtgcccagcctctcggcgagttaaccagcctggacgcccacggcgaattcggtggtggcagcggcagttctccaagctctagctcactttgtaccgagccccttatcccaaccaccccaatcattccttccgaggagatggccaaaatcgcatgctctttggagacaaaagagctttgggataaatttcacgagctgggcactgagatgatcattaccaagtctgggaggcggatgttccccaccatcagagtgtccttctcgggcgttgaccccgaagcaaagtatattgtgcttatggatatcgtccccgttgacaataagcgataccgttacgcgtatcatagatcctcatggctcgttgctggcaaagcagacccacctctccccgccaggttgtatgttcatcctgactcaccattcactggcgaacaactcttaaagcaaatggtgagctttgaaaaagttaagcttactaacaatgagttagatcagcatggccatatcatactcaactccatgcacaaataccaacctagggtacatatcattaagaaaaaggatcatacagcaagtctactcaatctcaaaagtgaggaatttcgaacgttcatttttcccgagacagtattcacggccgtgactgcctaccagaatcagctgatcaccaagttgaagatagatagtaatccattcgcaaagggattcagagatagttcccggcttactgatatcgaacgcgagagcgtggaatcccttatccaaaagcactcatatgcccgcagcccaatccggacctacggtggtgaagaagatgtgctgggagacgagtcccagaccaccccaaaccgaggttccgccttcactacatctgataacctgtctctgtcaagctgggtttcctcctcttcaagctttcccggtttccagcatccacagtctttaaccgcgctagggacaagcactgcgagtatcgctacccctataccacacccaattcagggctcattaccaccctacagcagactggggatgcccctgactccctctgcaatagcttcctcgatgcagggctctgggcctacattcccctcttttcacatgccacgttatcatcactactttcagcagggaccttacgctgcaatccaggggctgaggcacagttccgcggtgatgaccccctttgtttag

SEQ ID NO: 137388 - DNA, 1608 bp, synthetic construct
  misc_feature 1..1608: note = Description of Artificial Sequence: Synthetic coding sequence
  source 1..1608: mol_type = other DNA
atgggtattgtggaaccgggctgcggcgacatgctgacagggaccgagccaatgccggggagcgatgaaggcagagcgccgggggccgaccctcagcaccggtacttctacccggagccaggtgcccaagatgcagatgaacgcagggggggcggatcattggggagcccttacccaggcggggcccttgtcccagctccacctagccgctttctaggcgcctacgcctaccccccgcgacctcaggccgcaggattcccaggcgcaggcgagagcttccctccacccgccgacgccgagggctaccagcctggggagggctacgctgcacctgatccacgcgcgggtctgtaccctggtcctcgagaggactatgctttgcccgccgggcttgaagtttctggcaaattgagggtggctctgaataaccacctgctctggtccaagtttaatcagcaccagaccgaaatgatcatcacgaaacagggcagacggatgttcccttttctgtcttttacagtcgccggcctggaacccacttcccactaccgcatgtttgtcgacgtcgtgcttgtcgatcaacatcactggcgctatcagtccggcaaatgggtccagtgtgggaaagccgaaggaagcatgccaggcaatcggctctacgtccatccggatagccctaatactggagcccattggatgagacaggaggtcagtttcggaaaactgaaacttacaaataacaagggcgcatccaataacgtgacccaaatgatcgtcctgcagagcctccacaaatatcagcctcgcctgcacattgtggaggtcaatgacggggaaccagaagctgcgtgcaacgcatccaatacccatatttttacttttcaggaaacccaatttatcgctgtgacagcctatcagaatgccgaaattacacagcttaagatcgacaacaaccccttcgctaaggggttccgggagaactttgaaagcatgtacaccagcgtagatacatctatcccatcccccccaggacctaactgccaattcctgggcggcgaccactatagccctttgcttcccaatcagtaccccgtaccttcccggttttatccagacctgcctgggcaagccaaagacgtcgtgcctcaggcatactggttgggagccccccgagaccattcgtacgaagccgagttccgcgccgtcagcatgaagcccgcctttctgccatcagcaccaggaccgactatgtcctactacagaggccaggaggtcctggctcctggagcaggatggcctgtggcacctcaatacccccccaaaatgggccctgcctcttggttcagacccatgagaacgctccctatggagccaggccccggaggatccgaagggcgcggtcccgaagatcagggtccaccgttggtgtggactgagatcgcacccattcggcccgaatcctccgattctggactgggtgagggagacagtaaaaggcggcgcgtcagcccttacccttctagcggcgattcttcatcccccgccggcgccccttcccctttcgacaaagaagctgagggacagttttacaattactttccaaattag

SEQ ID NO: 137389 - DNA, 1203 bp, synthetic construct
  misc_feature 1..1203: note = Description of Artificial Sequence: Synthetic coding sequence
  source 1..1203: mol_type = other DNA
atgtttccgtcagtgagggtcaaagtcaagggactagatcctggaaagcaataccatgtggccatcgacgtggtacccgtagattcaaagcgctatcgatacgtataccacagtagtcaatggatggttgctggcaatacagaccacctgtgtatcatcccgagattctatgtgcatcctgattcaccttgttctggcgaaacgtggatgagacagataatctcctttgatcgtatgaagctgactaataacgaaatggatgataaagggcacatcatccttcagagcatgcataaatataagccccgcgtgcatgtcatcgagcaaggatccagtgtggacctaagccagatccagagcctgcctactgaaggggttaaaacgttcagcttcaaggaaactgaattcacaactgtaacggcttatcagaatcagcagatcaccaaacttaaaatcgagcgtaatccattcgccaaaggctttcgggataccggcaggaaccgcggagtactcgacggacttctggaaacatacccttggcggccttcctttaccctcgacttcaagacatttggggctgacacgcagtcaggcagttccgggtcctcccctgtgacatcttcaggaggtgcacccagcccactcaactcccttctgagtccactgtgcttctctcctatgtttcacctgccaacgtccagtcttgggatgccatgtcccgaggcttacctcccaaacgtaaatcttcccctttgttataagatttgccccacaaacttctggcagcagcaaccattagtcctcccggcccccgagagactggcaagctcgaacagctctcaaagcctggcacctctcatgatggaagtgccaatgctgagtagcctgggtgtcaccaactctaagagcggctcctctgaagatagttcagaccagtacctccaggctcctaacagcacaaatcagatgctgtatggccttcaatcccctgggaatatttttttgccaaattccatcacgccagaagccctcagctgtagctttcatccttcgtacgatttctatcgttacaatttctctatgcctagcaggttgatctccgggagtaatcacctgaaagttaacgacgatagccaagtctctttcggtgaaggcaagtgcaatcacgttcattggtatccagccataaaccactacctctag

SEQ ID NO: 137390 - DNA, 1563 bp, synthetic construct
  misc_feature 1..1563: note = Description of Artificial Sequence: Synthetic coding sequence
  source 1..1563: mol_type = other DNA
atggccctctccagccgggcccgggcgtttagcgtcgaggctctcgtaggccgtccaagcaaacgcaaactgcaggatccgattcaggcagagcagccagagctcagggaaaagaaggggggcgaagaagaggaggagcggcgctcaagtgcagccggcaaaagcgagccactcgaaaagcaaccgaaaacagagccaagtaccagtgctagtagtggatgcggcagcgatagcggttacggcaactcttccgaaagtttggaagagaaggatattcaaatggagctgcagggatctgagctgtggaagcggttccacgacatcggcacagaaatgatcatcactaaagctggaagaagaatgtttccttccgtacgggtcaaggtgaaaggcctagatcctggcaaacagtaccacgtagctattgatgtggtcccggtcgacagcaaaaggtatagatatgtgtaccacagtagccaatggatggtggctggcaatactgatcacctgtgtattattccacgcttttatgtccaccccgactctccgtgctctggagaaacatggatgcggcaaataatctcttttgacaggatgaagttgacaaacaatgaaatggatgacaagggccacattatacttcagtctatgcacaaatacaagcccagagttcacgtgattgaacaaggcagtagcgtggacctgtcacagattcagagtttgcccactgagggagtgaaaaccttcagcttcaaagaaacagaattcaccacggtgactgcctatcagaatcaacagatcacgaagctgaagatcgagcggaacccgttcgccaaaggcttccgagataccggtagaaatcgcggggttctagatggcctgctcgagacctacccttggcgcccctctttcacattggattttaagacttttggcgccgatacgcagagcgggagcagtgggagtagccctgtgacctcttcgggcggggctccttcacctttgaacagcttgctttcaccactttgtttcagtcccatgttccacctcccgactagcagccttgggatgccatgtccagaagcatatctcccaaacgtcaatctgcccctgtgctacaaaatctgccctacgaatttctggcagcagcaacctttggtgctgccagcccctgagaggctcgcttcttcaaacagctctcagtccctggcgcccctcatgatggaggtacccatgctgtctagtctgggagtcaccaacagcaagagcggctctagcgaagattcatctgaccagtatctgcaggcccctaattcaacaaatcagatgctgtatgggcttcagagtccagggaacatctttttaccaaacagtatcacccccgaagcactgagctgctcattccacccctcatatgacttctaccggtataacttctccatgccttcccgactgatttcaggatctaatcatctcaaagtcaatgacgacagtcaagtctccttcggagaaggcaaatgtaatcatgtccactggtatcctgccatcaaccattatctctag

SEQ ID NO: 137391 - DNA, 1563 bp, synthetic construct
  misc_feature 1..1563: note = Description of Artificial Sequence: Synthetic coding sequence
  source 1..1563: mol_type = other DNA
atggctctttcctcacgtgcaagagcattttctgtggaggccctagtcgggagaccgtctaaacggaagttgcaggatcccattcaggcagagcagccagagcttagagaaaaaaaagggggggaggaagaagaagagaggcgctcaagcgccgccggcaagtccgagcccctggaaaagcagcctaagactgaaccgtcaacatcggcctcttcgggatgtggctcagatagcggatacggtaacagctcggagtccctcgaggagaaggatattcaaatggaactccaggggagtgaactgtggaaacgatttcatgacataggtacagagatgattattaccaaagctgggcggcgaatgtttccttccgtcagagtaaaggtaaaagggcttgacccaggaaagcaatatcatgtggccatcgacgttgtcccggtcgactcaaagcgctaccgctacgtgtatcacagctcccagtggatggtcgccggtaacacagatcacctgtgcataattccacgcttctacgtacacccagattctccatgcagcggggagacatggatgcgtcagatcatctccttcgaccgtatgaaactaaccaacaacgaaatggatgacaagggtcacattatcctgcagagcatgcataagtacaagcctcgggtgcatgtcatcgagcaaggctcctctgtggacctgtcgcagattcagtccctccccactgagggagtcaaaacctttagcttcaaagagaccgagtttactactgtcacagcctatcagaaccaacagattacaaaactgaagattgagcggaatccatttgcaaagggttttcgagatacggggcgaaacagaggggtacttgatggtctactcgagacatacccatggcgtccctcgtttactcttgattttaagacttttggtgccgacacacagtccggctcctcggggtctagcccggttacgagtagtggaggagccccgtcccccctgaattctcttctctcaccgctgtgcttcagccccatgttccacttacctacctcctctttaggtatgccttgcccagaggcttaccttcctaacgtcaacctccccctctgctataagatttgccctacaaatttttggcagcagcagcctctggtgctgcctgcaccggaacgactcgctagcagcaattcatctcaatcactcgccccgctcatgatggaggtcccaatgttaagctcgttaggcgtgactaattctaagtctggtagctccgaagactcctccgaccagtacctgcaggcgcctaatagtactaaccagatgctgtatgggctacagtcaccgggcaacatctttttgcctaactcaataacaccggaggctctttcgtgttcgtttcacccctcctatgacttttatagatacaatttttcaatgccaagccgcctaataagcggatccaaccacctgaaggttaatgatgactcccaggtgagtttcggagagggcaagtgcaatcatgtgcattggtatccggcgatcaaccactacctgtag

SEQ ID NO: 137392 - DNA, 1203 bp, synthetic construct
  misc_feature 1..1203: note = Description of Artificial Sequence: Synthetic coding sequence
  source 1..1203: mol_type = other DNA
atgttccccagcgtacgggttaaggtcaagggcttggaccctggaaagcaataccatgttgcaatcgacgtggtcccagttgattcaaagaggtatagatacgtctaccattcatctcagtggatggtggccgggaatacagaccatctgtgtattatccctcgattttatgtccaccccgatagtccttgttcaggtgaaacctggatgcggcagatcatttcatttgatcgcatgaagctgacaaataatgaaatggacgacaaggggcacatcatcctacagtctatgcacaagtacaagcccagagtgcacgtgatcgagcagggaagcagtgttgacttatcccagattcagtcgctgccaaccgagggcgtgaaaaccttttccttcaaggagacggagttcactaccgtgacagcttaccagaaccagcaaattaccaaactgaagatcgaaaggaacccctttgcaaaagggtttagagacaccggcagaaaccgcggagtgctcgatggactcctggagacctacccttggaggccaagctttacactggactttaaaacatttggtgccgatactcagagcggttcttccggttcctcaccagttacaagctctgggggagcaccgtctccactgaactcactcctgtcaccactctgtttttcccccatgtttcatctccctactagctctcttggaatgccatgcccagaggcctatctgcctaacgtgaacttgcccctgtgttataagatctgtcctaccaacttctggcagcagcaacccttggtcctgcccgcacccgagaggctggcctcatctaacagctctcagtctctggcccctttaatgatggaggttccgatgttgtcttcacttggcgtcacgaacagcaaatctggtagcagtgaagactcatccgatcagtatctgcaggcacccaacagcactaatcagatgctgtatggattgcagtcgcctgggaatatctttctgcctaattcgatcacaccggaggccttatcctgctccttccatcccagctacgatttctatcgttataatttctcaatgccctcacgactgatctcgggctcgaaccacctgaaggtgaacgatgattcacaagtctcatttggagagggcaagtgcaaccacgtacactggtaccctgccatcaaccattatttatag

SEQ ID NO: 137393 - DNA, 2232 bp, synthetic construct
  misc_feature 1..2232: note = Description of Artificial Sequence: Synthetic coding sequence
  source 1..2232: mol_type = other DNA
atgagcttatcaatgcgcgaccccgttatccccgggacaagcatggcgtatcacccatttctcccacaccgagcacccgatttcgccatgtctgcggtgctcggacaccagccaccctttttcccagctttgaccctgcctccaaacggagcagcagccctgagtttacctggcgctctcgccaagcctatcatggatcagctagtcggcgctgctgagactggtattcctttttcaagcctgggtcctcaggcccatctgaggcctctgaagacaatggagccagaggaagaggtcgaagatgatcctaaggtccatttagaggccaaggagctgtgggatcagttccataaacgagggaccgagatggtgattacgaaatctggtcgcaggatgtttccaccattcaaagtgcgctgttcaggtcttgataaaaaagctaaatacatactcctgatggacattattgcggcggatgattgcaggtacaaattccataactccagatggatggtggccggcaaggccgaccctgagatgcctaagcgcatgtacatccacccagactcaccagccaccggagagcagtggatgtctaaggtggtgacattccataagctcaaactgacaaataatataagtgacaaacacggctttaccttggcctttccctcagatcatgctacttggcagggtaactacagttttggcacacagaccattcttaacagcatgcacaaataccaaccacgcttccacattgtgagggctaatgatattttaaagttgccatattccacatttcggacctatctcttcccggagacagagttcatcgcggttacagcgtatcaaaatgataaaataactcaacttaaaattgataacaatccctttgcaaaagggttccgggataccgggaatggcaggagagaaaagcgaaagcaactcactctgcagtctatgagggtgttcgacgagcggcataagaaggagaatggcacaagcgatgaatcttcttccgagcaagccgctttcaactgcttcgcccaagcaagcagtcccgccgccagtactgtgggcacttccaatttgaaggacctatgtccgagcgaaggcgaatctgacgcagaagcagaatccaaggaagagcacgggcctgaggcctgtgacgcagccaagattagcaccaccacctcagaagagccatgtcgtgacaaaggctcaccagctgtgaaggcgcacttgtttgctgccgagcggccccgggacagcggtcgcctggataaggcctccccagacagcagacattcccctgcgaccatctcgtcctctaccagggggctaggagccgaggaaaggcgcagtcctgtgagagagggcactgcccctgcaaaagtcgaggaggcacgggccttgcccggaaaagaagcgtttgccccactcacggttcagactgatgctgctgcagctcacctcgcgcaaggtcctttgccggggctgggcttcgcccccggtcttgccggtcagcaattctttaatggccatcccctgttcctccaccctagccaatttgcaatgggcggtgcttttagttctatggcagccgcaggcatgggcccactcctggctaccgtcagcggagcaagcactggggtgagtggtctcgactccacagcaatggccagtgccgctgccgctcagggccttagtggcgcctccgcagcaacactgccatttcacttgcagcaacacgtgcttgctagccagggcctggccatgtcaccctttggatcactgtttccttacccttatacttatatggctgctgcagctgccgcgtcctctgccgccgcctcatcttcagtgcaccgccatcctttccttaatctgaatacgatgaggccccgccttaggtattctccgtattcaataccagttccggtgcccgacgggtcatctcttctaactactgcgctgccatctatggcggcagctgcaggcccactcgacggtaaagtcgctgcattagccgcaagtcccgcttcagtcgctgttgacagcggctcggagcttaactcacgcagcagcaccttgtcctccagcagcatgtctctgagtccgaaactatgtgccgaaaaggaagccgcaacttctgagcttcagtccattcagaggctcgtgtcaggccttgaggcaaaacccgatcgttctagatccgcttccccttag

SEQ ID NO: 137394 - DNA, 2172 bp, synthetic construct
  misc_feature 1..2172: note = Description of Artificial Sequence: Synthetic coding sequence
  source 1..2172: mol_type = other DNA
atgagcctcagcatgcgtgaccctgtaatacctggcacttctatggcgtaccaccctttcctgccccacagggctcccgacttcgcgatgagcgccgtgcttgggcaccagcctcctttttttccagcccttacactcccacccaatggtgccgccgccttaagcttgccaggggcactggccaagcctataatggaccagctggttggggcggctgagactggcatacccttctcaagcctggggccacaggctcatctacgcccgttgaagaccatggagcccgaggaagaagtggaggacgatcccaaagtgcatttagaagccaaggagctgtgggaccagttccacaagaggggaacagagatggttatcacaaaatccggtagaagaatgttcccccctttcaaggtgcgatgttccgggctggacaagaaggctaagtatatcttgctgatggatataatcgccgccgacgactgcaggtacaagtttcataattccagatggatggtggccggcaaagcagatccggagatgcctaaacggatgtatattcaccccgattcacccgccactggagagcaatggatgtcaaaggtggtcacgttccataaactgaagctcaccaacaacatctctgataagcatggttttaccatcctgaattcaatgcataagtatcagcccaggtttcacattgtccgggcgaacgatatccttaaactgccatattctacgttccgtacataccttttccccgaaacagaattcattgccgtgaccgcttaccagaacgacaaaattacacagctcaagattgacaacaacccattcgctaagggattccgcgacactgggaatggtagacgagaaaaaaggaaacagctgaccctccagtctatgagggttttcgatgagcgtcacaagaaagagaatggaactagtgatgagtctagctctgaacaggctgcattcaactgcttcgcacaggcatcatcaccagctgcctcaactgtgggaaccagtaatcttaaggacctgtgtccctccgagggcgaaagcgatgccgaggccgaatctaaggaggaacacggtccagaagcctgcgacgcagcaaagatctcgacgactaccagtgaagagccttgccgggataaaggaagccccgctgtgaaggcccatctgttcgctgcagagcgaccgagagatagcggcaggctcgacaaggcatcacccgacagcaggcattccccagcaacaatcagctcttctacacggggactgggcgctgaggaacgacgctcgccagtgcgggaggggacagccccagccaaggtggaggaagcccgggcgctcccaggaaaagaggcctttgcccccttgacagtccagacggatgccgctgctgctcacctggcacagggacccctgccagggttgggattcgccccgggcctggccggccagcagttcttcaatggtcaccccctctttctgcacccatcgcagtttgctatgggcggcgcgtttagttccatggctgcagcaggcatgggaccccttctcgccacagtgtctggggcctccaccggcgtctcagggctggactcgacagccatggcgtcggctgccgctgcccagggcttgagtggggcaagtgccgccaccttgccatttcatctacagcagcacgtccttgcgtcgcagggcctggccatgagcccctttggtagcctgtttccctatccctacacatacatggccgcggcggccgctgcatcatcggcagcagcttcatcttccgttcatagacacccctttctgaatcttaacacgatgcggccgaggctgagatattctccgtactccattcccgtcccggtgcccgatggtagtagtctgctcaccaccgcattaccgtctatggccgcagccgccgggccattggacggaaaagtagcagccctggccgcctcccctgcctcagtggctgttgattccggaagtgagctgaattctagatccagcacattgagttcttcttcaatgagcctgtccccaaagctgtgcgccgaaaaggaggccgcaactagcgaattgcaatctatccagagactggtgagcgggctcgaagccaagccagataggtctcgatccgccagtccatag

SEQ ID NO: 137395 - DNA, 1803 bp, synthetic construct
  misc_feature 1..1803: note = Description of Artificial Sequence: Synthetic coding sequence
  source 1..1803: mol_type = other DNA
atgagtttatccatgagagatccagtcattcctggcacaagcatggcttatcatcccttccttccacatcgcgcacctgacttcgccatgtcagctgtactggggcatcagccaccctttttcccggccttaactctgcccccaaatggagctgcggccctttccctgcccggagcactggcaaaacctattatggaccagctggtgggagcagcagagacagggatacccttttcttctctgggaccgcaagctcatttgcgtcctctcaagaccatggagcccgaagaagaggtggaggatgatcccaaagttcatctggaagctaaagagctctgggaccagttccacaagaggggaaccgagatggtgatcacgaagagcggaaggcgcatgtttcctcccttcaaggtgagatgttccgggttggacaaaaaagccaaatatatactcctgatggatatcattgctgcagacgattgtcgctataaattccacaattcaagatggatggttgcaggtaaagccgacccagagatgccgaagaggatgtacattcaccctgattcccctgccacaggggaacaatggatgagtaaagtggtgacgtttcacaagctaaagctgacaaataatatttccgataaacacggctttaccctcgcctttccgagcgaccacgctacttggcagggcaactactccttcggcacacagactatcttgaattctatgcataaataccagcctcggtttcacattgtcagggctaacgatatccttaagttaccttacagtactttcagaacttatctgtttccagagactgagttcattgctgtgaccgcgtaccagaacgataagattacccagttaaaaatcgacaataatcccttcgcaaaggggttcagggataccggtaacggaagacgggagaagcggaagcagctcacgctccagagcatgcgtgtttttgacgaacgtcataaaaaagagaatggcaccagcgacgagagcagtagcgagcaagcagcttttaactgtttcgcccaggcgagttccccggcggccagtacagtaggaacttcgaaccttaaggacctctgtccctcagagggagaaagtgacgcagaggctgagagcaaggaagaacatggccccgaagcgtgcgacgcagcgaagatcagcacaactacgtccgaagaaccctgccgcgacaagggatcaccggcagtgaaagcgcatctcttcgcggccgaaagacccagggactccggccgcctggataaggctagccctgacagccggcatagcccagccacaatcagctcctccacacgggggctgggcgccgaggagcggaggagcccagtaagggaggggaccgccccagccaaggttgaggaagctagagctctgcccgggaaagaggctttcgcccccttaaccgtgcagacagacgccgcggccgccgctgcgagctccagtgtgcaccgacatccatttttgaatctgaatactatgcgaccccggctgagatactctccatacagcatacccgtgcccgtgccggatggctcaagcttgcttactacagcgctagctgcttccccggcgtctgtggccgttgactcaggttcggagctcaactctcgttcttccacactgtcttcatcctctatgagtttgtccccaaaattgtgcgccgagaaagaagctgccacttccgagcttcagtctatccagcggctggtttcaggcctagaagcaaaacctgaccggtctagatctgcctccccatag

SEQ ID NO: 137396 - DNA, 1638 bp, synthetic construct
  misc_feature 1..1638: note = Description of Artificial Sequence: Synthetic coding sequence
  source 1..1638: mol_type = other DNA
atgctgcaggacaagggactgagcgagagcgaggaagcattcagagcccccgggccagctttgggtgaggcatccgccgcaaatgctcccgagcctgcactagccgccccaggcctgtctggagccgctcttggctcccctcccgggccaggcgctgatgtggtggccgcggcagccgcagaacagactatcgagaacataaaggtgggtttgcacgagaaagagctgtggaagaaattccatgaagccggcacagagatgataataaccaaagccggccgacgaatgttcccttcttataaggttaaggtaacgggaatgaacccaaaaaccaagtatatactgctgattgatattgtcccggccgacgatcaccgctacaagttttgtgacaataaatggatggtggctggaaaggctgagcccgctatgcctggccgcctgtatgtgcaccccgattcgcccgccacaggagcacattggatgcggcagcttgtctccttccagaagctgaagctcaccaataaccacctggatcccttcggtcacatcatcttgaactcaatgcacaagtaccagcccagattacatattgttaaggctgatgagaacaatgcctttgggagcaaaaacacggctttttgcacccacgtttttcccgaaaccagtttcatcagtgtgacctcgtatcagaatcacaagatcactcagctcaaaatcgagaacaaccctttcgcaaaaggattcagaggctctgatgatagtgatcttagggtggccagattgcaatccaaggaatatcctgtgataagcaaaagtatcatgcgacagcgcctcatctctccccaacttagcgccacccctgacgtggggcctcttctgggcactcaccaagcactgcagcactaccagcatgagaacggcgcacattcacagctcgcagagccgcaggacttgccgctgtccacttttcccactcagcgagactcaagcctgttttaccactgtcttaaaagacgcgacgggaccagacatctggatctcccctgcaagcgctcatacttggaggccccctctagtgtcggggaagatcactacttcaggtcacccccaccctacgaccagcagatgctaagtccttcctattgttctgaggttacgcctcgcgaagcctgtatgtactcaggctccgggccagagatagcgggtgttagcggggtcgatgatctgccccctccgcctcttagttgcaatatgtggaccagcgtctcgccctatacttcctactcggtccagaccatggaaacggtgccttaccagcccttccctacccactttactgccacaacaatgatgcctcggctcccaacactaagcgctcagagcagtcaacctccagggaacgcccatttcagcgtgtacaaccagctgagtcagtctcaggtcagagaaagagggccgtcggcttcttttccacgggaacggggcctccctcagggctgtgagaggaaacccccatccccacacctaaatgctgctaacgaatttttgtattctcagaccttttcccttagccgagaatcctcactgcagtatcatagcggcatgggcaccgtggagaactggaccgacggatag

SEQ ID NO: 137397 - DNA, 1641 bp, synthetic construct
  misc_feature 1..1641: note = Description of Artificial Sequence: Synthetic coding sequence
  source 1..1641: mol_type = other DNA
atgctccaggataaaggccttagtgaatctgaagaagcattcagagctcctgggcctgccctgggagaggcaagcgccgccaatgcacctgaaccggccctggcggcgcctgggttgtctggggcggctctgggaagcccgcctggtcccggcgctgatgtcgtggccgctgctgcagccgaacagactattgagaacattaaagtggggctgcacgaaaaggagctgtggaagaaattccacgaggcaggtacagaaatgatcattaccaaggcgggcagaaggatgttccctagttacaaagtgaaggtaactgggatgaaccccaaaactaaatacatcctgctcattgatatcgttcccgctgacgaccatcgatataaattttgcgataataaatggatggtagcaggcaaggcagaacctgctatgcccgggcgactctacgttcatcctgactctccagcaactggagctcactggatgcgacagctcgtgagtttccagaagctcaagcttactaacaaccatctcgacccgttcggacacattatattaaacagcatgcacaaataccagcctcgcctgcacatcgtaaaagcagatgaaaacaacgcctttggatctaagaataccgctttctgcacgcatgtgtttccagaaactagttttattagcgttacctcataccagaatcacaaaattacccagttgaaaatcgagaataacccctttgccaaggggttccgtggcagcgacgactccgacctcagagttgccaggctccagtcgaaagaatatcccgttataagcaagtccatcatgcgacaaagactgatctctccccagctcagtgctacacctgacgtggggcctctgctggggacccatcaagcactacaacattaccagcacgaaaacggtgctcattcccaactagctgagcctcaagatctacccctgagtaccttcccgacccagcgggattctagcttgttttaccactgtctcaagaggagagcagatggaactcggcatcttgacttaccctgcaaacggtcctaccttgaggcaccatcctccgtgggagaagatcattatttccggtctcctcccccttatgaccagcagatgcttagtccttcttactgctccgaagtaaccccccgggaggcctgcatgtactcaggctctgggccagagattgctggagtgagcggggtagacgatctgcccccacccccactcagctgtaatatgtggacaagcgtgagtccatacacaagctattctgttcaaacaatggagaccgtgccttaccagcccttccccacccatttcacagccaccacaatgatgccccggttgccaacgctgagcgcacagtcctctcagccacctggaaacgcacacttttccgtgtataatcagttgtcacaatcacaggtgagggagagagggccttctgcaagcttccctcgggagcgtggactgcctcagggctgcgagcgtaagcccccaagtccgcatttaaatgccgcaaacgaatttctgtactctcagaccttttcgctgtcgcgggagtcttcacttcagtatcactctggcatgggtaccgtagagaactggactgatggttag

SEQ ID NO: 137398 - DNA, 1557 bp, synthetic construct
  misc_feature 1..1557: note = Description of Artificial Sequence: Synthetic coding sequence
  source 1..1557: mol_type = other DNA
atggccgatgccgacgaaggcttcggcctggcccacactcccctggagccggacgccaaggacctaccatgcgattcgaaaccagagtctgcgctaggtgctcccagtaagagtcccagctctccccaggccgccttcacacaacaagggatggagggaattaaagttttcttgcacgaaagagaactgtggctaaaatttcacgaagttggtacagagatgattatcactaaggcgggccgccgcatgttcccttcttacaaggtgaaggttaccgggctgaatccaaaaaccaaatatattttgctgatggatatcgtgcccgcagatgatcaccggtataagttcgccgataataagtggtcagtaaccggcaaggccgagccagcaatgcctggaagactctacgtgcaccccgattctcctgcaacaggtgcccactggatgcggcagttagtgagtttccagaaattaaaacttactaacaatcatctggatccctttggtcacataatcttaaattctatgcataagtatcagccacgcctgcacatcgtgaaggccgacgaaaacaacggcttcgggtccaagaacaccgctttctgcacgcacgtcttccccgagacagcattcatcgccgtgaccagttaccagaatcataaaatcacccagcttaagatcgagaataaccctttcgcgaagggatttagaggaagcgatgacatggagttacaccggatgagtaggatgcaatccaaagagtatcctgtcgtgcctcgaagcaccgtccgacagaaggtagcctccaatcacagccctttttccagcgagagcagagctcttagtacaagttccaatcttgggagtcagtaccagtgcgaaaacggcgtatctgggccaagccaagacctactccccccaccgaatccatacccgttacctcaggaacacagccaaatttatcattgcactaaacgcaaggaagaggaatgctcaacaactgaccacccttacaagaaaccctatatggagactagtccttctgaggaggacagcttctaccggtcaagctacccacagcagcaaggactcggcgcctcctataggacagagtctgctcaacggcaggcttgtatgtacgccagttccgcaccaccatctgagccagttccctcattagaagatatatcttgcaatacctggccatctatgccctcttacagctcatgtacagtgaccacggttcagccgatggaccggctgccctaccaacacttcagcgcacacttcacatctgggcctctagtgcctagactggcaggaatggcgaatcacggcagcccacagctgggggagggcatgtttcagcatcaaacatctgtagcacaccaacctgtcgtaaggcagtgtgggccgcagaccggactccagtctccaggcaccttacagccgcctgagttcctctactcacatggggtccctcgtactttgtcacctcatcagtatcattctgtgcatggggtcggaatggtcccagagtggtccgataacagttag

SEQ ID NO: 137399 - DNA, 1407 bp, synthetic construct
  misc_feature 1..1407: note = Description of Artificial Sequence: Synthetic coding sequence
  source 1..1407: mol_type = other DNA
atggaaggcattaaggtattcctgcatgagagagagctctggctgaaatttcacgaagtgggaacagaaatgataattactaaggctgggaggcggatgttcccttcatacaaggtcaaggtgacaggcctcaatcctaagactaagtacatcttgctaatggatatcgtgcctgctgacgatcatcgctacaagttcgccgataataaatggtctgtaacgggcaaggccgagcctgcgatgcccgggaggctttacgtgcatccggattctcctgcgactggcgcccactggatgcgacagcttgtctcgtttcaaaagttgaagctgaccaataatcacctggatccattcgggcatataattctcaattcaatgcacaaataccagcctagacttcacatcgtcaaagccgacgagaataatggatttggatctaagaacacagccttctgtacccatgtgtttcctgagactgccttcatagctgtcactagttaccagaaccataagattacccaacttaagattgagaataatccctttgccaagggatttaggggcagcgatgatatggaattgcaccgcatgtctcggatgcagtcaaaagaatatccagtggtccccagaagcacagtacgtcagaaagtcgcctcgaatcactccccctttagctcagagtctagggcgctaagcactagctccaacctgggtagtcagtatcagtgtgaaaatggggtctcaggcccttcccaagacttgctcccacctccgaacccatatccactgccccaggagcattctcagatctaccactgcacaaagcggaaagaggaggagtgctccacaacagaccacccttacaaaaagccatatatggagactagtccctccgaggaagactcattttatcgatcgtcgtatccccagcagcaaggactgggagcaagctatcggaccgagtccgcgcagcgacaggcctgtatgtacgcatcatctgcgcctccaagcgaacccgtccctagcttggaggatatttcttgcaatacttggccctctatgcccagctattcctcatgcactgtgaccaccgtccaacctatggacagacttccctatcagcacttctcagcacactttacaagtggacccctggtcccccgtctcgccggcatggctaatcacggcagccctcagctaggggagggcatgtttcagcaccagacaagcgtggctcatcagcccgtggtgaggcagtgcgggccccaaactggactacagtctccagggacactccaacctcctgagtttctgtactcccatggcgtgcctcggactctgagcccgcaccagtaccactccgtgcacggtgtgggcatggtgccagagtggagcgacaacagttag

SEQ ID NO: 137400 - DNA, 1557 bp, synthetic construct
  misc_feature 1..1557: note = Description of Artificial Sequence: Synthetic coding sequence
  source 1..1557: mol_type = other DNA
atggccgacgcagacgaaggcttcggactggcgcacactcccctggagcctgatgcaaaagatctgccctgtgacagtaaacctgaatctgctctgggcgccccctcaaaaagcccctccagcccccaggcagcctttacccagcaaggaatggaagggataaaagtgtttcttcacgagcgagagctttggctgaaatttcatgaagtgggcaccgagatgataatcactaaggccggcaggaggatgtttccaagctacaaggtaaaggtcaccgggcttaatcctaaaactaaatacatcttactgatggacatcgttcccgcggatgaccaccgttacaaattcgccgataacaagtggtcagtaacggggaaagccgaacccgcaatgcccggacggttatatgtacatccggactctcccgcaacaggtgcccactggatgagacaactggtctcgtttcaaaagctgaagctgacgaacaatcaccttgaccccttcggacatatcatcctaaacagtatgcacaaataccaaccaagattacacatagtcaaagctgatgaaaacaacggatttgggtcaaaaaacacagcattctgtacccacgttttcccagagactgcatttatcgccgttaccagctatcagaatcacaaaattacacagcttaagatcgaaaacaacccattcgctaaaggtttcaggggtagtgacgatatggaactgcaccgaatgtctaggatgcagtctaaggaataccccgtggtaccgagaagcaccgtccgccagaaggtagcgtccaatcactcgcctttcagcagcgaatccagagccctgtctaccagtagcaacctgggaagccagtaccagtgtgaaaatggcgtgagcgggccctcccaagacctgctgcccccgcccaacccgtacccgctgccacaggaacacagccagatctatcattgtaccaagcggaaagaggaagagtgctccaccacagatcacccctacaagaagccttatatggagacaagtccctctgaagaggatagtttttataggagtagttaccctcagcagcagggcctgggcgcctcatatcgaacagagagtgctcagcgccaagcctgtatgtatgccagtagtgcacctccttccgaacccgttccgtctctcgaagacatttcatgcaacacgtggccatccatgcctagttactcctcatgcaccgtgacgaccgtgcagcctatggaccggcttccctatcagcacttcagcgcccactttacgagtggacccctggtacccagactcgccggtatggcaaatcatggtagcccccagctgggtgaaggaatgtttcagcaccagacaagcgtggcacatcagcccgtcgtgaggcaatgtgggccacagactgggctgcagtccccgggtacgcttcaaccccctgagttcctctactcccacggggtaccacgtactctttcccctcaccagtatcatagtgtgcacggcgtcggaatggtcccagaatggtctgacaactcatag

SEQ ID NO: 137401 - DNA, 1269 bp, synthetic construct
  misc_feature 1..1269: note = Description of Artificial Sequence: Synthetic coding sequence
  source 1..1269: mol_type = other DNA
atggatatcgttcctgctgatgaccaccgttataaatttgcggacaacaaatggagcgtcacagggaaggctgaaccggccatgcccggcagactgtacgtgcacccagattctcccgccacaggggcccattggatgagacagctggtgagctttcagaagttgaaattgacgaataatcacttagatcccttcggacatatcattcttaattccatgcataagtatcagccccgtttacacattgtcaaggccgacgagaataatggctttggatccaaaaacactgcattttgtacccacgtcttcccagagacggctttcattgctgtcacctcataccagaatcacaaaatcacccaactgaagatcgagaacaaccccttcgctaagggctttcgcgggtccgacgacatggagctccatcgcatgagtcggatgcagagcaaggagtatcccgtcgtgccaaggtccacagtgcgccagaaggtggcctctaaccacagcccattttcaagcgaatctagagctttatcaacaagctccaatctgggcagtcagtatcagtgtgaaaatggggtttccggcccaagccaggacctgctgcctccccctaatccataccctctaccccaggagcattctcagatctatcactgcaccaaaagaaaggaagaggagtgctcaactacagatcacccgtataaaaagccttacatggaaacctctccctccgaagaagacagtttctatagatcttcatacccacagcagcagggccttggggcctcatatcgcacagagagtgcccaaaggcaagcatgtatgtacgccagctccgccccgccctctgagcccgtgccaagcctcgaagacatcagttgtaacacctggccttctatgccttcctatagctcttgtaccgtgacaaccgtccagccaatggacagactcccctaccagcactttagtgcacactttacctctggaccactcgtgccccggctggctggcatggctaaccacggttctccccagctgggcgagggcatgtttcagcatcagacctctgtggctcaccaacctgtggtgcggcaatgcggtcctcagaccggtttactgcataacagacacttcctcgagaaggagagagaacgaggcgaaagggagaggcggcgggaaaccgtggccaagcgaaccccacgcacacggttcttcatcagcccaaacgtgcatatttgtacacagggtcgttggatgttaatttag

SEQ ID NO: 137402 - DNA, 1050 bp, synthetic construct
  misc_feature 1..1050: note = Description of Artificial Sequence: Synthetic coding sequence
  source 1..1050: mol_type = other DNA
atggccgacgcagatgagggttttggccttgctcacactccgctcgagcctgatgctaaggacctgccatgtgactccaagccggaaagcgctctgggagctcctagtaaatcaccatccagtcctcaggcagcctttactcagcaaggaatggagggcattaaggtgtttctacacgaaagggaactctggctcaaattccacgaggtgggtacagagatgatcattacgaaggccggccggcgaatgttccccagctacaaggtgaaggtcactggcctaaatccaaaaaccaaatacattttgcttatggatattgtcccagccgatgatcatcgatataaattcgcagacaataaatggagtgttacgggtaaggctgagcccgcgatgccaggcaggctgtatgttcaccctgattctccagctaccggcgcccactggatgagacagcttgtgtccttccagaagctcaagctgaccaacaatcaccttgatccgtttggccatattatcctaaattctatgcacaaataccagcctagactgcatatagtgaaggctgacgaaaataacgggtttggtagtaagaacaccgccttctgtacccatgtgttcccagagaccgcttttatagccgtgaccagctatcagaatcataaaataacccagctgaaaatagaaaacaacccattcgcaaaggggtttagagggtcggacgatatggaactgcacagaatgtccaggatgcagtcaaaggaatatcctgtcgtgccccgcagtaccgtaaggcagaaggtagcttctaaccattcccccttttcatcagagagtagggccctctccacaagtagcaacctcggatctcaataccagtgtgaaaatggggtgagcgggcccagccaggatcttttgcctcctccaaatccttatcccctccctcaggagcactcccagatctaccactgtactaagcgaaagggcgagtgtgatcacccttggtctatctgcttcttgtcctacctgttcttgtctctaggctggggatag

SEQ ID NO: 137403 - DNA, 1311 bp, synthetic construct
  misc_feature 1..1311: note = Description of Artificial Sequence: Synthetic coding sequence
  source 1..1311: mol_type = other DNA
atgtaccacccacgtgagctataccccagtctgggggcaggctatagactcggtcctgcccagccaggagcagacagctcctttcctcccgcactggctgaggggtatcggtaccccgaactggatacccccaagcttgattgctttctatccggaatggaagctgcaccacggaccctggccgcccaccctccactgcccctgctccctcctgcaatgggtaccgaacctgctcctagcgcccccgaggctctccacagcctccctggggtgtctctctctctggaaaaccgggagctctggaaggaattttcatccgtgggcaccgaaatgatcatcactaaggccggccgccgtatgttcccggcttgccgggtgtccgtcacaggtcttgaccctgaggctaggtacttatttttgttagatgtaatccctgtggatggcgcaaggtatcgttggcagggacgacggtgggaaccatcaggtaaggcggagcctagattaccagatagagtgtatatacaccctgattcaccggctaccggtgcgcactggatgagacaacctgtaagctttcatagggtcaaactgaccaattccacactggacccgcatgggcatctgattttgcacagcatgcacaaataccagccgcggattcacctggtgcgtgccgcccagctgtgctcacagcattggggaggaatggcatccttccgttttccagagacaacctttataagcgtgacagcctatcaaaatccacagatcacgcaacttaagattgctgccaaccccttcgcgaagggattccgagagaacggccgaaactgcaagcgcgagagggacgcgcgggtgaaacggaaactaagaggccccgaacccgctgccactgaggcgtatggatctggggacacccccggaggaccctgcgatagcactctgggcggtgacatacgcgagtcagaccctgagcaggcacctgcccccggtgaagccacagccgcaccagcaccattgtgtggagggccaagtgcagaggcttacctcctgcatcccgcagctttccatggagccccaagtcatctccctacgcgcagcccgtcctttcctgaggctcctgacagtggtcggagtgccccttactcggccgcgttcttggagcttccacacggtagcggcggctcaggatatccagccgcgccgccagcggttccattcgcaccacatttcctacaaggtggtccatttccacttccttatacggcaccgggtggctatctcgatgtagggagcaagccaatgtattag

SEQ ID NO: 137404 - DNA, 1311 bp, synthetic construct
  misc_feature 1..1311: note = Description of Artificial Sequence: Synthetic coding sequence
  source 1..1311: mol_type = other DNA
atgtatcacccaagagagttgtacccatctctgggcgctgggtacaggctgggaccagcccagcccggtgccgactcctcattccctcccgcactggctgaagggtaccgctaccctgagctcgacacccccaagctcgactgctttctcagtggcatggaggcagccccgaggactctagctgctcacccacccctacctctcctgcctccggccatgggaacggaacctgccccttcagctcccgaggccctacactcacttcccggcgtgtcactgtcccttgagaacagggagttgtggaaggagttttcttctgtgggcacagaaatgattattaccaaagctggtcgaagaatgtttccagcgtgccgggtttctgtgacaggtttggaccccgaggcacgctatttgttcctgttagacgttatccccgtagatggggccaggtataggtggcaaggaagacgatgggaaccgagtggaaaggccgaaccacgactgcctgaccgagtgtacatccacccagatagccctgcaacgggagcccactggatgcgccaacctgtgagtttccatcgcgtcaagttgacgaacagcaccctggacccacatggtcatctgattctacatagcatgcacaaataccaaccgcgcatccacctggtccgagctgcccagctgtgctcacagcactggggcggcatggcctcttttcggttccctgagacgactttcattagtgttaccgcctaccagaacccacagatcacccagctgaagattgctgcgaaccccttcgccaagggatttcgcgaaaatggccgaaattgcaaaagagagagagacgctcgagtcaagagaaaattgagggggccggagccagctgcgacagaggcttacggttccggtgataccccgggcggaccttgcgatagcaccctcgggggcgacattagagagtccgatccagagcaggcccccgcaccgggggaggcgactgctgcacctgctcccctttgcggagggccatccgccgaggcctatttgctccacccagccgcctttcatggagccccaagccacctgcccacccgcagcccctctttcccagaggcacctgattccggaagatccgccccgtactcagctgcttttctggagctgccccatggctctggcggctccggctatcctgctgcacctcccgcggttccatttgcacctcattttctgcaggggggtccttttccattgccctacactgccccaggaggttatctggatgtcggttcaaagccaatgtattag

SEQ ID NO: 137405 - DNA, 888 bp, synthetic construct
  misc_feature 1..888: note = Description of Artificial Sequence: Synthetic coding sequence
  source 1..888: mol_type = other DNA
atgtatcatccccgcgagctctatccgagtctgggggcgggctataggttgggccccgcacagccgggagccgactcgagtttcccgccagcactggccgaaggataccgctaccccgagctggacacaccaaagctcgactgctttctgagcggcatggaagccgccccccgcactctggccgcccaccccccactcccactgctcccacccgcaatggggaccgagccggcaccttccgcaccagaggccctgcactcgctgcccggtgtgtctctctctctcgaaaaccgagagttgtggaaggaattcagctccgtgggcacagagatgataatcacaaaagctggccgacgcatgtttcctgcctgtcgagtgtccgttactggcctggaccccgaggcaagatacctgtttctgctcgacgtcatccctgttgacggggcccgatatcgctggcagggtcgccgctgggaaccatcgggcaaggcagaaccgcggctccctgatcgagtgtacatccaccctgactcgcccgcaaccggcgcacactggatgcgccagcccgtctccttccaccgcgtcaaactcaccaattcaacactggacccccatggccatctcatactgcacagcatgcataaataccagcctcgcattcacttggtgcgtgctgcccagttgtgcagtcagcactggggcgggatggcatcattccggttccctgaaacaacattcatcagcgtcacagcctatcagaatccgcaaattacacagctcaaaattgcagccaatccatttgctaagggatttcgtgaaaatggccgtaattgcaagcggtgggaattgttcatccatcttttcatgcactccactaatgtttattag

SEQ ID NO: 137406 - DNA, 1974 bp, synthetic construct
  misc_feature 1..1974: note = Description of Artificial Sequence: Synthetic coding sequence
  source 1..1974: mol_type = other DNA
atggagatggagacaacggaacccgaaccagattgtgtggttcagccgcctagccctcccgacgacttcagttgtcagatgaggctctctgagaagatcacaccccttaaaacctgcttcaagaagaaggatcagaagcgattggggaccggaacccttagaagtttgcgtcctatcctgaacactctcctcgagtcgggatccttagacggggtattccgaagtcgcaaccagtcaaccgacgaaaacagcctgcacgagccgatgatgaagaaggcaatggaaatcaatagctcctgcccgcctgccgagaataacatgagtgtattgattccggatagaacgaatgtgggggaccagatacctgaagcgcatccctccaccgaagcaccagaaagggttgtgccaatccaagatcatagtttcccctccgaaactctgagcgggacagtggccgatagtaccccggcccattttcagaccgatcttctgcatcccgtttcttcagacgtccctacgagtcctgactgcctggataaagtgattgattacgtgcccggaatcttccaggagaatagcttcaccatccagtacatcttggatacgtccgataaactgagcaccgagctcttccaggacaagtctgaagaggccagtctggatctagtgtttgagctagtgaaccagctgcaataccacacccatcaggagaacgggattgaaatctgtatggattttctccaggggacatgcatttacggcagagactgcctcaaacaccatactgtgcttccctatcactggcagattaagagaacaaccactcaaaagtggcagtcggtgttcaacgactcccaggaacatctggaacggttctattgcaatccggagaatgataggatgcgcatgaagtatggggggcaggagttttgggctgacctcaacgcaatgaatgtgtacgagaccacagagttcgatcagctgcgtaggctctcgactcctccatctagcaatgttaattcaatttatcacaccgtctggaaatttttctgccgcgatcactttggctggcgcgagtaccctgaaagcgtaatcaggttaatcgaggaggcgaatagcagaggcctcaaggaggtcagattcatgatgtggaacaatcactacatcttacacaatagtttttttcgtagggaaattaagagaagaccgctgttccgttcctgctttatcctgctcccctacctgcagaccctcggtggtgtgccaacccaggcacccccaccactggaggcaacatcttccagccagataatctgccctgacggtgtcacatctgccaacttctatcctgagacgtgggtgtacatgcatcctagtcaggattttattcaagtgcccgtgagtgctgaagataaaagctataggatcatctataatctgtttcacaagaccgtgcccgaattcaagtaccgaatcctgcagatcctacgcgtgcagaatcagtttctatgggagaagtataagagaaagaaggagtacatgaatagaaagatgttcggccgcgaccggatcattaatgagaggcacttatttcacggcacctcccaggatgtggtggacggaatttgcaagcataactttgatccccgggtttgtgggaagcacgccaccatgtttgggcagggaagctactttgcaaaaaaagcatcctacagtcataacttttcaaaaaagtccagcaagggggtgcattttatgtttctggccaaagtgttaaccggaagatacaccatgggatcacacggcatgcgacgccccccccctgtgaatccaggatcagttactagcgatctgtacgactcttgcgtcgataactttttcgagccgcagatttttgtcatttttaatgatgatcaaagctacccatactttgtgatccagtatgaggaagtttctaatactgtatcaatttag

SEQ ID NO: 137407 - DNA, 1974 bp, synthetic construct
  misc_feature 1..1974: note = Description of Artificial Sequence: Synthetic coding sequence
  source 1..1974: mol_type = other DNA
atggagatggagactaccgagcccgaaccagactgtgtggtgcagccacccagtccgccagatgacttctcctgtcaaatgagactcagtgagaagatcacaccactgaagacatgcttcaagaagaaggaccagaaaagacttgggactggtaccctgaggtccctgagaccgatattgaatacactgctggagagcgggtccttggacggcgttttcaggtcaaggaaccagtcaacagacgagaacagcctccacgaacctatgatgaagaaggctatggagattaactctagttgtcccccagccgaaaacaatatgtccgtcctgattcctgaccggactaacgtcggggaccaaatcccagaggcccaccccagtaccgaagctccggaacgagttgttcccattcaggatcattcattcccgagtgagaccctcagcgggacagtcgcagattccacccccgcccactttcagacggatctgctgcacccagtgtccagtgatgtcccaacttcgcctgattgcctagacaaggtgatagattatgtcccgggcatttttcaggagaacagctttacaatccaatatatcttagacacaagcgataagcttagcacggagctcttccaggacaaaagcgaggaggcctctttagatttggtcttcgagctagtcaatcagctgcagtatcacacccatcaggaaaatggaatagaaatttgcatggattttctccaggggacttgcatctacggacgcgactgcctcaagcaccacaccgtgttaccctatcactggcagatcaagcgaaccaccactcagaaatggcagtcagtgtttaatgatagccaagaacaccttgaacgattctactgcaaccctgagaacgaccgtatgagaatgaagtatggtggccaggaattctgggccgatcttaacgccatgaacgtgtatgaaaccaccgaattcgatcagcttcggcgcctgtcaacaccaccctcttctaacgtcaactcgatctaccataccgtgtggaaatttttctgtcgagatcatttcggatggcgcgaataccccgagtctgtgatacgcctgatcgaagaggctaactcacgcggtctcaaggaagtcaggtttatgatgtggaataatcactatatattgcacaatagctttttcagaagggagatcaagaggaggcccctgtttaggagttgcttcatcctgttaccatatcttcaaacactcggcggtgtccccactcaagctccaccacctctcgaggccacttcatcctcacaaatcatatgcccagacggcgtcacgtccgccaatttctacccggagacatgggtgtatatgcatccctctcaagatttcattcaagtgccagttagcgccgaagacaagagctacaggatcatctacaatctatttcacaagacggtgcctgagtttaagtacagaatattgcagattcttcgggtgcaaaaccagttcctgtgggaaaaatataagcgtaagaaagagtacatgaaccgcaagatgttcgggcgggaccgaatcattaacgagaggcatttatttcatggcacgtcgcaggatgtcgtggacggcatctgtaaacataacttcgatcctcgagtctgcggtaaacacgctacaatgttcggacagggaagttacttcgctaagaaagccagctactcccacaatttcagcaaaaaatccagtaagggcgtgcatttcatgttcctggcaaaggtgttaacagggagatacactatggggagccatgggatgaggagacctccgcctgtcaatcctgggtctgtcacgtccgacctttatgactcctgtgtcgacaatttcttcgagccccaaatattcgtaatcttcaacgatgaccaatcatacccgtattttgttattcagtatgaggaggtatccaacaccgttagcatctag

SEQ ID NO: 137408 - DNA, 1521 bp, synthetic construct
  misc_feature 1..1521: note = Description of Artificial Sequence: Synthetic coding sequence
  source 1..1521: mol_type = other DNA
atggagatggaaacgaccgagccggagcctgactgtgtggttcagccgcccagcccaccagacgacttctcttgccaaatgagactgtccgagaagatcacgccgctgaaaacctgttttaaaaagaaggaccagaagcggttaggtaccgggaccctgcggagtctaaggcccatcctgaatactctgttggaatctgggagcctggatggggtgtttcgaagcaggaaccagtccactgacgagaacagcctgcacgagcctatgatgaagaaggctatggaaatcaacagctcatgcccacccgcagaaaataacatgagtgtgttgattccagaccgcacgaacgttggggatcagatacccgaggctcatcccagcacagaggccccggagcgcgttgtccctattcaggaccattctttcccttcggaaactctgtccgggacagtggccgactctacacctgctcatttccagaccgacttacttcatcctgtcagcagcgatgttcccacaagtccagactgcctggacaaagtgatcgattacgtacccggtatctttcaggagaattcatttaccatccagtacatcctcgacacctccgacaagctgtctactgagcttttccaggataagagcgaggaggcttctctggatttagtctttgagctcgtgaatcagctgcagtatcatacccatcaagagaatggcatcgaaatatgcatggactttctgcagggcacttgcatctacgggagggattgtttaaagcatcacacggtgttaccctaccattggcagattaagcggactaccacgcagaaatggcaatctgtcttcaacgattcacaggagcacctagagaggttctactgcaatcctgaaaatgatcgcatgcggatgaagtatggcgggcaagaattctgggccgatttgaacgccatgaatgtgtacgaaaccaccgagttcgatcaactgaggcgcctgagtacacctccgagtagtaatgtcaattccatctatcacaccgtttggaagttcttctgcagagatcacttcggttggcgtgagtaccctgaatcagtgataagactgatagaagaggccaatagtagaggtttaaaagaagtaagatttatgatgtggaacaaccattatatcttgcacaattcctttttcaggcgagaaattaagagacggcccctgtttagatcatgctttattctcctcccttacctccagaccttgggaggcgtccctactcaggcccctccccccttagaggccacttcttcttcacaaatcatttgccctgacggagtcacttctgcaaacttttatcccgaaacctgggtgtatatgcacccatctcaggatttcattcaagttccagtgagcgctgaagacaaatcatataggataatttacaacctgtttcataaaactgtgccagagtttaaatacagaattctgcagatactacgagtccagaaccaatttctgtgggagaaatag

SEQ ID NO: 137409 - DNA, 1965 bp, synthetic construct
  misc_feature 1..1965: note = Description of Artificial Sequence: Synthetic coding sequence
  source 1..1965: mol_type = other DNA
atggagatggagacaacagagccagaacctgattgcgtggtgcagcccccttcgccacctgatgacttctcttgccagatgcgtctgtccgagaagataaccccactcaagacctgcttcaagaaaaaagaccaaaagagactgggcaccggaaccctgagaagtctgcggccaatactaaatactctgttggagtctggatcactcgacggagtgtttcgaagtcgcaaccagagcaccgacgagaacagtctacatgagcctatgatgaaaaaggccatggaaattaattcaagttgcccccctgctgaaaacaatatgtctgtcctcattcccgacagaacgaatgttggtgaccagattccagaggcccacccctctacggaagcccctgagcgggttgtgccgattcaggatcattcatttccctccgaaaccctcagtggcaccgtggccgacagcacacctgcacattttcagacggacctgttgcatcctgtgagcagcgacgtgcctacatctcctgactgcctggataaggtgattgattacgtccctggaatttttcaagagaatagctttaccatccagtacatcctggataccagcgataagctgtccactgagctgtttcaggacaagtccgaggaagcttcgctggatctggtgtttgagttagtgaaccaattgcagtaccacactcatcaggagaatggtatcgaaatttgcatggatttccttcagggaacctgtatttatgggagggactgccttaagcatcacacagttttgccctatcattggcaaattaaacgcacaaccacgcagaaatggcagagcgtctttaatgacagtcaggagcacctggagagattttactgtaaccctgaaaacgacagaatgcgcatgaagtacgggggtcaggagttctgggctgatctgaatgctatgaatgtttacgaaactacggagttcgaccagctaagaagactaagcacgcctccgagctcgaatgtgaattcaatctaccataccgtctggaagtttttctgccgcgaccacttcggctggcgcgaataccctgagtccgtgatccgactgatcgaggaggccaattctcgaggtctgaaggaggtgcgcttcatgatgtggaacaaccactacattctgcacaactcattcttcaggcgggagataaagagacgaccattatttagatcctgctttatcctgttgccatacctgcagacactagggggtgtaccaacccaggcccctcccccactggaggccactagttccagtcaaattatctgccctgacggggtcacatctgccaacttttatcctgaaacttgggtgtatatgcatccatctcaagactttatccaggttccagtgagcgccgaagacaaatcttaccggattatctataatctgttccacaagacagtcccagaattcaaatacaggattctgcagatcctcagggtgcagaaccagtttctgtgggaaaagtacaagcggaagaaggagtatatgaacagaaagatgttcggacgggacaggattatcaatgagcgacacctttttcatgggaccagccaggatgtggttgatggaatttgcaagcacaattttgatcctcgcgtgtgtggtaagcacgccaccatgttcggtcaaggctcttactttgcgaagaaagccagctattcccacaacttctcaaagaagtcttccaagggcgtgcattttatgttcttagcgaaagtcctcactgggcggtacaccatgggctctcatggcatgaggaggcctccacctgtgaatcctggatccgttacctccgacctgtatgactcatgtgttgataatttcttcgagccgcagattttcgttatcttcaatgacgatcagtcgtacccctactttgtgatccagtacgaggaagtgtcaaacacctag

SEQ ID NO: 137410 - DNA, 1974 bp, synthetic construct
  misc_feature 1..1974: note = Description of Artificial Sequence: Synthetic coding sequence
  source 1..1974: mol_type = other DNA
atggagatggaaactacagagcctgagccagattgtgtggtgcagcctccatcgccgccagatgatttctcgtgtcagatgagactgagcgaaaagatcacacccctcaagacctgttttaagaagaaagatcagaagaggctcggaaccggcacacttagatccttgcggcctatcttgaatacacttttggagagtggtagcttggatggagtttttagaagccgcaaccagtctaccgatgagaactctttacacgaaccaatgatgaagaaagctatggagattaatagctcgtgtccacccgcagaaaacaacatgagcgtcctcattccagaccgcaccaatgtgggcgatcaaatcccggaggcacatccgtctacagaggctcctgagagagtggtaccaatccaggaccacagcttcccgtcggaaaccctttctggtactgtggcagactccactcccgctcatttccagaccgaccttcttcatccagtctcttccgacgtgccaaccagcccagattgtctcgataaggtaatcgactacgtgcctgggatcttccaggagaactctttcactatacagtatatactcgacaccagcgacaaattgagcaccgagctctttcaagacaagagtgaggaagcctcacttgacctggtgtttgaactcgtgaaccagctccaataccatacccatcaggaaaatgggattgagatctgcatggatttcctgcagggcacctgtatctatgggcgagactgccttaagcatcacactgttctgccataccattggcaaataaagagaactacaacacagaagtggcagtcagtgttcaatgattcccaggagcacttagagaggttttactgcaatccggagaacgatcggatgcgtatgaaatacggtggccaggaattttgggcagatctgaatgccatgaacgtatacgagactactgaattcgatcagctccgaaggcttagtacaccccccagttctaacgtcaattccatctatcacacagtgtggaagtttttttgcagggatcactttggttggcgggaataccccgagtctgtgattcggctgattgaggaagcaaactcaaggggcctgaaggaggtgcgctttatgatgtggaacaaccactatatcttacacaactcattcttccgccgtgagattaaacggcgacccctctttcgctcatgcttcatcctgttgccctacctgcagaccctggggggagtccccacccaagccccgcctccacttgaggctaccagctcttctcagatcatctgtcccgatggagtgactagcgccaatttttatcctgagacatgggtgtacatgcacccatctcaagacttcatacaggtccccgtgtccgcggaagacaagtcctataggataatttataacctcttccacaaaacggtgccggaatttaaatacaggattttacagattctccgtgtacagaaccagtttctctgggaaaaatacaagcgcaagaaggagtatatgaatcgaaaaatgtttggtcgcgaccgcatcatcaacgagcgacatttgtttcacgggacatctcaggatgtagtcgacggaatttgcaagcacaatttcgacccacgagtttgtggcaagcacgccaccatgttcggtcaggggtcatacttcgctaagaaggcatcgtatagccacaacttttctaaaaagtcctcgaagggggtccacttcatgttcctggctaaggtactgactgggaggtacacgatgggatcccacggcatgagacgtcctcctcccgtgaacccagggtcagtaacatctgacctctacgacagctgcgtggacaacttcttcgagccgcagatctttgtgatcttcaatgacgaccagagctatccttactttgtcattcagtatgaggaggtcagtaacaccgtatccatttag

SEQ ID NO: 137411 - DNA, 1974 bp, synthetic construct
  misc_feature 1..1974: note = Description of Artificial Sequence: Synthetic coding sequence
  source 1..1974: mol_type = other DNA
atggaaatggaaaccactgagccggagccggattgcgtcgtgcagcctcccagccccccagacgatttcagctgccagatgagactttccgagaagattacccctctgaagacatgcttcaagaagaaggaccagaaaagattgggtacggggactctccgctccctaaggcccatattgaatacgttactcgagtccgggtctctggacggcgtcttccgtagccgcaaccagtccactgatgaaaattcattgcacgaaccaatgatgaagaaagctatggagattaactcgtcatgcccgcctgccgaaaacaatatgtcagtgttaattcctgaccgcaccaacgtgggggaccagatccctgaggctcacccatctacagaagcccctgagcgggtggtgcctatccaggaccattcgttcccttctgaaactctgagcggcacagtcgccgactctacaccagcacactttcagacagatttactccatcctgtgagctcggacgtcccaacctcccccgactgcctggacaaagttatagactacgtaccaggtatcttccaggaaaacagtttcaccatccagtatattcttgacacatccgataagctgagcactgaactcttccaggacaagtctgaggaggcttcacttgacctagttttcgaactagtcaaccaacttcagtatcatacccatcaagaaaacggcattgagatttgtatggactttctgcagggaacatgcatatacggtcgggattgtctgaaacaccatacagtgttgccttaccattggcagatcaaacgaaccactacccagaaatggcagtccgtgtttaacgatagtcaggagcacctcgaacggttttactgtaaccccgaaaatgaccgcatgaggatgaagtacggcggtcaggagttctgggccgacctgaacgccatgaatgtatatgaaacaacggaattcgaccagctccgcaggctgtctactccgccttcctcaaatgtcaattccatttaccacactgtgtggaaatttttttgtcgagaccatttcggttggcgcgagtaccccgagtccgtgatcagactcattgaggaggccaactccaggggactcaaagaggtacgctttatgatgtggaacaaccattacattctccacaactcattcttccgcagagaaattaagcgcaggcctttgttccggtcctgttttatcctgctgccgtacctccaaacactagggggggtgcccacacaggctcccccgcctttagaagctacctcatcctctcaaattatttgtccggacggtgtgacatcagcaaatttttacccagaaacgtgggtttacatgcatccttcccaggatttcattcaagtgcctgtgagtgcagaggacaaaagttaccggatcatatataatctctttcacaaaacagtgccagaattcaagtatagaatattacaaatccttcgagttcagaatcagtttctctgggagaaatacaaaagaaagaaagagtacatgaacaggaagatgttcggacgggacagaattataaacgaaaggcacctgttccacgggacatcccaggacgtagttgacggcatctgcaaacacaatttcgatccgagggtctgtgggaagcacgctactatgtttgggcaaggtagctatttcgctaaaaaagcttcctattctcacaacttcagcaaaaagtccagcaagggggtccatttcatgttcctggccaaagtgcttaccgggaggtacacaatgggaagccacggtatgaggcgcccccctcctgtgaatcccggctctgttacatccgatctctacgatagctgcgtggacaacttcttcgagccacagatattcgtaattttcaatgatgatcagtcttatccatatttcgtgatccagtacgaagaagtgagtaacacagtctcaatttag

SEQ ID NO: 137412 - DNA, 1662 bp, synthetic construct
  misc_feature 1..1662: note = Description of Artificial Sequence: Synthetic coding sequence
  source 1..1662: mol_type = other DNA
atgggcgcactggaaatgcaggatgaagaagatcgcattgaagccttgaaacaggtcgctgataagttacctcgaccaaacctgctcctgttgaagcatctcgtttacgtgctccaccttatcagcaagaacagcgaggttaatcggatggactcatctaacctcgccatttgcatcgggcccaacatgctgaccctggaaaatgaccagtctctgagcttcgaagcccagaaggatctcaataacaaagtgaaaacacttgtggagttccttattgataactgcttcgagattttcggtgagaacattccagtgcactcctcgattacatccgatgactctctcgagcatactgattccagtgatgtgagtactctgcagaatgatagcgcctacgactctaatgacccagacgtggagtcaaacagctcttccggaatctcgtcaccttccaggcagcctcaggtcccgatggccacagcggctggcctggatagtgccggtccacaggatgctcgggaggtttctcccgaacccatcgtttctaccgtggcgcgtttgaaatcttcactcgcgcaacccgataggcgttactctgaaccgtcaatgcccagctcccaggagtgtttagagagtagggttactaaccagacgctgacaaagtctgagggagacttccctgttccaagggtgggctctcgacttgagtcagaggaagctgaggatccgtttccggaagaagtatttcccgctgtgcagggcaagacgaagaggccggtcgaccttaaaattaagaacctggcccccgggagcgtgcttcctagagcccttgtgttgaaggcatttagctctagctcactggatgctagctccgattcctcccctgtcgctagcccatccagtcccaagcgcaacttcttcagcaggcaccagtctttcaccacaaaaaccgagaagggtaagccaagccgggagataaagaagcacagcatgagtttcacttttgcgccacataaaaaggtgctcactaaaaatctaagcgccggttcaggaaagagccaggactttacaagagatcacgtcccgcgcggcgttagaaaagagtctcagctagctggacggatcgtccaggaaaacggttgcgaaacccacaaccagacggccagaggcttctgtttgcggcctcatgctttgtctgtggacgacgtgtttcagggcgccgattgggagagacctggcagccccccctcatacgaagaggccatgcaggggccggccgccaggctggtagccagtgaatcacagacagtgggaagcatgaccgtcggctcaatgagggcccgcatgttggaggctcactgtcttttgcctcctctcccacctgctcaccacgtcgaagactcccggcacagaggcagcaaggaaccactcccagggcatggcctgagtccattaccagagcggtggaaacaaagtcgtacagtgcatgccagtggcgactccctgggccatgtgagtggtccagggaggcctgagctgctgccactccgcactgtttccgaatctgttcagagaaataagagggattgcctcgtgcgccgctgttcccagccagtttttgaagctgaccagtttcaatatgccaaagagtcctacatttag

SEQ ID NO: 137413 - DNA, 801 bp, synthetic construct
  misc_feature 1..801: note = Description of Artificial Sequence: Synthetic coding sequence
  source 1..801: mol_type = other DNA
atgaagctcagatctagccacaacgcaagcaaaacactgaacgccaataacatggaaacacttatagaatgccagtctgagggcgatattaaggagcatcctttgctcgccagctgcgagtctgaggactctatttgtcagcttatcgaagtgaaaaagcgcaagaaagtcttatcctggcctttcttgatgcgccgactgagtcccgctagcgacttttctggggccctcgaaaccgacctcaaagctagcttgttcgatcagcctctgtctatcatttgcggggattccgataccttgccaaggcccatccaggacatccttacaattctgtgcttgaagggtccgagtaccgagggcatttttcgtcgcgccgctaacgagaaggcacgaaaagagctgaaggaggagttgaatagtggcgacgcagttgatctggaaagactccccgttcacctcctggcagtggttttcaaagacttcctgcgctccatccctcgcaagctacttagctccgacttgttcgaggaatggatgggggctctggagatgcaggacgaggaggacagaattgaggctcttaagcaggtagcagataaacttccgcggcccaacctcttgcttttgaagcacttggtctatgttctgcacctaataagtaagaactccgaggtgaatcgaatggattcctcaaatttggcaatatgtatcggtcctaatatgctcactctggaaaatgaccagagcctgtcatttgaggcccagaaggacctgaacaataaagtttgctcagcgtactag

SEQ ID NO: 137414 - DNA, 2196 bp, synthetic construct
  misc_feature 1..2196: note = Description of Artificial Sequence: Synthetic coding sequence
  source 1..2196: mol_type = other DNA
atgaagctgaggtcgtctcataacgcgagcaagacattgaatgctaataatatggagacacttattgaatgtcagtctgagggggatattaaggagcacccgctgctcgctagctgtgaatctgaggactccatatgtcaattaatcgaggttaagaaaaggaagaaagtcctgtcatggccgtttttgatgagacggctgagcccggctagcgacttctcaggcgcgttggagacggacctcaaggccagcctcttcgaccagcccctgagtataatctgtggagacagtgacacactcccaagacctatccaagacatcctgaccatattgtgcttgaaggggccaagtactgagggaatctttaggagggccgctaatgaaaaggctagaaaagaactcaaggaggagctcaattcgggcgacgccgtggatctggagagactcccagtgcatctgcttgctgtggtcttcaaagactttctgcgctcgatcccccgtaaacttctgtcttccgatctgtttgaagagtggatgggtgccctcgagatgcaggatgaggaggatcgaatcgaggcactgaagcaggttgctgataagctgccacgacctaacttactgctgttaaagcatctggtgtacgttctgcacctgatcagtaaaaactccgaggtcaaccgcatggactcaagcaacctagccatatgtatcgggcccaacatgttaactctggagaatgatcagagcctttctttcgaggctcagaaggacttgaacaataaagtgaagactttggttgaattcctgatcgacaactgttttgagattttcggcgagaatatccccgtgcactcctccatcactagcgatgacagtttggagcacactgactctagtgacgtcagtactctgcagaacgattcagcttatgactccaacgaccccgatgtggaaagcaattcaagctctggcatcagcagtccaagcagacaaccgcaagtgcctatggcgacagccgccggcctggatagcgccggtccccaggacgccagagaggttagtcctgagcccatcgtgtccacagtggctcgcttgaagtccagtctggcgcagcccgatcggagatactcagagcctagtatgccaagctcacaagaatgtttggaatcaagagtgaccaaccagacgctaaccaagtccgagggtgacttccctgtgcctagggtaggaagcagactggagagcgaggaagcggaggatcccttcccagaggaggttttccctgctgttcagggaaagactaagcggccggtggatctcaaaataaagaatttggctcccgggagcgtcctgccacgcgcgcttgtcctgaaggctttcagttcgagttcactcgacgcatcaagtgatagttctcctgtagcctccccttcatctcctaaacggaatttcttttcacgccatcagtctttcacaactaagaccgagaagggtaagcccagcagggagataaaaaaacatagcatgtcattcactttcgcgccacacaaaaaggtgttaaccaagaacctgtctgcaggttcaggcaaatcccaagatttcaccagagatcatgtgcctaggggcgtgcggaaggagtctcaactggccggacggatcgtgcaagaaaatggatgtgagacccataatcagacggcccgggggttctgccttaggccacacgctctgagcgttgacgatgtgttccagggagcggattgggaaaggcctgggtctccccctagctacgaggaggccatgcaggggccagcagcccgcctcgttgcctcagaatcccagacagtcgggagcatgactgtgggcagcatgcgtgcaaggatgctggaggcccactgtctgctccctcctctgcctcccgcccatcatgtcgaagattctaggcaccgcgggtcgaaagaaccactgcctggccacggcctgagtccactcccagagcggtggaaacaatcccggacagtgcacgcctctggcgatagcctgggccatgtgtctggaccaggtcgccctgagctgctccccctaaggacagtgagcgagagcgttcagcgcaataagagagactgtctggtacgccggtgcagtcaaccagtttttgaggcagatcaattccagtacgcaaaggagtcctacatttag

SEQ ID NO: 137415 - DNA, 828 bp, synthetic construct
  misc_feature 1..828: note = Description of Artificial Sequence: Synthetic coding sequence
  source 1..828: mol_type = other DNA
atggcaaccgcagccggtctggatagcgcagggcctcaggatgcacgtgaagtcagccccgagccgattgtatccaccgtggcccgtttgaaaagcagccttgcgcaaccagaccggaggtacagtgagcccagcatgccgagctctcaggagtgcctagagagtagagtcactaatcaaactcttaccaaatcagagggtgatttcccggtacccagggtgggtagccgcctggagtccgaggaggctgaagacccattccccgaagaggtctttccagcagtgcaaggtaaaacaaagagacctgtagacctgaagatcaagaatctggcacccgggtctgttctgcccagagcactcgtgctcaaagcattttcaagttcatccctggatgcgtccagcgacagttcccccgtggcctccccttcaagccccaaacggaattttttcagtaggcatcagtccttcacaactaaaactgagaagggaaaaccatctcgggagattaaaaagcatagcatgagctttacttttgccccgcataaaaaagtcctgactaaaaacctctcagccggaagcggcaagtctcaggatttcactagggaccacgtgccgcgaggagttcggaaggaaagtcagctcgccggaagaatcgtgcaggaaaacgggtgcgagacccacaatcagacagctaggggattttgcttgcgtcctcacgccctatcggtcgatgacgtgttccaaggggctgactgggaacggccaggctcaccgccaagctacgaagaagcgatgcaaggcccagcagctagaccatggggagcttag

SEQ ID NO: 137416 - DNA, 327 bp, synthetic construct
  misc_feature 1..327: note = Description of Artificial Sequence: Synthetic coding sequence
  source 1..327: mol_type = other DNA
atgacaagaaagatcttcaccaacacaagagagcgctggaggcaacagaatgttaactccgctttcgctaagctgaggaaactgatccccacacatcctccggacaagaagctgagtaagaatgagaccctccgcttggcaatgcgatacattaactttctggtcaaggtgcttggggagcaatcactgcaacagactggcgtggcagcccaagggaacattctggggctttttcctcagggacctcatcttcctggactggaagatcggacccttcttgaaaattaccaggtcccatctcccgggccatcccaccacatcccatag

SEQ ID NO: 137417 - DNA, 780 bp, synthetic construct
  misc_feature 1..780: note = Description of Artificial Sequence: Synthetic coding sequence
  source 1..780: mol_type = other DNA
atggccagcccacagggtggccaaattgctattgctatgagattaaggaaccagctccaatcggtgtataaaatggatccactgagaaatgaagaggaggtgcgtgttaaaataaaggatctgaatgaacatattgtgtgctgtctctgtgccggctattttgtggacgctactacgattaccgaatgcctgcataccttttgcaaatcttgcatcgtcaaatatctgcaaacatccaaatattgccccatgtgtaacataaaaattcatgagactcagcccctgctgaatttgaagctcgatagggttatgcaggacattgtctataagttggtcccaggactccaggactccgaggaaaaacggattagggagttctaccaaagcagaggcctggatcgagtgacacagcccacaggtgaggagcccgcactcagtaacctgggacttccattctccagctttgatcattcaaaagctcactactaccgatacgatgaacaactcaacctttgtctggaacgtctgtctagcggcaaggacaaaaacaaaagcgtgttgcagaacaaatatgtcagatgcagcgtccgcgccgaagtcagacacttgcggcgggtcctgtgtcaccgcttaatgcttaacccacaacacgtgcagctcctgttcgacaacgaagtcctacccgatcacatgacaatgaaacaaatctggcttagtaggtggtttggtaagccatcccctctccttctgcagtattcagtgaaggagaagcggcgctag

SEQ ID NO: 137418 - DNA, 876 bp, synthetic construct
  misc_feature 1..876: note = Description of Artificial Sequence: Synthetic coding sequence
  source 1..876: mol_type = other DNA
atggaagcccctgccagcgcccagacgccccacccccatgaacccataagttttgggatagaccagatcttgaattctcccgatcaggactctgcacccgcgccaaggggacctgacggagcctcatatctgggcgggccacctggcggtaggcccggagctacctatccatctttacccgcaagttttgcaggcctaggagcccccttcgaggatgctggctcgtactcggtgaatctgagtttggcaccggcgggagtgatccgagttcctgctcatcggcccctgcccggggcagttcccccgcctcttccctccgccttaccagctatgcccagtgtgcctaccgtgtcatccctgggcggcctaaattttccctggatggagagctcacgtaggttcgtgaaagatcggttcacggcagcagctgctctgaccccattcacagtgacacgccggatcggccacccttaccaaaaccggacaccgccaaaacgaaagaagccacgcacatcttttagcagggttcagatatgcgaattggaaaagaggtttcacaggcagaaatacctcgcctccgcagaacgggctgccttagccaaatcacttaaaatgaccgacgcccaggtgaagacctggtttcagaacaggaggacaaaatggaggcgtcagaccgccgaagagagggaagccgaaaggcagcaagcttctcggttgatgctccaactgcaacacgatgcctttcagaagtccctgaacgattctattcagcccgatcccctgtgtctgcacaatagctctctattcgctctgcagaacctgcagccgtgggaggaggactcctctaaggtgcctgccgtcaccagtttggtgtag

SEQ ID NO: 137419 - DNA, 312 bp, synthetic construct
  misc_feature 1..312: note = Description of Artificial Sequence: Synthetic coding sequence
  source 1..312: mol_type = other DNA
atggccgagtcttggagcggacaagccttgcaggccctgcctgccacagtgttaggcgccctcggctccgaattcctcagagaatgggaggctcaggatatgagggttaccttgttcaagctgctcctcctatggcttgtgctttccttgctgggaatacagctcgcatgggggttttatggaaatacagtgaccgggctctaccatagacccggactgggtggccagaatggctccacgccggatggaagcacccacttcccatcctgggaaatggccgccaacgaacccttgaagacccaccgagagtag

SEQ ID NO: 137420 - DNA, 387 bp, synthetic construct
  misc_feature 1..387: note = Description of Artificial Sequence: Synthetic coding sequence
  source 1..387: mol_type = other DNA
atggcctccgaggcttctgttcggctgggggtgccccccgggcgcctatggatccaacgccccgggatctacgaggacgaagagggtagaacgtgggtcacagtggtggtacgattcaatccttcgcgccgtgagtgggcacgcgcctcacagggttccaggtatgagcccagcatcactgtccacctgtggcagatggccgttcatacgagggagctcctatcctctggacagatgccattttcccagctgcccgctgtctggcagttgtaccccgggagaaaatacagggccgcagatagctccttttgggaaatcgcagaccatggccagatcgattcaatggaacagctggtgctcacttaccaacccgaacggaaggactag

SEQ ID NO: 137421 - DNA, 387 bp, synthetic construct
  misc_feature 1..387: note = Description of Artificial Sequence: Synthetic coding sequence
  source 1..387: mol_type = other DNA
atggctagtgaggcctcagtgcgcctcggagtcccaccaggcaggttgtggatccagcggcccgggatctacgaagacgaggaaggcagaacatgggtcacagtggtggttcgattcaacccctctagacgggaatgggccagagcatcacaaggaagtcgatacgagcctagtatcacagtccacctctggcagatggcagtccacacgcgcgagctgctatcttccggccagatgcccttttcccagctccctgctgtgtggcagctgtatccgggtcgtaagtatagagccgcggactcttcattttgggaaatcgcggaccacggccagatagacagcatggagcagctggttttgacttaccagccagaacggaaggattag

SEQ ID NO: 137422 - DNA, 4776 bp, synthetic construct
  misc_feature 1..4776: note = Description of Artificial Sequence: Synthetic coding sequence
  source 1..4776: mol_type = other DNA
atgggcaatgccgagagccagcatgtcgagcacgaattttatggggagaagcacgcctcgctcggtaggaagcatacttcaagatctctgagactgagccacaagactaggcgcacgaggcacgcttcttcaggaaaggtgatccataggaactccgaagtaagcactagatcttcaagcactccgtccatcccgcagagtctggcagaaaacggcctggaacccttttcacaggatggcacattggaggatttcggctctccaatatgggtggacagggttgatatggggcttaggccagtctcatacactgacagctcagtaacccctagcgtcgactcgagcatcgtgttaaccgccgcctccgtgcagtctatgccagacaccgaagagtctaggctgtacggtgatgacgcgacatatcttgcagagggagggcgaagacaacactcatacactagcaatggtcctactttcatggaaaccgcttcatttaagaagaaaagatcaaagtctgcagatatttggcgcgaggactcgctggaattctcccttagcgatttgagccaggagcacctgacttcgaacgaagagatactcggatccgccgaggaaaaggattgcgaagaagcccgggggatggagactcgcgcatcccccaggcagttgagcacctgtcaacgggcaaacagcctcggggacctgtacgcgcaaaaaaactctggagtcacagctaacggagggcctgggagtaaattcgcagggtactgccgcaaccttgtctcagatatccccaacctcgccaaccataagatgccgccagccgctgctgaggaaactcccccttatagtaactacaacactctgccctgtaggaagagtcactgcctgagcgagggcgcaaccaatcctcaaattagccactctaatagcatgcaaggacgccgggccaagaccacccaagacgtgaacgccggcgagggctctgagtttgcagatagtggtatcgaaggggctaccacagataccgatctcctgagccggagatccaacgcaactaactcttcctactccccaaccactggaagggcattcgtcggcagcgactccggtagttcctctacgggtgacgctgccaggcagggagtgtatgaaaacttccggagggagctggaaatgtctacaacgaatagtgagtcccttgaggaggctggctccgctcacagcgatgaacagagtagcgggacactgagctcccctgggcagtcagacattctgttgacggcagcgcagggtacggtgcgcaaggcgggggccctggctgttaaaaattttctcgtgcacaagaaaaataagaaagtcgaaagtgcaacaaggcgtaagtggaagcactattgggtgtccctgaagggatgcactctgtttttctatgagagcgatggccggtccgggattgatcataattcgattccaaagcacgcagtgtgggtcgaaaattcgatcgtgcaggctgtgcctgagcaccctaagaaagactttgtcttctgtctatcaaacagcctaggtgatgcgttccttttccagaccacctcccagaccgagctcgagaactggatcaccgccatccattccgcctgtgccactgcagtggccagacaccaccataaagaagatacgttacgcctactgaagtcagagataaaaaagctggaacagaagattgacatggatgaaaagatgaaaaaaatgggtgaaatgcagttaagcagtgtgactgatagcaaaaaaaaaaagacaatcttagaccagatcttcgtgtgggagcaaaatctggagcagtttcagatggacctttttagatttcgatgctacttggcgtccctgcaggggggcgagctgcccaaccccaagcggctgctggcatttgcctcaagaccaactaaggtggccatgggcagactgggcattttctccgtctcctccttccatgccctcgtcgcagcacggacaggggaaaccggagtccgccgccggacccaagccatgtctagatccgcatcgaagagaagaagccggttttctagtctctggggactggatactacaagcaaaaaaaagcagggacgccccagcataaatcaggtatttggcgaaggcacggaggcagttaaaaaatcccttgagggaatatttgacgacatagtacctgacggcaagagagagaaagaagttgtattgccaaacgtgcaccaacataatccagactgtgacatttgggtgcacgagtacttcacaccaagttggttttgcttgccaaacaaccaaccggccctgaccgtggttcggccgggcgacacagcaagggatactttagagcttatctgcaagacgcaccaactggaccactctgcgcattacttgcggctcaagttcctgattgagaataaaatgcagctgtacgtgcctcaacctgaggaggacatctacgaattgctgtataaggaaatagagatctgcccgaaggtgacccaatctatccacatagagaagtctgacacagctgctgacacctatggcttctctctgagctcagttgaagaagacgggatccgtcgcctttatgttaattctgttaaagagacaggactggcctctaaaaagggactgaaagctggcgatgaaatccttgaaattaataatcgggctgctgatgctctgaactcatcgatgcttaaagacttcctgagtcagccctctctcggtctactggttcgaacgtatcccgagctggaggaaggagtggaactgctggaatcccctccccaccgcgtggacggaccggcagacctgggtgaatctccactggctttcctcacctctaaccccggccactcgctctgttctgaacagggatcaagcgcggagacggcaccagaggagaccgaagggccagatctggaaagctccgacgaaacagaccacagctccaaatctactgagcaagtggctgctttctgtcggagtctgcacgaaatgaatccgagcgatcagagtcctagcccccaggattcaactggcccacaattggctacaatgcgacagctatctgatgcggataagctgagaaaagttatttgtgagctgttggaaacagaacgtacatacgtgaaagacttaaattgcctaatggaaagatatctgaagcccctccagaaggagaccttcctgacacaggacgaacttgacgtgctgttcggcaacctgacggagatggtcgaattccaggtggaattcctcaagaccctggaggacggcgtgcgcctggtgccagatctggagaaactggagaaggtggaccagtttaagaaagtgttgttttcacttgggggttcatttctttattacgcggacaggtttaaactgtactccgcattttgcgcctcgcatacgaaagtccccaaagttctcgtcaaggccaaaaccgacaccgcctttaaggcctttctggatgctcagaaccctaagcagcaacatagctcgacactggagtcctatctgatcaagccgatccagaggattttgaagtacccattgttgcttagggagctctttgccctaaccgatgcggaatcagaggagcactatcacctcgacgtggcaatcaagacaatgaacaaggtggctagtcacattaatgagatgcagaagatccacgaagagtttggcgctgtcttcgaccagctgatcgcggagcagaccggagaaaagaaagaagtggcagatctgtccatgggagatcttctgctccacaccacagttatatggctgaacccacctgcatctctcggaaagtggaagaaagaacctgaactggctgcattcgtctttaaaacggctgttgtgctcgtctacaaagatggctcgaagcagaagaagaaactggttggctcacaccgcctgagcatctatgaagattgggacccatttaggttccgacatatgatccctaccgaggctctgcaggtgagagccctggcatcagccgacgctgaggcgaacgcagtctgcgagattgtgcatgttaaaagtgaatccgagggcagacctgagcgtgtttttcacctgtgttgctcaagccccgaatcccgcaaggacttcttgaaggcggtgcattcaatcctccgggataagcaccgccgacagctcctcaagacagagagtttaccatctagccagcaatacgtcccattcggcggcaagcgactgtgcgctctcaagggcgcaaggccagccatgagtagggccgtgagcgcgccatcaaaatcgctgggcagacgtcggcgccgcctggcacgaaatcgctttacaattgattctgacgcagtcagcgccagcagccccgagaaggagtcccagcagccacctggtggaggcgataccgacaggtgggtggaggagcaattcgacttagcccagtatgaggaacaggacgatatcaaggaaacggacatcctgtcggatgatgatgagttttgcgagtcagtaaagggggctagcgtggatcgagatctgcaggagcgccttcaggcaacgtccatttctcagagggagcggggcaggaaaactcttgatagtcacgcttcgcgcatggcccaactgaagaaacaggccgcactgtctggtatcaacggtggcctagaatctgcatcagaagaagtcatatgggtgcggagggaagatttcgctccctcgcgtaagctcaatactgaaatctag

SEQ ID NO: 137423 - DNA, 3216 bp, synthetic construct
  misc_feature 1..3216: note = Description of Artificial Sequence: Synthetic coding sequence
  source 1..3216: mol_type = other DNA
atggaaactgcttcttttaaaaaaaaacgctctaaatccgcagacatttggagggaggattctttagagtttagcttgagcgacctgtctcaggaacacctcacaagcaacgaagaaattctgggaagcgcagaagaaaaggattgcgaggaggcacgggggatggaaacacgggcctcccctcgccagttatctacctgccagcgggctaactctctaggcgatctgtacgcccagaaaaacagcggtgttaccgcgaatggaggcccggggagcaagttcgcgggctattgccgcaacttagtctccgatatcccaaacctcgccaatcacaagatgccacccgcagctgcagaggagactccgccctattctaactacaataccctgccatgcagaaaaagccattgcctgtcagagggcgcaaccaacccccagataagccatagcaatagcatgcagggaaggcgggctaaaactactcaggatgttaacgccggcgagggcagcgagttcgctgactctgggattgagggcgcaacaaccgacacggatctgctttcccgcaggagcaatgctactaattcgtcatatagtccgaccactggtagggcctttgtgggtagtgattcaggatcctcatcaacaggcgacgcagcaaggcaaggtgtctatgaaaattttaggagagaacttgaaatgtctaccacaaatagtgaatcactggaagaggccggcagtgcccactctgacgagcagtcctctggaaccctgagcagccctgggcagagcgacatcttgctaaccgcagctcagggcacagtgaggaaggcaggcgctttagctgtgaagaattttctggtgcataagaaaaataaaaaggttgagtcagcgacccgcaggaagtggaaacactattgggtcagtctgaagggttgtacgctttttttttatgagtctgacggccggagcggaatcgatcacaatagtatacctaaacacgccgtttgggtggagaattctatcgtccaggctgtccctgaacatcccaaaaaggatttcgtcttctgcctgtctaactccctcggggacgcattcctgtttcagaccacctcacagaccgagctggagaattggataactgcaatacactccgcttgtgcaacagctgtcgcacgccaccaccacaaggaggataccttgaggctgctgaagtctgagattaaaaaactagagcaaaaaatcgatatggatgaaaagatgaaaaagatgggggagatgcaactctcatcagttactgattcaaaaaaaaagaagacaatcctggatcagatttttgtctgggagcagaacctagagcagttccagatggatctgtttagattccgatgttacctggcaagcttgcaggggggggaactgccgaatcccaagcggctgctggcatttgcctctagacctacaaaggttgccatggggagactcggaatcttcagtgtctcttctttccacgccctggttgccgcacggaccggcgaaaccggggtcagacgacgcactcaggctatgagcagaagcgcttccaagcgcagatctagattctcctcactgtggggcctggatacaacaagtaagaaaaagcagggccgtcccagcattaaccaggtgtttggtgaaggaactgaagcagttaaaaagtccctggaagggatctttgatgatatcgtaccggacggcaagcgggagaaggaagttgtgctccccaacgtccatcaacataatcccgactgtgacatctgggtccacgagtactttactcctagctggttttgtttgccaaacaatcagcccgcactaaccgtggtgcgccccggtgacactgccagggacactttagagttgatatgcaaaacccaccaactcgaccactcggcacactacttgagactgaagttcttgattgaaaacaaaatgcaactgtatgtaccacagcctgaagaggatatatatgagctcctctataaagaaatcgaaatttgcccaaaggtgactcagtctatacacatcgagaagtcagacacagctgcagatacatatggcttttctctgagcagtgtggaagaggacggcatccgccgcctgtacgtaaactctgtgaaggaaaccgggctcgcctccaagaagggattgaaagccggggacgaaatactggaaatcaataatagagccgccgatgctctgaatagctctatgcttaaagatttcctgtctcagccatccctgggattgctcgtaaggacatacccagagctagaagagggcgttgaattactcgaatccccaccacatcgggtggatggtccggctgacttgggcgaaagcccattggcattcctgacaagcaaccccgggcattcactgtgctctgagcagggatctagtgccgaaacagcccccgaagaaacagaaggaccggacttggagagtagtgatgagacagatcactcctctaagtcaaccgaacaggttgcagccttctgccgttcccttcacgaaatgaatccatcggaccaaagtccgtctcctcaagattccacaggaccccagttagctacaatgagacagctttcggatgcggataaattgaggaaagtgatctgcgaactgctggagaccgaacgtacgtacgtgaaggatttgaactgcctaatggagagatacttgaaacccctacagaaggagacctttctgacacaggacgagctggacgtgttatttggcaatcttacagaaatggtggaatttcaggtggaattcctgaaaacgctggaagatggggtgagactggtcccggatctcgagaaattagaaaaagttgaccaattcaaaaaagtcctgtttagcctaggcggatctttcctgtattacgccgacagatttaagctttatagtgccttctgcgcccataagagcagccaggggccaggagaatctcaggacagacacggctttcagggtattttgggctgccctgagcccgaggccgctgccctcatccacgcgggtgtggtacctcatcaagcacatcctgaagatccccaggttcccacatcagctcaaggcgcagtgaggcccgatcgctgtggagagcgaggggctttgcctccaggccgagggcatcaggatcacgaacaaggctgtcagagccatcaatag

SEQ ID NO: 137424 - DNA, 678 bp, synthetic construct
  misc_feature 1..678: note = Description of Artificial Sequence: Synthetic coding sequence
  source 1..678: mol_type = other DNA
atggggaacgctgagtctcagcacgtggagcatgagttttatggtgagaaacacgccagtctgggacggaagcacacgagcagaagtttgaggttgagtcataagactcgccggacccgccatgcatcaagcggaaaagtgatccaccgtaatagcgaagtgtccacccgctcctcaagcaccccgagtattccccagtcactggcagagaacgggctggaacctttctctcaagatggcacactcgaggattttggctctccaatatgggttgatcgagtcgacatgggtctccggcctgtgagctacaccgactcttccgtgaccccctccgtggactcatctattgttctgactgctgccagcgtgcaaagcatgcccgataccgaagagtcgaggctgtatggggacgatgctacatacttagccgagggagggcgccggcagcactcatacacctctaatggaccgacatttatggaaaccgcttcttttaagaaaaagaggagtaagagcgctgacatttggcgggaagatagtctggaattcagtctctctgatctctcccaggagcacctgacctctaacgaagagatactgggctcagccgaggaaaaagattgtgaggaggctcggggaatggagactcgcgcctcaccccgacaactatccacgtag

SEQ ID NO: 137425 - DNA, 4596 bp, synthetic construct
  misc_feature 1..4596: note = Description of Artificial Sequence: Synthetic coding sequence
  source 1..4596: mol_type = other DNA
atgggaaacgcggaatctcagcacgtagaacacgagttttatggggagaaacatgcctctttagggaggaagcacacttcccgatctcttaggctgtcccataaaacacgaaggaccagacatgccagttctggaaaggttattcacaggaactctgaggtatccacccgtagctcctctactccctctatcccccagtccttagccgaaaacggactagagccgttctcccaggacggcactctggaggattttggtagccctatttgggtcgacagagtcgatatgggactgcggccagtgtcgtacaccgatagtagcgtcacgccttccgtggactctagcatagtgctaacggccgcgtcagtacaatccatgcctgacaccgaggagtcccggctgtatggggacgatgcgacatacttggccgagggagggagacgacaacattcctacacctcgaacggtccaacatttatggaaactgcctctttcaagaaaaaaagatcaaaatctgccgatatttggcgtgaggattcactggaattcagtctgagtgacttgtcacaagaacatcttacgagtaacgaagagatcttggggagcgcagaagaaaaggactgcgaggaggccagagggatggaaacaagagcctcaccacgccaactttccacttgccagcgtgctaattctcttggcgacctttacgcacaaaaaaattccggcgtaacagccaatggcgggcctgggtcaaagttcgcggggtattgcaggaacttagtgtccgatatcccgaacctcgcaaatcacaaaatgcctccagctgccgccgaggagacaccgccgtattccaattacaacactcttccgtgtagaaagtcacactgtttgagcgaaggcgctactaaccctcagatctctcattcaaatagcatgcaaggccgcagagccaagacaacccaagatgtcaatgccggggaagggagcgaatttgctgacagtggcatagaaggcgcaaccaccgatactgacttacttagtagaaggagcaacgcaaccaattcatcttatagccccactacgggcagagcctttgttgggagtgactcgggaagctcctccactggcgatgccgcccgccagggcgtctatgaaaattttcgccgggaactggagatgtcaaccaccaatagtgagtccctcgaggaagccggcagcgcccactctgacgaacagagctctggaacactctcaagtccaggtcagtcagatatcttattaacagccgcccagggtaccgttaggaaggccggggccctcgccgtgaagaattttctcgtacataagaagaataagaaagtggaaagcgcaacccggcgaaagtggaaacactactgggtaagcctgaaagggtgcaccctgttcttttatgagtccgacggtcgcagcggcatcgaccacaactcgataccaaagcacgccgtgtgggtggagaacagcatcgtgcaggccgtgcccgagcaccccaaaaaagattttgtgttctgcttaagtaattccctgggggatgctttcctcttccaaaccacaagtcagacggaacttgagaactggatcacagcaattcactctgcatgcgccacagcggtggcacggcatcaccataaagaggacacccttcgactactcaagtctgagattaaaaagctcgagcagaagattgatatggacgaaaagatgaaaaagatgggagaaatgcaactgtcctctgtgactgattccaaaaagaaaaaaacaatcttggaccagatttttgtctgggagcagaacctcgaacagttccaaatggatttgtttcggttcagatgttacctggcatctcttcaaggtggggaattgcctaatcccaagcgtctgctggcttttgccagcaggccgactaaggtagccatggggcgactcggcatcttttcagtctcatcctttcacgctttggtggccgcccggactggagagaccggagtgagaagaagaacacaggcaatgtctcgatcggcctctaaacgtagatcccggttctcgagcttgtgggggctggacacaacttcgaagaaaaaacagggccggccatcaatcaatcagcgagagaaagaggtcgttctgcccaacgtgcatcagcataatcctgactgtgacatctgggtccatgaatactttactccaagttggttctgtctccccaataatcagcccgcactcactgtggtaaggcccggcgataccgctcgcgatacgctcgagctgatctgtaaactgtacaaagaaattgaaatctgccccaaagtcactcagtccatccacatcgaaaagagcgacacggcagccgatacatacggcttttccttaagcagcgtggaggaggacggaatcagaagactatacgtgaatagcgtcaaagaaactggtctggcgtccaagaagggccttaaggccggagacgaaatcttggaaattaacaatcgggcagccgatgcattgaattcttcaatgctgaaggactttctgagccagcctagcttgggactgttagtgagaacctatccggaactcgaggagggtgtggagttactggagagcccccctcaccgggtggacggcccagctgacctgggtgagagtcctctggctttcctgacgtccaacccgggccattctttatgcagcgaacagggcagttcagcggagacggcccccgaagaaaccgaaggtcctgacctggagtcctctgatgagaccgaccacagttctaaatcaacagaacaggttgccgcattctgcaggagtcttcatgaaatgaatcctagtgatcagagcccatcacctcaagatagtacagggcctcaactggcaactatgcgccagctgtctgatgcggacaaattaagaaaggtcatttgcgagctgctggaaacggaacggacctatgtgaaggatctgaactgtttaatggagcgctatctgaaacccctccaaaaagaaactttcctgactcaggacgaactggatgtgctcttcgggaacctcaccgagatggtagagtttcaggtggagtttctgaagaccctggaggacggtgttcggctggtcccagacctcgagaaactcgagaaagtggatcagtttaaaaaagttttattctccctcggcggctcatttctgtactacgctgacaggtttaagctgtactcggcattttgcgcttctcataccaaggttccaaaggttctcgtgaaggccaagacagataccgcttttaaagcatttctcgacgcccagaatcccaagcaacagcactcatccaccttggagtcctatttgatcaagccaatacagcgcattctgaagtatccactgctgctgagagagttattcgccctcaccgatgcagaaagtgaggagcactaccatctggacgttgccatcaaaaccatgaacaaggtagccagccatatcaatgaaatgcagaaaatccatgaggagttcggggccgtgttcgaccagttgattgctgagcagacgggagaaaagaaagaggtcgccgatttgtctatgggggatctgctgctgcacacaacggtgatctggttgaatcctccagctagcttgggaaagtggaaaaaggagcctgagctggcagcattcgttttcaagacagccgtcgtcttggtgtacaaggacggcagtaaacagaagaaaaagttagtcgggagccacagactctccatttatgaggattgggacccatttcgctttagacacatgatccctacggaagcgctgcaggtgagagctctggccagcgccgatgcagaagctaacgccgtctgtgaaatcgttcacgttaagagcgaatccgagggtcgccccgaaagagtgttccacctgtgctgctcatcccctgaatcacgaaaggattttctcaaagccgtgcactccatcctgagagacaaacatcgtagacagcttctcaagacagagtcactcccaagctcccagcagtacgtgccattcggtggaaaaagactctgtgccctgaagggggcgcgacccgccatgtctagagcggtgagtgctccatcgaagtctcttggcagaagaaggagacgcctggcaagaaaccggttcaccatagactctgacgcagtgtcagccagctcacccgagaaggagtcccaacagccacctggtggaggcgatacagatcggtgggtggaggagcaattcgatttggcccagtacgaagaacaagatgacataaaggagactgatatactgagcgacgatgatgagttctgtgagtctgtgaagggcgcatctgtggaccgcgacctccaagagcgactacaagctacaagcatttctcagcgggagcgcggcagaaagacactcgattctcatgcttctcgaatggctcagttgaaaaagcaagccgctctgtccgggataaatggcggattagagtcagcatctgaggaagtgatttgggtaaggagggaagattttgctccctctcgcaagttgaacaccgaaatttag

SEQ ID NO: 137426 - DNA, 2493 bp, synthetic construct
  misc_feature 1..2493: note = Description of Artificial Sequence: Synthetic coding sequence
  source 1..2493: mol_type = other DNA
atgggtagcatgtttcgctcggaagaagtagccctggttcagctgttcctccccacagcagcggcctacacctgtgtcagccgcttgggcgaactggggctggtggaatttcgggatcttaacgcgtctgtgtccgcttttcagaggagattcgtggttgatgtacggcggtgcgaggaattggagaaaacattcaccttcctgcaggaagaagtacggagagctggtctggtgttgccgccgccaaagggtagactgcccgccccccctcctcgggacctccttcgcatccaggaggagaccgaacgcctggctcaagagcttcgggatgttcgggggaatcaacaagctctgcgcgcccagctccatcaattgcagctccacgccgccgtgctaagacaaggccacgaaccccagctggccgccgcacacaccgatggcgccagtgagaggacccccctgctgcaggccccaggcggaccccaccaggatctcagggtgaatttcgtggcaggagccgtcgaaccacacaaggctccggcactagaacgcctcttgtggagagcttgtaggggtttccttattgcctcgtttcgggagctggaacagcctctcgaacatcccgtgaccggagagcctgcaacttggatgaccttcttgatttcctactggggggaacaaataggccagaagatcagaaaaattaccgactgctttcattgtcatgtattcccattcttacagcaggaggaggcccgccttggcgctctgcagcagctgcaacaacaatcccaggagctgcaggaagtacttggggagaccgaaaggttcctgagtcaagtgttaggtcgagttcttcagctcctcccccctgggcaagtccaggtgcacaaaatgaaggccgtgtatttggccctcaatcagtgttccgtcagcactacacacaagtgcctcattgccgaagcttggtgctctgtgagggacctacccgcccttcaggaggccttgagagattcgagcatggaagagggcgtctccgccgtggcacacaggattccatgcagggatatgccccccaccctaatacgaaccaatagattcaccgcctcttttcaagggatagtggatgcgtacggtgtcgggcgataccaggaggtgaatcccgccccgtacacaattatcacattccctttcctgttcgccgttatgttcggtgatgtcgggcacggcctgcttatgtttctctttgccctagcgatggtactagcagagaacagacccgcagtcaaagcagctcagaacgagatatggcagactttctttcgcggccgttacttacttttattgatgggcctgttttccatttatactggctttatatataatgagtgctttagtcgggccacatcaatctttccgagcggctggtctgtcgctgcgatggcaaaccagtccggttggagcgatgcatttttagcccagcatactatgctaacccttgacccaaatgtcacaggggtcttcttgggaccatacccgttcggtatcgatcccatctggtctctagccgccaaccatctttcgtttctgaatagttttaagatgaaaatgtcagtgatcttgggagtggtccacatggctttcggcgtggtgctgggtgtgttcaatcatgtccatttcgggcaacgccaccgtctgctgctggaaacattgccggaactaaccttcctgctagggctttttggctatttggtgttcctggttatatataaatggctgtgcgtatgggccgcccgagccgcatctgctccctccattctcattcacttcattaacatgttcttattttcccatagccctagcaaccgcttactataccctcgtcaagaagtagtgcaggcaacattagttgtcctggcgctggccatggtcccaattctcttgcttgggacgccactccatctcttgcacaggcaccggcggcgattgcggagacggcccgctgatcgacaggaagaaaacaaagctgggcttctcgacctccccgacgcctcagtgaacggctggtcatccgatgaagagaaggccggtggacttgatgacgaggaagaggccgagctggtcccaagcgaggtgctcatgcaccaggccattcacacaatcgagttctgcttagggtgcgtctcaaacactgctagttacctgaggttgtgggccctttctctggctcacgcccagttgtccgaggtactgtgggctatggtaatgaggatcggcctgggccttggacgggaggtcggggttgccgccgttgttttggtgcctatctttgctgccttcgctgtcatgaccgtggccattttgttggttatggagggtttatctgccttcttgcacgcgctgaggctgcattgggtggagttccaaaataagttctatagcgggaccggttacaagctgagccccttcacattcgctgcgacggacgactag

SEQ ID NO: 137427 - DNA, 657 bp, synthetic construct
  misc_feature 1..657: note = Description of Artificial Sequence: Synthetic coding sequence
  source 1..657: mol_type = other DNA
atggggtccatgttcagatccgaggaagtggcgctggtgcagctgtttctccccaccgctgcagcctacacctgcgtcagtaggttgggggagttaggccttgtcgaattccgagatctaaacgcaagcgtgtccgcttttcagagacgctttgtggtggacgtaagacgctgcgaagaattagagaagacgtttacgttcctgcaggaggaagtacggagggccggacttgtcctccccccccccaaggggagactgccggcaccgccgccacgggacctcctgcgaatccaggaggaaaccgagcgactggcccaggagctccgagacgtccggggcaaccagcaagccttgcgagcccagctacaccagctgcagctccatgctgcagtgcttcgccaaggccacgagccgcagctggcggcagctcacactgatggcgcatctgaaaggacaccactactgcaagccccaggcgggccgcatcaggatctgcgggttaacttcgtcgccggggcagtggagccccacaaagctcccgccctggagcgactcttatggcgggcctgtcgcgggtttctgattgcctccttcagagaactggagcaacctctggaacaccctgttacaggggaacccgccacctggatgacctag

SEQ ID NO: 137428 - DNA, 186 bp, synthetic construct
  misc_feature 1..186: note = Description of Artificial Sequence: Synthetic coding sequence
  source 1..186: mol_type = other DNA
gacgacgaggaagaagcggagttagtacccagcgaagtgctgatgcaccaggctatccatacaatcgagttctgtctaggttgtgtgtctaacacggcctcttatttacgactctgggcactcagcttggcccacgcgaggtggaattcccgaacatcatcgacacaagccagagccacctcatag

SEQ ID NO: 137429 - DNA, 1845 bp, synthetic construct
  misc_feature 1..1845: note = Description of Artificial Sequence: Synthetic coding sequence
  source 1..1845: mol_type = other DNA
atgacttttctgattagctattggggagagcagatcggccagaagataaggaaaatcaccgactgctttcactgccacgtttttccctttttgcagcaggaagaagctcggttgggagcgctgcaacagcttcagcaacagtcacaggaactgcaggaagttctgggagaaacagagcggttcttgagccaggtgctcggcagagtcctacagctgttgccgccgggacaggtgcaagtgcataagatgaaggcagtgtacttggccttgaaccagtgttccgtctccacaacacacaaatgtctgattgctgaggcatggtgttcagttagagaccttccagccctgcaggaggctctaagggatagctcgatggaggaaggcgtatcagctgttgcccatcgaattccgtgcagggacatgcctcccaccctcatcagaacaaatcgttttaccgcttcatttcagggcattgtcgatgcttacggggtcggccgataccaagaggtgaatcccgcaccctacacgattataacgttcccttttcttttcgcagtcatgtttggcgacgtgggtcatggcctgctgatgtttctctttgcattggcgatggtgctggcagagaacaggcccgcggtgaaagccgctcagaatgaaatatggcagacattttttcggggtaggtaccttctcctgctcatgggactttttagtatctacacaggctttatttataacgagtgtttttctcgggccacgtcgatctttccgtccggctggtccgttgctgctatggctaaccagtccgggtggtctgacgcatttctcgcccagcataccatgctgacactggatcccaacgtcaccggtgtcttcctaggaccatatccttttggaatcgatcctatttggagtctcgccgcaaaccacttgtcctttctgaactcttttaagatgaaaatgagcgtgattttgggtgtagtgcacatggcctttggtgtggtgcttggggtgttcaatcacgttcacttcgggcagcgacaccgcttattacttgaaacgcttccggaactaactttcttactgggactcttcggataccttgttttcctggtaatttacaagtggctgtgtgtctgggcggctagggccgcttcagctccaagtattttgatacactttatcaacatgttcctttttagccatagtccttctaatagactcctctatcctagacaggaggtagtgcaggcaacactcgttgtactggcgttggcgatggtacctatcctcctgcttggaacacctcttcacctgcttcatcgccaccggagaaggctgcgacggcgcccggcggaccggcaggaagaaaataaggccggcctgcttgacctgcccgacgcctccgtgaatgggtggagtagcgacgaggaaaaagccgggggcctggatgacgaggaagaagctgagttggttccgagcgaagtcctgatgcaccaggccatccatactatagagttctgcctgggttgtgtgtctaacaccgcatcctacctgcgcttgtgggctctgtctctggcccacgctcagctctctgaggtgctgtgggctatggtgatgcgcatcggcctcgggctgggccgtgaggtgggggtggctgccgtcgtactagtgcccatttttgctgcctttgccgtgatgactgtcgccatattgctcgttatggaaggcctatctgcctttctgcatgcactcagattgcattgggtcgaattccaaaacaagttctactctggtaccggatacaaactgtctccctttacatttgccgctacagacgactag

SEQ ID NO: 137430 - DNA, 357 bp, synthetic construct
  misc_feature 1..357: note = Description of Artificial Sequence: Synthetic coding sequence
  source 1..357: mol_type = other DNA
atggtcccaatactcctgctcggaaccccgctgcacttgttgcacaggcatcgccgacgcctgaggaggaggccagccgacagacaggaggagaataaagctgggttgctagacctacccgacgcctcagtgaacgggtggagctccgatgaggagaaggccgggggactcgatgacgaagaggaggcggaactcgttccctccgaagtcctaatgcaccaagccatacataccatcgagttctgtctcgggtgtgtgagtaatacagcgtcctatcttcgactgtgggccctgtcactggctcatgcaagatggaatagcagaacatcttccactcaggccagggctacatcctag

SEQ ID NO: 137431 - DNA, 1671 bp, synthetic construct
  misc_feature 1..1671: note = Description of Artificial Sequence: Synthetic coding sequence
  source 1..1671: mol_type = other DNA
atggagggacccctgtctgtcttcggtgatcgcagcaccggggaaacaatccggagtcaaaatgtcatggctgccgcttcgatagctaacatagtgaaatccagtcttgggccagtaggtctggataagatgctcgtggatgatatcggcgatgtcaccattaccaatgatggagctacaattctgaagctgttggaggtggagcacccagctgcaaaggtcttgtgcgaactggctgatcttcaggataaggaagtaggagatggaacaactagtgtggtgattattgccgccgaactgcttaagaatgccgatgagctggttaagcagaaaatccacccaacatcagtgatctcagggtaccgcctggcttgtaaggaggccgtgcgttatatcaatgaaaatttgatcgtgaacacggacgagcttggccgggactgcctgataaacgctgctaagacatcgatgtccagtaagatcattgggatcaatggagatttttttgcaaatatggttgtggacgccgtgctggcaataaagtacactgacatcaggggccaacctagatatccagtaaactccgttaacatcttgaaagcgcacggtagatctcagatggaaagtatgctgatcagtgggtacgccctcaattgtgtggtgggctctcaaggcatgccaaaaaggattgttaacgccaaaatcgcctgcctcgatttctctttgcagaaaaccaagatgaaattgggggtgcaagttgtgatcacagatccagaaaaactggatcagatccgtcagagagaatccgacattaccaaggagcggattcaaaagattctggccacgggagccaacgtgattttgaccacaggagggattgacgacatgtgtttaaagtacttcgttgaagccggagcaatggctgtgcgacgcgtgttgaagcgcgatctgaagaggattgcgaaggcgtcgggagcgaccatattgtccacactagctaatcttgaaggagaagagacattcgaagcggccatgttaggccaggcagaggaggtggtccaggaaagaatttgcgacgacgaactaatcctgattaaaaacacaaaagctcggacctctgcttccatcatcctgaggggagctaacgattttatgtgcgacgagatggaacgcagcctgcacgacgctctgtgtgtggtcaaaagagtcctggagtcaaagtcagtggtgcccggcggtggcgctgtggaggcagcccttagcatttacctggaaaactatgccaccagcatgggctcacgcgagcaactcgccattgcagagttcgctcgctctctcctggtgattccaaacacactcgctgtcaacgccgcgcaagattctacagacttggtcgcgaagttaagggcatttcataatgaagctcaggtcaatcctgagcgaaaaaacctgaagtggatcggactggacctttctaatggcaaaccaagggataataaacaagccggcgtgttcgaaccgaccatcgtgaaggtgaaatcacttaagtttgctaccgaggccgccattactatactgcggatcgatgacctcatcaagttacatcctgagagcaaagacgacaaacatggctcctacgaagacgctgtgcactccggagcactaaatgactag

SEQ ID NO: 137432 - DNA, 1206 bp, synthetic construct
  misc_feature 1..1206: note = Description of Artificial Sequence: Synthetic coding sequence
  source 1..1206: mol_type = other DNA
atgagctcaaagatcatcgggatcaacggggatttcttcgcaaatatggttgtcgacgctgttctcgcaatcaaatataccgatatacgcggccagcctcggtatccagtgaattcagtgaatatcctcaaggctcacgggaggtcccagatggaaagtatgttgatttcaggatacgccctgaattgtgtggtggggagtcaaggtatgcccaaacgaatcgtgaacgccaagatcgcatgtcttgatttcagccttcagaaaacgaagatgaagctgggtgtccaggtggtgatcacggatccagaaaaactcgaccagattagacagcgggaaagtgatattactaaggagcggattcagaaaatacttgcaaccggagccaacgtgattctgactaccggggggatagacgacatgtgcctcaagtatttcgtggaagccggggcaatggccgtccgtcgagtgctcaagagagatctgaagagaattgccaaggcttcaggcgccacaattttgtccacactggccaatctggagggcgaagaaacatttgaagccgccatgttagggcaggccgaagaagtcgttcaggaacgaatctgcgatgacgagttaatacttattaagaatactaaggccagaacctctgctagtatcattcttcgaggagctaacgactttatgtgcgatgaaatggaacgctccctacacgacgcattatgtgtggtcaagcgagtccttgagagcaagtctgtggtgcccggggggggggctgtcgaggccgctctctctatttacttggagaattacgccacatcaatgggaagtcgggagcagctcgccattgctgaatttgctcgtagtttgttggtgattccaaataccctggcagtaaacgccgcccaggacagtacggacttggtggccaaactgagggccttccacaatgaggcccaggtgaatcctgagcgcaaaaaccttaagtggattgggctggatctcagtaacggcaaaccaagggacaataagcaggccggcgtgttcgagcctactatcgtgaaggtgaagtccctcaagtttgccacggaagccgcaataacaatcctgcgaatcgatgacctaattaaactgcaccctgaatctaaagatgataagcatggaagctatgaggatgctgtccactcaggagccctcaacgactag

SEQ ID NO: 137433 - DNA, 1302 bp, synthetic construct
  misc_feature 1..1302: note = Description of Artificial Sequence: Synthetic coding sequence
  source 1..1302: mol_type = other DNA
atggaaggcccgctgagtgtgtttggcgaccgcagcacaggagagacaatccgctcccagaatgtcatggcagctgccagtattgctaacatcgtgaagtcttcattaggacccgtgggccttgacaaaatgcttgtggatgatatcggagatgtgaccatcaccaacgacggcgctaccatcctcaagctgcttgaggtcgagcatcccgctgccaaagtactgtgtgagctcgccgaccttcaggataaggaggtgggagatggaacaacatcagtagtcattattgctgcagagttgctaaagaatgccgacgaacttgtcaagcagaagatccaccccaccagcgtgatcagtggctacagattagcatgcaaggaggctgtgcggtatatcaatgagaacctcattgttaacaccgacgagcttggccgcgattgtctcattaatgcggccaaaacatccatgtcaagcaagatcataggcattaatggggatttctttgctaatatggttgtggacgccgtgctggcaattaaatatactgacatccgaggacaaccgagatatccagtcaactccgtaaacatcctcaaggctcatggtcggtcccaaatggaatccatgctgatttctggctatgccctgaattgcgtggtgggttcacagggaatgccaaagcggattgtcaacgcaaagatagcctgcctggattttagcttgcaaaaaaccaaaatgaaacttggcgtgcaggtggtgattactgacccggagaagctggaccagatccgtcagagggagagcgatatcacaaaagaacggatccaaaaaatcctggccacgggtgccaatgtgatcctgacgactggtggtatagacgacatgtgtctaaagtatttcgtggaagcaggtgccatggctgttcgaagggttcttaagagggatcttaagcgcatcgcgaaggcatccggcgccacgattctttctaccctcgcaaatctggagggtgaagagacctttgaggcagcaatgctgggacaggcagaagaagtcgtgcaggagagaatttgtgacgacgagttgattctcattaagaacaccaaggcaagaacctctgcaagtatcatcttgcgtggagctaacgattttatgtgcgacgaaatggaacgctctttgcatgacgctctgtgcgtggtaaaacgagtattagagagcaagtctgtagtgcccggaggtggggcggtcgaggcggcattatctatctatctggagaactacgccaccagtatggactggtcgtag

SEQ ID NO: 137434 - DNA, 648 bp, synthetic construct
  misc_feature 1..648: note = Description of Artificial Sequence: Synthetic coding sequence
  source 1..648: mol_type = other DNA
atgctcgcagggcagttggaagcaagagacccaaaggaggggacccaccccgaagatccttgtcccggagcgggggcagtgatggaaaaaacagccgttgcagctgaggtccttaccgaggactgcaatacaggagaaatgccccctctgcagcagcagattatcagactgcaccaggagctgggccggcagaaatccctgtgggcggatgtccatggaaagttgaggtctcatattgatgctcttcgggaacagaatatggagcttcgtgaaaagctgcgcgccctacagctacagaggtggaaggcacggaaaaagtcggccgccagccctcacgcagggcaagaatcacataccctagccctcgaaccggcctttggtaagatttcccccctatctgctgacgaggagacgatacccaaatatgcaggacataagaaccaaagcgccacactccttggccagcgaagctccagcaacaactctgcaccgcccaaacctatgtccctgaaaattgagagaatctccagctggaaaactccaccccaggaaaatcgcgataagaacctcagcaggcgacgccaggatagacgggccacacccacgggtcgtccgactccctgcgcagagcggcggggaggtgtgtag

SEQ ID NO: 137435 - DNA, 981 bp, synthetic construct
  misc_feature 1..981: note = Description of Artificial Sequence: Synthetic coding sequence
  source 1..981: mol_type = other DNA
atggagaagacacctgctgctgctgaggtcccacgagaggattctaatgccggagagatgccatctctgcagcagcagatcacctccctacatcaggagctggggcgccagcagtcactttgggccgatatccaccggaaattgcagtcccatatggatgctttaagaaaacagaaccgggagctcagagaggagctgcgggggctccaaaggcagcagtgggaagccgggaagaaacccgcagcaagtcctcacgcgggccgagaaagccataccctcgcgttagaacccgctttcgggaagataagccatctgagtgcagacgaagacaccacccctaagtacgcaggaaggaaatctcagtccgccactttactcggacagcgttggtcctccaaccacctagctccccccaaacccatgtccctgaaaaccgaaaggatcaactcgggaaaaaccccaccacaagaagatcgggagaagagccctcctgggcgcagacaagaccggtcccctgccccgaccggcagacccacaccaggtgctgaacgacgcggggtgtctgaggatggtaagatcatgcacccttcttctagatcaccccaaaactccgggggtcgaaagtcgccagtacaagcctcgcaggcaacaactctgcaggaacagactgccgcagcccgaggggcagaccgctcctcgtccgtccttggtagctcggaaggcgggtttttgagccgcgttcaggccgatgaattcgcatcaagcgcgccggactcagctgagcggcagaacctgccagttaaccctcctagcagcttagaaattgcccaggcaatggatacaaaaatgaaaaaggaggaagtgcaggaagagaagcgacatccaaaggggaaggctgacgattgccgccgctcaggatttcccagcgagttccctggtgcacttcacgcagccccttcaaggcaggacatgggtccttag

SEQ ID NO: 137436 - DNA, 1326 bp, synthetic construct
  misc_feature 1..1326: note = Description of Artificial Sequence: Synthetic coding sequence
  source 1..1326: mol_type = other DNA
atggccccaaagggtattctgggtagctttccaacagctatgaatctttcactagagggcaaagtaaaggaaacggttcataacgccttttgggatcacctaaaggagcagctgagcgccacaccacctgatttttcttgcgcactagaacttcttaaagaaatcaaagaaatcctgctgagcctgcttctgccacggcagaaccgactgcgcatagaaatcgaggaggcactcgatatggacctgctgaaacaggaggccgagcacggcgctctgaaggttctgtacctgagcaaatacgtgctgaacatgatggccctgctgtgcgcccctgtgcgggatgaggccgtgcagaaactggaaaatatcaccgaccccgtgtggctgctgcgcgggatatttcaggtgctggggaggatgaagatggacatggtcaactatactattcagtcactacagccacatctgcaggagcactcaatacagtatgagagagcaaaatttcaagaactcctcaacaaacagcctagcctcctgaaccacactactaagtggctgacccaggctgccggcgatctgacaatgtccccccccacgtgccccgatacgtctgactcatccagcgtggctggtccatctcctaatgaggcagcaaataaccctgagcccctcagccctacaatggttctgtgccagggattcctcaatctgctcctttgggatctcgaaaacgaagagttccccgagaccttgctgatggataggaccaggctccaggaattgaaatctcagctgcatcaacttaccgtgatggcctctgtgctgctggtggcttctagctttagcggcagtgtattgtttggtagcccacagttcgtcgacaagctgaagaggatcaccaagtctctcctggaggactttcacagccgcccagaggaggcaattctgacggtctccgaacaggtttcccaggagattcatcagtcactgaaaaacatgggactcgtcgctcttagctctgacaataccgcctccctaatgggccaactccagaatatcgcaaaaaaagagaattgcgtatgttcagttatcgaccagcgcattcatctgtttttaaaatgttgccttgtcttgggcgtgcagcggtccttgctcgacttacccggcggcttaaccctgattgaggcggaactggccgagctcgggcagaagttcgttaacctaacccaccataaccaacaggtcttcggcccatactatacagagattctcaaaaccctcatttctccagcccaggcgctggaaactaaggtggagtcggtgtag

SEQ ID NO: 137437 - DNA, 1551 bp, synthetic construct
  misc_feature 1..1551: note = Description of Artificial Sequence: Synthetic coding sequence
  source 1..1551: mol_type = other DNA
atgacacgggggggcgggggaggtgatacgatctccaagatgcctgatgtgaaagaatcagtcccgccaaaataccctggcgactccgagggcagatcttgcaagccagagacatctggaccaccccaagaggataagtccggctctgaagatccacctccattcctcagtgtgaccggtctgaccgaaacagtcaacgaggtgagcaagctgagcaataagattggtatgaattgtgattactatatggaggagaaggtgctcccccccagtagtttggaaggcaaagtgaaagaaaccgtccataatgctttctgggaccacctgaaagaacaattatcagcaactcccccagacttttcctgcgccttggagctgcttaaggaaatcaaggagattctgctgtctcttctgcttccaagacaaaatcggctgcgaatcgaaatcgaggaggcgctcgacatggatctcctcaagcaggaagctgagcatggagccctgaaagttctgtatctgagcaagtacgttctaaatatgatggccctcctctgcgcccccgttcgggatgaggctgtgcagaagctggagaatataaccgatccggtctggctcctacgcggaatcttccaggtgttaggccgcatgaaaatggatatggtgaattatacaattcaatcactgcagccacatctgcaggagcacagtatccagtacgaacgcgcaaaatttcaggagctgttgaacaaacagcctagtcttctgaatcacacaaccaagtggctcacccaggccgctggagatctcaccatgtcccctccgacatgccccgacacttccgatagcagctcagtggccggcccttcccccaacgaagcagctaataatccagagcccctctccccaactatggttctctgccaaggttttctcaatctcctgctgtgggacctggagaacgaagagttccctgagacccttctgatggaccggactcggctgcaggagctaaaatcacagctgcatcaattaacagtgatggcctcagtattgctcgtggccagtagtttctctggcagtgttctattcggcagtccccagttcgtcgataagttgaaaaggatcacaaaatcgcttctggaggactttcatagccggcccgaagaggcaatcctgacagtgagcgaacaagtcagccaggagatccatcagtcattgaagaacatgggtttagtggccctgagttccgataacaccgcttctctgatggggcagcttcagaatatcgctaaaaaagagaactgcgtttgttccgttatcgaccaaagaattcatctctttctcaagtgttgtctggtactgggggttcagcgtagcctgctggacctgcccggaggtctaaccctcattgaggcagaactggccgaattgggacagaaattcgtcaacctgacccaccacaaccagcaggtttttggaccctattacacggaaattctgaaaacattaatttcacccgcgcaggccctagagaccaaggtggagagtgtctag

SEQ ID NO: 137438 - DNA, 822 bp, synthetic construct
  misc_feature 1..822: note = Description of Artificial Sequence: Synthetic coding sequence
  source 1..822: mol_type = other DNA
gggttaagtcatagggccactcctcagccagccgctccccctagatggtatgcgccgggccgccaagctgcacgtcccacggaacgcacacctgtcgatgaccctcgacgagggagacgctctctggagggaaaagttaaggagaccgttcataacgccttctgggaccacctgaaagagcagttgtcagcaacaccccctgacttttcgtgcgcactcgagttgctgaaagagatcaaggaaattctactgtccctgcttttgccccggcaaaaccggttgcgcatagagattgaagaagccttggacatggatctgctgaaacaggaggcggaacacggggccctgaaggtactctatttgtcaaaatatgttctgaacatgatggccctcctatgcgcaccagtgcgtgatgaagctgtgcaaaagttggagaatatcacggacccagtatggctcctgagagggatctttcaggtgttgggacgcatgaagatggacatggtgaactacactatccaatctctgcagcctcacttgcaggaacacagcatccagtacgagagggcaaaattccaagagcttctgaataagcagccttctctgctgaatcacacaactaagtggctgacccaggccgcaggggacctaaccatgagccccccgacatgcccagacacatccgattcttcgtccgtggccggtcccagtcccaacgaggccgcaaataatccagagcccctgtcccccacaatggttctctgccaggggtttttaaacctcttgttgtgggacctcgaaaacgaggaatttcctgaatag

SEQ ID NO: 137439 - DNA, 1326 bp, synthetic construct
  misc_feature 1..1326: note = Description of Artificial Sequence: Synthetic coding sequence
  source 1..1326: mol_type = other DNA
atggctcccaaggggatcctcggctcgtttcccacagctatgaacctctcattagagggtaaagttaaggaaacagtgcacaacgcgttctgggatcacctcaaggaacaattgagtgcaactccacccgatttcagttgtgccttagaactgctgaaggagattaaggagatcctgctctcactcctgctaccacggcagaaccgccttagaattgagatagaagaggccctggatatggatctgctcaaacaagaggctgaacacggggcactgaaagtcctgtacctcagcaagtacgtgctcaacatgatggctctactttgtgctccagtgcgcgatgaagccgttcagaaattggagaatattacagaccctgtttggcttctgcgtggcatttttcaggttctcggaaggatgaagatggacatggtaaactatacaatccaatccttacagccacatttacaggagcacagtatacagtacgagagggccaagttccaggagcttctcaacaagcagccttccctcctcaaccacacgacaaaatggctgactcaggcggccggggatctgactatgtctcccccaacatgcccggacacttcggacagttcaagcgtggcagggccttctcccaatgaagccgccaataacccggagcccctgtcacccaccatggtcctatgccaggggttcttgaacctgctgctctgggatcttgaaaacgaagaatttccagagaccctattgatggatagaacgagattacaggagctgaagtcccagctccaccagctgaccgttatggcaagcgtactcctcgtggcctcctccttctccggatctgtgttgttcggcagccctcagttcgtggacaagttaaagaggatcacaaaatccctgctggaagacttccattcgaggcccgaggaggcaatccttaccgttagcgagcaggtgagccaagagattcaccagtctctgaaaaacatggggctggtcgccctttcatcggacaacaccgcaagtctgatggggcagctgcagaatattgccaagaaggaaaactgcgtgtgctcagtgatcgatcaacgcattcaccttttcttaaagtgctgtcttgtcttaggcgtgcagcgttctttacttgatctacccggtggattaacccttatcgaggccgaactagctgagcttggccagaagtttgtgaatctgacgcaccataaccagcaggttttcggcccttattacacagagatcctcaagacgctaatttctccagctcaggctctggagaccaaggttgagtctgtgtag

SEQ ID NO: 137440 - DNA, 312 bp, synthetic construct
  misc_feature 1..312: note = Description of Artificial Sequence: Synthetic coding sequence
  source 1..312: mol_type = other DNA
atggcgcctaagggtatcctcgggagcttccccacggccatgaacctgtcactcgaggggaaggttaaggaaaccgtccacaacgcgttttgggaccacctcaaagagcagctgtcggccactcctccggacttttcctgcgccttagaactattgaaggagatcaaagagattctgctgagcctgctgctgcccagacagaatcgcctcagaatcgaaattgaagaggctctggatatggaccttctgaaacaggaagccgaacatggcgctctcaaagtgctgtatctgtccaagtacgttctcaattag

SEQ ID NO: 137441 - DNA, 1512 bp, synthetic construct
  misc_feature 1..1512: note = Description of Artificial Sequence: Synthetic coding sequence
  source 1..1512: mol_type = other DNA
atgccagatgtaaaggagtccgtgccgcccaaataccctggggactcggagggaagatcttgcaagcctgagacttcgggccctccacaggaagacaagtctggatctgaagaccccccaccttttctttcagtgacagggctcactgagacggtgaatgaggtaagtaagctgtccaataaaattggaatgaattgtgactactacatggaggagaaagtactgcccccttcttccctagaaggcaaggtcaaagaaaccgtgcataatgcattttgggatcatctgaaggaacagctgagcgcaacccccccagacttttcctgcgcactggaactattgaaagaaatcaaggagatccttctgagcctgctactgcctcgccaaaaccgattgagaatcgagatagaggaagctctggacatggacctgctgaaacaagaggccgagcacggcgctcttaaggtactctatttgtctaagtacgtgctcaatatgatggcactgctgtgtgccccggtacgcgatgaagccgtacaaaagctagagaatattacagatccagtctggctcctgcggggcatattccaggtgctggggcggatgaagatggatatggtgaattacaccatccaaagtctacagccccatttacaggagcacagcatacagtacgaacgggctaagttccaggagctgctgaataagcagccatctttgcttaatcacactacaaaatggttaactcaggccgctggagatctcacgatgtccccccctacctgccctgacacctctgactccagcagtgtcgctggtcccagccccaatgaggctgcaaataatcctgagccgctctcccccactatggtcttgtgccagggcttcctcaacctgttgctctgggatctcgaaaacgaggagttcccagaaacattgctcatggaccgaacccgtctgcaggagctgaagagccagctgcaccagctgactgtgatggcaagtgtcctgctggtcgcttccagcttcagtgggtcggtactgttcggttccccgcagtttgtcgataagctcaagcgaatcaccaagagcctcctcgaggacttccactctcgcccagaagaagccattctgactgtgagcgagcaggtaagccaggagatccatcagagtctcaaaaacatgggattggttgccttatcttctgataacacagcctctctgatgggccagttgcagaatatcgccaaaaaagaaaattgtgtctgttccgtgatcgatcagagaattcatctctttctgaaatgttgtctcgtactgggggtgcagcgctccctgctggatctccctggtggcttaaccctaatagaagccgagctggccgagctggggcagaagttcgtgaatcttacccatcacaaccagcaggtatttggaccttattacaccgaaatactgaaaacactcatctcaccggcgcaagcccttgaaaccaaggtcgagtctgtgtag

SEQ ID NO: 137442 - DNA, 1413 bp, synthetic construct
  misc_feature 1..1413: note = Description of Artificial Sequence: Synthetic coding sequence
  source 1..1413: mol_type = other DNA
atgacacgcgggggcggcggtggagttctgtctgttaccggactcacggagaccgtgaacgaggtgtctaaattgagcaataagattggaatgaattgtgattactacatggaggaaaaggtgctgccaccctcatctttggaaggcaaggtgaaagaaaccgtacataatgccttctgggatcatttaaaggagcagctgtctgccacaccccccgattttagctgcgccctggaactcctgaaggaaattaaggaaatactgctgagcctccttctccctcggcagaatcgcctgaggatagagattgaagaggctttggacatggatttattaaagcaggaggctgaacatggagctctaaaggtactgtacttgagcaaatatgtgctcaacatgatggccctcctgtgcgcacctgtgagggatgaagctgtgcaaaaactggaaaacatcactgatcccgtgtggctcttaagaggtatcttccaggtactcggtcgtatgaagatggacatggtgaactatactattcagtcactgcagccacacctgcaagagcatagtatccagtatgaaagggcaaaatttcaggagctcctgaataaacagccttccctcttgaatcacaccacgaagtggctgacacaggccgccggcgatcttacaatgtccccacccacatgcccagatacctcagatagtagctccgtggctggcccctcgccaaacgaggcggctaataacccggaacctctgagcccaacaatggtgctctgccagggattcctcaatttgctgctctgggaccttgagaacgaagagttcccggaaacactcctcatggaccggaccagattgcaggaactgaagagccaacttcaccagttaaccgtcatggcttccgtgctgctagtcgcctctagtttttcaggatcagtgctgttcggctcaccccagtttgtggacaagttgaaacgtatcactaaatctctgttggaagacttccattcgcggccagaggaggcgatcttgaccgtgagcgagcaagtctcccaagaaatccatcaatcattgaagaatatgggcctcgtggctctcagttccgataacacagcgagcttgatgggccagttgcaaaacatcgctaagaaggaaaactgcgtgtgtagcgtcatcgaccaacggattcacttattcctaaaatgttgccttgttctaggtgtgcaaagatcactgctggacctccccggcggtctcacactgattgaggctgaacttgcggagctggggcagaaatttgtgaatctcactcatcacaatcaacaggtgttcggaccgtactacactgagatcctgaagaccttgatctcgcctgcacaggctctggagacaaaggtggagtctgtctag

SEQ ID NO: 137443 - DNA, 1398 bp, synthetic construct
  misc_feature 1..1398: note = Description of Artificial Sequence: Synthetic coding sequence
  source 1..1398: mol_type = other DNA
atgactcgcggaggaggaggaggcggactaaccgagaccgtgaacgaagtgtccaagttgagtaataagattgggatgaattgtgattattacatggaggaaaaggtcctgcctccttccagcttggagggcaaagtcaaggaaaccgtccacaatgccttttgggatcatctaaaggaacagcttagcgcgacacctcccgacttctcatgcgcgcttgaactactgaaggagattaaagagattctgttgtcacttctcctccctaggcagaatagactccggattgagatcgaagaggccctggacatggatttgctcaagcaggaagccgaacacggagcacttaaggtgctttatctcagcaagtacgtgctgaatatgatggctctgctttgtgcgcctgtacgcgacgaggctgtccagaagttggagaatatcaccgaccctgtatggctcctccgaggtattttccaggtactaggacgaatgaaaatggatatggtgaactacacaatccagtcactgcagccccaccttcaagaacattcaattcagtacgagagagcaaaattccaagagctccttaataagcagccgtcgctcctgaatcacactaccaaatggttgacccaggcagcaggcgatctgactatgtcccctcccacctgtcccgatacttccgattcttcctctgtggccggtccctctccgaatgaggccgccaataatccggagcctctatcacccacaatggtcctatgccaggggtttctgaacctgttactgtgggatttagagaacgaggagttcccggagactctgctgatggacaggactcggctgcaggaactcaagtctcaactgcaccagttgaccgtgatggcttcggtacttttggtcgccagctcattttcggggtctgtcctgtttggttctcctcaattcgtcgacaagctgaagcgcatcacaaagtccctcctggaggacttccacagcagacccgaggaagccattttgaccgtgtctgaacaagtaagtcaggagattcatcagtccctaaaaaatatgggccttgtggcactaagttctgataacaccgcgtccctcatgggccaactgcaaaacatagcgaagaaagagaactgcgtctgctccgtgatcgatcaacgcatccatctcttcctcaagtgctgtctggtcctgggggtgcagaggtccttgctagacctccctggcggcctcactctgatcgaagcggagttggcagaactaggacagaaattcgtcaacctgacccaccacaatcagcaggtgttcggcccgtactatacggaaattctcaaaacactgattagtcccgctcaggcattagaaacaaaagttgaatccgtttag

SEQ ID NO: 137444 - DNA, 165 bp, synthetic construct
  misc_feature 1..165: note = Description of Artificial Sequence: Synthetic coding sequence
  source 1..165: mol_type = other DNA
atgacgaggggcgggggcggaggggacaccatttcaaaaatgcccgatgtcaaagaaagcgtccctcctaagtatccaggggattccgaagggcgatcttgcaagccggagacgtccggaccacctcaagaggacaagtcaggctccgaggatcctcccccctag

SEQ ID NO: 137445 - DNA, 165 bp, synthetic construct
  misc_feature 1..165: note = Description of Artificial Sequence: Synthetic coding sequence
  source 1..165: mol_type = other DNA
atgaccagaggaggcggcggtggcgatactatatccaaaatgcccgatgtcaaggaatccgtacctcctaaataccctggtgactcagaaggcagatcttgcaagcccgagactagcggaccgccccaagaggataagagcggatcagaagaccctccaccctag

SEQ ID NO: 137446 - DNA, 597 bp, synthetic construct
  misc_feature 1..597: note = Description of Artificial Sequence: Synthetic coding sequence
  source 1..597: mol_type = other DNA
atgttttttgaacgccatctcgagaatctgctcaaacatttcatccctggaaccacagaccccgccgtcattctggatttgctgcctctgtgccggaactacgtgcggagagtgcatgttgaccagttcctaccccccgtccagctgccggctcaattacggcctggagaccagtcagacagtggcagcgagggggagatggaggagccaactgtggatcactaccaactcggcgacctggtggctgggcttagtcacttagaggagttagatttggtttatgacgtgaaggattgcggaatgaacttcgagtggaatttgttcctcttcacgtaccgggattgtctcagtcttgccgccgctatcaaagcgtgtcatacgctgaaagacggagggaaacagctgctcgagggcatgtcagataataagaccctgcttgagtttgatctgagactcagtgatgtggctcaggagtcagaatacttgatcgggcaggctctgtacgcaaatcgtgaggccgctcggcagcgcgccctgaacccctctcacttcatgtccaccatcactgctaatggcccggaaaactcagtcgggtag

SEQ ID NO: 137447 - DNA, 597 bp, synthetic construct
  misc_feature 1..597: note = Description of Artificial Sequence: Synthetic coding sequence
  source 1..597: mol_type = other DNA
atgttcttcgagcggcatcttgaaaacttgctgaagcacttcatccctggaaccactgaccctgccgttatcttggacttattacccctgtgccgcaattacgtcaggcgcgttcacgtcgatcaattcctcccgccagtccagctccccgcgcagctgagaccgggcgatcagtcagacagcggttcagagggcgagatggaggaaccaaccgtggaccactatcagttaggcgacctggtggcaggcctatctcatttagaagaacttgacctcgtttatgatgtgaaagactgcggcatgaattttgaatggaacctattcctgtttacttatcgagattgcctgtcactggctgccgcaataaaggcttgccatactctgaaagatggaggcaaacagttgctcgaaggaatgagtgataacaaaacacttcttgaattcgatctcaggctgtcggatgtagctcaggaatctgagtacttgatcggccaagctctctatgccaatagggaagctgctcgccagagggctcttaaccccagtcacttcatgtcaaccatcactgcaaacggccctgaaaatagcgtgggctag

SEQ ID NO: 137448 - DNA, 1506 bp, synthetic construct
  misc_feature 1..1506: note = Description of Artificial Sequence: Synthetic coding sequence
  source 1..1506: mol_type = other DNA
atgcaggacaccgttactacctctgcgctgctggatcccagccatagcagtgtgtctacacaggataattcctctacaggcggccacacttcgagtactagcccacagctctccaagcctagcattacacctgtgcctgccaaatctagaaatcctcaccctagggctaacatccgacgaatgcgtcgcatcatagccgaggatcctgaatggtctcttgcgattgttccgctgttgaccgagctttgcattcaacatattattcggaactttcagaagaacccgatcctgaaacagatgctgcccgaacaccagcagaaagtgctcaaccacctgagcccagatttgcctcttgctgttaccgccaacctaattgacagcgagaactattggctgcgctgctgcatgcacagatggcctgtgtgtcacgtggcacaccacgggggttcgtggaagagaatgttctttgaaagacacctggagaaccttctgaagcactttatccctgggacaacagaccctgctgtaattttggatctactccccctgtgtcggaattacgtgcgacgcgtacatgtagaccaatttttgccgcctgtgcaattaccagcccagctgcgccccggtgaccagtccgattcaggatccgagggcgagatggaggaacccactgtggaccactaccagctgggtgatcttgtagcaggcttgtcgcacctggaagagcttgacctggtgtatgatgtcaaggattgtggtatgaactttgagtggaacctgtttctgttcacctacagagattgcctctcgctcgcagccgcaatcaaagcatgccacacgctcaagatattcaagttgactagatccaaggtcgacgatgacaaggccaggatcattatcaggagcttactggaccacccggtgcttgaggagctcgatttgtcccaaaatcttattggggatcgaggcgccagaggggctgccaagctcctatcacatagtcgtctccgcgtactgaacttagcaaacaaccaagtgagagccccgggggctcaatctcttgcacacgctctcgcccacaatactaaccttattagcttgaacttgcgactaaattgtatcgaagatgagggaggacaggcactggcacatgccctgcagacaaataagtgcctgacaacgctgcatctgggggggaatgagctctctgagccaacagccaccttactctcacaggtcctggctattaacacaacactcactagcatcaacttgagttgcaaccacatcggcctggatggcggcaaacagctcctggaaggaatgtctgataataagaccttgctggaattcgatcttcgactctcagatgttgctcaggagagtgaatacctgattgggcaggccctctatgccaaccgggaggccgcccgccagcgggctctgaacccttcacactttatgtccacaattacggctaatggaccagagaattcagtcgggtag

SEQ ID NO: 137449 - DNA, 597 bp, synthetic construct
  misc_feature 1..597: note = Description of Artificial Sequence: Synthetic coding sequence
  source 1..597: mol_type = other DNA
atggagaaaagggggcgaggcgtgaaaagctcaccgatccaaactccgaaccagacacctcaacaggcacctgtgactccaaggaaagagcgccgcccttccatgttcgagaaggaggcatacactcaaatcctccgagagcgcctaagagagtccatacacaacgtgcaatatgtcgaacctcctttcgacgacagcattgctgatatcggaaaggagtggaagagtgcactggctaagttgaagttcgccaactcctaccgaatggaaccactgaaaaaattccaggctcattcagtggaaaccaaggtgcagcagatactaacagagtctctcaaagacgtaaagtacgatgataaggtcttttcacacttgtccctggaactggcggataggatcctcctggccgttaaagaattcggatatcacaggtataagtttatcataaaagtgctgtttatccaaaaaaccggccaggctatcaacatcgcatccagatggatatgggatatagcctgggacagttgggtcgccgcaaagcacgaggcagagagttacgttgccctcgtgttggtgtttgctctgtattacgaatag

SEQ ID NO: 137450 - DNA, 666 bp, synthetic construct
  misc_feature 1..666: note = Description of Artificial Sequence: Synthetic coding sequence
  source 1..666: mol_type = other DNA
atggcctctcggccactgcctcccggcagacaggaggaggagaatgcgaaggactccgggcgtaagccatctcccgtcagaccacggggctgcttgccctccatcgacgaggcccgccctgccggacccggtcctgcgcccgccagtagaaggggcagcatgctgggactggccgcctcattcagcaggcgtaactctctcgttggccctggcgccggcccaggaggtcaacgcccaagtctggggccagtgcccccactcggctctagggttagcttctccgggttgccattggctcccgcgcgttgggtagccccctcttatcggaccgagccagtacctggcgagcgttgggaggccgccagagcccagcgcgccttggaggctgccttggctgcgggattgcacgatgcctgctacagctccgatgaggccgcacgtctggtgagggagctctgcgaacaagtgcacgtacgactcagagaactatcccctcccaggtacaagcttgtctgttcagtggttctggggccgagggcaggacaaggcgttcacgtggtgtcccgggcgctgtgggacgttgcccgcgatggactcgcctctgtttcttacaccaatacttccctcttcgccgttgctacagtgcatggcctctattgcgagtag

SEQ ID NO: 137451 - DNA, 666 bp, synthetic construct
  misc_feature 1..666: note = Description of Artificial Sequence: Synthetic coding sequence
  source 1..666: mol_type = other DNA
atggcttctcgaccactccctccaggacgccaggaggaagagaatgccaaggactctggacggaagccaagtccagttagaccaagaggctgtctcccatccatcgatgaggcacgcccggccggacccgggcccgctccggccagccgccgcggatctatgctggggcttgccgcctcctttagcaggcggaatagcttggtggggcctggagctgggccaggaggtcagcgccccagtctgggacccgttcctcctctcgggagccgagtttcctttagtggcctcccactggccccagctcgttgggtcgcaccaagttataggaccgagcctgtccccggcgagaggtgggaagccgcacgcgcgcagcgcgccctggaggctgctttagccgccgggttgcatgacgcatgctacagtagcgacgaagccgcccgcctcgtacgggaactgtgtgagcaggtgcacgtcagactccgggaactcagtccaccgcgctataagctcgtgtgtagtgtggttctgggccctcgcgccggtcaaggggtgcatgtggtctctagagctctttgggatgtagcacgtgatggactcgcctcagtaagttatacaaacacttcattatttgccgtggctacagtgcacggcctttattgcgaatag

SEQ ID NO: 137452 - DNA, 1074 bp, synthetic construct
  misc_feature 1..1074: note = Description of Artificial Sequence: Synthetic coding sequence
  source 1..1074: mol_type = other DNA
atggagaggatgtccgactccgccgacaaacccattgacaacgacgccgagggtgtgtggtcaccagatatcgaacagagtttccaggaggccttagccatttatcctccttgtggaagacgcaaaattatcctgtctgatgagggtaaaatgtacggaagaaatgaattaattgcccggtacatcaagctgcggaccgggaaaactcgtacgaggaagcaggtcagcagccatatccaggtccttgcccggcggaaaagcagagattttcacagcaagctgaaagttacatccatggatcagactgcgaaggacaaggcactgcagcacatggcggccatgtcaagtgcacaaatagtcagtgccacagccatccataataagctgggcctacccgggatacccagacccaccttccccggagcgccagggttctggcccggaatgatacagaccggccagccaggatcatctcaggacgttaagccattcgtccagcaagcctaccctatccaacccgctgtgactgcaccaatcccaggatttgagccagcctctgcacctgcccccagcgtacccgcctggcaggggaggagcatcggcacaacaaagctgcggttagtggagtttagcgcatttttggagcagcagagagaccccgatagcgctgacctgaattgcaacatccaggatgatgctggcgcattctatggcgttaccagccaatacgaatccagtgagaacatgacagtcacttgcagtaccaaggtgtgttcgttcggcaaacaggttgtcgaaaaagtggagactgagtacgcgcggttcgaaaatggtagatttgtgtaccgcatcaatagaagcccaatgtgcgagtacatgattaatttcatccacaagctgaaacatctccctgagaagtacatgatgaactctgtgcttgagaactttacaatattgctcgtggttaccaatagagatacccaggaaacactgctctgcatggcttgcgtcttcgaggtcagtaattccgagcatggtgcccagcatcacatttaccgcttggttaaggactag

SEQ ID NO: 137453 - DNA, 1236 bp, synthetic construct
  misc_feature 1..1236: note = Description of Artificial Sequence: Synthetic coding sequence
  source 1..1236: mol_type = other DNA
atggagaggatgtctgacagcgcggacaagccaatcgacaatgatgccgaaggcgtgtggtccccggatatcgaacaatccttccaggaggctctggccatctaccccccctgtggccgacggaagattattctctctgatgagggcaagatgtacgggcggaacgagctcatagcccgatacatcaagctccgtacaggcaagactaggaccaggaagcaggtgtctagccatatccaggtgttagccaggaggaagtcacgtgatttccacagtaaactgaaggatcagaccgctaaggataaagccctgcagcatatggctgcaatgtctagcgctcaaatcgtatctgctacagcaatacacaataagcttggcctccctggtattccacgaccaacctttccaggcgcccctggtttctggcccggaatgatccaaacagggcagcccggttccagccaggacgttaaacctttcgtgcagcaagcctatccgatccagccagcagtgaccgcaccaattcctgggttcgagcctgcttccgctcccgcgccatccgtgccagcttggcaaggaaggagcattgggaccactaaattgaggctcgtggagtttagtgcctttttagagcagcagcgggacccggatagctacaataagcacctgttcgtccacattggccacgcgaatcattcttactccgatcctcttctcgaaagcgtcgacattcgacaaatttacgacaagttcccggaaaagaagggagggttgaaggagctttttggcaaggggcctcaaaacgcgtttttcctagttaagttttgggcagatctcaactgcaacattcaagatgatgcaggagcattctatggggttacatcacagtatgaatcttctgagaacatgaccgtcacatgtagcaccaaagtgtgttcctttggaaagcaggtcgtggaaaaggtggaaaccgagtatgctagattcgagaacggcaggttcgtatatcggattaatcgcagtcccatgtgtgaatacatgatcaactttatacataaactgaagcatttacccgaaaaatacatgatgaattcagtactggagaatttcaccattctactggtcgtaaccaacagagacacgcaggagactctgctgtgcatggcatgtgtgttcgaggtttcaaacagcgaacatggagcgcaacaccacatttatcggctggtgaaagactag

SEQ ID NO: 137454 - DNA, 1281 bp, synthetic construct
  misc_feature 1..1281: note = Description of Artificial Sequence: Synthetic coding sequence
  source 1..1281: mol_type = other DNA
atcgaacctagctcctggtccggctctgagagtcctgctgagaacatggagcgtatgagcgattcggctgacaagccgattgacaatgatgcagaaggtgtctggtcccctgacatagaacagagttttcaggaagcgctagctatctatccaccctgtggccgtcggaagatcattctgtctgatgagggcaagatgtacggacgtaacgagttaattgctcgttacattaagctgagaacgggaaagactcggaccaggaaacaggtatcatctcacattcaggtgctggcacgaagaaagtcccgagacttccattccaaacttaaggaccagaccgctaaggacaaggccctccagcatatggctgcgatgtcctccgcccagatagtctctgccactgcaatccacaacaaattaggactgccagggatccctaggcctactttccccggggcccccggcttctggcccgggatgatacaaaccggccagcccggatcctctcaggatgtaaagccatttgtgcagcaggcatatcctattcaaccagccgtgacggcgcctatccccggattcgagcccgccagtgcaccagcgccatccgtgccggcctggcaaggaagatccatcggcaccacaaagttgcgtttagtcgaattcagtgcgttcctggaacaacagcgagatccagactcttacaataaacatttgttcgtccacattggacacgccaatcacagctactcagatccccttctggagagcgttgacatcaggcagatctacgacaagttcccagagaagaagggtgggctaaaggaactgtttggcaaaggcccacaaaatgccttctttttggtgaagttttgggctgacttaaactgtaatatacaggatgacgctggggccttctacggggtaactagccagtatgaatcctccgaaaacatgaccgttacctgttcgaccaaggtctgcagcttcggtaagcaggttgtcgaaaaggtggaaaccgaatatgcgagatttgagaacggaagattcgtgtacagaatcaacagatctccgatgtgcgagtacatgattaattttatacataaactcaaacacctgcctgagaagtatatgatgaatagcgtgctggaaaattttacgatcctgctggttgtgaccaaccgggacacgcaggaaaccttgctgtgtatggcatgcgtcttcgaggtgtccaactcagaacacggagcccagcatcatatctatcggttggtcaaagactag

SEQ ID NO: 137455 - DNA, 993 bp, synthetic construct
  misc_feature 1..993: note = Description of Artificial Sequence: Synthetic coding sequence
  source 1..993: mol_type = other DNA
atgcgctatgtgctgtcctggtgcgtgacagtaacttttaaggatcagactgcgaaggacaaagccttacagcacatggctgcaatgtcgtctgcccagatcgtttcagcaactgccatccacaataagctgggcttgcccggcatccctaggcccacttttccgggcgcaccaggcttttggccagggatgattcagactggacagccaggttctagccaggacgtcaagcccttcgtccagcaggcctatcccattcagccagccgtgacggcccccattcccgggtttgagcccgcctccgcccccgccccctctgtcccggcgtggcagggtcggtccatcggaacgaccaagctcaggctggtcgagttcagtgcgttcttagaacaacaacgagatcctgactcctacaacaagcaccttttcgtgcatattggacacgcaaatcattcttactccgacccactcctcgaaagtgtcgatattcggcagatttatgataagttccctgagaagaagggaggcctgaaggagctgttcgggaaaggccctcaaaacgcttttttcctcgtgaagttttgggcagatctgaattgtaatatccaggatgacgccggcgcattttacggagtgacatcacagtacgagtcttctgagaacatgaccgtaacctgctcgactaaggtgtgttcctttggcaaacaagttgttgagaaggtcgaaacagaatatgctaggttcgagaacgggcgcttcgtttacagaatcaatcgctctcccatgtgtgaatacatgatcaattttattcacaagttgaagcaccttccagagaagtacatgatgaactcagtactggagaattttaccatcttgctcgtggtcaccaatagggatacccaggaaacactactttgtatggcctgcgttttcgaagtcagtaacagcgagcacggtgcccagcatcatatctaccgcctggttaaggactag

SEQ ID NO: 137456 - DNA, 207 bp, synthetic construct
  misc_feature 1..207: note = Description of Artificial Sequence: Synthetic coding sequence
  source 1..207: mol_type = other DNA
attgagcccagtagctggtctggttccgaatcaccagccgaaaacatggaacgcatgtccgattctgctgataagcccattgataatgatgcggaaggagtatggtctcctgatattgaacagagtttccaagaggccctcgctatatatcccccttgtggacggcgaaaaatcatccttagcgacgaaggcaagatgtacgggtag

SEQ ID NO: 137457 - DNA, 1281 bp, synthetic construct
  misc_feature 1..1281: note = Description of Artificial Sequence: Synthetic coding sequence
  source 1..1281: mol_type = other DNA
attgaaccgagttcatggagtgggtctgagtcacctgccgagaatatggagagaatgtcagacagcgccgataaaccaatcgacaatgatgccgaaggcgtatggtctccggatattgagcaatcatttcaagaggcccttgccatatatccaccctgcggccgcaggaaaatcattctctccgacgaaggcaaaatgtatggccgcaatgaacttatagcccggtacataaaactacggaccggcaagacacgcacccgaaagcaggtgtcttcacacatccaggttctcgcacgcaggaaaagcagggactttcattctaagttgaaggatcagaccgcgaaggataaggccctgcagcatatggccgcgatgtcttccgcccagattgtcagtgcgaccgccatccacaataaactcgggctcccagggatacctaggccaacttttccaggcgctcccgggttttggcccgggatgatccagacaggacagcccggcagctcccaggacgtaaaaccttttgtgcaacaggcttaccctatccagccagcagtaaccgctcctattcctggtttcgaacccgcttccgctcccgctccttctgtgcccgcatggcaggggcgctccatcggtaccacaaagttaaggctggttgagttttcggcttttctggagcagcagagggaccctgatagctacaataaacacttgttcgtgcatatcggtcacgcaaaccattcatacagtgacccgcttctggagagtgtggatattaggcaaatctatgacaaattcccagagaagaaggggggtttaaaggagctattcgggaagggaccccaaaatgccttcttccttgtcaagttctgggccgatctgaattgcaacattcaagatgacgcaggagccttctacggagtcacatcgcaatacgagagctccgaaaatatgaccgtcacctgtagcactaaagtctgctcctttggcaaacaggttgtggaaaaggtggagactgagtatgctcgcttcgaaaatgggaggtttgtgtaccgcattaacaggtctcctatgtgtgagtatatgatcaacttcatccataaactgaagcacttacccgagaagtatatgatgaactctgtgttagagaactttaccattttactcgtagtgacaaatcgagatactcaggaaactctcctctgtatggcatgtgtattcgaagtctccaatagtgagcatggtgcccagcaccacatctaccggcttgttaaggactag

SEQ ID NO: 137458 - DNA, 1344 bp, synthetic construct
  misc_feature 1..1344: note = Description of Artificial Sequence: Synthetic coding sequence
  source 1..1344: mol_type = other DNA
atgggtgagcccagagccggagcagctctggacgacggaagtggttggaccggtagtgaggaagggtcagaagaaggaacagggggatccgaaggggcaggtggcgatggcgggcccgatgctgaaggggtgtggtcccccgacatcgagcagagctttcaagaggctctagcgatatacccaccatgtggccgaaggaaaatcatcctaagcgacgaggggaagatgtacggaagaaatgagctgatagccagatacataaaacttaggaccggaaagacaaggacccggaaacaggtctcatcccatatacaggtgctggcacgccgaaaatctagggagatccagtctaagttgaaagatcaagtctctaaagataaagcctttcaaacgatggccaccatgtcctcagctcagctcatcagtgccccatcattgcaggccaaactggggcccaccggcccccaagcttccgaactattccagttttggagtggcggatccgggccaccttggaacgtacctgatgtcaaaccgttttcccaaaccccttttacattgtctctgacacctccttccactgatcttcccgggtacgagcctccgcaagccctctcacctttacctccgcccactccaagtcctcctgcttggcaggcccgaggcctagggaccgcaaggttacaacttgttgagttttccgcattcgttgaacctcctgatgctgtcgactcgtaccagaggcatctgtttgttcatatatcccagcattgtcctagtccaggtgccccgccattagagtcagttgacgttcggcaaatctatgataagtttcccgagaagaagggaggccttcgggagctatatgaccgcgggcccccccacgcttttttcctcgtgaagttttgggccgatttaaattggggaccctccggtgaggaggccggagctggggggagtatctcatctggaggcttctacggggtctccagtcagtatgagtcacttgagcacatgactctcacctgcagcagcaaggtgtgcagctttggaaagcaggttgtggaaaaagtagagacggaaagggctcaattagaggacggtaggttcgtctatagactcctacgctcccctatgtgcgaatacctcgttaacttcctgcacaaactgcgccagctgcctgagcggtatatgatgaactctgtactggagaactttaccatcttacaggtggttacgaaccgcgacacacaagagcttcttttgtgcactgcttacgtgtttgaggtgtcaacctcagaacggggcgcccagcaccacatctacagactggtgcgcgactag

SEQ ID NO: 137459 - DNA, 1353 bp, synthetic construct
  misc_feature 1..1353: note = Description of Artificial Sequence: Synthetic coding sequence
  source 1..1353: mol_type = other DNA
atgggagagccaagagcgggcgcagctctggatgacgggtccgggtggacgggctccgaggaaggtagtgaggagggtaccggcggatcagaaggtgctgggggggacggcggcccggatgcagagggggtttggagtccagacatcgagcagtctttccaggaagctttggctatctacccaccctgtggccgaagaaaaataatcttgagcgacgagggcaaaatgtacgggaggaatgagttaatcgcgcggtatatcaagttgcggacaggcaaaacccggacccgtaaacaggtctcgtcacacatccaagtgctagctcggcggaaaagcagagagatccagagtaaactgaaagatcaggtttcaaaggataaggctttccagactatggctaccatgtccagcgcccagctaattagcgccccctctctccaggcaaaactcggcccaacgggaccccaagtggtgcaggccagtgagctcttccagttctggagtggcggctcgggccccccttggaatgtaccagacgtgaagccgttctcgcagactccctttaccctgtctttgacccccccctccacagacttgccagggtatgagcccccccaagctctctccccccttccacctccaaccccctctccaccggcgtggcaggcacggggcctagggaccgcccgattgcagctggttgagttttccgctttcgtggaaccgcccgacgccgtggatagctaccagcggcacctcttcgtccacatttcacagcattgccccagccccggagcaccccccctggagagcgtggacgtccgtcagatttacgataagttccctgagaagaaaggcgggctccgcgaactgtatgatagaggacctcctcatgctttcttcctggttaaattctgggcagatttgaattggggcccgtccggggaagaagctggcgccggaggttctatctcttccggtgggttctacggtgttagctctcagtatgagtcactggaacacatgaccctgacctgcagcagcaaggtatgtagcttcgggaagcaagtggtggaaaaagtcgagacggagagggcccagttggaggacgggaggttcgtctaccgtttgttgcggtccccgatgtgtgaatacctcgtcaactttttgcataaactgaggcagctccccgaaagatacatgatgaatagcgtactcgaaaactttactatcctgcaagtggtgacaaatcgggacacgcaggagctgctcctttgcactgcttacgtctttgaagtgagcactagcgaaaggggcgcacagcatcacatttatcgcctggtgagggattag

SEQ ID NO: 137460 - DNA, 960 bp, synthetic construct
  misc_feature 1..960: note = Description of Artificial Sequence: Synthetic coding sequence
  source 1..960: mol_type = other DNA
atggctacaatgtccagtgcccagcttatctctgcaccatctctgcaggctaagctggggcccactgggccccaagtggtgcaggcaagtgaactgtttcagttttggagcggggggtccggccctccctggaatgttcctgatgtgaaaccgttcagtcagaccccctttactttgtctctgacgccaccctctactgacctgccgggatatgaacccccacaggcgctgtctccactgccacctcctacaccatccccccctgcatggcaagccaggggtctcggcaccgccaggctgcagcttgtagaatttagtgctttcgtggagccccccgatgctgtggatagctaccaacggcatctgtttgtacacatctcccagcattgcccaagccctggggcgccccctctggagagcgtagatgtgaggcaaatctatgataaattccctgagaaaaaaggcggattgagggaattatacgataggggaccacctcacgctttttttctggtcaagttttgggccgacttgaactggggaccgtcaggggaagaggcaggagctggcggctcgataagtagcggaggcttttacggcgtgagctcacagtatgaatcactggagcatatgacacttacatgctcttcaaaggtctgctcattcgggaagcaggtggtggaaaaggttgaaacagagagagctcagctagaggacggacggttcgtgtataggctgctcaggtcacccatgtgtgagtacctggtaaacttcctgcacaagctgcggcaactacccgagcgatacatgatgaatagtgtcctggaaaacttcaccattctccaggtggttaccaaccgcgatactcaggagctgctcctctgcaccgcttatgtgtttgaggtgagcaccagcgaacgtggagcacagcatcatatctacaggctggtccgggattag

SEQ ID NO: 137461 - DNA, 1356 bp, synthetic construct
  misc_feature 1..1356: note = Description of Artificial Sequence: Synthetic coding sequence
  source 1..1356: mol_type = other DNA
atgggcgagccacgggcgggagccgccctggatgatgggtctgggtggaccggtagcgaagaggggtcggaggaaggaacgggcggatctgaaggcgctggcggagatggaggcccggatgcagagggtgtgtggtctcccgatattgagcagtcctttcaagaggcactagccatttaccccccatgtggtcgccgtaaaattattttgagcgacgaggggaagatgtatgggcggaacgaactgattgctcgttacattaagctgaggacgggcaaaacaaggacaagaaagcaggtaagtagtcacatccaggttcttgcgcgccgcaagtctcgggagattcagtcgaagctgaaggccctcaatgtggaccaagtcagcaaagacaaggcctttcagaccatggcaactatgtcatcagcccagctgatttccgcaccttctctccaggccaaactcggcccgactggacctcaggcttccgaactgttccagttttggtctggaggctcgggcccaccttggaacgtcccagatgttaaacccttctcccagacccctttcaccctctctcttacaccaccctcaacggatttaccaggttacgagccaccccaggccctctccccattgccacccccaaccccaagtccccctgcttggcaggctcgggggctaggaacagctcgcctccagctggtcgaattctccgcctttgttgagcctccagacgcagtcgactcataccaacgccacctgttcgttcatatcagccagcactgcccatcccctggagctcctccactggagtccgttgacgttcgacagatctacgacaagttcccagaaaaaaaaggagggctccgggagctgtacgatagaggacctccccacgctttcttcctggtaaagttttgggccgacctgaattggggccccagcggggaggaagctggtgctggaggctccatttcgtccggcggcttttacggagtgagcagtcaatatgagtctcttgaacacatgacactcacctgctcaagtaaggtgtgcagcttcggcaaacaggtggtcgagaaggtggaaactgaaagggcccagctagaggatgggagatttgtgtacagactactgcgcagcccaatgtgtgagtaccttgtgaatttcctgcacaaactgcggcagctccccgagcggtatatgatgaacagtgtcctggaaaattttacgatcctgcaggtggtgactaaccgtgacactcaggaattgctgctctgtacggcttacgtgttcgaagtgtctacttcagaaagaggggcgcagcaccacatctaccgtctggtaagagactag

SEQ ID NO: 137462 - DNA, 1356 bp, synthetic construct
  misc_feature 1..1356: note = Description of Artificial Sequence: Synthetic coding sequence
  source 1..1356: mol_type = other DNA
atgggagagccccgagctggagccgctctggatgacggctcgggctggaccggaagcgaagaggggagtgaagaagggaccggagggtccgagggggccggcggagacggcggtccagacgcagaaggcgtgtggtcacccgatatcgaacagagctttcaggaagccctggcaatttatcctccatgtggtagacgtaagattatactttctgatgagggaaaaatgtacggcaggaacgagctgatcgcacgttatattaaactgcggactgggaagacgaggacgaggaaacaggtgtcctcccacatccaggtgttggctcgtagaaaaagccgggaaattcaaagtaagctgaaggctctgaatgtagaccaggtgagtaaggacaaagccttccaaaccatggccacaatgagctccgcacagttaatttccgcccccagccttcaagctaagctcggtcctacagggccccaagcgtctgagcttttccagttctggagcggaggctcgggccctccatggaacgtccctgacgttaagccgttttcccagacccccttcacgcttagcctgactccaccttctaccgacttgccaggttatgaacctccacaagccctcagccctttaccccctccgacgcccagtccgcctgcctggcaggcccgtggactcggtaccgcacgattacagcttgttgaattctccgcttttgtagaacctcccgacgccgtggactcttatcaacgccatctgttcgttcatatctcccagcattgtcctagccccggcgcacccccactagaatctgtcgacgtccgtcagatctacgataagtttcccgagaagaagggcggactgagggagttgtacgacagaggtcccccacacgcattttttctagtgaagttttgggctgatctgaattgggggcccagcggcgaagaggcaggggcgggaggatccatcagcagtggcgggttctatggcgtctcttcccaatacgagtcactcgaacatatgactttaacctgttcatccaaggtttgctcattcggcaagcaagtggtggaaaaggtggagacagagcgcgcacagctggaggacggaaggtttgtctatagactgctgcggtcgcctatgtgtgagtacctggtgaactttctacacaaactcaggcagctccccgaaagatatatgatgaacagtgtgcttgaaaacttcactatccttcaggtggtgacaaaccgggacacccaggagcttttactttgcacagcttatgtgttcgaagtgagcacctccgagaggggagcccagcatcatatttatagacttgttcgagactag

SEQ ID NO: 137463 - DNA, 1353 bp, synthetic construct
  misc_feature 1..1353: note = Description of Artificial Sequence: Synthetic coding sequence
  source 1..1353: mol_type = other DNA
atgggggagcctcgagcaggcgctgccttggatgacggttcaggatggacgggaagtgaagaaggatctgaggagggaacaggaggatcagagggggctgggggggacggaggacccgacgccgagggtgtgtggtcccccgacatcgaacagagcttccaagaggctttagctatttaccccccctgcggccgcagaaaaatcattttgtccgacgaaggtaaaatgtacggacgcaacgagctgattgcccggtatataaaattgcggactggtaaaacacgtacaagaaagcaggtgtcttctcacatacaggtgttggccagacgaaagtctcgggagatacagagcaaacttaaggatcaagtgagcaaagacaaggccttccagaccatggccaccatgtcttcagcacagctgatcagcgccccttctctccaggcgaagctggggcctaccggaccccaagttgtccaagcgtccgagctcttccagttctggtccggaggctctgggcccccgtggaatgtacccgacgtgaagcccttcagtcaaactccctttaccctttcactcactcccccaagcaccgacctacctggctatgagccccctcaggccctatcacctctcccaccacccaccccaagtcctcccgcttggcaggcccggggattaggcaccgcgcgactgcaactcgtcgaattttctgcgtttgtggagcccccagatgctgtcgactcctaccagcggcacctcttcgtccacatttctcagcactgtcccagcccaggcgcccccccactcgagtcagtcgatgtcagacaaatatatgacaaatttcccgaaaaaaagggcgggctaagggaactctatgatcgagggccgccccacgcattcttcctcgttaaattttgggccgacctcaattggggtccctccggcgaagaagccggggccggtggatctatttcctcgggcggcttttatggagttagctcacagtacgagtctttggaacacatgaccctgacttgtagctccaaggtctgctcctttgggaaacaagtagtggagaaggtcgaaaccgagcgggctcaactcgaagacggccgatttgtctatcgcctgctgaggtctcccatgtgcgagtatctggtaaacttcctccataaacttcgtcagttgcccgaacgttatatgatgaactctgtcctggaaaactttactatcctgcaggtggtcacgaatagggacacacaggaactccttttgtgcacagcttatgtgttcgaagtcagcacctcagagcggggcgctcaacaccatatctacagacttgtccgggattag

SEQ ID NO: 137464 - DNA, 1308 bp, synthetic construct
  misc_feature 1..1308: note = Description of Artificial Sequence: Synthetic coding sequence
  source 1..1308: mol_type = other DNA
atagcgagcaactcttggaacgcatcctcatcgccaggtgaagctagggaggatgggcccgaagggctggacaaaggactagataacgatgcagagggcgtctggagtcctgacattgagcagagctttcaagaggctctggccatttaccccccctgtggacgcagaaaaatcatactttccgacgaggggaagatgtatggcaggaacgagttaatcgctcggtacattaaactgaggacggggaaaacccgtacgcggaagcaggtgagctctcacatccaagtgttggctcgaaaaaaggtgcgcgagtatcaggtcggcattaaagccatgaacctggatcaagtaagtaaggataaggccctgcaatcgatggcctctatgagctcagcacagatcgtgtcagcatcagtactccagaacaagttctctcccccctcgccccttccacaggccgtgttttctacctccagccgcttctggagcagccccccactcctgggccagcagcctggcccctcgcaggatattaagccatttgctcagccggcctatccgattcagcctcccctgcctcctacactttcatcctatgaaccccttgccccactgccctccgccgcagcttcagtccctgtatggcaggacaggaccatcgcctcctcccggctgcggttgcttgagtacagtgcttttatggaagtccagagagatcccgatacgtattctaagcatctgtttgttcacatcggtcaaacgaaccccgccttctccgaccccccactggaagccgtggacgttcgacagatctatgacaagttcccagagaaaaaggggggcctaaaagagttgtacgaaaaggggccccccaacgcgttctttttggtgaagttctgggccgacttgaatagtactatccaagaaggtcccggcgccttctatggcgtgtcctctcagtattcctcagctgacagtatgacaataagcgtgagcacgaaggtttgctcctttggaaagcaggttgtcgagaaggttgaaaccgagtacgcgaggttagaaaatgggagattcgtataccggattcataggagcccgatgtgtgaatatatgatcaacttcattcacaaactgaagcatctgcccgagaaatacatgatgaactccgtcttggaaaacttcactatcttgcaggttgtgacgagccgagactcacaggaaacactgctcgtaattgccttcgtgttcgaagtgtcaacgagcgagcacggggcacagcaccatgtctacaaactggttaaagactag

SEQ ID NO: 137465 - DNA, 1356 bp, synthetic construct
  misc_feature 1..1356: note = Description of Artificial Sequence: Synthetic coding sequence
  source 1..1356: mol_type = other DNA
ttatctaggcccgtcggctctggtcccgagcccagagccaccagtaccatcgcgagtaatagttggaatgcatccagcagccctggcgaggccagggaggatggacctgaaggcttggataaggggctagacaacgacgcggagggcgtgtggtcccctgatatagagcagtcattccaggaggctctggctatttaccctccctgcggtaggagaaaaataattctctccgatgagggtaagatgtatggacgcaatgagctcatcgcaagatacatcaaactgagaaccgggaagacacgaactcggaagcaggtgagcagtcacctgcaggtgctggcaagaaggaagagccgagaaattcagagtaagctgaaatccagtccccaggaccaggtatccaaagacaaggccttgcagtcgatggccagtatgtcaagcgctcagatcgtgagtgcgtccgtgctccagaataaatttagcccccccagtccactcccacaagccgtgttctcaacctcttctcgcttttggtccagccccccactattaggacagcagccagggccttctcaggacattaagccctttgcacagcccgcttaccctattcagccccccctgcctcctactctcagtagttacgaacctcttgctccactgcccagcgccgcagcatctgtgcccgtgtggcaagacaggactatcgcctcctctcgactgcgcctgctggagtatagtgctttcatggaagtccagagagacccagatacttactccaagcatctcttcgttcacattggccagaccaacccagctttttcagatccgccattagaagccgtcgatgtgcgacagatatacgataagttccccgagaagaagggtggcctgaaagagctgtacgaaaaagggccaccaaacgcattttttttagtcaagttttgggcggatcttaattctactatccaggaaggtcctggggccttctatggcgtatctagccagtactcctctgctgattctatgactatatcagtgagcacgaaagtatgcagcttcggcaagcaggtggtcgaaaaggtagaaaccgaatatgctagattagagaacggtcgattcgtctaccgaattcacaggagcccaatgtgtgaatacatgatcaattttatccataagctcaagcacctccctgaaaagtatatgatgaatagtgttctagagaacttcactattctgcaggtcgtgacatcgcgcgacagtcaggagaccctcctggttatcgcctttgtctttgaggtgagtacgtccgagcacggcgcccaacatcacgtgtataagcttgtgaaggattag

SEQ ID NO: 137466 - DNA, 1176 bp, synthetic construct
  misc_feature 1..1176: note = Description of Artificial Sequence: Synthetic coding sequence
  source 1..1176: mol_type = other DNA
cttgagggcaccgcagggacaatcacatctaatgaatggtcatccccaacaagtcccgaaggctccaccgccagcgggggcagtcaggcattagacaaacccatcgataacgacgcggaaggtgtgtggtcccccgacatcgaacagagctttcaagaagcattggccatctaccccccgtgtggccggagaaagatcattctatccgatgaggggaagatgtatggcagaaatgaactgattgcccggtacatcaagctgcggaccgggaagacaagaacgaggaaacaggttagttctcacattcaagtgctggcccggagaaaggctcgtgaaatccaggctaaacttaagttctggcagggcgccctgcccgggcaagccgggacttctcacgacgttaagccattttcccaacagacctacgcggtacaacccccactacctcttcccggattcgaaagtcctgctgggcccgcgccttcacctagtgctcccccggcccctccgtggcaaggcagaagcgttgcatcgagcaagctgtggatgctggagttctcggccttcctcgaacagcaacaggatcccgacacttataataagcatctctttgttcatatcgggcagagcagtccctcctacagcgatccatatttggaggcggttgacattcggcagatttatgataagtttcctgagaaaaagggtggcttaaaggacctctttgagagagggccaagcaatgccttctttctagtgaaattttgggctgacctcaatacaaatattgaggacgagggctcttcattctatggggtaagctctcaatatgaaagtccagagaatatgataatcacctgttccaccaaagtttgttcttttgggaagcaagtcgtggagaaggtggagactgaatacgctcgttatgagaatggtcattattcttatcggattcatcgttctcctctctgcgagtacatgataaactttatacataaactgaaacacctccctgagaaatacatgatgaattcggtgctggagaactttactatactgcaggtggtgaccaatcgcgatactcaggagaccctgctttgtattgcatacgtgttcgaggtgtctgcgtctgagcatggggcacagcaccatatttatcgtctggtcaaggagtag

SEQ ID NO: 137467 - DNA, 1305 bp, synthetic construct
  misc_feature 1..1305: note = Description of Artificial Sequence: Synthetic coding sequence
  source 1..1305: mol_type = other DNA
ctagagggcaccgctggaactatcacatcaaacgaatggtcctcacccacctcccccgaggggtccacggctagcggtggtagccaggctctcgataagcccatcgataatgacgcggaaggggtatggtcccctgatatcgaacaatcattccaggaggctctggcgatttaccccccctgcggtcggcgtaaaattattctaagtgacgaagggaagatgtacggcaggaatgagctgatagcgcgatacattaaactgcgcactggcaaaacccgaactaggaaacaggtatctagtcacattcaagtacttgctcgacgcaaagccagggagattcaggctaagctgaaagaccaagccgccaaggataaagcccttcaatcaatggcggctatgagttctgcccagatcatctctgcgaccgcttttcatagttccatggcccttgcacggggtcctggacgtcctgctgtgagcggtttttggcagggcgcattgcccggccaggctgggactagccatgacgtcaaacccttttcccagcagacttacgctgtccagccccccctgccactcccaggcttcgagagcccagcaggccctgctcctagcccatctgcgccgcctgctcccccttggcaaggccgtagtgttgcttccagtaaactgtggatgttggagtttagcgcctttcttgaacagcagcaagatccggatacttacaataaacacttgtttgtgcacatcggtcagtcaagcccatcctactccgacccttacctcgaggccgtggacattagacagatttatgataagtttcccgaaaagaagggcggactgaaagacctttttgagcggggccccagtaacgctttctttttggtgaaattttgggcagacctcaacaccaatatcgaagatgaggggagtagtttttatggcgtttcatcccagtatgagtcacctgagaacatgattattacctgttcaaccaaagtctgctcattcggaaagcaggtggtggaaaaggtagagactgagtatgcgcgttacgagaacggccactactcctatcggatccacagaagtccactttgcgaatacatgatcaacttcatacacaagttgaaacatctgcctgagaaatacatgatgaatagcgtgctggagaatttcacaatactccaagtggtgactaatcgggatacacaagaaacccttctgtgcattgcgtacgtgtttgaggtttccgcatcggagcacggagcacagcatcacatttataggctggtcaaagagtag

SEQ ID NO: 137468 - DNA, 918 bp, synthetic construct
  misc_feature 1..918: note = Description of Artificial Sequence: Synthetic coding sequence
  source 1..918: mol_type = other DNA
atggcagctatgagctcggcgcagataatcagcgcgacagccttccatagctcaatggccctggcacgggggcctgggaggcctgctgtgtccggcttttggcagggcgccctccctggccaagctggtaccagccatgacgtgaagccattcagccagcagacctacgcagttcaacccccgcttccactacctgggttcgagtcacccgctgggccagcaccatccccaagcgcccccccagcccccccctggcagggccgatccgtggcttctagcaaactctggatgcttgagttttccgctttcttggagcagcaacaggatcctgacacttataacaagcacctcttcgttcacattggtcagtcaagtccctcatacagcgatccctacctggaagcagtcgatatccggcagatatatgataaattccccgagaagaagggtggcctgaaggacttatttgagcgcgggccctcaaatgcattctttctcgtgaaattctgggcggatctcaatactaacattgaagatgagggcagtagcttttatggggtgagcagccagtatgagtctcctgaaaatatgatcattacctgctcaaccaaggtttgctcttttggtaagcaggtggtggaaaaagtcgaaactgaatacgctcgatatgaaaatggtcactatagctatcgcattcatagatcaccgctgtgcgagtacatgattaactttattcacaagctgaaacatctgcccgaaaaatacatgatgaatagcgtgctagaaaatttcactatcctgcaggtggtgaccaacagagatacacaggagaccctcctgtgcatcgcatacgtgttcgaggtaagcgcctccgagcatggcgcccaacatcatatctaccggctcgtcaaagaatag

SEQ ID NO: 137469 - DNA, 219 bp, synthetic construct
  misc_feature 1..219: note = Description of Artificial Sequence: Synthetic coding sequence
  source 1..219: mol_type = other DNA
cttgagggaactgcaggcaccattaccagcaacgagtggagcagcccaactagtccagaaggatctacagcttccggcggcagtcaggcactggacaagcctatcgataacgatgcggagggagtatggagcccggacatagagcagtcttttcaggaagccctcgctatctacccaccttgtggtagacgaaagattatcttgtctgacgaagggtag

SEQ ID NO: 137470 - DNA, 69 bp, synthetic construct
  misc_feature 1..69: note = Description of Artificial Sequence: Synthetic coding sequence
  source 1..69: mol_type = other DNA
ctggagggaaccgccggcacaataacatcgaacgaatggtcatccccaacctctcccgagggttcttag

SEQ ID NO: 137471 - DNA, 528 bp, synthetic construct
  misc_feature 1..528: note = Description of Artificial Sequence: Synthetic coding sequence
  source 1..528: mol_type = other DNA
ctggagggtactgccgggactattacctcaaacgaatggagttctccaacctcaccagaggggagtacagctagtgggggctctcaggctttggacaaaccaatagataacgatgcagaaggagtttggagcccggacatcgagcagagttttcaggaagctctggccatctaccccccgtgcggcagacggaagatcatcctcagcgacgagggcaagatgtatgggcgcaatgagctgatagctcgctatatcaagttacggacaggcaagactcggactagaaagcaagtttcctctcatatacaggtgctcgccaggcgtaaggcccgcgagatccaggccaagctgaaggaccaggccgcaaaggacaaggctctgcagtcaatggcggccatgagcagcgcccagataatcagtgcaactgctttccattcgagtatggccttggcccgcgggcccggaagaccagccgtctctggcttctggcagggggctctccccggccaggccggcacatcccattag

SEQ ID NO: 137472 - DNA, 3099 bp, synthetic construct
  misc_feature 1..3099: note = Description of Artificial Sequence: Synthetic coding sequence
  source 1..3099: mol_type = other DNA
atgtgtaacgaggagaccgagatcaaagaagctcagtcttaccaaaacagtccagtgtcctctgctacgaaccaggacgccggatacgggtccccgttttccgagtcctctgatcagctggcgcatttcaagggctcctcaagtcgggaagagaaggaagatcctcagtgtccagactcagtgagctacccgcaagactccctagctcagattaaggccgtgtatgccaacctcttctccgagagttgctggtccagccttgcattagatctgaagaagtctggctccacaacgagcacaaacgatgcaagtcagaaggagagctctgccccaacacccaccccccccacctgccctgtgagcacaaccggacctaccacctccacccccagtacttcatgctctagcagcacttcccactcatccaccacttctactagttcttcatccgggtacgattggcaccaggcagctctcgcaaaaacactgcagcagactagtagttacgggttactgcccgagccttcactcttttccactgtccaactttaccgccagaacaataagctgtatggaagtgtcttcactggtgctagtaaattcaggtgcaaggactgttctgcagcatacgacacgctagtcgagctgacagttcacatgaacgaaacaggccattaccgggatgacaatcgcgataaggactcagaaaagaccaagcgatggtcaaaaccgcgtaaaagatctctgatggaaatggagggaaaggaggatgcccagaaagtactgaagtgcatgtactgtggtcattccttcgagtccctgcaggacctctcggtgcacatgatcaagaccaagcactatcagaaagtgcccctgaaggaaccggttccagcgattactaaacttgtcccatccaccaaaaaacgcgccctccaagacctagcgcccccgtgtagcccagagcccgccggcatggcagctgaagtagccctgtccgaatcagctaaggatcagaaggccgccaacccctacgtcactcctaataatcgctatgggtaccagaacggagcttcatatacatggcagttcgaggcccgcaaggctcaaattctcaagtgcatggagtgtgggagtagccacgatacactgcagcagttgaccgcccacatgatggtgacaggccattttttgaaggtaaccacttccgcatctaaaaagggcaagcaattggtcctcgatcccgtggtcgaggagaagatacagagcattccacttccccctaccacacacaccaggctgcccgccagcagcataaagaagcaaccagatagccccgccggctctacaacgagtgaggagaaaaaggagcctgaaaaggagaagccccctgtcgcaggggacgcggaaaaaattaaggaggagagcgaagatagcctcgagaaatttgaaccatcaactctttatccatatctgcgcgaagaggacctggatgacagccccaaaggcggtctggatatcctgaagtccctggaaaataccgttagtaccgccatctccaaagcacaaaatggagccccctcatgggggggctacccgagcatacacgcggcttaccagctgcctggaacggtgaaacctttgcccgcagctgttcagtcagtgcaggtgcagccgagctacgccgggggcgtgaaatccctctcttccgcagagcataatgcacttctgcactcccctgggtcactcactccacctccacataaatcgaacgtgtccgcaatggaggaattagtggagaaggtgacagggaaagtgaacatcaaaaaagaggagagacctccggaaaaggagaagagtagtctggccaaagccgcatcgcctattgctaaagaaaacaaagacttcccaaagaccgaagaggtttcagggaagccgcaaaaaaaaggcccagaagccgaaacggggaaagccaagaaggaagggccgctcgacgtccataccccaaacggcaccgagcccttaaaagccaaagttacaaacggatgtaataatctgggaataattatggatcacagcccagagccctcctttattaaccccctcagcgcactacagagtatcatgaatactcatcttggaaaagtaagcaaacccgtaagtccgtctctggatcccctcgccatgctttacaaaatctccaactcgatgctagacaagcccgtctatcctgctacacctgtgaagcaggcagacgctattgacaggtattactatgaaaactcagaccagccaatcgatctgaccaagtccaagaataaacctctcgtgtccagcgtggcagattcagtcgcctcgccattgagggaatccgccctcatggacatcagcgacatggtaaagaacctgaccggacgcctgaccccgaaaagcagcaccccctctacggtttcggaaaagtcagacgccgatggatctagcttcgaggaagctctggacgaactgtctccagtgcacaaacgtaaagggcggcaaagcaactggaaccctcagcaccttctcattctgcaggctcagttcgcatccagccttagggagaccacagagggcaagtatattatgagcgacttaggaccacaagagcgggtccacatttcaaagttcaccggactgtctatgacaactatctctcattggcttgctaacgtgaagtatcagttacgtagaaccggcggaaccaagtttctgaagaatttggacactggccacccagtcttcttctgtaacgactgtgcgtcccagttccgtaccgcgagcacatacatcagccaccttgaaacacatctcggcttctcgttaaaggatctgagtaagcttcccctgaaccaaatccaggagcagcagaacgtctccaaggtgctgacaaacaaaactctcggccccctgggggccacagaggaagaccttggatcaacctttcaatgtaagctgtgtaaccggactttcgcatccaaacatgctgtgaaactgcacctgtccaaaactcacggaaaaagcccggaggatcacttaatttatgtaactgagctggaaaagcagtag

SEQ ID NO: 137473 - DNA, 237 bp, synthetic construct
  misc_feature 1..237: note = Description of Artificial Sequence: Synthetic coding sequence
  source 1..237: mol_type = other DNA
atgtgcaacgaagagaccgaaatcaaggaggctcaatcgtaccagaattccccagtttcctctgcaacaaaccaagatgcaggatacggttctccattttcagaaagctctgatcaactagcacactttaagggatcctccagtagggaagaaaaagaagaccctcagtgtcctgactccgtgtcctacccccaagatagtttagcccagataaaagctgtgtatgccaacctgtag

SEQ ID NO: 137474 - DNA, 321 bp, synthetic construct
  misc_feature 1..321: note = Description of Artificial Sequence: Synthetic coding sequence
  source 1..321: mol_type = other DNA
atgtgtaacgaagagaccgagattaaggaggcccagtcttaccagaatagccctgtatcttcagctaccaaccaggatgcaggatatggttctccattctcagagagttctgatcagctggcgcacttcaaagggagcagctcgagggaggaaaaagaggatccacagtgtccagacagtgtatcttacccccaggattctctcgctcagattaaagcagtgtacgcgaatttattctccgagtcatgttggagtagcctggccctggacctgaaaaagtccgggagtacaaccagcaccaatgacgcctcgcagaagtag

SEQ ID NO: 137475 - DNA, 3096 bp, synthetic construct
  misc_feature 1..3096: note = Description of Artificial Sequence: Synthetic coding sequence
  source 1..3096: mol_type = other DNA
atgatggcggctgccctgctgcactataccggctatgcccaggaggaacagctgaaagaggaagaggagataaaggaggaggaggaagaggaggactcaggaagtgtcgctcaactgcaagggggtaacgacactggaacggacgaggagctggagacaggccccgagcagaaaggatgcttctcttatcaaaattcccctggttcgcacctgagtaaccaagatgctgaaaatgagagcttgttatccgacgcctccgatcaagtgtctgatattaaaagcgtctgtgggcgtgacgccagcgacaaaaaagcacatactcacgtgagactccccaacgaggcacacaattgcatggacaagatgactgccgtctatgcgaacatcctctcggatagctactggtcaggattaggcctgggattcaagctctctaattccgagcgacgtaattgcgacacccggaatggatccaacaagtcagacttcgattggcatcaggatgccctatctaagtctctgcaacagaacctaccttctcggtctgtatccaaaccctctttgttttcatcagtccagttatacaggcagtcaagtaaaatgtgcggcacggtctttactggtgcctctagatttagatgtaggcagtgttcggccgcttacgacacactagtggaattgaccgtccacatgaacgagactgggcactaccaagatgacaataggaaaaaggacaagctgcgccccacctcctactcaaaacccaggaaaagggccttccaggacatggataaagaagatgcccagaaagttctcaagtgtatgttttgtggggattcattcgacagccttcaggacctgagcgtgcacatgatcaagacaaaacattatcaaaaggtcccccttaaggaacccgtgccaactattagttccaaaatggtgacgcctgccaagaagcgcgtcttcgacgtgaatcggccatgctcgcccgactccaccacaggatcatttgctgactcgttctcttcccagaaaaacgccaacctgcagctatcctctaataataggtacggctaccagaacggagcctcatatacgtggcagttcgaagcttgtaaatcacaaatacttaagtgtatggagtgtgggtcttctcacgatacgttgcagcagctgaccacacatatgatggttactggccattttttgaaggtcacgtcctctgcctctaagaaaggtaagcaactggtcctggatcccctggccgtcgagaagatgcaatctctgagtgaagcccccaattccgattctcttgcccccaagccatcctccaacagtgcaagcgattgtactgctagcactacagagcttaagaaggagtccaagaaggaaagacctgaagaaactagcaaggacgaaaaggtggtcaaatccgaggattacgaagatcccctgcagaaaccgctcgatcccactatcaagtaccaatacttaagagaagaggacttggaggatggcagtaagggcggaggggatattctcaaaagtctcgagaacactgtcacaacagctatcaacaaagctcagaacggggctccctcctggtccgcctacccttcaattcacgcagcctaccaactaagcgagggaacaaagccaccactgcctatgggtagtcaggtgcttcagataagaccaaaccttactaataaactgcgcccgatagctcccaaatggaaggtaatgccactagtctcaatgccgacccacctcgctccatacactcaggtgaaaaaggagtccgaagacaaagacgaggcggtgaaagaatgtggtaaagagtcaccccacgaagaagcctcatccttttctcacagcgaaggggactcattcagaaagagtgaaacgccgccggaggcaaaaaagacagagttggggccacttaaggaggaagaaaagctgatgaaggagggctcagagaaagagaagccccagccactggagcccacatccgcgctgagcaatggctgcgctctggccaaccacgccccagctcttccctgcatcaaccctttgtctgcgctgcagagcgtgctgaataaccatttggggaaagcaaccgaaccccttagaagtccgtcctgtagcagtcccagctcatcaacgatctcgatgtttcacaaaagtaacctgaatgtgatggacaaacctgttctaagtccggctagcacaaggtccgcgtccgttagtcggcggtatctgtttgagaactctgatcaacccatcgatctaacgaagagtaagagtaagaaagccgagagtagccaggctcagagttgcatgtctccccctcaaaagcacgccctgagtgacatcgcagacatggttaaggttttacctaaagccactactcctaaacccgccagttcctccagagtgccacctatgaaactggagatggatgtgagacgtttcgaggatgtcagtagcgaggtgtcgacgctccacaaacggaagggacgccaatcgaattggaatcctcagcacctgctcattctccaggcccagtttgcctcctcattgttccagacgtcggaaggcaagtatctgctcagcgatttgggcccccaggagcgaatgcagatcagcaagttcacgggattaagcatgactacaatttcgcactggctggccaatgtgaagtatcaattgcggaaaacagggggaacaaaattcctgaagaacatggataaggggcatccaatcttttattgttccgactgcgcttctcaattcagaacaccttccacttacatctcccacctggaatctcacctggggttccaaatgaaggatatgacccgcctgtcggttgatcagcaaagcaaagtcgaacaagagatctctcgggtgtcatcagctcagaggtcccctgagacaattgctgctgaagaagataccgacagtaaatttaagtgtaagctgtgttgtcggaccttcgtgagtaagcatgcagtcaaactgcatctgtctaagacccattccaaatcccccgaacaccacagccaatttgtcacagacgtggacgaggaatag

SEQ ID NO: 137476 - DNA, 3105 bp, synthetic construct
  misc_feature 1..3105: note = Description of Artificial Sequence: Synthetic coding sequence
  source 1..3105: mol_type = other DNA
atgccccgaagaaaacagcaagctcccaagagggcagccggttacgctcaggaggagcagctgaaggaggaggaagagatcaaagaggaggaagaggaggaggactccggctccgtggcgcagctgcaagggggaaacgatactggtactgacgaagaactcgagacaggacccgaacagaaaggatgcttttcgtatcaaaattctcccggatctcacctgtccaaccaagacgccgaaaacgagtctctcctcagtgacgccagtgatcaagtatctgatataaagagcgtgtgtggtcgcgacgctagcgataaaaaagctcatacacacgtgagactaccaaacgaggcccacaactgtatggacaagatgaccgctgtttatgctaacattctctctgattcatactggtctggtctgggcttggggtttaagctgtctaactccgaacgcaggaactgtgacacacggaatggcagcaacaaatccgattttgactggcaccaagacgcattatctaaatcacttcagcagaacctgccctcaaggtccgtgagcaaaccgagcttattctcctctgtgcagctgtatcgacagagcagtaaaatgtgtggaaccgtgttcaccggcgcctccaggttcaggtgtagacagtgtagcgctgcctacgacacactggttgaactcacagtgcatatgaacgaaactggtcactatcaggacgacaacaggaagaaggacaagcttaggcctacctcgtactccaagcctcgcaagcgagcctttcaagacatggataaagaagatgcccagaaggtgcttaaatgcatgttttgtggagattcctttgattccctccaagacctctctgtccacatgattaaaacaaagcattatcagaaagtgccgcttaaagaacctgtgcccacaatctctagcaagatggttacgccagccaagaagagggtgtttgatgtgaatcgtccatgctcaccagattcaacaaccgggtctttcgccgattctttttcctctcagaaaaatgccaacctgcagctcagcagtaacaaccgatacgggtatcaaaacggcgcaagctatacatggcagttcgaagcttgtaagtcgcagattttgaagtgtatggagtgcggcagcagtcacgacaccctacagcaactgacaacccatatgatggtgaccgggcatttccttaaggtgacatcttctgcctctaaaaaggggaaacagttggtgcttgacccattagccgtcgagaagatgcagagtctgtcagaagccccaaattctgactccctcgcacctaagccttcctccaactcggcatccgactgtactgcaagcaccacagaacttaagaaggaaagcaaaaaggagcgcccagaagaaacatctaaggacgagaaagtggtgaaaagtgaagattacgaggaccccctgcagaagccactcgatcctaccatcaagtatcaatatctgcgtgaagaagacctcgaggatgggagcaaaggtggtggcgacatcttgaagagtttggagaacaccgttactactgccatcaataaggctcagaacggagccccgagctggtccgcttatccatctattcacgccgcatatcagctgagtgaggggactaagcctcctctgcctatgggcagccaagtattacaaatacggcctaacctcactaataagctgcggcctatcgctccgaagtggaaggtgatgcccctggtgtctatgccaacacacctggccccgtacacccaggttaaaaaggaaagtgaggacaaggatgaagcggtgaaggaatgcggtaaggaaagccctcacgaggaggcttcctcgttctctcacagtgagggcgactcttttcggaagagtgaaaccccacccgaagcgaagaagactgagctcggcccgttgaaggaggaagagaaacttatgaaggaaggttccgagaaggagaagccgcaacccctggaacccacctctgccctgtccaacgggtgcgccctggccaaccatgcgcctgccttgccttgcatcaacccactttcagctttgcagtcagtgcttaataaccacctggggaaggctaccgagccattgcggtcaccgtcatgttcttcaccttcatcctcaactatatccatgtttcacaaatctaacttgaacgtcatggataaacccgtgttgtctcccgcctctacacggagcgcaagcgtctcacgccgctacctgtttgaaaattctgaccaacccatagatctcacaaaatccaaatccaaaaaggcagaaagctcccaggcccagtcttgcatgtcaccccctcagaagcatgctctgtccgatattgctgacatggttaaggttctccccaaggctaccacccccaaaccagcttcttccagtagagtgccacctatgaaactcgagatggatgtgaggagatttgaagacgtcagtagcgaagtgagtactttacacaaacgaaaaggcagacagtctaattggaatccccagcacctcctgatcctccaagcacaatttgcttcctcgttgttccaaacatcagagggtaaatacctgctgagtgatctgggtcctcaggaacggatgcagatcagcaagtttaccggtctgagtatgactacaataagtcactggctcgccaacgtcaagtaccaactcagaaagactggaggcactaagttcctaaagaacatggacaaagggcatccaatattctactgcagtgactgtgcttcgcaatttcgaaccccttccacttatatctctcatctggagtcccacctgggattccaaatgaaggatatgacacggctatctgtggaccagcagagtaaggtagagcaggaaattagcagagtgtcgtcggcccagcggagcccggaaacgatcgctgccgaagaagacacagactctaaatttaagtgtaaactgtgctgccggacatttgtgtcaaaacacgcagtcaaactgcacctgtctaagacacacagcaagagccctgagcatcactctcagttcgtgaccgatgtggatgaggaatag

SEQ ID NO: 137477 - DNA, 3246 bp, synthetic construct
  misc_feature 1..3246: note = Description of Artificial Sequence: Synthetic coding sequence
  source 1..3246: mol_type = other DNA
atgccccgcagaaaacaacaggcaccacggcgtgcagccgcctacgtcagcgaggagctgaaagccgcggctctggtcgacgagggactggacccagaagaacacaccgcagacggcgagccgtccgcgaagtatatgtgtccagagaaggagctggccagagcatgtccaagttaccagaacagccctgcagcagagtttagctgccatgagatggattccgaaagccacataagcgagacgtcagaccggatggcagacttcgaatcaggatcgattaaaaacgaggaggaaactaaggaggtgactgtccccctggaagataccacagtttccgatagcctcgagcaaatgaaagcagtttacaacaattttctgagtaattcctactggtcgaatttaaatttgaacctgcatcaaccatctagcgaaaaaaataatggcagctccagcagcagctcatcctcatcaagttcctgcggtagcggcagcttcgactggcatcaaagcgccatggctaaaacactgcagcaagtgagccagtcccgaatgctgccagaaccatctctgttctctactgtccagctttacaggcagagttccaaactgtacgggtctattttcacaggtgcaagcaaatttagatgcaaagactgctcagccgcctacgataccctggtggagctgaccgtgcatatgaacgagactggacactacagggacgacaatcatgagaccgataataataatcctaagagatggagcaaacctagaaaaaggagtctgctcgagatggagggcaaggaggatgcacaaaaggtgttaaaatgcatgtactgtggacatagcttcgagagtttacaggatttgtctgttcacatgatcaaaactaagcactatcagaaggtccccctgaaagagcccgttacacccgtggccgccaagattatacctgcaacacgcaaaaaagctagccttgaactggaactgcctagcagccctgactcaaccggagggaccccgaaggcaaccatatctgacactaacgacgccctgcaaaagaattcaaacccctatattacccctaataaccgatacggccatcagaatggggccagttatgcttggcatttcgaagcccgtaagtctcagatccttaaatgcatggaatgcgggtctagccacgacacattgcaagagctaacagcccacatgatggtaacgggccactttatcaaggtcaccaacagcgcaatgaagaagggcaagcccatcgtcgagactcctgtgacacctactatcaccacattgctggatgagaaagtccagtcagttccccttgcagctaccacattcacatccccatcaaacacaccggccagcatttcgcctaagctgaatgttgaggtgaagaaagaggtcgataaggagaaagcagttactgatgaaaaacccaaacaaaaggacaagccgggagaggaagaggagaagtgtgatatttccagtaaatatcactacctgacagaaaatgatttggaagagtctccgaagggcggtctcgatattctgaagtcgctggaaaataccgtcacatccgcaatcaataaggcccaaaacggaacaccttcttggggaggctacccatccatacatgccgcctaccaacttcctaatatgatgaagttgtcccttggtagttccggaaaatccactccactgaagccaatgttcggaaattcagaaatagtgtctccaaccaagaaccagaccctcgtgagtcctccatcctctcagactagtcctatgccaaaaacaaacttccacgcaatggaggagctggtcaaaaaggtgacggagaaggttgcgaaagttgaagagaaaatgaaggaacctgatggaaagttgagcccccccaagcgggccacaccaagtccctgttcttcagaagtgggagaacccatcaagatggaagcctcatctgatgggggatttagaagccaagagaacagcccgtctccacccagagacggctgtaaagatggtagccccctggccgagcccgtggagaacgggaaagaactggtaaaacctctggcgagtagcttgtctgggagcactgccattattacggaccatcccccagaacagccctttgttaatcctctctccgcacttcagtccgttatgaacattcacctgggaaaggccgccaaaccatctctgcccgccttggatcccatgtccatgctgtttaagatgtcgaactcactggccgagaaggccgctgttgccacgccaccaccactgcagtctaaaaaggccgatcatctcgacagatatttttaccacgtcaataatgatcagcctattgatcttaccaagggtaaatctgataagggctgtagcctcggtagcgtgctactttccccaacctctacggcccccgctacttcctcatctaccgttacaactgccaagactagtgccgtcgtgtcatttatgtccaactctcctctcagagagaacgccctttcagacatatctgacatgctgaagaacctgaccgaaagccataccagcaaaagcagcacaccaagtagcatcagtgagaaaagtgacatcgacggcgcaacattagaggaggccgaggagagtactccagcgcagaaaaggaagggcagacagagcaactggaatccgcagcatttgctcatccttcaagcacagtttgctgcctccctccgccagaccagcgaaggcaagtatatcatgtctgacctgagcccacaagaaagaatgcacatcagtaggttcacaggcctgtctatgaccacaatttctcattggctcgcaaatgtgaaataccagctcagaagaactggcggcaccaagtttttgaaaaatcttgatactggacaccccgtgtttttttgtaacgattgcgcttcccaaatccgcacccctagcacatacatttctcacctggaaagccacctgggtttcagattgcgagacctgtcaaaactgagcactgagcagatcaatagccagatcgctcagactaaatcgccaagtgaaaagatggtcacatcctctccagaggaggacctcggtacatcctaccagtgtaagctctgtaacagaaccttcgcttccaagcatgctgtgaagttacacctgtccaagacgcatggtaagagccctgaggaccacctgctgtatgtgtctgaacttgaaaagcagtag

SEQ ID NO: 137478 - DNA, 1896 bp, synthetic construct
  misc_feature 1..1896: note = Description of Artificial Sequence: Synthetic coding sequence
  source 1..1896: mol_type = other DNA
atgaatttcaacaccattttggaggagatcctgattaagaggagccagcagaagaaaaagacatctcccctgaattataaagaaaggctgttcgtgctgacaaagtctatgttgacctattatgagggacgggcagaaaagaagtaccgcaagggcttcattgatgtgagtaagataaaatgcgtggagatagttaagaacgatgacggcgtgataccatgtcagaacaaatacccctttcaggtggtgcacgatgccaataccctgtacatattcgctccatccccccagagtcgggacctgtgggttaaaaagcttaaggaagagatcaaaaacaataacaacatcatgataaagtatcatcctaagttttggacagacggttcttaccagtgttgccggcagaccgagaaactagcacccgggtgtgaaaagtacaatctgttcgaatcctccatccgcaaagctttgcctccggcccccgaaacaaagaagcggcgcccccctccaccaatcccactggaggaggaggacaatagcgaggaaatcgtagttgcaatgtacgattttcaggctgccgagggacacgatctccggttggaaagaggtcaggaatatctgatactggagaaaaacgacgtgcactggtggagggcgagggacaagtacggcaacgaaggctacatcccttccaactatgtgactgggaagaagagtaataatctggaccagtacgaatggtactgccggaatatgaacagaagcaaagcagaacaattactacgcagtgaggacaaggagggcggcttcatggttagggacagttcgcagcctgggctgtacacggtgagcctatataccaagttcggaggtgaggggtccagtggattccggcactaccacattaaagagaccacaacatctccaaagaagtattacctagctgaaaaacatgcctttggaagcatccccgaaattattgaataccacaaacacaatgccgccggcctggttactaggctgcggtaccccgtttcagtcaagggcaagaacgctcccactaccgctggttttagctatgaaaagtgggaaatcaaccccagcgagctgacattcatgcgagaactgggctccggtctctttggcgtggttcggctgggcaagtggcgcgctcagtacaaagtggccattaaggccatacgggagggagctatgtgtgaggaggactttattgaggaggccaaggtgatgatgaagcttacgcatcccaagctggtgcagctctacggagtctgtacacagcaaaagcccatatatatcgttactgaatttatggagaggggctgccttttaaattttctgcgccagcggcagggccacttctcaagagatgtactgctgtcaatgtgccaggatgtgtgcgagggaatggagtacttggaacgcaactctttcatccaccgtgacttagccgcaaggaactgcctggtgtccgaggctggagtggtgaaggtgtctgatttcggcatggccagatacgtcctcgacgaccagtacacctcaagctcaggggccaaatttcccgtcaaatggtgtccacccgaggttttcaattacagccggttttcgtcaaagtctgatgtctggagctttggtgtcctgatgtgggaggtgtttactgaaggcaggatgccttttgaaaagtacacaaattatgaagtcgtgaccatggtcactagaggacatagactctaccagccgaagctcgcctcaaattacgtttatgaagtgatgttgaggtgctggcaggagaagcccgagggacggccatccttcgaggacctgctgcgaaccatagatgagctggtggagtgtgaggagacattcggccggtag

SEQ ID NO: 137479 - DNA, 2094 bp, synthetic construct
  misc_feature 1..2094: note = Description of Artificial Sequence: Synthetic coding sequence
  source 1..2094: mol_type = other DNA
atggggtttcagccgccggctgcactgttgttgaggttgttcctgctgcaaggaattctgcgactcctctggggtgacctcgcctttatcccaccatttatccgtatgtcgggacccgcagtgagcgctagtctggtaggtgataccgaaggcgtgactgtctcgcttgccgttctgcaagacgaggccggcattcttcccattcctacttgcggagtcttgaacaatgagactgaggattggagtgtcaccgttatccctggggcgaaagtacttgaggtgacagtccggtggaagcgaggcctcgactggtgttcttcaaacgagaccgacagcttttccgaatcgccctgtattctgcagacactgttggtttccgcgagccataacagcagctgctccgcacaccttctgatccaggtcgagatctacgccaactcatcactcacacataatgccagcgaaaacgttacagtcatccctaatcaagtttaccagccactgggcccctgtccctgtaaccttactgcaggagcatgcgatgtaagatgttgctgtgaccaggagtgttcctccaacctgacaaccctttttcggcgaagctgtttcaccggcgtctttgggggagatgtgaatccacctttcgatcagctgtgctcagcagggactaccaccaggggagtcccagattggtttccgttcctttgcgtgcagagtcctctagcaaacacaccctttctcggatatttctaccatggcgcggtttctcctaagcaggattcctccttcgaagtgtatgtggacacagacgcgaaggacttcgctgacttcgggtacaagcagggggacccgattatgacagttaaaaaggcgtacttcactattccgcaggtgtctctcgcaggacagtgcatgcagaacgctcccgtggcctttttgcacaatttcgatgtcaaatgtgtaactaacctggagctgtaccaggaacgcgatggcatcattaacgcaaagattaagaatgtggcacttggggggattgtgacccccaaagttatttacgaggaggcaaccgacctcgacaagttcattacgaataccgagaccccactgaacaacgggagcacccctcgtatcgtcaacgtcgaggaacactacatcttcaagtggaataacaacacgatctcggaaattaacgtgaaaattttcagagccgagatcaacgctcatcagaaagggatcatgacacagcgatttgtggtgaaattcctgagctacaacagtgggaatgaagaggagttatctggtaaccctgggtatcagcttggcaagcctgtgagggcgttgaatattaacaggatgaataacgtcaccacccttcacttgtggcaatctgcgggacggggcctctgcacatccgccacgtttaagcccatcttatttggggagaacgttctgagtggatgcctcctggaggtgggcatcaacgagaattgtacccagctaagggagaacgccgtggagagattggactcattgatccaagctacacatgttgcgatgcggggaaacagcgactacgccgatctgtctgatggctggttagaaatcattcgggtggacgctcccgaccctggagcggacccactagcctcctcagtgaatggaatgtgtttggacataccggcgcacctgtccatccgtatcttaatatcagatgccggggctgttgaagggatcacccagcaggaaatccttggagtagagacgcgtttttcaagcgtgaattggcagtatcagtgcggccttacttgtgaacacaaggccgaccttcttcccattagcgccagcgtgcagttcatcaaaattcccgcccagctgcctcaccctctcactcgattccagatcaattatacagagtacgactgtaacaggaacgaagtctgttggccacagttattgtacccatggacccagtattaccagggggagttgcactcgcaatgcgtggcaaaagggctgcttctgctgctattcctcactctggctctcttccttagcaacccatggacacgaatatgcaaggcctatagctag

SEQ ID NO: 137480 - DNA, 2091 bp, synthetic construct
  misc_feature 1..2091: note = Description of Artificial Sequence: Synthetic coding sequence
  source 1..2091: mol_type = other DNA
atgggttttcagcccccagctgccttgctgctaaggctcttccttctgcaaggtatcttgcggttgctctggggagacctcgcatttatccctccttttatacgcatgtccgggccagccgtgtccgcgagcctggttggggacacagaaggagtgaccgtgagtttggcagtactccaagacgaggcgggtattctcccgatccctacctgtggcgtgctgaacaacgagacggaggactggtctgtcactgtgattccgggggctgtcctggaagtgacggtgaggtggaaaagaggcctggattggtgttcttccaacgaaactgactcatttagtgagagcccgtgcatcctacaaactctcctggtgtctgcatctcacaactcatcctgtagcgcacacctcttgattcaggtggagatctatgcgaactcttctctgactcataatgcctccgagaatgtgactgtgatccccaaccaagtgtatcagccattgggcccatgtccgtgcaacctaaccgccggggcatgcgacgtcagatgctgctgtgaccaggaatgttcctctaacctaacaacactgtttagaaggtcatgttttacgggcgtattcggaggcgatgttaatccaccattcgaccagctctgctcggcgggcaccacaacccgtggagtgcctgattggtttccgttcctgtgtgttcagtcgccgctggcgaacaccccttttctgggctacttttatcacggtgccgtgtcccccaagcaggatagctccttcgaagtatatgtagatacagacgcgaaagacttcgctgatttcggatacaaacagggagacccgataatgactgtaaagaaggcgtactttaccattcctcaggtgagcctggcagggcaatgcatgcagaatgcgcccgtagcattcctgcacaatttcgacgtgaagtgtgtgacgaacctggaactctatcaggaaagggacggaattatcaacgccaagatcaaaaacgtcgcacttggtggtatagtaacccctaaggtgatctatgaagaagctaccgacctggacaaatttatcactaataccgagacccctcttaacaatggctcgactccccggatcgtgaacgtagaagagcactacatcttcaaatggaacaacaacacaatctcggagattaatgtcaagatttttagggcggaaattaacgcgcaccaaaaaggtattatgacccaaaggtttgtagtaaagttcctgtcatacaatagcgggaacgaagaagagctgtccggaaacccgggctatcaactgggaaaacccgttagagctctcaatattaatagaatgaataatgttaccactctgcacctgtggcagtcggccggacgcggactgtgtacatccgcgacctttaagccgatactgtttggtgaaaacgtcctgtccggttgtctcctagaggtggggatcaatgagaattgcactcagctcagggaaaacgctgttgagcggttggacagcttgattcaggctacacatgtcgccatgcgaggtaattcagattacgcggatctgtctgatggatggctggagatcatcagggtggacgcacccgatcccggagcggaccccctggcctcatccgttaatggcatgtgcctcgacattccggctcacttgagtatcagaatccttatctctgacgcgggagcagtggagggaatcacacagcaggaaattttgggagttgaaaccaggttctcatccgtaaactggcaataccagtgcggcctgacctgtgagcacaaggccgatttactacctatcagcgcatccgtgcagttcattaagattcccgcacagctgccgcatccactgacgagatttcagatcaattacacagagtatgattgcaaccgaaatgaagtgtgctggcctcaactcctatacccctggacgcaatattatcagggtgagttacattcccagtgtgtagccaagggcttgctgctactgttgttcctcaccctggccctgtttctgagcaatccatggacaaggatttgtaaggcttactcatag

SEQ ID NO: 137481 - DNA, 1824 bp, synthetic construct
  misc_feature 1..1824: note = Description of Artificial Sequence: Synthetic coding sequence
  source 1..1824: mol_type = other DNA
atgaggacaccgcagctggcgctgctgcaggtcttcttcctggtctttcctgacggagtgcgaccccagccctctagttccccttccggggccgtgccgacatcccttgagttgcagagaggcactgatggtggaacactgcagtctcctagcgaagcaaccgctacccggccagccgtgcccgggctgcctaccgtggtgcccacactcgtgacgcccagcgcaccaggtaatcggactgtggatctattcccagtgctacccatctgcgtttgtgacctgacccctggcgcttgcgatataaactgctgttgcgatcgcgactgttatcttctgcatccaaggaccgttttctctttttgcctgccaggcagcgtgcggtcctcttcttgggtatgtgtggataattctgtcattttccgaagtaattcaccattccctagccgcgttttcatggacagtaatgggatacgtcaattttgtgtacacgtgaacaattcaaatctgaactacttccagaagctgcagaaggtaaatgccacaaacttccaggcactggcagcagaattcggaggcgaatcatttactagtacattccagacccagagcccaccaagcttttaccgtgccggtgatccaatcctcacatactttccaaagtggtccgtgatttcactcctccggcaaccagctggcgtaggagcaggcgggctttgcgctgagtctaaccctgccggcttcttggagtctaagtccacaacctgcactcgctttttcaaaaatttggcgtcaagttgcaccctggacagcgctctgaacgctgcgtcttattacaacttcacagtgctaaaggttccccgttccatgaccgatccacagaatatggaattccaggtgcccgtgattctcactagtcaggcaaatgcccccctcctggctggcaacacgtgccagaacgtcgtctcccaggtaacatacgaaattgaaaccaacggtactttcggaattcagaaggtttcagttagtcttggccagactaatctgaccgtggagccaggggcctccctccagcagcatttcatcttacgctttcgcgcgtttcagcaaagtacggctgcgtccctaacctctccgcgctctggtaaccctggctacatagtgggcaagcccctgctggcgttgaccgacgacatctcttactcaatgacactattgcagtcccaaggcaacggtagctgtagcgtgaaaaggcacgaagtgcagttcggcgtcaacgccattagcggatgcaagcttcggctcaaaaaggccgattgtagccatctccagcaggaaatctaccagacactgcatggacgccccagaccagagtatgtggctatctttggaaacgcggacccagcacagaagggcggatggacgcgcatcctgaaccgacattgctcaatttccgcgattaactgtacctcctgctgcctcatcccggtgagtcttgagatacaagtactctgggcctacgtgggcctcctgtcaaacccgcaggcgcacgtgtcaggcgtcaggtttctgtaccagtgccagtccattcaagactctcaacaggtaactgaggtttcactcacaacattagtgaattttgtggacatcacccagaagcctcagccacctagaggacagcccaagatggactggaaatggcctttcgatttctttccttttaaggtcgccttcagtcgcggcgtgtttagtcagaagtgcagcgtgagtccaattctcatactgtgtcttcttctcctcggcgttctgaatctggaaaccatgtag

SEQ ID NO: 137482 - DNA, 1290 bp, synthetic construct
  misc_feature 1..1290: note = Description of Artificial Sequence: Synthetic coding sequence
  source 1..1290: mol_type = other DNA
atggattctaacggtattcggcagttttgcgttcacgtgaataactccaacttgaactactttcaaaagctgcagaaggtgaacgcgacaaactttcaggctctcgctgccgaatttgggggtgaatccttcacaagtacgttccagacccagtcacccccttcattctaccgcgccggcgatcccattctaacatacttccccaagtggtcagttataagtctgctgaggcagcctgcgggcgtcggcgcgggaggactgtgcgcagaatccaacccagccggatttctggagtcaaagtctaccacttgcactcgctttttcaagaacttggcgtcctcctgcaccctcgactccgccctcaatgcggccagctactacaattttaccgtgctgaaggtcccaaggagcatgaccgatccccaaaatatggaggtgacctatgaaatcgaaacaaatggcacattcgggatacagaaggttagcgtatcattgggtcaaactaatctaactgtggagccaggggcctcgcttcagcaacacttcatcctgcggttcagggcattccagcagagtacagcagcatctctcacatccccccgtagtggtaaccctgggtatatcgtgggcaaacctcttttagccttaacagatgatatttcatactcgatgacgctgctgcagtctcagggaaacggcagttgctctgtcaaacgccatgaggtgcagtttggagtcaacgccattagtgggtgcaaattaagactcaaaaaagccgattgcagccatcttcagcaggaaatatatcaaacactgcacggcagacctcgccccgagtacgtggccatattcgggaacgccgatcccgcacagaagggaggctggacccggatccttaaccgccactgcagcattagtgctatcaactgtacatcgtgttgcctgatcccagtatctctggagattcaagtgctgtgggcgtatgtgggattactgtcaaacccccaggcccatgtgtctggtgtgagatttctctaccagtgccagtctatccaagacagtcaacaggtcacagaggtgagcctgactactctcgttaattttgtcgatatcacacagaaaccccagccgccacgcggtcagccgaagatggactggaaatggccattcgatttcttcccattcaaggtcgcctttagtcgcggagtcttctcgcaaaagtgttctgtgtctcctatcttaatcttgtgtctcttgctcctgggagtcctcaaccttgagacaatgtag

SEQ ID NO: 137483 - DNA, 1332 bp, synthetic construct
  misc_feature 1..1332: note = Description of Artificial Sequence: Synthetic coding sequence
  source 1..1332: mol_type = other DNA
atgcgtactcctcaactcgcattgctacaggtcttttttctggtgtttcccgatggggtgcgtccacagcccagctctagtccttccggagctgtgccaacctccttggagctgcagcgagggaccgatggtggcaccctgcagtctccttctgaagctactgctacaaggccagccgtcccaggactccccaccgtggtgccaacgcttgttacgccctccgctcccggcaatagaaccgtggacctttttcctgtactcccgatttgcgtgtgcgaccttacccctggggcgtgtgacatcaattgctgctgcgatcgggactgttatcttctgcatcctcggaccgtattcagcttctgtttaccaggctctgtgaggagcagctcctgggtctgcgtagataattccgttattttccgatccaatagcccatttccctcgcgcgtctttatggacagcaacggcattcgccagttctgcgttcacgtcaacaacagtaatcttaactatttccaaaagctacagaaggtgaatgcaaccaactttcaggccttggccgccgaattcgggggagaaagttttacaagcacattccaaactcagtctcccccctcgttctatcgggccggggaccctatattaacctatttccctaagtggtccgtgattagcctcttaaggcagcctgcaggggtgggcgccggaggactttgtgctgagtccaatcccgcaggatttctggaatcgaagagtaccacctgtactaggttttttaaaaatctcgcgagctcctgtacactagattccgcactgaatgctgcatcgtattacaatttcaccgtactcaaagttccacgatccatgaccgacccccagaacatggagtttcaagtccctgtaatcctgacaagtcaggcaaatgcaccactgctcgcgggcaacacatgccagaatgtagtgtcacaggtgacttatgagattgagacaaatggaacttttggcatacagaaggtgtccgtctcgttaggacagaccaatttgaccgttgagcctggcgcgtccttgcagcagcactttattctgaggttccgcgcattccagcagtccacagctgcctccttaacttcccctcggagcggtaaccctggctacatcgtaggtaagcccctcttagcgctgacagacgacataagttacagcgtcagtttcctggaacttgggggtctgcttcagccaaacgagaaaagctgcaaagggtttcaaacttacgtgaggttagcaaaaggtgaggagtttttcgtccattacaatgaggtgttaatctattag

SEQ ID NO: 137484 - DNA, 1878 bp, synthetic construct
  misc_feature 1..1878: note = Description of Artificial Sequence: Synthetic coding sequence
  source 1..1878: mol_type = other DNA
atgagactcgagaccgccgaggcctatgtcgggcccggtggtcctgaatgcccgatgagaacaccccagctggctcttctgcaggttttttttctggttttcccagatggcgtacggccgcagcccagtagctcgccctcaggggcggtacctaccagcctggagctccagcgcggcactgatggtggcaccctccagtctccttctgaagcaacagccacacggccagccgtacctggcctacccactgtggtgcccaccctggtgacaccaagcgcaccaggtaaccggaccgtcgacctgttcccggttctccctatctgcgtctgcgacctgacgcccggtgcatgcgatatcaactgctgctgcgacagggattgctatctcctgcaccctcggacggtgttctctttttgcttgcccggctccgttcggagcagctcgtgggtatgcgtcgataactctgtgattttccgcagcaattctccctttccaagccgagtgttcatggactccaatggcatcagacagttctgtgtccacgtcaataacagcaacctgaactattttcagaagctacagaaggtgaacgctacaaatttccaggccctcgctgccgagttcggcggagagtcttttacatcgacattccagacccaatcccccccatccttctatagagcaggcgacccaatcctgacctattttccaaagtggagcgtcatttcgttactgaggcagcccgccggagtgggggcaggaggtttatgtgcagagtccaaccctgcaggcttcctcgagtccaaatcaacaacttgtactcggttcttcaaaaatctggcatcttcctgcactttagactctgccctgaacgctgccagctattacaacttcaccgtgttgaaagttccccgctctatgactgatccacaaaacatggagtttcaagtgcctgtgatcctcacatctcaggccaacgcccctctgctggcaggaaacacgtgtcagaacgtggtgtctcaggttacctacgagattgagaccaacggaacattcggtatacagaaagtatccgtttcgctaggacagacaaacctcacagtcgaaccaggtgccagcctgcagcagcactttatcttgaggttcagagcctttcaacagagtacggctgctagcctaacctcccccagatccggcaatcccgggtacattgtgggcaagcccctacttgccttgacagatgacatctcatatagcatgacattactccaatcccaggggaacgggtcctgctcggtcaaaagacatgaagttcagtttggggtcaatgcaatctcaggatgcaaactgaggctaaagaaggccgactgctctcaccttcagcaggagatttaccaaacgttgcatggccgtccccggcccgaatatgttgcgatctttggtaacgcagaccccgcacagaaagggggatggacgcgcatcctaaaccgccattgttcaatatccgcaatcaattgcacatcttgttgcctcatccctgtgtcactcgaaatccaggtcctgtgggcctatgtcggcttactgtcgaatccacaggcgcacgtctccggtgtgcggttcctataccaatgccagagtattcaggactcccaacaggtcactgaagtaagtctcaccacactggttaactttgtggacatcacccagaagccccagccgcctcggggtcagcccaaaatggactggaagtggccattcgacttttttcctttcaaagtggctttttccagaggcgtattctcacagaaatgcagcgtgtcacctattctcattctctgcctgctcctcctcggagtgctgaatctcgaaactatgtag

SEQ ID NO: 137485 - DNA, 1380 bp, synthetic construct
  misc_feature 1..1380: note = Description of Artificial Sequence: Synthetic coding sequence
  source 1..1380: mol_type = other DNA
atgagaaccccacagctggccctcttgcaggtattctttctggtgttccccgacggagtgcgcccgcaaccatctagttcaccatccggggccgtcccaactagcctagagttgcagagaggcaccgacggcgggaccttgcagtcacccagcgaggccacagctactcggcccgctgtgcccggcctgcccaccgtggtgccaactctagttacaccatcggctcccggcaatagaacagtagacctcttcccagtcctgcctatctgcgtttgcgatctcactcctggcgcatgcgacataaactgttgttgcgatcgcgactgttatctcctgcacccacgcactgtgttttcattctgcttaccaggctcggttagaagctcatcttgggtttgcgtggacaactcagtcatcttccgatcaaattctcccttcccgtctcgggtgtttatggattcaaacggcattcgccagttctgtgtacacgtgaataactgttttctcgagagtaagtccaccacgtgcactcgattcttcaagaacctggcttcatcttgcacactagattcagccctgaacgccgccagctattacaactttactgtacttaaggtgcctaggagtatgaccgacccccagaatatggaggctttccaacaatccactgcggcatcccttacaagcccaaggagtggaaatcccgggtacattgtaggtaaacccctgctagcactgaccgatgacatcagctacagtatgacccttcttcagagtcagggaaatggaagttgtagcgtcaagcgccacgaggttcagtttggagtgaatgcaattagtggctgtaaacttcggttgaagaaagcagattgtagccatctgcaacaggagatatatcagaccctgcatggccgtcctcggccagaatacgtagccattttcggaaatgccgaccccgctcagaaaggtgggtggacaaggatcctcaatcgccactgctcgatttctgcaattaactgcacgtcttgttgtctaatccctgttagtctggagatacaggtcctgtgggcttatgtgggacttctctccaacccgcaggcacatgtttcaggtgtccggttcttgtatcagtgccagagcatccaggacagtcagcaagtgactgaggtatccctgacaacactagtaaattttgtcgatattacccaaaagcctcagccccctcgagggcaacccaaaatggattggaaatggccttttgacttcttcccattcaaagtagccttctctcggggagttttctcccagaagtgctccgtgtccccaatactgattctgtgtcttctgctgttgggggtgcttaaccttgagactatgtag

SEQ ID NO: 137486 - DNA, 6468 bp, synthetic construct
  misc_feature 1..6468: note = Description of Artificial Sequence: Synthetic coding sequence
  source 1..6468: mol_type = other DNA
atgaattactctagtttcctccgaatatgggtgtcttttatcttcgcattagtccagcaccaggcccagccacgggagctgatgtatcccttttggcaaaacgacaccaagactcccaaagtggatgatggcagtagcagcgagattaagttagccatccccgtgtttttttttggagtgccatacagaacagtttatgttaacaacaacggggtcgtatccttcaacgttctggtgtcgcagttcacacctgaaagtttcccactcactgatggccgtgctttcgtggctcctttctgggcagacgtgcataacggaatccgaggcgaaatttattacagagagacgatggagccagcgatcctcaagagggcgacgaaggacatacgaaagtattttaaagatatggccacgttctcagccacatgggttttcatcgtaacatgggaggaggtgacgttctacggcggcagctctaccacacctgttaacacctttcaggcggtcctcgttagtgacgggagttacacttttacactgttcaattactatgaaataaactggactaccgggacggccagcggaggagatcccctcacagggctggggggcgtaatggctcaagctggcttcaacggggggaacctgactaacttcttcagtctacccggatccagaacgcctgagattgtgaatatacaggagactactaatgtgaatgtccccggcagatgggcgttcaaagtcgatggcaaagagattgacccagctaacggctgtactagcagaggccagttcctgcgccgcggggaagtcttctgggacgacttaaattgtaccgtcaaatgcagatgtctcgactttaataatgaaatttattgtcaggaggcatcgtgcagcccttacgaggtgtgcgaacctaaaggcaagttcttttactgtagcgctgtagaaactagtacatgtgtggttttcggggaaccccactatcacactttcgatggctttttgttccatttccagggtagttgcgcatatctgctggcaagacagtgcctccagacttcttccttgcctttcttttccgtcgaggcgaaaaacgagcatcgtagaggatcggccgtgtcatgggtgaaggaactatcagttgaggtaaacggctacaagatactgattccaaaaggctcctacggaagggtcaaggtgaatgatctggtgacctccttgccggtgacactcgatctcggcacagtgaaaatttatcagtcaggaatcagtacagctgtggagacagattttggattgctggtgacctttgacggtcagcactacgcctcaataagcgtgcctgggagttacatcaattctacatgcgggctctgcggtaactataataagaatcctctcgatgattttctccgtcccgacggtagaccggccatgagtgtcttggatctcggtgagtcctggcgcgtgtaccacgctgactggaaatgcgattctggctgtgtggataattgcactcagtgcgacgccgctaccgaggccctatatttcggctcggattattgcgggttcctcaataagactgatgggcccctgtgggagtgtggaaccgtggtcgaccctacagcattcgttcacagctgtgtttatgacttgtgttcagtgcgggacaatggcacgctgctctgtcaagccatacaggcctatgctttagtctgtcaggctctggggattccgatcggagattggcggactcaaactggatgtgtgagcaccgtccagtgcccttccttctcccactacagcgtttgcacgtcttcttgtcccgacacctgcagcgatctgacagctagcagaaactgcgcgaccccttgcactgagggatgcgaatgcaaccagggctttgtactctccactagccagtgtgtccccttacacaagtgtggatgcgacttcgatggccattactacactatgggcgagttcttctgggccactgccaactgcacagtgcagtgcctctgtgaggaaggtggtgacgtttactgcttcaacaagacctgcgggtctggggaagtctgcgccgtcgaagatggttaccagggctgcttccctaaacgagagacagtatgcttgctgagtcaaaatcaggtccttcacactttcgacggggcatcgtacgctttcccatcagagtttagttacaccctcctgaagacatgccccgagagaccagaatatctcgagatcgatattaacaaaaaaaagcctgatgctggccctgcctggctcaggggactcagaatacttgtcgcagaccaagaagttaagatcggtggcatcggagctagcgaagtcaaacttaacgggcaagaagtcgagcttccctttttccaccccagcgggaagttggaaatttatcggaataagaattctaccaccgtggaatcaaaaggcgtggttaccgtgcagtacagcgacatcggcctgctctatatccggctgtctaccacgtacttcaattgtaccgggggactctgcggattttataatgcaaatgcaagtgatgagttttgtctgcccaatgggaagtgtacagataacttggctgtctttttagaaagctggacaaccttcgaagagatttgcaatggcgagtgcggagaccttctgaaggcatgtaataacgacagcgaactacttaaattttaccgttccaggtccaggtgtggaatcattaacgacccctccaactcttcattcctggagtgtcacggggtggttaatgtgaccgcttactacaggacttgtctgtttcggctctgtcaaagcggggggaacgagtcagagctgtgtgactcagttgctcgctatgcctccgcttgtaaaaatgccgatgtggaggtcggaccttggaggacttatgatttctgcccccttgaatgccccgagaattcccattttgaggagtgcattacatgcacagaaacttgcgagactttgacactgggcccgatatgcgtcgattcatgctcggaaggctgtcaatgcgacgagggatatgcactgcttggttctcagtgtgttacccggagtgagtgcggctgcaatttcgagggtcaccagctcgcaacgaacgagaccttctgggtagatctggactgccagatattctgctactgctctggtactgataaccgcgtccactgtgaaactattccatgtaaagacgatgaatactgtatggaggagggaggactgtactattgccaggcccgaactgacgcttcatgtatagtgtccggatatggccactacctgacctttgacgggtttccattcgactttcagacctcatgcccactaattctgtgtaccacaggatcaaggccctcctccgacagtttcccaaagtttgttgtcaccgccaaaaacgaggatcgagaccctagtctggcactgtgggtcaagcaggtcgacgtgactgtatttggatactcaattgtgattcaccgcgcttataagcacaccgtgcttgttaatagcgagaggctatacctgccgcttaaactggggcaggggaagattaatatcttttcttttgggttccacgtggtggtggagactgattttggtctaaaggttgtgtacgactggaaaacattcctgtccattacagtgccacgttccatgcagaactccacgtatggactctgcgggagatacaatggcaatcctgacgacgatctggaaatgcccatgggtctgttagcttcttccgtcaatgagtttggacaaagctgggtgaagagagacaccttctgtcaggtcggatgtggagacaggtgtccctcatgcgccaaggtagagggcttctctaaagtccaacagttgtgctctctaatcccaaaccagaacgctgctttttctaagtgtcatagcaaggtgaacccaaccttcttctacaaaaactgtctgtttgatagttgtatcgacggcggggcagtgcagaccgcctgttcctggcttcagaattacgccagcacttgtcaaacccaaggcattaccgtcactgggtggcgcaattacacatcatgtaccgtgacatgtccccccaacagccactacgagagctgtgtgtccgtctgccagccaagatgcgcggcaataaggcttaagtctgactgttctcactactgtgtagaaggctgccattgcgatgcgggttacgtgctcaatggtaaatcatgtatcttaccacattcgtgcggctgttactctgatggaaaatattatgaaccaaagcaactgttctggaatagtgattgtacgagacgttgccggtgcttccgacgcaatgtcattcagtgtgaccctaggcagtgcaagagtgatgaagaatgtgccttacggaacggggtgcgggggtgctttagtactaagaccagttattgcctagcggcaggcggcggggtgtttcgaacctttgacggcgcctttctaagatttcccgctaattgcgcatttgtgctgagcacaatttgccagaaactccccgacattagttttcagcttattatcaattttgataagtggagcgccccaaatttaactattatttctcctgtgtacttctacatcaacgaagaacagattctcattaacgacaggaatactgtcaaagtgaatggcacccaagttaacgttccatttattacagggctcgcaaccaagatatactcttcagaagggttcttggtaatcgacacctctccagacattcaaatttactacaatgggtttaatgtcattaaaattagtattagcgaaagactgcagaataaagtttgcgggctgtgtggcaacttcaatggcgatctgacagacgattatgtaacattgaggggaaaaccggtcgtttcctccgtcgtccttgcgcagtcctggaaaaccaatggaatgcagaaacgccctcttgcccccagctgtaacgaacttcagttttcccagtacgcggctatgtgcgacaacgtgcacatccaaaagatgcagggcgatggatactgtctgaaactcactgacatgaagggctttttccagccctgttacggtttattggacccactgcctttttacgagagctgctatctggacggttgctactcacacaagaaattccagctgtgtggctctttggcagcttacggggaagcctgccggtcattcggtatactgagcaccgagtggatcgaaaaggagaactgtagcggagtggtggaagatccatgcgtgggcgctgactgtcccaaccgcacatgcgaactgggcaatggtcgagagttatgcggctgtatcgaacctcctccctacggtaataactctcacgacataatcgacgccgaggtgacttgcaaagccgctcagatggaggtgagtatctctaagtgcaagctgtttcaactgggcttcgagcgcgagggggtacgtatcaacgatcgacagtgtacagggatcgaaggggaggatttcatctcctttcagatcaataatacaaaaggcaattgcggcaacatagtgcagagcaatggaacccacatcatgtacaaaaatacactttggatagagtctgccaacaacaccggaaacattatcactagagatcgcacaataaacgtggagttcagttgcgcctatgaactcgacatcaagatctccctggattccgtagtgaagcccatgctgtccgtaattaacttgacggtccccacacaggaggggagttttatcaccaagatggcactctataagaacgcctcatataaacacccctacagacagggtgaagttgtccttacgactcgtgacgtgctgtacgtgggggtattcgtagtgggcgcggacgctactcacctcattctcaccctgaataagtgttatgccacgccaactcgcgactccaacgacaaactcaggtacttcattattgaaggtgggtgtcaaaatctcaaagataatactatcgggattgaggagaatgctgtgtctttaacgtgcagatttcatgtgaccgtattcaagtttatcggcgactacgacgaagttcacctgcactgcgccgtttccctgtgcgacagcgaaaagtacagctgtaagattacctgtccccataatagccggatagccaccgattatacaaaagagccaaaagaacaaatcatatctgtcggaccaatcaggaggaagcgtctggactggtgcgaggacaacggcgggtgcgagcaaatctgtacaagtagagtcgatgggccactgtgcagctgcgtgacaggcaccttgcaggaggacgggaagtcatgcagagcatccaattccagcatggagctccaggtttggaccctgcttctcatcatgatccagatcagcttgtggcactttgtctacaagtcggggaccacctcatag

SEQ ID NO: 137487 - DNA, 6468 bp, synthetic construct
  misc_feature 1..6468: note = Description of Artificial Sequence: Synthetic coding sequence
  source 1..6468: mol_type = other DNA
atgaattatagttccttcctccgcatttgggtgagctttattttcgcactggtgcagcaccaagctcagccccgggagctcatgtatcctttctggcagaatgacactaaaacacctaaagtggacgacggctcaagcagtgagatcaaactcgctattccagtgttctttttcggggttccgtaccgcacagtgtacgtgaacaacaatggcgtcgttagctttaacgtgctggtgtcacagttcacaccagaaagcttccctttaactgatggtcgtgcctttgtggcaccattctgggccgacgtgcataatggaattcggggtgagatctattaccgcgagaccatggagcccgcaattcttaaacgcgcaacaaaggatattcggaaatacttcaaagatatggcgacattttcggcgacctgggtatttatcgttacgtgggaagaagtcacgttctacggaggttcatctaccacccctgttaataccttccaggccgttcttgtgtcggatgggtcctatacgtttaccctgttcaattactatgagatcaattggactacgggaaccgctagcggcggcgacccgcttaccggcctaggaggcgtcatggctcaggcgggcttcaacggcggaaaccttaccaactttttttccttacccggatcccggacaccagagattgttaatattcaggagaccaccaacgtcaacgtccctgggagatgggccttcaaagttgatggtaaggagattgatcccgcaaacggctgtacctcaagggggcagtttttacggcgtggagaggtgttctgggatgacctcaactgtaccgtgaagtgtaggtgcttggacttcaacaacgagatctactgccaggaggcctcttgtagcccatatgaagtgtgcgagcccaagggaaagttcttctactgttctgctgtagaaacgagcacatgcgtggtttttggggagcctcattaccacacctttgacggcttcttgttccattttcagggaagttgcgcttacttacttgcaaggcagtgtctacagactagcagccttccgttcttctcagttgaagctaaaaatgagcacagacgcggctcagcagtctcctgggtgaaggagttgagcgtcgaggttaacggctataagatcctaattcctaaaggctcttacgggcgcgtgaaggtcaacgacctcgtgacctctttgcccgtgacgctggacttaggcactgtgaagatctatcagtctgggatctccaccgccgtcgagactgacttcggattgctggtgaccttcgatggccaacattacgccagcatttctgtcccaggctcctacattaactcaacctgtggtctctgcgggaactacaacaaaaaccctttggacgactttttgcggcctgatggcagaccagccatgagtgtcctggatttgggcgaaagttggcgagtttaccacgccgactggaaatgcgactcagggtgcgtagacaactgcacccagtgcgacgcagcaacagaggccctgtatttcggatcagactattgcggctttcttaacaaaaccgacggcccattatgggagtgcggcaccgtagtcgatcccacagctttcgtccattcttgcgtgtatgatctgtgctccgtacgtgacaatgggactctgctgtgccaagctattcaggcttatgctcttgtgtgccaagccctgggtattcccattggcgactggcgtacccaaactggctgcgtgagcactgtgcaatgtccaagtttctctcactactcggtttgtacgtcctcctgcccagatacatgctcagacctgacagctagtcggaattgtgcaacaccatgcaccgagggttgcgagtgtaaccagggttttgtgctctccactagtcagtgcgtgcctttacacaagtgcgggtgcgatttcgatggccactattacacaatgggcgaatttttctgggccacagcgaactgcacagtccaatgcctgtgcgaggagggcggagatgtgtattgcttcaataaaacttgcggctcaggggaggtgtgcgcagtagaagatggctatcaaggatgtttcccaaagcgcgaaacagtttgtctgctgtcccagaaccaagtcctgcatacattcgatggcgcgtcttatgctttccctagtgaattttcttacaccttactgaagacctgccccgagcgtcccgaatatcttgaaatcgatataaataaaaaaaaacccgacgccggtccagcctggttaaggggactgcgaatcctggtagcagatcaagaggtcaagataggcggcattggggcaagcgaggtgaaactgaacgggcaggaggtcgagttgccctttttccatccttccggtaagctggaaatctatcgcaataagaattcaacaaccgtagagagcaagggtgtcgttaccgtgcagtactccgatatcggcctcctgtacatccggctgagcacaacttactttaattgtacaggagggctgtgcggcttttacaacgccaatgcttctgatgagttttgtttgccaaacggcaaatgcaccgataatctcgctgtgttcctggaaagctggaccactttcgaggaaatatgtaatggagaatgcggcgatcttctaaaagcgtgcaacaacgactctgagctgctcaaattttaccgatccaggtccaggtgcgggattattaacgatccaagtaactcctctttcctcgagtgccacggggtggtaaacgtcactgcctattatcggacatgcctctttaggctttgccagagtgggggcaacgagagcgaactgtgtgattccgtggcaaggtatgcctcggcctgcaagaatgcagatgtggaagtagggccttggagaacctatgatttctgtcccttggaatgtcctgagaactcccatttcgaggagtgtattacctgtaccgaaacatgtgagacactaacattagggccgatctgcgtggacagctgttcagaagggtgtcagtgcgacgagggctacgccttgctgggctcccaatgcgtcacccgttcagagtgcggctgcaattttgaaggtcaccaactcgccaccaacgagacgttctgggttgacctggattgtcaaatcttttgctattgttcagggaccgacaatagagtacattgcgagaccattccttgtaaggacgatgagtattgcatggaggaaggtgggctatactattgccaggccagaaccgatgccagctgtattgtctctggctacggtcactatcttacattcgacgggttcccgtttgatttccaaactagttgtccactgattctctgcaccaccggttcccgaccttcaagtgattcttttcctaagttcgtggtcacagccaaaaatgaggacagagaccctagccttgcgctgtgggtgaaacaagtagatgtaacagtgtttggctatagcatcgttattcacagggcctacaaacacactgtgttggtaaactccgaaagactgtacctacccctgaagcttggtcagggaaagatcaacattttttctttcgggttccatgttgttgtcgagacagattttgggctcaaggtggtgtatgattggaaaactttcctgagtatcaccgtgccaaggtctatgcagaactcgacatatgggctgtgcggtcgatacaatggtaatcccgacgatgatcttgaaatgccaatgggcctgctcgcttcaagcgtgaatgagtttggccagtcatgggttaagagagacactttttgccaggtgggatgcggcgaccgatgcccgagctgcgccaaggtcgaaggcttctctaaggtacagcagctgtgttccttgatcccgaaccagaatgcggccttcagtaaatgccactcaaaagtgaatccaactttcttctacaagaattgcttgtttgattcctgcatcgacggcggcgccgttcagaccgcgtgctcatggttgcagaactacgcctctacatgccagactcagggcattaccgtaacgggctggagaaactatacgtcctgcaccgttacctgtccgccgaacagccactacgagtcatgcgtgtctgtttgccagccccggtgtgccgctatccgtctgaagtccgattgtagtcactactgtgtggaagggtgtcactgcgacgcagggtacgtgttaaatggcaaatcttgcattttaccccattcttgtggctgctatagcgacggaaagtattatgaacctaagcagctcttctggaatagcgactgcaccagacgatgtcgttgcttccggcgcaacgtgatccagtgcgaccctcggcagtgcaaatcagacgaagaatgcgcactccgcaatggtgttcggggctgcttttcaaccaaaacaagctattgtctggctgccggcggcggagtttttcgcacatttgatggggccttcctcagattcccagcaaattgcgcattcgtgttgtcaactatctgtcaaaagcttcccgatattagcttccagctcatcatcaattttgacaagtggtcggcccccaatctaacaataatctctccagtgtatttttatatcaatgaagagcagattctcatcaatgaccgcaatacagtaaaggtgaatggcacacaggttaacgtccctttcataaccggactagccacaaagatatattcatcagagggcttcctggtcattgacacaagccctgacatccagatctattataatggctttaacgtcattaaaatttccatttccgaacgactccaaaataaggtgtgcggtttatgtgggaatttcaacggcgatttgaccgacgattacgtaacgttaaggggcaagcctgtcgtctcgtcggtcgtcctagctcagtcttggaagactaacgggatgcaaaagagaccactggccccatcctgcaatgagctacagtttagtcagtacgctgcaatgtgcgataatgtgcatattcagaaaatgcaaggtgatggctactgtctgaagcttaccgacatgaaaggcttcttccagccctgctatggcctattagatcccttgcctttctacgagagttgctatttagatggctgctacagccataagaagttccagctgtgtgggtcacttgcagcctatggtgaagcgtgtaggagcttcggcattctgagcacagagtggatcgagaaagagaattgctcaggcgtggtcgaggatccatgcgtaggagctgattgtcctaatagaacttgcgagttgggaaatggaagagagctgtgcgggtgtatcgagccacctccctatggcaataattcgcatgacatcatcgacgcagaagtgacctgtaaggccgcgcaaatggaggtgagcatctccaagtgcaaactgttccagctgggtttcgagagagagggtgtaaggattaacgatcgacagtgcacgggcatagagggagaagatttcatttcttttcaaatcaataatacaaaaggcaattgtggtaatatcgtgcagagcaatgggacacacatcatgtataaaaacacactgtggatcgagtctgcaaataatacagggaatattataaccagagacagaacaatcaatgtggaatttagttgtgcttatgagctggatattaagattagtttagacagcgtcgtcaagcctatgctgagtgtcatcaatctgaccgtacctacacaggaagggtcatttatcaccaaaatggctctgtacaaaaatgcctcctacaaacacccttacagacagggagaagtcgttctgaccacaagagacgtcctgtacgttggagtgttcgtggtaggagccgacgcgactcatctgattctgaccctcaataaatgctacgctacaccaacgcgagattccaacgacaagctgagatactttatcatagagggggggtgccagaatctgaaggataacactatcggcattgaggaaaacgcagtgtcgctgacttgtaggtttcatgtgacggtgttcaagtttattggggattacgacgaggttcacctacattgcgccgtctcgctttgtgactctgagaagtacagttgtaagattacatgtccgcataattctaggatcgccacggactataccaaggagccgaaggaacagataatcagtgtcggccctatacgcagaaagaggttggattggtgcgaagataacggaggatgtgaacagatttgcaccagtcgggttgatgggcccctgtgctcctgtgtgaccggcacattgcaggaggacgggaagtcctgtcgggcttccaattcgtccatggagttacaggtctggaccctgctcctgataatgatccagatctctctctggcattttgtgtacaaaagtggcaccacatcatag

SEQ ID NO: 137488 - DNA, 1257 bp, synthetic construct
  misc_feature 1..1257: note = Description of Artificial Sequence: Synthetic coding sequence
  source 1..1257: mol_type = other DNA
atggcgaaactccttcagccccccccaaaatttcttccttcagagtggcacatcgcaaacaaaaatcaataccatcgcgccgatgcccagcgctctcgctccgaacggctcgtggccgaatcacagcggctggtggacgaaatcgaaaagaccactaggaagtcccagtctgatgtgaataagaagcttgaacagcggctcgaggaggtgcagttctggaaaaaagaactggacgataaactggaacaactggtgaatgtgactgatgatttgttaatatataaaataaggctagagaaagctctagaaacactaaaagaacccctgcatatcaccgaaacctgcttggcatatcgagagaaacggatcggcattgatcttgtgcacgacaccgtcgaacatgagctcattaaagaggccgagattattcagggtatcatggcattgcttacgcggaccctggaggaggcatccgagcagatccggatgaatcgcagtgctaagtataacctggaaaaggatcttaaagacaagttcgtggcccttaccattgatgatatatgtttcagcctcaacaacaattccccaaatattagatactctgaaaatgcggtccgtatagagcccaatagtgttagtttggaagactggttggacttttcttcaacaaatgtagagaaggccgacaaacagaggaataattcccttatgctcaaagcactggtggacaggatcctgtcacagacggcaaacgatctgaggaaacaatgtgacgtggtcgataccgcgtttaagaacggcttgaaggacacgaaggatgctcgcgataagttagctgaccacttggcaaaggtcatggaggagattgccagtcaagagaagaatataactgctctcgagaaggcaattctggaccaggaaggaccagctaaagtcgcccacaccaggttggaaacacgcacacatcgccctaatgttgaactctgtcgggatgtggctcagtacaggctgatgaaggaagtccaggagatcacacacaacgtcgcacgcctcaaagagaccctcgcgcaggctcaggcagaactgaaggggctccacagaagacaactagccttacaagaggaaattcaggtgaaagaaaatacaatttacattgacgaagtgctctgtatgcagatgagaaagtcaatccccctgagagacggggaggatcatggagtgtgggctggcggactgaggcccgacgccgtgtgttag

SEQ ID NO: 137489 - DNA, 819 bp, synthetic construct
  misc_feature 1..819: note = Description of Artificial Sequence: Synthetic coding sequence
  source 1..819: mol_type = other DNA
atggccctgctcacacggactcttgaggaggcgagcgaacagatccgtatgaacagatctgccaaatacaatctggaaaaggacctgaaggacaaattcgtggccttgaccattgacgacatctgtttttcattgaataacaactctccaaatatccgctattccgagaacgctgtgcgaattgagcctaacagcgtgtcactcgaagactggctggattttagctccacaaatgtggaaaaggccgataaacagaggaacaatagtctgatgctgaaggccttagtggatcgaatactttcccaaaccgcaaatgatttaagaaagcagtgtgacgtcgttgatacggccttcaaaaatggcttgaaggataccaaagatgcacgcgacaagttagccgaccaccttgctaaagtaatggaggagatcgcgtcccaggagaagaatattactgccctggagaaggctatattggaccaagagggccccgctaaggtagcacacaccagactcgagacacgaactcatagaccgaacgtggaactgtgcagagatgttgcacagtaccgactcatgaaagaggtacaggagataacccacaacgtggcccgcttgaaagagaccctcgctcaggcacaagccgaattgaaaggattgcatagaaggcagttggccctgcaggaggagattcaagttaaggaaaacaccatttatatagatgaggtcctgtgcatgcagatgcggaaatctatacctcttcgggacggcgaggatcacggggtttgggcaggtgggttgagacctgacgctgtatgctag

SEQ ID NO: 137490 - DNA, 1473 bp, synthetic construct
  misc_feature 1..1473: note = Description of Artificial Sequence: Synthetic coding sequence
  source 1..1473: mol_type = other DNA
atggaacgggtggggtgtacacttactactacatatgcacacccgaggcccacgccgacaaacttcctgcctgccattagcaccatggcttcgagttatcgggacaggtttccccactctaacttgacacattctctgtccctgccctggcggcctagcacctactataaagtcgcttctaacagcccctctgtcgccccctattgcactaggagccagcgagtgagcgaaaacacgatgctgccatttgtgtcaaacagaaccacatttttcacgcggtacacgcctgatgactggtatcgttccaacctgacaaattatcaggagtccaacacaagcaggcataatagtgaaaaactgagagttgatacctccaggctcatccaagacaaataccagcaaacaagaaagacgcaggcagacacgactcagaatcttggagagcgtgtgaatgatattggcttctggaagtccgaaattatccacgaactggacgagatgatcggtgaaacgaatgccctgactgacgtgaagaaacggctggaacgcgccctgatggaaacagaggcgcctctccaagttgctagagagtgtctgttccaccgggagaagagaatgggtattgacctagtgcatgacgaggtcgaagcgcagcttctgacagaagtggacacaatcctatgctgtcaggagagaatgaagttacatctggacaaggccatcgcccagctcgctgcaaaccgcgcatcgcaacatgaactggaaaaagacctgagcgacaagcagaccgcctacaggatcgatgacaagtgtcatcatctgaggaatacttccgacggggtgggctattttcgcggagtggagagggtggacgcaacagtaagtgtgcctgaaagctgggctaaatttactgatgacaatatcctccgctcacagagcgaaagggctgcctcagctaagttaagggacgacattgagaatctgttggtcgtgaccgccaacgaaatgtggaatcagtttaacaaggtgaatctgtcctttaccaataggatcgcagagaccgccgacgccaagaacaaaatccaaactcacctggctaagactctccaggagattttccagacagagatgaccattgagagcattaagaaggctattaaggataaaacagcctttctgaaggtggcccaaacccggttggacgagagaacacggcgcccgaatattgagctttgccgggacatggctcagctgagactcgtgaacgaggtccatgaagttgatgacacaatccaaacactgcaacagaggctgagggatgccgaggacacattacaaagtctggtccacattaaggccaccttagaatacgacctcgcagttaaagctaacagcctgtatatcgaccaagagaaatgcatgtctatgcggaagagttatcccaataccctgaggttagttggtttctgttag

SEQ ID NO: 137491 - DNA, 1473 bp, synthetic construct
  misc_feature 1..1473: note = Description of Artificial Sequence: Synthetic coding sequence
  source 1..1473: mol_type = other DNA
atggaacgagtagggtgcaccctgactactacttacgcacatccacggccaacacccaccaattttctgccagctatatccaccatggcttccagttacagagataggttcccccattcaaaccttacccactccctgtcattaccatggcggccatctacctactataaggtggcttcaaactctcctagcgtcgctccatactgtactcgcagccagcgggtgtcagaaaacacaatgttaccttttgtctctaatcggactacgttcttcacacgctatactcctgatgattggtatagaagtaacttaacaaactaccaggaaagtaatacgagtaggcataatagtgagaaactaagagtggatacctcaagattaattcaggataagtatcaacagactcgaaaaacccaggccgatacaactcagaacctgggtgagagggtcaacgatattggtttttggaagagcgagatcatccatgagctcgatgaaatgataggggaaacaaacgctctaaccgatgtcaagaaacgcctcgagagagcccttatggagactgaggccccacttcaggttgccagggagtgcctctttcatcgggagaagagaatgggtatcgatctcgtccatgatgaagtagaggcccagctgctgactgaagtggacaccattctgtgctgtcaggaaaggatgaagttgcatctagacaaagccatcgcacagctggctgccaatcgcgcatcccagcatgagctagaaaaggacttgtcggataagcagacggcgtaccgaatagatgataaatgccaccatctccggaacacctccgatggggtgggttatttccgcggtgtagagagggtggatgctaccgtctcggtgcccgaaagttgggcgaaattcacggacgacaacattctccggagccaaagcgagagagccgcatctgccaagctgcgggatgatattgaaaatttgctcgtcgtaaccgctaatgaaatgtggaatcaatttaacaaagttaacctaagcttcaccaatcggatagccgaaaccgccgatgcaaaaaacaagatacaaacgcacctcgcaaagaccctgcaggagattttccagaccgagatgacgatagagtctataaagaaagctatcaaggacaaaacagcctttttaaaagtcgcgcaaacaagattagacgaaaggaccaggcggcccaatattgaattgtgtagggatatggctcagttaaggcttgtcaatgaggtgcacgaggtggacgacacgatccagaccctgcaacaaagacttcgcgatgctgaagacacattgcaatcgctggtacacattaaagctacacttgagtacgacctggccgtgaaggctaactcactgtacatagaccaagagaagtgcatgagcatgcgaaaaagctatcctaacactttacgcctcgttggtttctgctag

SEQ ID NO: 137492 - DNA, 444 bp, synthetic construct
  misc_feature 1..444: note = Description of Artificial Sequence: Synthetic coding sequence
  source 1..444: mol_type = other DNA
atggaaagggttgggtgcacacttaccactacctacgcacatccacgacctacacccaccaatttcctgcccgctatctcaactatggcctcatcctaccgggacaggttcccacatagtaacctgacgcattctctgtctctgccctggagaccttctacttactataaggtcgcatcaaattctccaagtgtcgcaccctattgcactcgaagtcagagagtcagcgagaacactatgctgccttttgtatctaatcggactacattcttcacacggtacacacccgacgattggtaccgaagcaacctaactaattatcaagaaagtaatacatcccgccacaatagcgagaaactgagggttgacacgtcgcggctgattcaagacaagtatcagcagacacggaaaacccaggccgatacgacacagaacttaggctag

SEQ ID NO: 137493 - DNA, 423 bp, synthetic construct
  misc_feature 1..423: note = Description of Artificial Sequence: Synthetic coding sequence
  source 1..423: mol_type = other DNA
atggagagagtcgggtgcactttaactaccacttacgcacatcctcgcccaacacccactaacttcctgccagccatttccactatggctagctcataccgtgatcgctttccgcattcaaacctgactcactcattgtcgcttccttggagaccgagcacctactataaggtggcctcaaacagtcctagtgtggctccctattgtactagatcccagcgcgtctccgagaacacaatgttgccctttgtgagcaatcgaactaccttcttcacgcgttacacacctgatgattggtaccggtccaatctcaccaactatcaggaatccaataccagccgccataacagcgaaaagctgagagtggacacttctcgccttattcaggacaagtatcagcagactcggaaaacccaggcatag

SEQ ID NO: 137494 - DNA, 249 bp, synthetic construct
  misc_feature 1..249: note = Description of Artificial Sequence: Synthetic coding sequence
  source 1..249: mol_type = other DNA
atggaacgggtcggatgtacgttaactaccacatacgctcaccccaggcccacacctacaaatttcttgcccgcaatctccacaatggcatcttcatatagggacaggttcccacattccaacctaacgcactcactgtccctgccatggagaccctctacttactacaaagtggccagcaactcaccatccgtagcaccttactgtaccagatcacagcgggtcagtgagaacaccatgcttccttag

SEQ ID NO: 137495 - DNA, 2514 bp, synthetic construct
  misc_feature 1..2514: note = Description of Artificial Sequence: Synthetic coding sequence
  source 1..2514: mol_type = other DNA
atggagcctgcaccctctgaagtaaggcttgccgtgagagaagccattcacgccctctcctcgtcggaagatgggggtcatattttctgtacacttgagagcctcaaacgttacctaggtgagatggagccacctgcgcttcctcgcgaaaaggaggagttcgcatccgctcacttctctcctgtgctaagatgcctcgcctcgcgcctgagtcccgcttggctagaactgcttccccatggccgcctggaagagctgtgggccagctttttcctagagggacctgcggatcaggcttttctggtgctcatggagaccatcgagggcgccgccgggccttcttttagactcatgaaaatggcccgcctgctggcgagatttctaagggaaggccgactggcagtgcttatggaagcgcaatgcagacagcagacccagcccggttttattctgctgcgggagacactgctgggaaaggtggtcgcgttacccgaccacctcggcaataggctgcagcaggaaaatctggcagaattcttcccacaaaactattttaggctactgggcgaggaagtagttagggtgctccaagccgtggtggatagtctccaagggggtctagacagctccgtcagttttgtttcccaggtcctaggcaaagcctgcgtgcatggaaggcagcaagaaatactgggcgtcctggtcccgaggctggctgcgctgacgcaggggtcttatctgcatcaaagagtttgctggcgccttgtagaacaggtgcctgaccgggctatggaggcggtactcacggggctcgtggaagccgcacttggcccagaagtgctgtcgcgtctgttgggcaacctggtggtgaaaaataagaaagcccagtttgttatgacacagaagctgctcttccttcagtcccgcttgactactcccatgctgcagagtttgctgggacatctggccatggactcccaacggagaccccttctgctgcaggttcttaaggaacttctcgagacgtggggctcatcgagtgctatcaggcacacccccttgccccagcagagacacgttagcaaggccgttctcatttgcctcgcacagcttggtgaacccgagctgcgggactctcgggacgagttattggcatccatgatggcgggggtcaagtgccgccttgacagcagcctgccgcctgtgcggcggttgggcatgatagttgccgaggttgtctcagcccggatccaccctgaaggcccccccttgaagttccagtatgaagaagacgagctgtccctggagcttctcgcactggcctcacctcagcccgccggggatggcgcttccgaagcgggtaccagcctcgtgcccgccaccgctgaaccccctgctgagacacccgccgaaattgtggatggcggcgtgccgcaggcacaattggctgggagtgactcagatcttgactctgacgatgaatttgtgccttacgatatgtctggcgaccgggagctgaaaagctccaaggcacctgcttacgttagagactgcgtggaggctctcacaacttctgaggacatagaaagatgggaggccgctctgcgagcgctggaaggtctggtttatcggagccccaccgccacccgcgaagtctccgttgagcttgctaaggtgctgctacatttagaggagaagacatgtgtggtcggttttgctggcctccgtcagagggccttggtggctgtaacggtgaccgaccccgcaccagtcgctgactatctcactagccagttctacgccttgaactattctctacgccagagaatggacattctggacgtgctgacccttgccgcacaagagcttagtcgtcccggctgtttgggccgcaccccccagcccggaagcccatcccccaatacgccttgcctacctgaagctgccgtgtcacagcccggcagcgccgtcgcatccgattggcgcgtggtggttgaggaaagaattaggagcaagacacagagactgtccaagggcggccctcgacagggaccggcaggatctccgagccgttttaactctgttgccggccactttttttttccactgttgcagagattcgatcggccactggttacgtttgatctactcggcgaggaccagcttgtactgggccgactggctcatacgctgggtgccttaatgtgcctggcggtaaatacaactgtagcggtcgctatggggaaggcacttcttgaattcgtatgggccttgagatttcatattgacgcatatgtaaggcagggcttactttccgccgtctcatcagttttgcttagtcttccagctgctcggctgctcgaagatctgatggatgagttgctagaggcaaggagttggcttgctgacgtcgccgaaaaggacccagacgaggattgtcgcacattggctcttagggccctcttgttattacagcggctcaaaaatcgactactgccaccagccagcccatag

SEQ ID NO: 137496 - DNA, 1083 bp, synthetic construct
  misc_feature 1..1083: note = Description of Artificial Sequence: Synthetic coding sequence
  source 1..1083: mol_type = other DNA
atgatggcaggtgtgaagtgcaggctggacagcagcctgcccccagtcaggcgtttgggaatgatcgtggcagaagtggtctccgctcggatacaccctgagggcccacccttgaagtttcagtacgaagaggatgaactgagtctggagcttctggccctagcttcccctcagcctgccggggatggggcctcggaggccggtactagcttagtcccagctaccgccgaacctcccgctgagacccctgcggagattgttgatggcggtgtgcctcaagctcagctcgccggaagtgattccgaccttgatagtgatgacgagtttgtgccctacgacatgtccggagacagggaactaaaatcatccaaggctcctgcatatgtgcgcgattgcgtcgaggttttagatgtcctcaccttggctgcacaggagctgagccggccgggttgtctgggacgtacaccacaacccggttctccctctcccaataccccgtgcctgccagaagcggcagtgagccaacccggatcagcagttgcatctgactggcgggtggtcgtggaagagcgaattcggtcgaagacacagaggctttctaaaggcggaccccgtcagggccctgcaggcagtccttcccgattcaacagcgtcgccggccacttcttctttccactgctgcagagatttgaccgccccctcgtcacctttgacctgttaggtgaggaccagttggtgctaggccgactggcccatactctgggtgcgctcatgtgcctcgccgttaacaccacggttgcagtggctatgggtaaagcactgctggaatttgtgtgggcattgcggttccacattgatgcttatgtgaggcagggtctcctcagtgcagtgtcaagcgtgttgctgagcttgcccgctgctcggctgctcgaagaccttatggatgagctcttggaggccaggtcctggctcgctgacgtggccgagaaagaccctgacgaggactgcaggactctggccctgcgggcactgctcctgctgcaacgcctgaagaatcggctcctgcctccagcctctccatag

SEQ ID NO: 137497 - DNA, 3270 bp, synthetic construct
  misc_feature 1..3270: note = Description of Artificial Sequence: Synthetic coding sequence
  source 1..3270: mol_type = other DNA
atggccgtgttcgatacacccgaagaggctttcggcgttctgcgcccagtctgtgtgcaactgacaaagacccaaactgtggagaacgtggaacatctccagacaagactgcaagccgtgtctgatagtgctttgcaggaactgcagcagtacattctgtttccacttcggttcaccctgaaaacacccgggcccaagagagagagactgatccaatcagtggtggagtgcctgacatttgtgctgtcgagcacatgtgtgaaagaacaggagcttttacaagaactcttttcggaacttagcgcctgtttgtacagcccttcgagccagaaacccgccgccgtttcagaggaacttaaactggcagtgatacagggcctctctacactgatgcattctgcatatggagatattatcctcacgttctacgagccgagcattcttcccaggctcggattcgctgttagcctactcttggggctggccgagcaagagaaaagcaaacagatcaagatcgccgccctcaagtgcctccaagtgctgctcctccagtgcgattgccaagaccaccccagatctctggacgaactggaacagaaacagctaggagacctgttcgcatccttcctgccaggcatctcgactgctctcaccagattgatcaccggagactttaagcagggtcacagtatagtggtgtcatctctgaaaattttctataaaaccgtcagcttcatcatggccgacgagcagctgaaaagaatttccaaggttcaggctaagcctgctgtcgaacaccgcgtcgccgaactgatggtctaccgcgaagccgactgggtaaagaagacgggcgataaactgaccattctaatcaaaaagattatcgaatgtgtatccgtccacccgcactggaaagtgcggctggagctggtggaactggtagaagatctccttctcaagtgtagccaatccctggttgaatgtgcgggcccactgctgaaggcgctagtcgggctggtgaacgacgaatcccctgaaattcaagcacagtgcaacaaggtgctccgccacttcgcggatcagaaagtcgtggtgggaaacaaagctctcgcggatatcctatctgaatcactccactcgcttgctacttctctgccccgattgatgaacagtcaggacgaccagggaaaattcagtacactctctctgctgttgggatatcttaagttactggggcccaaaatcaactttgtcctgaattcagtggcccacctgcagaggctcagcaaggcccttatccaggtcctagagctggacgtcgcggatattaaaatcgtagaagagcggaggtggaactcagacgatcttaacgcttctcctaagacaagcgccacgcagccttggaacaggatccagaggcggtactttagattcttcactgacgagaggatcttcatgctcctgcgacaagtgtgccagctgctaggctactatggaaatctgtatttgctggtggatcatttcatggaactctatcaccagagcgtggtgtacaggaaacaggcagctatgattttgaacgagcttgtgactggagccgcaggactcgaagtggaggacctgcacgaaaaacacattaagacaaacccagaagagttacgtgagattgttacgagtattctggaagagtatacgtcccaggaaaactggtatctggtgacgtgccttgagacagaagagatgggtgaagaactcatgatggagcaccctggacttcaggcaattacctccggggaacatacctgtcaagtgacctccttccttgcctttagcaagccaagtccaaccatttgcagtatgaactcaaacatatggcaaatatgcatccagctcgaaggaattggtcaatttgcttatgccctcgggaaagacttttgcctcttactgatgtcagctctttaccctgtactcgaaaaggctggagaccagacattactgatctcacaggtcgcaacctctactatgatggacgtttgtcgggcatgcgggtatgactcccttcagcacctgataaaccagaatagcgactatctggttaacgggattagccttaacctaagacacttagccctacatccacacacacctaaggtactggaggtcatgctcaggaactcggatgccaaccttttaccactggttgctgatgtcgtgcaagacgtgttggccacactcgatcaattttatgacaaaagagcggcctccttcgtttccgtgttgcacgccttaatggctgccctcgcccagtggtttccagacacaggtaacctgggccacctgcaggaacaatcccttggcgaagaaggctcacatttaaaccagcggcccgccgccctggagaagagtacaaccacagcggaggacatcgagcagtttctgctgaactatctgaaagaaaaggatgtggcagacggtaatgttagcgattttgacaatgaggaggaagaacagtcagtgccacccaaagtggacgaaaacgacacgcgacctgatgtcgaaccacctttgccactccagatccagatagctatggatgtaatggagagatgcatacacctgttgtctgataaaaaccttcaaatacgccttaaagttctcgatgtactggacctgtgtgtggtggtcctgcaatcgcacaagaatcagctcttacccctggcacaccaggcgtggccaagcctagtccacagattgacacgtgatgcccctttggccgtactacgggcatttaaagtcctccgaacactgggctcgaaatgtggggacttcctccgcagcaggttttgtaaggatgtgttacctaagttggctgggagtctcgtgacgcaggctccaatttctgcaagggcgggcccggtctactcacacacactcgcctttaagctccagctcgctgtgctccagggcctaggacctctttgtgaacgactggatttaggcgaaggcgatttgaataaagtggccgacgcttgcttgatttatttatctgttaagcagccggtcaaactccaggaggcagcccggagcgtttttctgcatctgatgaaggtagaccctgatagtacttggtttctgctgaacgagctgtattgtcccgtgcagttcaccccgccacacccatcactccaccccgtgcagctccatggtgcctccgggcagcagaacccgtataccaccaatgtgctccagcttttaaaagagctgcagtag

SEQ ID NO: 137498 - DNA, 3270 bp, synthetic construct
  misc_feature 1..3270: note = Description of Artificial Sequence: Synthetic coding sequence
  source 1..3270: mol_type = other DNA
atggctgttttcgacacaccagaggaggctttcggcgtgctcaggcctgtgtgcgttcagctgaccaagacccagaccgtggagaatgtggaacacttgcaaacccggctccaggctgtgagcgacagcgctctgcaggagttgcagcagtatatcctctttccactcaggtttacattgaaaaccccaggccctaagagggaaagacttatacagtcagtagtagaatgtctgacttttgtcctcagtagcacttgtgtcaaggagcaggagttgctgcaggaactgttcagtgaactcagcgcctgtctgtattcgccgtcatcacaaaaacccgccgccgtgagcgaggaacttaaactggcagtgatacagggcctgtccacgctgatgcactccgcatatggtgacattattctcactttctacgagcccagtatactcccaagattgggcttcgctgtgtcacttctgctgggactggccgagcaagaaaaatctaagcagattaagattgccgcactcaagtgtctacaggtgttattactgcagtgcgactgtcaggatcacccacggagcctagatgagctggagcagaaacagctgggggaccttttcgcatcattccttccaggcattagcacagccctcaccaggttaatcaccggcgatttcaagcaagggcacagtatcgtggttagcagcttgaagatcttctacaaaactgtctcgttcataatggccgacgagcaactgaagagaatctccaaagtgcaggccaagcctgcagtagagcaccgcgtggccgagctaatggtctatcgcgaagcggattgggtgaagaaaactggagataagctcaccatactgattaagaaaattattgagtgtgtgagcgttcatccacattggaaagttcgattggaacttgttgaactggttgaagacctcctgcttaaatgtagtcaaagtctggtggagtgtgcaggtcccttactgaaggccttagttggactggtgaatgacgagagcccggagatccaagctcagtgtaacaaagtcctgcggcattttgccgaccagaaagttgttgtcgggaacaaggcattggcagatatcttgagcgaaagtctccattccttagctacctcgctgcctcggctgatgaattcacaagatgatcagggtaagttcagtactctcagtttattgttaggatacctgaagttattgggcccaaagatcaacttcgtcttgaattctgtagcccatctccagaggctgtctaaggcactgatacaggtactggaactggatgtagccgacatcaagatcgtggaggaacgtaggtggaattcagatgacctaaacgccagccctaaaaccagcgctacccaaccctggaataggattcagagaagatatttcaggtttttcaccgatgagagaatatttatgctgcttaggcaagtctgccagttgctaggctattatgggaacctgtatctactcgttgatcattttatggagctgtaccaccagagcgtcgtgtacagaaagcaggccgcgatgatcctgaatgaactcgtgacaggggcagcaggactggaggtggaagatctgcacgaaaaacatattaagaccaaccctgaagaactcagagagattgttactagcatcctggaggagtacacctcccaggagaactggtatctagtgacttgtctggaaaccgaggagatgggagaagaattgatgatggaacacccaggcctgcaggcaatcacatctggtgaacatacgtgtcaggtgacaagcttcttggcattttccaagccctctcctacaatctgctccatgaattcaaatatctggcaaatatgtatccagctggagggtatcggccagtttgcatacgccctgggaaaggacttctgcctgctgctgatgagcgctctctaccctgtgcttgaaaaggctggggaccagacactgttaatttcccaggtcgctacctctacaatgatggatgtgtgccgggcgtgtggctatgatagcctgcagcacctgataaaccaaaacagtgattacttagtgaacggcatcagcctgaatctccgccatcttgctctacatccccacacgcccaaggtgctagaggttatgctgcggaatagtgatgccaatctcctcccattggtcgccgacgtcgttcaggatgtactggccacactcgatcagttttacgataagagggcagcaagttttgtctccgttttgcatgccctgatggccgccctcgctcagtggttcccggacacagggaacctgggccatctgcaggagcagagcctgggtgaggaaggatctcacctgaatcagagacccgccgccctggagaaatcgactaccaccgcggaagatatagaacagttcttactgaactacctaaaggaaaaagacgtcgcggacggcaacgtaagtgacttcgacaacgaggaggaggagcaaagcgtaccgcctaaagtggacgaaaatgacacacgaccagatgttgaaccaccactccccctccagatccagattgcaatggatgtcatggaacggtgtatacacctgctgtccgacaagaaccttcaaatacgtctgaaagtgttagacgtcctcgatctatgtgtggtggtgctccagagtcataagaatcagctcctccctctggcccaccaggcttggccctcactcgtgcacagactaacacgggatgctcctctcgccgtgttgagggcattcaaagtgcttagaaccctcgggtctaaatgtggggatttcttgaggtccaggttttgtaaggacgtcctgccaaaactcgccggctcactggtgacgcaggccccaatttccgcgcgtgccggaccagtttatagccatacactggcctttaagctacagcttgccgtcttacaggggctggggccactgtgcgagagactagacttaggggagggggatctgaacaaagttgcggatgcttgcctaatctacttgtccgtcaagcagcctgtaaaactgcaagaggcagcgagaagtgtgtttctgcatttaatgaaggtcgatcctgacagcacatggtttctgctgaacgagctgtattgtcctgtgcagtttaccccaccccacccatcattgcaccccgtacagctccacggcgccagtggtcaacagaatccatataccacgaacgtgctgcagctgctgaaggagttacagtag

SEQ ID NO: 137499 - DNA, 3270 bp, synthetic construct
  misc_feature 1..3270: note = Description of Artificial Sequence: Synthetic coding sequence
  source 1..3270: mol_type = other DNA
atggccgtgtttgacacgccagaggaagcttttggagtattaagacctgtgtgcgtgcagttaacgaagacccaaactgtggagaacgtggagcacctgcaaacaagactgcaggcagttagcgattccgcgctgcaggagctgcagcagtacatcctgtttcccctgagattcacactcaagacgcccggaccgaaaagggagaggctgattcaatccgtcgtggaatgcctcacattcgtactcagtagcacctgcgtcaaggagcaggaactgctccaggaactgttttccgaactgtctgcctgtttgtacagcccttcttcccagaaaccagctgcagttagtgaagagcttaagcttgctgtcatacagggtctgtcaaccctgatgcacagcgcctatggcgacatcattttgacattctacgaaccatctattctgccaaggctgggctttgccgtgagtctcctcttaggtctcgcagagcaagaaaagtctaagcagataaagattgccgcactgaagtgcttgcaggtccttttgctccagtgcgattgccaggaccaccctcggtctctcgacgagctcgagcagaaacagctgggtgacctgtttgcctcctttctccctggaatctccactgccttaacgcggctgatcacaggtgattttaagcaaggacacagtatcgtggtaagcagcctgaaaatcttctacaaaactgttagtttcataatggcagacgagcagcttaagcggattagtaaggtgcaagctaagcctgcagtggagcaccgagtcgctgagttaatggtataccgtgaggctgactgggtgaagaagacaggggataaactcacaatcttgatcaagaagataatcgaatgcgtgagcgtccatcctcattggaaagtccgccttgaactcgtggagttggtagaagatctcctcctgaaatgttctcagtcactggtcgagtgtgctggtcccctcctgaaagccctggtcggactcgtcaatgatgagagtcccgagattcaggctcaatgtaataaggtcctacgtcactttgctgaccagaaagtagtcgtgggaaacaaggcactcgccgacattttatctgagtctctgcattccttagccacctccttgcctcgactcatgaattctcaggacgaccaggggaagttttcaaccctatccctgctcctgggatacctcaaattacttgggcctaaaattaattttgtactcaatagtgtggcgcacttacagaggctctcaaaagccctgattcaggtacttgagctcgatgtggccgatattaagatagtggaggagagacgatggaactctgatgatcttaacgctagcccgaagacttcggctacacagccatggaatagaatccagcggcgctactttagattcttcacagacgagagaatctttatgctgcttagacaagtctgtcagctgcttggctactatgggaacctgtatctgctcgtggatcattttatggagctgtatcaccagtccgtggtatacagaaagcaggctgctatgattctcaacgagctagtgacgggagcggctggattggaggttgaagacctacatgaaaaacatatcaagacaaatccggaggagttgcgagagatcgttacctctattttagaagaatacacttcccaggaaaactggtatctagtgacttgtctggaaactgaggagatgggcgaagagctgatgatggaacatcccggattgcaggccataaccagtggcgagcatacatgccaggtgacaagttttctcgcattttccaagcccagccccaccatctgctccatgaactcaaatatctggcagatttgtatccagctagaaggtataggacagttcgcctacgcccttggcaaggacttctgtcttctgttaatgtctgccctatatccagtgctcgaaaaggccggcgaccagactttgcttatttcacaggtggccacaagcaccatgatggacgtctgccgcgcgtgcggatacgattcactacaacacctgataaatcagaattcagattatttggtaaatggtataagtttgaatctccgccacctagctttacacccccatacccccaaagttctggaggtcatgcttaggaattctgatgccaacctgctgcccctagttgctgacgtggttcaggatgtgttagctacccttgaccagttctatgataaaagagctgcaagttttgtgtcggtattacacgcactcatggcggcattagcacagtggttcccggataccggaaatttgggacacctacaggaacagtctctgggagaggagggttcacatttgaaccagcgcccagccgccctcgaaaagagtactaccacagccgaggacatcgagcagtttctgcttaattacttgaaggagaaggacgttgctgacggcaacgtgtccgattttgataacgaggaagaagagcagtcagtgccgcctaaggtggatgagaacgatactcggcccgacgtcgagccaccattgcctctgcagatccagattgctatggacgtgatggagcgatgcattcatctccttagcgacaaaaatctccagatcagactcaaagtcctcgacgtgctagacctctgtgttgtcgtgttacagagccacaagaatcagctgctccccctcgcccaccaagcctggcccagcctggtacatcggctcacgagggatgccccactggccgttctgagggctttcaaggtgctgcggacgttgggatccaagtgcggagacttcctccggagccgcttctgtaaggacgtgttgcctaaacttgcagggtcactggtcactcaggcaccgatttctgctcgcgctgggccggtgtacagccataccttggcgtttaagctacagctcgcggtgttgcaaggactcggtcctctgtgtgagcggctggacttaggtgagggggacctgaataaggtggctgacgcttgccttatttacctttccgtgaaacagcctgttaagctgcaggaggcggctaggagtgtgtttctgcacttgatgaaagtggatcccgattccacatggttcctgctgaatgagttgtattgtcccgtgcagtttacgcctccccacccttctctgcaccctgtccaacttcacggcgcatcaggacagcagaatccttacacaactaacgtgctgcagctactcaaggaacttcagtag

SEQ ID NO: 137500 - DNA, 1527 bp, synthetic construct
  misc_feature 1..1527: note = Description of Artificial Sequence: Synthetic coding sequence
  source 1..1527: mol_type = other DNA
atggaactcgacagcgctctggaagccccatctcaggaggacagtaacctgagtgaggaactgagtcactccgcttttggccaggccttcagcaaaattctgcactgccttgcaaggcctgaggccagacgtggaaatgtgaaagatgccgtactcaaggacttaggggatctgatcgaggcgactgagttcgatcggttattcgaagggaccggtgcaaggctgcgcggaatgccagaaacactgggtcaggttgccaaagcccttgaaaagtacgccgcgccttctaaagaggaggagggaggtggtgacggtcactccgaggcggctgagaaagccgcgcaggttggactgctgttccttaagcttctgggcaaggtggagacagccaaaaattctctcgtgggccctgcttggcaaaccgggctgcaccaccttgccggcccggtctatatatttgcaatcacccattcactcgagcagccttggacgaccccacggagtcgtgaagtggcccgcgaagtgttaacatctctgttgcaggtcacagagtgcggaagtgtcgcaggatttctgcatggggagaacgaagacgagaagggccggctctctgtcatactcgggctcttgaagcctgacttatataaagagtcttggaagaataatcccgcaatcaaacacgtgttttcctggacgctgcaacaagttacacgaccatggctatcccagcaccttgagagggtgctgcctgcgtctttggtcatatctgatgattatcaaactgaaaacaaaatactcggggtgcactgtctacaccacattgttctgaacgtccccgctgccgacctgctgcagtataatcgggcacaggtgttataccatgccatctcaaatcatctctacactcctgaacaccatctcatacaagccgttctcctgtgtctcttggacctttttccaatactagaaaagaccctccattggaagggggacggcgcacgcccaacaacccactgcgatgaggtactgagactgatcctcacgcacatggagccagagcatcggctgctgcttcgcagaacatacgcccggaatctcccggccttcgtaaatagactgggcattctgaccgtgaggcacttaaaacgcctggagcgcgtgattatcggctatctcgaagtatatgatggcccggaagaggaagccaggctgaagatcctcgagactcttaagctcttaatgcagcatacctggccacgggtatcctgtaggctggtggttctcttaaaggctctactgaaactgatctgtgatgttgctcgcgaccccaacctgaccccggaatctgtcaaaagcgctctgctacaggaggccacagattgcctcattctgctggaccggtgtagtcaggggcgcgttaagggcctgctggctaaaatcccacagtcctgcgaggacagaaaggtggttaactacatccggaaggtacagcaggtctctgaaggcgctccctataacgggacctag

SEQ ID NO: 137501 - DNA, 1527 bp, synthetic construct
  misc_feature 1..1527: note = Description of Artificial Sequence: Synthetic coding sequence
  source 1..1527: mol_type = other DNA
atggagctcgactctgctctggaagctccatcccaggaggatagtaacctctcggaggaactgtcacatagcgcttttgggcaagcttttagcaaaatcctccactgcctggccagacccgaggccaggcgcgggaacgtgaaggacgcagtgctgaaggatcttggcgatctcatcgaggcaactgagtttgatcggctctttgaggggacaggcgcaaggctgagggggatgcctgagacgctgggccaggtggccaaggcacttgaaaaatatgcagctcccagcaaggaggaagaaggaggaggcgacggccactctgaggcagccgaaaaagctgcccaggtgggactgcttttcctgaagctgctgggcaaggtggagacagcaaaaaatagcctcgtgggcccggcatggcagactgggctgcaccatctcgctggcccagtgtacatattcgctattacccattcccttgaacagccttggacaacgccacggagccgagaagtggcaagagaggtccttactagccttctgcaggttacagaatgtgggtccgtggctgggttcctacacggcgagaacgaagacgagaagggacggttatcggtaatcttgggactgttgaagccagacttgtataaggagtcttggaaaaataaccccgctatcaagcacgtgttctcatggacccttcagcaggtcactagaccctggctgtctcagcatctggagagagtgctaccagccagtctagtcatttccgatgactaccagactgagaataagattctcggcgtccattgcctgcaccacatcgtcctgaatgttccggccgccgacctgctgcagtataatcgggcccaggtgctataccacgcaattagcaatcacttatacactcctgagcatcatctgattcaggcagtcttgctttgccttctcgatctgtttccaatcctggaaaaaaccctgcactggaagggcgacggagcccgccccaccactcactgcgacgaggttctccggctgatcctgacccatatggaacccgagcaccgcctgctactccgtagaacgtatgctagaaacttgccggcattcgttaataggttaggaatcttgaccgtacgtcatctaaagagactcgaacgcgtgattatcgggtatttagaggtgtacgatggtcccgaggaagaagcacgactaaagatcctcgagactcttaagttactgatgcagcacacatggcccagagtgtcctgtcgcctggtggtattacttaaggccctcctcaaactgatttgtgatgtcgcacgcgatcctaatcttacccccgagtccgttaagtctgcactcctccaagaagccacagactgcctcatccttctggatcgttgtagtcagggccgggtgaaaggattattggcgaaaattcctcagtcctgcgaagatagaaaggttgtgaactacattcgaaaggtgcagcaagttagcgagggtgcaccctataacggcacctag

SEQ ID NO: 137502 - DNA, 1494 bp, synthetic construct
  misc_feature 1..1494: note = Description of Artificial Sequence: Synthetic coding sequence
  source 1..1494: mol_type = other DNA
atggaactcgatagtgccctggaagcaccatctcaggaggattctaatctgtcagaggagctctcccactccgcttttggacaggcgttcagcaaaatcctccactgtctggcccggcctgaagcaagacgtggtaatgtcaaggacgctgtgttaaaagacctgggggacctcattgaggccacggaattcgacagactgtttgagggcactggagcccggctccgagggatgcccgagaccctgggacaggttgcgaaagctcttgagaagtatgctgcccctagcaaagaagaggaaggcgggggcgacggacactctgaagctgcagagaaggcagcccaggtgggcctactctttctgaaactgctggggaaagtcgagactgcgaagaactcactcgtcggtcccgcatggcagacgggcctgcaccaccttgccggacccgtctacatctttgccattacccactctctggagcagccctggacaacacctcggtcccgggaggtggcccgcgaagttctgacgtctttactgcaggtcaccgagtgtggttcagtggccgggtttcttcacggagaaaatgaggatgagaaaggccgtttaagtgtaatactggggttgctcaaacctgacctctataaggagagttggaagaacaatcccgccatcaagcacgtgtttagctggacgttgcagcaagtgacacgaccgtggctctctcagcacttggagagggtgcttcccgcatctctggtgatctccgacgattaccagacggaaaataagatccttggtgtgcattgtctccaccacatcgtgcttaacgtccccgctgcagacctgttacagtacaaccgcgcccaggtcttatatcacgcgatcagtaaccacctgtacactccagagcatcacttaatccaggccgtactgttgtgtctcctggacctctttccaatcctggaaaaaacactccattggaagggggacggcgcccgacccacaacccactgtgatgaggtgctcagactgattttgacacacatggaaccagaacaccggctgttgcttcggaggacctatgctagaaatctcccagcctttgtcaacagactcgaaagagtgatcattggttatttagaagtgtacgacgggcctgaagaagaggcacgcctgaaaattctagaaacactgaagctacttatgcaacacacctggccacgcgtgtcttgccgactcgttgtactgctcaaggctctgcttaagcttatctgcgatgttgctcgggatcccaacctgaccccggaaagtgtcaagagtgccctgttgcaggaggcaaccgattgcttgatcctgctggatagatgttctcagggccgagtgaaggggctcctcgcgaagataccgcagtcctgtgaggatcggaaggtggttaactacataaggaaggttcagcaggtgagtgaaggcgctccttacaatggcacttag

SEQ ID NO: 137503 - DNA, 306 bp, synthetic construct
  misc_feature 1..306: note = Description of Artificial Sequence: Synthetic coding sequence
  source 1..306: mol_type = other DNA
atggaactggattctgccctggaggccccaagccaggaggacagcaacttgagcgaggagctctctcatagcgccttcggacaggccttttctaaaatcttgcattgtcttgcccgacctgaggcacgcagaggcaacgtgaaagatgcagtgcttaaagacttaggtgatctgatcgaggccaccgagtttgaccgcttattcgagggaacaggggcacggttgagaggaatgcctgagactctggggcaggtggcaaaagccttggaaaagtacgcggcaccctctaaggaggaggaggggtag

SEQ ID NO: 137504 - DNA, 2424 bp, synthetic construct
  misc_feature 1..2424: note = Description of Artificial Sequence: Synthetic coding sequence
  source 1..2424: mol_type = other DNA
atgcctcgcgcgccaagatgccgcgcggtgaggagtctccttcgcagccactatagagaagtcctgccactggccacatttgtacggcgactcggcccacaaggatggagactcgtccagagaggcgatcccgcagcctttcgcgccctggtagctcagtgtttagtttgcgtaccctgggatgcccggcctcccccggcggcccccagctttagacaagtgtcatgcctaaaggagttggttgcacgcgtgcttcagcggctttgcgagcgaggagccaagaacgtcttggcttttggtttcgccttactggacggcgctcgcggtgggccgcccgaggctttcaccacgagcgttcggtcttacctgcccaatactgtgactgatgctctgagagggagcggcgcctgggggcttctgctgaggagagtgggcgatgatgtgctggttcacctgttagcaagatgtgcactatttgttctcgtcgccccatcatgtgcttatcaggtgtgtggtccacccctgtaccagctcggcgcagctactcaagcccgaccaccaccacacgcctccgggccgcggaggaggctgggctgtgaaagagcatggaaccattctgtcagagaggcaggggtgcctctaggcctgcctgcccccggcgctaggaggcgaggtggatctgcgtcccggagcctgcctcttccaaaacggccacgaagaggtgccgctccagagcccgagcgtacacctgtcggtcagggcagctgggcccacccaggtagaacccgcgggccttcagatcgcggtttctgtgtagtgagccctgcacgacccgccgaagaggcaacctctctggagggagctctgagcggcacccggcattcacatccctctgtgggtcgccagcaccacgcgggaccaccatctacgtctcggccccctcgcccatgggataccccttgtcctccagtttatgcggaaaccaaacactttctctactcttcaggagataaagaacaacttcgcccttcgtttcttctgagcagtctccgcccatcactcacaggcgctagaagactggtggaaacgatcttcctgggttccagaccgtggatgcctgggacccccaggcgtttacctcggttgcctcagcgttattggcaaatgagacccctgttcctcgagctgcttgggaaccacgcacagtgcccgtatggggttctgttaaagacgcactgccctctgcgggccgcagtcacccccgctgccggggtgtgtgcaagggaaaaacctcaaggtagtgtcgctgctcctgaggaagaggacaccgatcccaggcgcctggtgcaactgctccgtcagcatagctccccgtggcaggtttacgggtttgtgagggcttgtctgcggaggctggttccgcctggactttgggggtcaaggcacaatgagcgcagattcttaagaaatacaaagaaatttatttcattgggcaagcacgccaagctgtccctgcaggagttaacctggaagatgagcgtacgtgattgtgcctggctccgtcggtcccccggcgtgggatgtgtccccgccgctgaacaccgacttcgcgaagagattctagccaagtttctccactggctgatgagcgtatatgtggtcgaactgttgagatccttcttctacgtgacggagactacattccagaaaaaccgactgttcttctatagaaaatctgtctggtccaaactccagtctatcggaatccggcagcatctgaagcgggtgcaattgcgggagctctcggaggccgaggtgagacaacatcgggaagctcgacctgcattattgactagtcgcctgcgattcataccgaaacccgacggactgcggcccatcgtcaatatggattatgtggtgggtgcccggaccttccggcgagaaaagcgcgcagaaaggctcacctcacgcgtgaaggctctattctcagtcctgaactacgaaagggctaggagacccggactcctgggcgcaagcgtgttgggcctcgatgacatccaccgcgcctggaggacatttgtcctgcgagtacgagcccaggatccaccgccggaactgtacttcgttaaagtggatgtcactggtgcttatgacaccattccccaggacaggttgacagaggtcattgcatccatcatcaaaccacaaaatacatattgtgttcggaggtatgcagttgtgcaaaaggcagcgcacggacatgtgagaaaagcctttaagtcgcatgtgctgagaccagtgcctggggatcctgccggattacatccgctgcatgctgctcttcagcctgttctgagacgccacggggagcaggctgtgtgtggggactccgccgggagagccgcacctgcatttggtggatag

SEQ ID NO: 137505 - DNA, 3399 bp, synthetic construct
  misc_feature 1..3399: note = Description of Artificial Sequence: Synthetic coding sequence
  source 1..3399: mol_type = other DNA
atgcctcgcgcgcccaggtgtcgggcggtccgatccctcctgagatctcactatcgggaagtgctccctctagctacctttgtccgcagactgggtccgcagggatggcgccttgtacagaggggagatcctgctgcttttcgtgcacttgtcgcccagtgccttgtctgtgttccctgggatgcccgcccccctcctgccgccccatcctttcgacaggtttcttgtctgaaagaattggtcgccagggtcttacaacgcttgtgcgaaagaggcgccaaaaatgtcttagcttttggatttgctctgttggacggggcaaggggcggtccccccgaggctttcaccaccagcgtgaggtcataccttcccaacaccgtcaccgatgccctgcgggggtcgggcgcctggggcctgcttctgagacgggtgggtgacgacgtcctggtgcaccttctggcacgatgtgcactcttcgttttggtggctccatcctgtgcctaccaagtctgcggaccacccctgtaccagctgggcgctgctacacaagcccgcccaccccctcatgcatccggaccacgacgacggctaggatgtgagagagcctggaatcattccgtcagagaggctggcgttccactagggttacccgccccaggtgctagaagacgaggcggcagcgcctctcgctctctccctttgccaaagcgccctcgcaggggagctgccccagaaccggaaaggacccccgtcggccagggctcttgggcccatcccgggagaacacgagggcctagtgataggggcttctgtgtggtttcaccagcacggcccgctgaagaagccacatcacttgagggggctcttagcggcacccggcactcccatccttccgttggcaggcagcaccatgcagggcctccttctacctctcgcccccccagaccttgggatacaccttgcccccctgtgtatgctgaaacgaagcactttctttattcctcaggggacaaagagcagctgaggccgtcattcctattgagctctctcagaccttcattgacaggagctcgacgtctggttgaaactatcttccttgggagtaggccttggatgccaggaacgccacgccgcttgccgcggctccctcagaggtattggcagatgcgacctctgtttctggagctgcttggcaaccacgcgcaatgtccttatggtgttctactgaaaacccattgtcctctgcgggccgccgtgacacctgcggccggagtgtgcgcacgcgaaaagccccaaggaagcgttgcagctccggaagaggaagataccgatccacgaagattagtgcaattgctgagacagcactcctctccatggcaagtgtacggctttgtccgggcctgtctacgcagacttgtgccaccaggcctttggggctcccgccataacgaacggcgctttttaagaaataccaagaagttcatatctctgggcaagcacgccaagctctccctgcaggaacttacctggaagatgtcggttagggattgtgcctggcttagacgatcccctggtgttgggtgcgtccccgctgctgaacaccggctgcgagaagagattctggccaaattcctccattggctaatgagcgtctacgtggtggaacttctgcggtcttttttttacgtcaccgaaaccaccttccagaaaaacagactcttcttttacagaaaaagcgtatggtctaagctgcagtctatcggcattcggcagcatttaaagcgcgtgcagttgcgagaactgtctgaggcggaagtgcgacagcatcgagaggctcggcccgcactcctcaccagtaggttgcgattcatcccgaagcccgacggtctgcggccaatagtgaacatggactacgtggtgggggccaggacttttagaagggagaagagggctgaacgacttacctcgagagtgaaagccttattctcagtgctgaactacgagagagctagaaggcctggcctgttgggcgcctccgtactgggacttgatgatatccatcgggcttggcgaacttttgtgcttagagtcagagcccaggatcctccgccagagctgtacttcgtcaaggtcgacgtcaccggcgcctacgacacaatcccccaggaccgccttacagaggtgattgcctctatcataaagccgcagaatacttactgtgttcggagatatgccgtcgtgcagaaagccgcccacggacatgtgcgcaaagccttcaagtcccacgtgtccacacttacagatctgcaaccctacatgaggcagttcgtggcacatctccaggagactagcccattacgcgatgccgtcgtaatagaacagagctcgagtctgaatgaggcctccagcggactgtttgatgtgttcctgcgcttcatgtgccatcatgctgtgcggatccggggtaaatcatatgttcagtgccaaggaatccctcagggctcaatcctgtctactctgttgtgctccctgtgttatggcgacatggagaataagctctttgctggtattcgtagagacggtcttctgttaagactcgtggacgattttctgctggttacccctcatctcacgcatgctaagactttccttagaaccttggtccgcggggtgcccgagtacggatgcgtggtgaacctgcgaaagacagtggtaaatttccctgtcgaggacgaggctctagggggcacagcgtttgtgcagatgcccgctcatgggctattcccctggtgcgggttactccttgataccaggaccttagaagttcagtccgattacagctcatatgctaggacttccattagggcgtctctgacttttaatcgtggcttcaaagcaggaaggaacatgcgcaggaagctgttcggtgttttgcgactgaaatgtcactctttatttctcgacctgcaagttaatagcctccagaccgtgtgtaccaatatctataaaatcctgctactgcaggcttatagatttcatgcctgcgtgctgcaactgccttttcaccaacaagtctggaaaaatccaaccttcttcctccgcgtcatatctgataccgcgtccctgtgttattcaatcttgaaggctaaaaatgccgggatgagcctcggggccaagggggccgcaggtcccctcccgtcagaggctgtgcagtggttgtgtcaccaagcgtttcttctgaaattgacccggcacagagtcacctatgtccccctgttgggttcactgcgcaccgcccagacacagttatctcggaagctgcctgggaccaccctaaccgcgctggaagcagccgctaaccccgctttgccgtccgacttcaaaactatactggattag

SEQ ID NO: 137506 - DNA, 3210 bp, synthetic construct
  misc_feature 1..3210: note = Description of Artificial Sequence: Synthetic coding sequence
  source 1..3210: mol_type = other DNA
atgcctcgggccccacgatgtcgggccgtgcgtagcctgctgcgctcacactatcgtgaggtgttgccactggctaccttcgtacggagactggggcctcaggggtggaggctggtgcagcgcggagacccagcagctttccgggctcttgtagcacagtgtctcgtgtgtgtcccctgggatgccagacctccgcctgccgctccctccttccgacaggtgagctgcctcaaagagctcgttgcgagggttctgcaacggctctgcgagcgaggagcgaagaatgtattggcattcgggttcgctctcttggatggagctagggggggtcccccagaagcctttacaacgagcgtcagatcctatttacctaataccgtgaccgatgccctgaggggatcaggggcctggggtctcttactgcggcgggtcggggacgacgtcctggtccacctgctggcccggtgcgctttgtttgtcttggtcgctcctagctgtgcttatcaggtctgcggccccccactatatcagctgggtgcagcaacccaagcaaggcctcccccacatgccagcggcccacgtagaagactgggttgcgagcgggcttggaatcatagtgtgcgggaagcaggggtgccactggggcttcccgcccccggcgctaggaggcgcggcggctccgccagtcggtctttgcccctgccaaaaagaccacggaggggtgcagctccagaacccgagcggacacccgttggtcagggatcttgggcccatccgggccgcacacgcgggccttccgatcgcggcttttgtgtggtgtcaccagcgcggccagccgaggaggcgacttccctggaaggtgcactttcaggaacccggcactcccacccctcggtgggtagacagcaccacgctggacctccgtctacttcaagaccacccaggccatgggacacaccatgccctccggtctatgcagagaccaaacatttcctgtatagttcgggggacaaggagcagctgagaccttcgttcctgctgagttcattacggccctctcttactggcgccaggcggctcgtagaaactatatttctaggtagcagaccctggatgcctgggactcctaggcgcctgccaagactgcctcaaaggtactggcagatgcggccactttttttagaactgctggggaaccatgcacagtgcccttatggggtgctgcttaagactcactgtcccttaagggccgctgtgacacccgctgccggagtgtgtgctagggagaagccacagggatcggttgctgccccagaggaagaagacactgatccccgccgattagtccagctgctccggcaacattcttctccgtggcaggtgtacggctttgtcagagcgtgcctgagacgcttggtgccgccggggctttggggctcccgacataacgaacggcgatttctgcggaacactaagaagttcatttctctcggtaaacatgccaaacttagtctccaggaactcacttggaaaatgtccgtaagagactgcgcctggctccgacggagccccggggtgggctgcgtgcctgcagcagagcatcgcctgagggaggaaattctggcgaagttccttcactggttgatgtccgtgtatgttgtcgaactgctgagatcattcttctatgtgaccgagaccacctttcaaaaaaatcgcttattcttttacaggaaaagcgtttggtcaaaacttcagtcaattggcattcggcaacatctaaagcgcgtgcagttaagggaactttccgaggctgaagttcgacaacatcgggaggcacggcctgccctgctaactagccgcctgagatttatccctaaacctgatgggctccgccccattgttaatatggattacgtggtcggagcacgtaccttccgccgggagaagagggctgagcgtttaaccagtcgggtcaaggcacttttctccgtgcttaattacgagcgggctagaagaccagggcttcttggtgccagcgttctggggctggacgacatccatcgtgcctggaggacattcgtcctgcgcgtaagggcccaggaccccccacctgagctctatttcgtgaaagtagatgtcaccggggcttatgacactatcccccaggaccggcttaccgaagtgattgccagcatcattaagccacaaaacacatattgcgtccgccggtacgcagtcgtccagaaagctgcccacgggcatgttagaaaggcatttaagtctcacgtatccacgctcacagatctgcagccttacatgcggcaatttgttgcgcatcttcaggagacatcccctctgagggatgcagtcgtgattgaacagtcaagttccctcaacgaggcctcatccggactctttgatgtcttccttcgcttcatgtgccatcacgccgtgcgcatcaggggaaagtcttatgtccaatgccaggggatcccccagggatctatcctgagcactctactatgctcattgtgctacggagatatggaaaataagctgtttgcaggcattaggagagatggactgctactgcgcctcgtcgatgattttctgcttgtgaccccccacttaacccacgctaagactttcctcagttacgccaggacttcaattagggcgagcctgactttcaataggggttttaaggccggccgtaacatgcgacgtaagctgtttggcgtgctgaggttgaagtgccactctttatttttagatttgcaggtgaactctctgcaaaccgtctgcaccaacatttataagattctgctgctccaggcttacagatttcatgcatgcgtgctccagctgccttttcaccagcaggtttggaagaatccaaccttctttctccgggtgatctccgatacagcatctctttgttactccatccttaaagctaagaatgctggtatgtccctaggggccaagggagccgccggacccttgccctccgaagcagtgcaatggctgtgtcatcaggccttcctgctgaaactcacccgacatcgcgttacttatgtgccccttttggggtctctgagaactgcacagacccagctaagcaggaaattaccaggaactactctcaccgccctcgaggctgccgccaatcccgccctcccttccgacttcaagacaatccttgattag

SEQ ID NO: 137507 - DNA, 2424 bp, synthetic construct
  misc_feature 1..2424: note = Description of Artificial Sequence: Synthetic coding sequence
  source 1..2424: mol_type = other DNA
atgccgcgggccccccgatgccgcgccgtccgttctctgctcaggagccattaccgggaagtccttcctctggccactttcgtcaggaggctggggcctcaaggctggcggctagtgcagcgcggcgatcctgccgctttcagggccttggtggcgcaatgtctcgtgtgcgtcccttgggatgcacgccccccccccgctgccccttccttcagacaggtgtcctgtctgaaagaactggtggccagggtcctacagagactgtgcgagcgcggagccaagaacgtactcgccttcggttttgccctcctagacggtgcccgcggcgggccacccgaagccttcacaacctccgtgcgctcttacctccccaacactgtgactgatgcgctgcggggctccggagcctggggcctgttgctgcgccgggtcggcgatgacgttctcgttcaccttcttgctaggtgcgccctgttcgtgctggtggcgccgtcgtgcgcataccaggtatgcgggccgccgctgtatcagctgggggccgccacccaggcaaggccacctccgcatgcctcaggcccacgccggaggctgggttgcgaacgtgcatggaatcattccgttagggaggctggggtcccattgggactacccgctccaggagcaaggaggcggggaggctcagcttcacggtccctcccgttgcctaagcgccccagacggggcgctgcacctgagcctgagaggacacctgtcggccagggaagctgggcccaccctggcaggactcggggcccttcagatcgtggattttgtgtggtttcccccgctagacctgccgaagaagctactagcctagagggcgctttgtctggaacccgccacagtcatccctctgtcggacgacagcaccacgcaggacccccaagcaccagccgccctccgcggccatgggatactccgtgtcctcctgtttatgccgaaaccaaacattttctctactcttcaggtgataaagagcaactgaggccatcatttctcctgagcagcctgagaccgagtttgactggggcacggcggctcgtggagactatctttctgggttcaagaccatggatgcccgggacacctcgcaggctgccacgactcccccagagatattggcaaatgcggccgctatttctggaactcctggggaaccatgcgcagtgtccatacggtgttctgctcaaaacccactgccctttacgggcagcagtaacccctgctgccggtgtatgcgccagggaaaaaccgcagggctctgttgccgccccagaggaggaggatactgacccccggcgcctcgtccagctgctgagacagcatagctccccctggcaggtttatggttttgtcagagcttgtttgcggaggctcgttccgcctggactctgggggtctcggcataacgaaagaaggttcttgcgaaacaccaagaaatttatctcactgggcaaacatgctaaactatccctgcaggagctgacatggaaaatgtcggttagagattgcgcctggttgagaaggtcccctggcgtaggctgcgtccctgcggcggagcatagactgagagaagagatcttggcgaaatttctccactggttgatgtccgtttatgtggtcgagcttctgcgctcgttcttttatgtgacagaaacaacctttcaaaagaatcgactctttttttaccggaagtcagtgtggagtaagttgcaatctatcggaatcaggcagcacctgaagcgagtccagctgcgcgagcttagcgaagccgaagtacggcagcaccgcgaggcgcggcctgcactcctgacttcaaggctgaggtttatccccaagcccgacgggctccggcccattgtgaatatggactacgtggttggagcccgcacgtttaggcgggagaagagagccgaaaggctgacatccagagtgaaggcactattctctgtactgaactacgagagggctaggcgtccagggcttctgggtgcatccgtgctagggctggacgacatacaccgtgcctggcgcaccttcgtgctgcgtgtcagagcgcaggaccctcccccggagctgtatttcgtgaaagttgacgttaccggcgcttacgacacaatcccccaggacagattgactgaggttatcgcatcgataatcaagcctcagaacacatattgtgtgcggcgctatgccgttgtgcagaaggccgctcatggccatgtccgaaaagctttcaaaagtcatgtgctgcgccccgtacccggtgacccagccggattacatccactgcacgccgctctgcagcctgttcttcgtcggcacggagagcaggcagtgtgcggagactctgctggacgcgcagcccctgccttcggcggctag

SEQ ID NO: 137508 - DNA, 372 bp, synthetic construct
  misc_feature 1..372: note = Description of Artificial Sequence: Synthetic coding sequence
  source 1..372: mol_type = other DNA
atgatgttaccaaagccgggaacatattatcttccatgggaagtttccgcaggtcaggtacccgacgggagtactctgcggacatttggccgcctgtgcctgtacgacatgatccagtcacgagtgactctaatggcacagcatggcagtgatcaacatcaagtgttggtgtgtaccaagctagtggagccgtttcacgcccaggtggggtccctatacattgtcctgggagagctgcagcatcaacaggatcgcggcagcgttgttaaggcacgtgtgctcacatgcgtggaggggatgaatctgcctctgctggaacaggccatacgcgagcaaaggctgtataagcaggaacgaggtgggagtcagtag

SEQ ID NO: 137509 - DNA, 369 bp, synthetic construct
  misc_feature 1..369: note = Description of Artificial Sequence: Synthetic coding sequence
  source 1..369: mol_type = other DNA
atgctgcccaagccaggcacatattatctgccttgggaggttagcgcgggacaggtacctgacgggtccacgcttcgcacctttggccgtctatgtctctacgacatgattcagtcccgagtcactctgatggcccagcacggcagtgaccagcatcaggtgctagtttgtactaagttagttgagccatttcacgcccaggtgggctccctctatatcgtcctcggtgagcttcagcatcagcaggatcgtggcagtgtggtgaaagctagagtcctgacctgtgtcgagggcatgaacctccccctcctcgagcaggccattagggaacagcgactgtataagcaagaacggggcggttctcagtag

SEQ ID NO: 137510 - DNA, 5514 bp, synthetic construct
  misc_feature 1..5514: note = Description of Artificial Sequence: Synthetic coding sequence
  source 1..5514: mol_type = other DNA
atgggtgctatgacccagctgctcgctggcgtgtttttggcatttctggccttggccactgaggggggcgtcttaaaaaaggtgattcggcacaaaagacaaagcggggtgaatgctacactgcccgaggaaaaccagcctgtggtttttaaccacgtctataacataaagctgcctgtgggttctcaatgctccgttgacttggagtccgcttctggcgaaaaagatctagctccacctagtgaaccgtccgagtccttccaggagcatacagtggatggagaaaaccagatagtgtttacacatcgcatcaacatacctagaagagcttgcggatgcgctgctgcaccggacgtgaaggagctgttaagccggctagaggagctagagaatctggtgagctctctgcgggagcagtgcactgcaggggcgggatgctgtctgcaacccgccacagggcgtctggacacccgccccttttgctccgggcgtgggaatttctcaactgaagggtgtggatgtgtgtgcgaacctgggtggaaagggccaaattgctcggaacctgagtgcccgggaaattgccacttgcgcgggaggtgcatagacggacagtgtatttgcgacgacggatttaccggcgaggactgcagtcagctcgcatgtccaagcgactgcaacgatcagggaaagtgcgtgaacggagtgtgtatctgttttgaaggatacgcgggggctgattgttcacgagagatctgtcccgtgccgtgctcagaggaacacggcacttgtgtggatggactgtgcgtgtgtcatgatggctttgccggagacgattgcaacaagcctttatgtctgaacaactgctacaatcgcgggaggtgcgtcgagaatgaatgcgtttgcgacgaaggcttcacaggagaagactgctccgagctcatttgtccgaacgactgtttcgaccgaggccggtgcattaatgggacttgctactgtgaagagggatttaccggagaggactgcggtaagcctacatgcccccatgcttgtcacacacagggccgatgtgaagaaggacaatgtgtttgtgacgagggcttcgcaggtgtggactgtagcgagaaaagatgtcctgcagattgtcacaatcgtgggcgatgtgtcgacggaagatgcgagtgcgacgatggttttaccggtgctgactgcggggagctcaagtgccctaacggctgcagcggccatgggaggtgcgttaacggccagtgtgtgtgcgatgagggctatactggtgaagattgttctcagctgagatgtccaaacgactgccattcgaggggccgatgtgtcgaggggaagtgtgtgtgtgagcaggggtttaaaggctacgattgtagtgatatgagctgcccgaacgattgccaccagcacggaaggtgtgtgaacggcatgtgtgtatgcgacgacggatatactggagaagactgccgtgatcgacagtgtccccgcgattgttcaaaccgtggtctttgcgtagacggtcagtgtgtgtgtgaggatggctttaccggacctgactgcgctgagttgtcttgccctaatgactgtcacggacaggggcgttgtgttaacgggcagtgtgtgtgccacgaggggtttatgggtaaagactgcaaggaacaaagatgcccgtccgattgccacggtcagggccgctgcgttgacggtcagtgtatctgccacgaaggatttacgggcctggactgtgggcaacattcatgtcccagcgattgtaacaacctcggtcagtgtgtgtcaggtcgatgcatctgtaatgaggggtacagtggcgaagattgcagtgaggtatcccctccaaaggatcttgtagtaaccgaggttacagaggagacggtgaatctcgcttgggacaacgagatgcgcgttacggaatacctggtcgtgtacacgccaacgcatgagggggggttggagatgcagtttcgagtgcccggtgatcagacctcgaccattatacaggaacttgaacccggtgtggaatattttattcgggtctttgccatcctggaaaacaaaaaatctatcccagtcagcgctcgcgtcgccacgtacctccctgccccagagggactgaaatttaaatctatcaaggaaacctctgttgaggtggagtgggatcccctcgatatcgccttcgaaacatgggagataatattccgtaacatgaacaaagaggatgaaggggaaatcactaagagtcttagacgacccgaaacatcctatcggcaaaccggcttggcacctggccaggaatacgaaatttctctgcatatcgtgaaaaataacacccgaggcccgggactaaagagggtaacaacaacaagattagatgctccatcacaaatcgaggttaaagatgtcacagacactacagcgctgatcacatggttcaagcctttggcagagatagatggaatagaactaacttacggtattaaagacgtccctggggaccggactactatcgatcttaccgaggatgaaaatcagtactcaatagggaaccttaagccagatacagaatatgaggtatcactgattagtcggcggggtgatatgagttctaacccggcaaaggagaccttcaccacgggcctggatgccccacgcaacctgagacgggtctctcagactgataacagtatcacactggaatggaggaatggaaaagctgccatcgattcataccgcattaagtacgctcccatctcaggcggagaccacgctgaagttgatgtacccaaaagccaacaggcaaccaccaagaccaccctcactggtctaagacctgggaccgaatatggcataggggtgagcgcagtgaaagaggataaagagtctaacccagcaaccatcaacgctgctacagaactcgacacccccaaagacttgcaggtgagtgaaacagcagaaacatcactgaccctactctggaaaaccccactcgcaaagtttgacagatatcgccttaactattcgctccccacaggacaatgggtaggcgtccaactgccgcgtaatacgacatcctacgtgctcagaggactggaacctggacaagaatacaacgttttactcacagccgagaaggggaggcacaaaagtaagccggccagggttaaggcctccacggcgaaggagccggagattgggaatctcaatgtatccgacattactccagaatctttcaatctgagctggatggcgactgacggtatttttgagacattcaccatcgagatcattgactccaatcggctgctggaaaccgtggaatacaatatatcgggcgccgagcgcacggctcacatttccgggctgccaccaagtacagactttatcgtctatctttccggtctagccccaagcattagaaccaaaactattagtgctaccgctacaaccgaggccctgcccctgcttgaaaacctcactatcagcgatataaatccttacggctttacagtgtcatggatggcctctgagaacgcttttgactcctttctggtgacggtagtggactcaggcaagctcctggacccacaagaattcactttatccggaacacagagaaagctcgaactccgcggcctgatcacagggatcggctatgaggtcatggtgagcggtttcacccagggacaccaaacaaaacctctacgagccgagatagtgaccgaggcagagcctgaggtcgataacctgctcgttagcgacgcaactcccgacggctttcggctgtcctggacggctgatgaaggagtctttgataattttgtcctcaaaattagagataccaagaagcaaagcgagcctctggaaatcacacttctggcaccagagcgcacccgtgatatcacaggtctccgggaggccacagaatatgagatcgagttatatgggattagtaaaggcaggagaagccagacagtgagcgcaattgcaactacggccatgggctcacccaaagaagtcatcttttcagacatcaccgagaactccgctactgtgagctggagggccccaaccgctcaggtcgaatctttcaggattacatatgtgccgataactggaggtaccccctctatggtgactgtggacgggacgaagactcagacacgacttgtgaaactgatcccgggggtggaataccttgtttccattattgctatgaagggctttgaggaaagcgagcccgtgtccggttccttcactaccgctctcgacgggccttcaggcttggtgacggccaacataaccgacagcgaagccttggctcgctggcagccggctatcgccacagtcgattcatatgtgatttcatatacgggcgaaaaggtgcccgaaatcacaaggacggtgtccgggaacacggtagagtacgccctcactgacttggagcccgcaactgaatatacgttgcggatcttcgctgagaaggggccccaaaagagttccacaattacggctaagttcactaccgatcttgactccccgagagacctgactgcaacagaggttcagtctgagaccgcactcctgacttggagaccgcctcgcgctagtgtgaccggatatttgcttgtctacgagtctgttgatggcacagtaaaagaggtgattgtcggccccgatactacgtcttacagcctcgcagatttgtctcccagtacccattacacggctaagatccaggcactcaacggccctctccggtctaacatgatccaaaccatcttcactaccattggtttactgtatcccttccccaaagactgtagccaggcgatgttgaatggagacaccaccagtggcctgtacactatctacttgaatggcgacaaagccgaggccctggaggtgttctgtgatatgacatccgatggtggcggatggattgtcttcctgaggagaaaaaacggacgggagaacttttaccagaattggaaggcatatgcggcaggcttcggcgatcgccgtgaggagttttggcttggactggataatctcaataagatcaccgcgcagggccaatatgagttaagggtggacttgcgagatcatggcgaaacagcctttgcagtttacgataagtttagtgtaggagatgctaagacaaggtacaaactgaaggtggaaggctattcaggcaccgccggcgacagcatggcttaccacaatggccgtagtttctcaacttttgacaaagacactgatagtgccatcactaactgcgcactgagttataagggagccttttggtacaggaattgtcatagagtaaacctgatgggcaggtatggagacaacaatcattctcaaggcgtcaactggttccactggaagggacatgagcatagtatacagttcgctgagatgaaactacgcccctccaatttcaggaacctagaaggcaggagaaaacgggcctag

SEQ ID NO: 137511 - DNA, 4695 bp, synthetic construct
  misc_feature 1..4695: note = Description of Artificial Sequence: Synthetic coding sequence
  source 1..4695: mol_type = other DNA
atgggcgcgatgactcagcttttggctggcgtttttctggcatttcttgccctggcgactgagggcggagtcctcaaaaaagtgatccggcataagaggcagtccggggtaaacgccactctccccgaggagaaccaaccagtggtgtttaatcacgtatataacatcaagctccctgttgggagccagtgcagcgttgatttagagtccgctagtggcgaaaaggatctggctccacccagtgaaccatcagagtccttccaagaacatactgtcgacggcgaaaaccaaattgtgttcacccacaggattaatattccccggcgagcctgtggatgcgctgccgctcctgatgtgaaggagctgttgagccggctggaggagttggagaacctcgtgagttcgttaagagaacaatgtaccgccggcgcaggatgctgcctccagccggctaccggccgattggatacgcgacccttctgctctggccgtggaaacttttctactgaaggctgcggctgtgtttgcgagccaggatggaagggccctaactgcagcgagcctgagtgccctggcaactgccacttacgaggacgctgtattgacgggcagtgtatctgcgatgatggtttcacaggagaggattgtagccagttagcgtgtcccagcgattgtaacgatcaaggcaaatgcgtgaatggagtgtgcatctgtttcgagggatatgccggcgccgactgctctcgcgagatctgtcccgtgccctgcagcgaggaacacggcacctgcgtagatggactgtgcgtctgtcatgacggttttgccggtgatgactgtaacaaacctttgtgtctcaataattgctacaataggggcagatgtgtcgagaacgaatgcgtgtgtgacgagggttttaccggcgaagactgtagcgagctcatttgtccaaatgactgcttcgaccgggggaggtgcattaatggcacgtgctactgtgaagaaggcttcacaggcgaggactgcggtaagcccacctgcccgcatgcctgccacactcagggacggtgtgaagaggggcagtgcgtttgcgacgagggctttgcgggagtcgactgcagcgaaaaaaggtgcccagccgactgtcataatcgtgggcgctgcgtcgatggacgatgcgaatgtgatgatgggttcacgggagcagactgtggggagctgaaatgcccgaacggctgtagcggtcatggacggtgcgtgaacggacaatgcgtatgtgatgaaggatacaccggagaggattgttcccaacttagatgtcccaacgattgtcactctcgcggacggtgcgtcgaaggtaagtgcgtgtgcgagcaagggttcaaaggttacgactgctcggacatgagttgtccgaacgattgtcatcaacacggccgttgtgtaaatggaatgtgcgtgtgtgacgatggctacacgggagaggattgtagggaccggcagtgcccaagagattgcagcaaccgaggattatgtgtggacggccagtgcgtatgtgaagatgggtttacaggtcctgattgtgctgaactgtcgtgtcctaacgattgtcatggacaggggcgctgcgtcaacggacaatgcgtttgccatgagggctttatgggtaaggattgcaaggaacagcggtgtccaagcgattgccacggtcagggcaggtgtgtggacgggcaatgcatctgccatgaaggatttacaggactggactgtggacaacacagttgtccatctgattgtaataacctgggccagtgtgtgtcggggcgttgcatctgtaatgagggatactctggcgaggattgcagcgaagtaagccctcccaaggacttagtggtgacagaagttaccgaggaaactgtcaacttggcctgggataatgaaatgagggtaactgaatatttagtggtatacactcccacacacgaggggggcctagagatgcagttccgagttcccggcgatcaaacatctacaattatacaggaactcgagccaggggtcgagtatttcattcgagtcttcgctatcctggagaataaaaagtcaatcccggtctccgcgcgggtggccacatatctacccgcgcccgaagggctcaagttcaaaagcatcaaagagacatcagtggaagtggagtgggaccctctcgatattgctttcgaaacctgggaaatcattttccgtaatatgaataaggaagatgagggcgaaatcacaaaaagcctgagacgtcccgagacctcctaccgccagactggcctggcaccgggtcaggaatatgagattagccttcacatcgtcaaaaataatacaaggggtccaggtctaaagagggtaactaccacccgactcgacgctccctcccagatcgaagtgaaggatgtcaccgatacgacggcattaatcacttggttcaagcccttggcagaaattgacggcattgaactcacgtacggtatcaaagacgtaccaggagataggacaactattgatttgactgaagacgagaaccagtattcaatcggaaacctgaagccagacactgaatacgaagtgtctctcataagtaggagaggcgacatgtcatccaatcctgccaaagaaacttttaccaccggtttagatgcccccagaaacctgaggcgagtctcccagactgataactcaatcacattggaatggagaaacgggaaagcggctatcgactcttatagaatcaaatacgcccctatttccggaggagatcacgcggaggtggatgtcccaaagagtcaacaggctacaactaaaaccaccctgaccgggctgcgtcctggtaccgaatacggaatcggtgttagcgccgtgaaggaagacaaggagtccaatcccgcgactattaacgcagcaactgaactcgatactcccaaggatttgcaggtgagcgagaccgccgagacaagccttaccctcctctggaagaccccattggccaagttcgataggtatagactaaattatagcctgccgacgggtcagtgggtgggagtgcagttgccaaggaacactacatcctacgtgctgcgcggtctcgagccgggtcaggagtataatgtcctcctgactgcagagaagggccgccacaagtccaaacccgcccgtgtgaaggcatccaccgccatggggagccctaaggaggtcattttctctgacatcactgagaattcggccaccgtctcttggagagcacctaccgcacaagttgagtcctttcggataacttacgtgcccattaccggtggtacaccttctatggtaaccgtggatggaactaagacacaaaccaggttggttaagctgatccccggagtcgagtatttggtctccattatagctatgaaggggttcgaagagtccgagcctgtgtccgggtccttcacaacagctctggacggccccagcggcttggtgacagctaacattactgatagtgaggcccttgcgaggtggcagccagctattgccactgtagattcatacgttatatcctacaccggcgaaaaggtgcctgagatcacacggacagtgtcaggtaacaccgtggaatatgccctgactgacctagaaccggctacagagtacactctgcggattttcgccgagaaggggccccaaaagagttccaccatcaccgcaaaattcaccacagacctggattcccctcgggacctcaccgccactgaagttcagagtgaaacagctctgttgacttggcggcctccccgagccagcgtgaccggctacttgctagtgtacgagagcgtagacggtaccgtgaaggaggtcatcgtgggcccagacacgactagctattccctggcagacctgagccccagtacgcactatacagccaagattcaagcactgaacggccctctgcggtcaaacatgattcagacgattttcaccaccatcggcctcctctatccttttcctaaagattgttctcaggccatgttgaatggtgataccacttccggcttatatacgatttacttgaatggcgataaagcggaggccctcgaagtcttttgtgacatgacaagcgatggcggcggatggatagtgtttttgagaagaaaaaatgggagggagaatttctatcagaattggaaagcctatgccgcgggcttcggcgataggcgcgaggaattctggttggggctggacaatctgaataaaatcacggcacagggccagtatgagctgcgggttgatctgagggatcacggggaaactgctttcgctgtgtatgataagttcagtgtgggcgatgcaaaaactcgatacaagctcaaggtcgaggggtacagtggcaccgctggggatagcatggcctatcacaacgggcgcagcttttcaacatttgataaggacactgattcggcaattactaattgtgctctatcctacaaaggcgccttttggtacagaaattgtcatagagtgaatctgatggggcgctacggagacaataatcactcgcagggagttaattggttccactggaagggccacgaacatagcatccagttcgccgagatgaagttgcgtccctccaacttcagaaaccttgagggcaggcggaagcgagcctag

SEQ ID NO: 137512 - DNA, 4968 bp, synthetic construct
  misc_feature 1..4968: note = Description of Artificial Sequence: Synthetic coding sequence
  source 1..4968: mol_type = other DNA
atgggggctatgacccagctgctggccggggttttcttggctttccttgccctagccaccgagggcggcgtactgaaaaaggttattaggcacaagaggcagtctggcgtcaatgctactttaccagaggaaaaccagcccgtggtgttcaaccacgtctataatatcaaactccctgtgggaagccagtgttctgtggatttggagagcgcatcaggagagaaggatctggcccctccatcggagccatctgagtcatttcaggagcacaccgttgacggcgagaatcagattgtgttcacacatcggattaacatccccaggcgcgcatgcggttgtgccgcagcccccgatgtgaaagagctgctgagtcgtcttgaagaactggagaacttagtcagttccctgagggagcagtgcacggcgggcgctggatgttgtctccaaccggcaacaggtcggcttgacaccagaccgttctgctctggtcgcgggaatttttccactgaagggtgtgggtgtgtatgtgaacctgggtggaaaggcccaaactgctcagagcccgaatgcccaggaaactgccacctcagaggccgatgtattgacggccagtgcatctgcgatgatggattcactggagaagattgctcacaactggcctgtccaagcgactgcaatgatcagggcaagtgcgtaaacggagtctgcatttgctttgaaggttatgccggcgcagactgctctcgcgagatttgcccagtgccatgctcagaagagcacggcacatgcgttgacggtctttgtgtttgccacgacggattcgctggagacgattgcaacaaacccttatgcttgaataattgttacaaccgcggccgatgcgttgaaaatgaatgtgtttgcgatgaaggcttcaccggcgaagattgcagcgaactgatttgccctaatgactgttttgaccgcgggcgttgcattaatgggacctgttactgtgaagaaggttttaccggagaagactgtggcaagcctacctgtccccacgcatgtcatacacaaggccggtgcgaggaaggtcagtgtgtgtgcgacgaggggttcgccggcgtggattgtagtgagaagagatgtcccgccgattgtcacaatcggggaaggtgcgttgacggccggtgcgagtgcgatgacggttttacaggcgcggactgcggagagctgaaatgtcccaacggctgtagcggtcacgggcgctgcgtgaacggccaatgtgtgtgtgatgaaggatatacaggagaggactgttctcaactcaggtgtcccaatgactgccattccaggggcaggtgcgtggaggggaagtgtgtctgcgaacagggcttcaagggttacgactgttctgatatgagttgccccaacgattgccaccaacacgggcggtgcgtaaacggcatgtgtgtgtgcgacgatggctatactggcgaggattgtagagacaggcagtgtcccagggattgttctaaccgaggactgtgtgtcgacggccagtgcgtctgcgaagacggttttaccggacccgactgtgccgagctgtcgtgccctaatgactgtcacggccaaggacggtgtgttaacggacagtgtgtttgtcatgagggctttatggggaaggattgcaaggagcaaaggtgtccctctgattgtcatggccaaggccgatgtgtcgacggccagtgcatttgccacgaaggttttaccgggttggactgcggacagcacagctgtccatctgactgcaataacctgggacaatgtgtgagtggcagatgtatttgcaacgaaggttactcaggggaggactgttccgaggtgagcccacctaaagatttggtggtgaccgaggttaccgaagagaccgtgaaccttgcatgggacaatgaaatgcgcgtcactgaatatctggttgtatacaccccgacgcatgaggggggcctggagatgcagttccgcgtgccgggtgaccagacatctactatcatccaagaattggagccaggagttgagtacttcataagggtctttgccattctggaaaacaaaaagtcaatcccggtatctgcacgcgtggctacatatctgccagcccccgaaggtctgaaattcaagagtattaaagaaacctctgtggaggtggagtgggaccctctggatattgcatttgaaacctgggagatcatttttcgaaatatgaacaaagaagatgaaggcgagattacaaaaagcctacgcaggcctgagacgagttatcgccagaccgggctggcaccaggtcaagagtacgagattagcttgcacatcgtgaaaaataacacacgaggaccaggacttaagcgcgtcacgacaaccagacttgacgctcctagccagatcgaggttaaggatgtgaccgatacaaccgcgctcataacctggtttaaaccattagccgagatagacgggattgaattgacttacgggataaaggatgtgcccggtgatcggaccactatagatctgacagaggatgagaatcaatatagcatcggtaatttaaagcctgacaccgagtacgaggtgagtctgattagtcggcgaggcgacatgtcctctaatcctgcaaaggagacatttacaacaggcctcgacgctcctcggaacttgcgccgggtgtcacagaccgataacagcatcactctcgagtggagaaatgggaaggctgccattgacagctatagaattaagtatgctcctattagcgggggcgaccacgccgaggtggacgtgccgaaatcccagcaagccaccacaaaaacaaccttgaccgggctgcgtcccggaaccgaatatggaatcggcgtcagcgctgtcaaggaagacaaagagtccaaccctgctacaattaacgctgcaaccgagctggacacacctaaggacttgcaggtgtctgagacagcggagacctctctgacattgctctggaaaacacccctggcaaagtttgatagatacagactgaactattctttaccaactggccagtgggttggcgtgcagctgcctagaaacacaacttcgtacgttcttcgggggctggaacctggacaggaatacaacgtgttactgaccgcagaaaagggacggcacaaatcaaaacctgctagagtgaaggcatcaaccgaggccgaacccgaagtggataatctgttagtcagcgacgctacccctgacggcttccgcttgtcctggacagcagacgaaggggtcttcgacaattttgtgctcaagattagagacactaaaaaacaaagtgagccacttgagatcactttacttgccccggaaaggaccagagacattactggtctgagagaagcgacagaatatgagatagagctctatggaatctccaagggccgtcgctcacagactgtgagcgcaatcgctacgacagctatgggctctccgaaagaggtgatattctcagacattaccgagaattccgcaacagtatcatggcgagctcccacagcacaagtcgaaagtttcaggatcacgtatgttcctatcacaggtggtacaccaagtatggtcacagtggacgggactaagacacagacacgcctggttaaactcataccaggcgtggagtacctggtttcgataatcgcgatgaaagggtttgaagagagcgaaccagtgtccggctcatttactactgcactcgacggacctagtggtctggtgacggccaatattaccgactcggaggctctggctcgctggcagcctgccatcgctaccgtggactcctacgtgattagttataccggggagaaagttcccgaaatcacccgcacggttagcggcaacacagtggagtatgccctgaccgacctggaacctgctactgagtacactctgcggatcttcgccgagaaggggccacagaagtcctcgacgattactgccaagtttactaccgacctcgactccccccgcgatcttacagctactgaggttcagagcgagacggcactgctgacatggaggcctccgcgtgccagtgtaacagggtatctcctggtgtacgaaagtgtggatggcacggttaaggaggttatcgtgggcccagacactacaagctactcattggccgatctcagcccaagcacacactacactgcaaagatacaggcactgaatggacctcttcggagtaacatgatccagaccatttttacaactattggtctgctgtaccccttccctaaggactgttcccaggctatgctcaatggagataccaccagcggactgtacactatttatctaaacggcgacaaagccgaggctctggaagtcttttgtgatatgacttccgacggcggggggtggattgtctttctacgacggaagaacggtcgcgaaaacttctatcagaactggaaagcatatgctgctggcttcggggataggcgagaggaattctggctgggcctagacaatttgaataaaataaccgcacaggggcagtatgagctgcgagtggatctgcgagaccacggagagacggcatttgccgtatatgataagttcagcgtcggtgacgcaaagacccgctataagcttaaggttgaaggatatagcggcaccgccggtgattcaatggcatatcacaatgggaggagttttagtacttttgataaggatacagattcagccatcactaattgcgccctgtcttacaagggtgccttttggtacagaaactgtcatcgggttaatctgatgggccggtacggggacaataatcattcgcagggggtcaactggtttcactggaaaggccacgagcattccatccagtttgcagaaatgaaactgaggccctcaaacttccggaacctggaggggaggcgaaagcgggcttag

SEQ ID NO: 137513 - DNA, 6606 bp, synthetic construct
  misc_feature 1..6606: note = Description of Artificial Sequence: Synthetic coding sequence
  source 1..6606: mol_type = other DNA
atgggagctatgacacagctgctcgcaggtgtgttcctggccttcctggcccttgccaccgagggaggcgtgttgaaaaaggtgatcaggcacaagcgtcagagcggtgttaatgcaacattgcctgaagaaaaccagcctgtcgtctttaatcacgtgtacaacatcaaattgccagtgggttcccaatgcagcgtcgaccttgaaagcgcatccggtgaaaaggatctcgctccccctagcgaaccttcagagtcattccaggagcatactgtcgatggcgaaaaccagattgtgttcacgcatcgcattaatattccccgtcgggcatgcggatgcgctgcagcacccgacgttaaggagctactgtcacgcctagaggagctcgagaacctggtgtcttctttgagggagcagtgcacagccggggctggctgttgcctccaacccgccacaggacgcctcgacacgcgcccattttgcagtgggcggggcaacttctcgaccgaaggatgcggttgtgtctgcgagcccggttggaagggccccaattgctccgagcccgagtgtcccggtaactgccacctaagagggcggtgcatcgatggacaatgtatctgcgacgacggctttaccggagaagactgctctcagctggcatgtcctagcgactgcaatgaccagggaaagtgtgtcaatggagtatgtatctgcttcgagggttatgcaggcgcagattgttcccgggaaatttgtcctgtaccgtgttccgaggaacacggaacttgcgtcgatggcctgtgcgtgtgtcacgacggttttgctggcgacgactgtaacaagcccttatgcctgaacaattgttacaatagggggcgttgtgtggaaaatgaatgcgtttgtgatgagggttttacaggtgaggactgcagcgagctgatctgccccaatgactgtttcgatagaggtcggtgcataaatggaacctgttactgtgaggagggctttacaggggaggattgcggcaagcctacctgtcctcatgcatgccacacccaaggacgttgtgaggagggacaatgcgtttgcgatgagggttttgccggcgttgattgttcagagaagcgctgccccgccgattgccacaatagagggcgctgtgtagacgggcgatgtgagtgcgatgacggatttactggcgcagactgtggggagctgaagtgtcctaacgggtgttctggccatggaagatgtgtgaacggacagtgtgtgtgcgatgaggggtacacaggtgaggactgctcccagctgcggtgtccaaacgattgtcactctcgggggagatgcgtggagggcaaatgtgtgtgtgaacagggattcaaggggtatgattgcagcgatatgagttgcccgaacgactgccatcagcatgggcggtgcgttaatggaatgtgtgtgtgcgatgacggatacaccggtgaggattgtagggataggcagtgtcccagagactgtagtaacagagggctgtgcgtcgatggtcagtgcgtgtgtgaggatggcttcaccggaccagactgcgctgagctctcctgccctaacgactgccatggtcagggtcggtgcgtgaatggtcagtgtgtgtgtcacgagggtttcatgggcaaggattgcaaggaacagaggtgcccttctgattgccacgggcagggcaggtgcgtggatggccagtgtatttgccacgagggatttaccgggctggactgcggacagcacagttgccctagtgattgtaacaacctgggccagtgcgtaagtggaagatgtatttgcaatgagggttactctggagaggattgctctgaagtcagtcctcctaaggacctggtcgtcacagaggtgactgaagaaaccgtgaacctggcttgggataacgaaatgagggtgactgagtacctggtcgtgtatacaccaactcatgagggcggcctcgagatgcaatttagagtgcctggcgaccagacaagtacaattatccaggagctggaaccgggagtcgagtactttattcgggtgtttgcgatactggagaacaaaaagtcaattcccgtgagcgcccgcgtagccacttacctgccggcccctgagggactgaaattcaaatccattaaggaaacgtctgtggaggttgagtgggatcctctggacattgcttttgaaacatgggagatcatatttagaaatatgaataaagaagacgagggcgaaataacaaaatccctgaggaggcccgagactagctaccggcaaacaggtctggcaccggggcaagaatacgagatttcgttgcacattgtgaagaataacacacgggggcctggcctgaaaagagttacaacaacacgtttggacgctccctcacagatagaagtgaaggacgttacagatactaccgcactgattacttggttcaaacccctggctgaaattgatggcattgaattgacttacgggatcaaggacgtgccaggcgatcgtactacgatcgatctgaccgaagatgagaaccagtacagcattggtaatttgaagccggatacggagtacgaggtttctctgataagtcgtaggggggatatgagctctaatcccgccaaggagacttttaccacagggctggatgcgcctcgcaatctccggagagtatcgcaaaccgataattcaatcacattagagtggagaaacggtaaggccgcaatcgattcatatcggataaagtacgctcccatttctggaggggaccacgcagaggtagacgtgccaaaatcccaacaggccaccacaaagacaacactgacaggactgagacccggaacagagtacgggattggcgtctcagcggttaaggaggacaaagagtctaacccagccactattaatgctgcaacagagctggacaccccgaaggacctgcaggtttccgagactgccgaaacctcactaacgttgttgtggaaaacccctctggccaaattcgatcggtatagactcaattactccctcccgaccggccaatgggtaggtgtgcagctcccgaggaacaccacatcctatgttctgaggggcttggaacctggacaggaatacaatgttctgctgaccgccgaaaaagggaggcacaaaagcaagccagcacgagtaaaagcatccacggagcaggcccctgaattggaaaatttaaccgtgactgaggtaggctgggacggactgaggctgaactggacggcagcggaccaggcttacgaacactttatcatacaggtacaagaggctaataaggtagaagccgcaaggaatctgactgtaccaggttcgctacgggccgttgacatcccaggccttaaagccgccacaccatataccgtctcaatctacggtgttattcagggatataggaccccggtgctgtccgccgaagcctcaaccggcgagactcctaacctgggcgaagttgtggtagccgaagttgggtgggatgccctgaagctcaattggacagcccctgagggagcttacgaatatttctttatccaggtgcaagaagcagatacagttgaagccgcccagaacctgactgtgcctggaggactgcggtccacagacttgcccggcttaaaggccgccacacattatacaattactatccggggagtcacgcaggatttctccactacccccctcagcgtggaagtcctaacagaagaggtgccagatatgggtaacttgactgttacggaggtctcatgggacgctctgcggttgaattggacaaccccagatggaacttatgatcagtttaccatccaagttcaggaggccgatcaggtggaagaagcccataacctaactgtccccggatccctgagatcaatggagattcccggactgagggcagggactccttatacggtgaccctgcacggtgaggtgcggggacattctaccagacctctggctgttgaagtcgttactgaggaccttcctcagctgggagatctggcggtttccgaggtggggtgggatgggttacgtctcaattggaccgcagccgataatgcttacgagcactttgtgatacaggtccaggaggtcaataaagttgaggcagcacagaatctcacgctacccgggtcgctcagggcagtagatatccctgggctggaggcagccaccccttaccgggtttcgatctatggagtcataagaggatatagaactcccgtcttgtcagccgaagcatctactgcaaaagagccagaaatcggaaacctgaatgtttccgacatcactcctgagagtttcaacctgtcctggatggccaccgatggtatttttgagacctttactatcgaaatcatagattccaaccggcttcttgagactgtcgagtacaacatctccggcgccgaacgaacagctcatataagcggtctccccccatcaacagatttcattgtctatttatcaggcctggccccctcaattagaactaagacgatttctgctactgccaccacagaggccttgccgctgttggaaaacttgacaatcagcgacataaatccgtacggctttacggtttcttggatggcttccgagaatgccttcgatagttttctggtgactgtcgtggattccgggaagctgctggaccctcaggaatttactctgtctggcacgcagcggaagctagaactgcgcggactaatcacaggtattgggtacgaggtaatggtgagtggcttcacacaagggcaccagactaaacccttgcgcgcagaaatcgtcactgaagctgaacccgaagtggacaacctacttgtgagcgatgcgactcccgacggcttcagactctcttggaccgcggacgagggcgtattcgacaacttcgtgctgaagatacgcgacactaaaaagcagagcgagccactggaaataacgctgttggcgccggaacgtacccgggatattacagggctgcgcgaggccactgaatatgaaatcgagctttatggcatttccaaaggtcgtaggagccagaccgtatctgctatcgccactacagctatggggtctccaaaagaggtgatctttagcgatatcaccgaaaatagcgcaaccgtgtcttggcgcgctcctacagcgcaggttgaatcctttcgcattacctatgttcctattaccggaggaaccccatccatggtgactgtggacggcacaaagacgcagaccaggctggtgaaacttattcccggcgtggagtaccttgtgtctatcattgccatgaaaggcttcgaagagtccgagccggtttcaggctccttcactacagctctggatgggccctctggcctggtcaccgctaatattaccgactcagaggccttggccaggtggcaaccagccatcgcaactgtagacagctatgtgatctcttacacgggagagaaagtgcctgaaataacaagaaccgtttctgggaataccgtagaatacgccttgaccgacctcgaacctgcaaccgagtataccttgcgaatcttcgccgagaagggtccacaaaaatcatcaactattaccgctaagttcaccactgatcttgattcccctagagatctaacagctacagaagtgcagtctgaaactgctctactaacctggcgtcctccccgggcctcagtgaccggctacctgttagtttacgaatccgtggacggcaccgtaaaggaggtgatcgtcggcccggacactaccagctactccttggcggatctctccccctccacccactatacagccaagattcaggccctcaatggccctctgaggtccaacatgattcagacaatctttacaactattgggctgctttacccttttccaaaagattgtagccaggccatgctgaacggagatacaacttcaggcctgtacactatctatctcaacggggacaaggcggaagccctcgaggtgttttgtgacatgaccagcgacggaggcgggtggattgtgttcctgcggagaaagaacggccgggaaaacttctaccaaaattggaaggcatacgcagcaggctttggagatcgacgcgaagagttttggctgggactggataacctgaataaaataacagcacaagggcaatacgaactccgcgttgacttaagggatcatggagagacagcctttgctgtctacgacaagttctccgtaggcgacgctaagacgcggtataagctcaaggtggagggatacagcgggactgccggggattctatggcctatcataacggcagaagtttcagtactttcgacaaagacactgatagcgccatcaccaactgtgccttgtcctacaaaggggccttctggtatcgaaattgccacagagtgaatctgatgggcagatacggcgacaacaaccattctcagggagtgaactggttccactggaaaggccacgaacactctatccagtttgcagagatgaagctgaggccatccaactttcgaaacctggaaggacggagaaagcgagcatag

SEQ ID NO: 137514 - DNA, 3240 bp, synthetic construct
  misc_feature 1..3240: note = Description of Artificial Sequence: Synthetic coding sequence
  source 1..3240: mol_type = other DNA
atgggggccatgacccagctacttgcgggtgtgttcttggctttcctggcactagctacggaagggggcgtgttgaagaaggtaatcaggcacaagcgccagagcggggtcaatgccacattgcccgaggagaatcagccagttgtattcaaccacgtgtataatatcaagctgcccgtcgggagccaatgcagcgtcgatctggaaagtgcttcaggtgagaaagacctggcccctccttctgaaccaagcgagagcttccaggaacataccgttgacggcgaaaaccagatagtattcactcataggatcaatattcccagacgggcctgcggctgcgctgctgcaccagatgtgaaagaactcttatccaggttggaggaactcgagaacctggtttccagcctgagagagcagtgcactgccggggccggttgctgcctgcagcctgcgaccggacggctggacacacggccattctgtagcgggaggggcaatttctcgaccgagggctgcggttgcgtatgcgagccaggctggaagggtcccaattgcagtgaaccagagtgcccggggaattgccacttgcggggacggtgcattgacggccagtgtatctgcgatgacgggtttaccggggaagattgttctcagcttgcttgcccctctgactgcaatgatcaaggcaaatgcgttaatggtgtgtgcatctgttttgagggatatgctggtgcagattgcagccgtgagatctgccctgtgccatgttccgaggagcacgggacttgcgtagacggactttgtgtgtgccacgatggcttcgcgggggatgactgtaacaagcctctttgtctcaacaattgctacaatcggggcagatgtgtggaaaacgagtgcgtctgcgacgagggatttaccggcgaagattgttcggaactgatctgtccgaacgattgtttcgatcgcggcagatgcatcaatggaacttgttattgcgaagagggtttcacgggagaggactgtggaaaaccaacatgcccgcacgcttgccacacccagggccgctgtgaagagggccaatgcgtttgcgacgaagggttcgctggtgtcgactgctctgaaaagaggtgccctgctgattgtcacaaccggggccggtgcgttgatggccgttgtgaatgtgatgatggtttcaccggagcagattgcggagaactgaaatgccccaatggctgttccggccatggtagatgcgttaacggtcagtgtgtttgtgacgaaggctacactggagaggattgtagccagctgcgatgccctaacgactgtcatagccgtggtcgctgtgttgaggggaaatgtgtgtgtgagcaaggcttcaagggatacgattgtagtgacatgtcatgtcccaatgactgccaccagcacggccggtgcgttaacgggatgtgcgtctgcgatgacggctacacaggagaggactgtagagatcggcagtgcccacgggactgtagtaatcgggggctgtgcgtagacgggcagtgcgtctgtgaggacggctttacaggccccgactgcgctgagctgagctgccctaacgactgccatgggcaaggaaggtgtgttaacggccagtgcgtgtgtcacgagggatttatgggcaaggattgtaaggagcagcggtgtccctctgactgtcacggtcaaggccgatgcgtagatggacaatgtatctgccatgaaggctttacgggtctggactgcggacagcattcttgtcccagtgactgcaataacctgggccagtgtgtaagcggtagatgcatctgtaatgaaggctatagcggggaagactgttctgaggtctccccacccaaagatctcgttgtcactgaagttacagaggagacagtaaacctggcctgggataacgaaatgcgcgtgaccgagtatctggttgtctacacgccgacccacgagggcgggctggaaatgcagtttagagtccctggggaccagacttcaacaatcatccaggagctcgaacccggagtggagtatttcatcagagtcttcgcgatactggagaacaaaaagagcatccctgtttctgcacgggtggccacttatctacccgcccctgaggggctgaaattcaagagtatcaaagaaactagcgtagaggtagaatgggatcccctagatatagcttttgagacctgggagattatttttagaaacatgaacaaagaggacgaaggggagattacaaaaagtcttcgcaggccggagacctcgtatcgccagaccggactggcccctggccaggagtacgagatatccctgcacatagtcaaaaataacacccggggcccaggtctgaaacgcgtcacaaccacccggttggacgccccttcccaaatcgaggtaaaggacgtgaccgacaccaccgctctcattacctggtttaaacctctagccgagatcgacgggatcgaactcacctacggaattaaggacgtacccggcgacaggaccaccatagacctcaccgaggatgaaaaccagtactcgatcggaaatcttaaacctgataccgagtatgaagtgagcctgataagccgccgcggagatatgtcgagcaaccccgctaaggagactttcaccacaggactcgatgcaccaagaaacttgcgcagagtgagccagacggacaacagtatcacactggaatggcggaatgggaaagccgctattgattcttatcgcatcaaatatgcacccatctctggcggggatcacgcagaagtggatgttccaaaatcccagcaagcgaccacaaaaaccatcacagcaaagtttactacagacctcgatagtccgcgggacctcactgccacagaggtgcagtccgagacagcactcctcacttggcgcccaccccgtgcgagtgtgacaggctacctgctggtgtatgaaagcgttgatggtactgtgaaggaagtaatcgttggcccagacacaacctcatattcgttggcagacctctcccccccatccttatttctccactttattcagcagaagccggaaaagcagtactgcttccatttcaaggatatgataaatattatcaatattataatgatgatgatgatgatgaaaacaaaagacttcagcagagacttgagtttccagaacatctcgggccagtacctaatcgtattcttcttctag

SEQ ID NO: 137515 - DNA, 279 bp, synthetic construct
  misc_feature 1..279: note = Description of Artificial Sequence: Synthetic coding sequence
  source 1..279: mol_type = other DNA
atgggagccatgacccagcttcttgccggggtcttcctggcctttctggccctggccaccgagggtggcgtgctgaaaaaggtcatccgacacaaacggcaatctggcgtgaatgcaacactgccagaggagaaccagcccgttgtattcaatcatgtgtataacataaagctgcccgtgggctcccaatgcagtgtcgatcttgagtccgccagcggcgaaaaggacttagcacctccatcagagccatccgagagtttccaggagcacacggtctag

SEQ ID NO: 137516 - DNA, 5241 bp, synthetic construct
  misc_feature 1..5241: note = Description of Artificial Sequence: Synthetic coding sequence
  source 1..5241: mol_type = other DNA
atgggcgcaatgacccagttgctggccggtgtgttcctggccttcttggcactggctaccgaggggggagtgttgaagaaggttattagacataagcgacagtctggagtcaacgccactctgcctgaggagaaccagcctgtagtttttaatcacgtgtataatattaagctccctgttgggagtcaatgcagcgtggacctggagtctgctagcggagagaaggacctggcaccacccagtgaaccgtctgagagctttcaggagcatactgtcgacggcgagaatcagattgtttttacccaccggattaacatcccgagacgcgcttgtggatgcgccgctgccccggacgtaaaggaactcctatcaagactggaagagctggagaatttggtgtcctcgctgagggagcagtgtactgccggggctggctgttgtctacaacccgctaccggtagactggatacacgcccattctgttccggtcgtggcaacttttcaacagagggatgcggctgcgtctgtgagccgggttggaagggtccgaactgttcggaacctgaatgcccgggcaattgccacctgcgcggacgatgcatcgatggccagtgcatttgcgacgacggcttcactggagaggattgcagccagctcgcctgtccttccgattgtaacgaccaaggaaagtgtgtgaatggcgtgtgtatttgctttgaagggtatgcgggtgcagactgctcccgggagatctgcccagttccctgcagcgaggagcacggtacatgtgtagatggcctgtgtgtgtgtcatgatggctttgccggtgatgattgcaataaacccctgtgcctgaataactgttacaaccgtggcagatgtgtcgaaaatgaatgtgtttgtgatgagggcttcacaggagaggattgctccgagcttatttgtcccaacgactgcttcgacaggggccgctgtattaacgggacatgttactgtgaagaaggctttacaggcgaggactgtggtaagccaacctgtccgcatgcttgccatacccagggcagatgtgaggagggacagtgcgtctgtgatgagggatttgcgggagtggattgctccgaaaaaaggtgtccagccgattgccacaatcggggtcggtgtgttgacggccgatgcgaatgtgatgatggttttacaggcgcggattgcggagaactgaagtgtcccaatgggtgcagcggacacgggcggtgcgtcaacggtcagtgcgtgtgtgatgagggttacaccggagaagattgcagccagcttcgttgtcctaacgactgccactcccgcgggcgctgcgtcgagggaaaatgcgtgtgcgagcagggcttcaaagggtatgactgcagcgacatgagctgcccgaacgactgccatcagcatgggaggtgcgtgaacggaatgtgcgtttgcgacgacggttataccggagaagattgccgcgataggcagtgtcctcgtgactgcagtaaccggggcctgtgtgtggacgggcagtgtgtctgtgaggatggcttcacaggccccgactgtgctgaactgtcgtgcccaaacgattgtcacggtcaaggtcgttgtgtaaatggacagtgcgtctgtcatgagggatttatgggtaaagattgtaaagaacagagatgccctagcgattgtcatggtcagggtaggtgtgtggacggccaatgcatatgccacgaaggcttcactggcttagactgcggacaacactcttgcccctctgactgtaataacttaggacagtgcgtgtctgggaggtgcatatgcaacgagggctactcaggtgaggactgctctgaggtatccccgcctaaggatctcgtggtgacagaagttacagaggaaactgtgaatttagcatgggacaatgaaatgagagtgacggagtatctggttgtgtacaccccaactcatgaagggggactggagatgcagtttagagtccccggagatcagactagcaccattattcaggagctcgagccaggggtagagtacttcatcagagtgttcgccatcttagaaaataaaaaaagcattcccgtgtctgcacgcgtagccacctatctgcccgcccccgagggactaaagttcaaaagtataaaggagacttcagttgaagtggagtgggatcctctggatatcgcttttgagacctgggagattatatttcgtaatatgaacaaagaggacgagggtgagatcacaaagagcctaaggcgaccagaaactagctacaggcaaactggactggcaccaggccaggagtatgagattagtctacacatcgtgaaaaacaacacgcggggacccggactgaagcgtgtcaccactacccggctcgatgccccctcacaaatcgaggttaaggacgttacagatacaactgccctgatcacatggttcaaaccactcgccgaaatcgacggcattgagcttacatatggaataaaagatgtgcccggagaccggacaaccattgatcttaccgaagacgagaatcagtacagtattggcaacctcaagcctgataccgagtatgaagtgagcctgatcagtagaagaggcgacatgagctccaatcccgctaaagagaccttcaccacggggcttgatgcacctcgcaacctgagacgcgtgagccagactgacaattctatcacccttgagtggagaaacggaaaggccgccatagactcataccggataaaatacgcaccaatttctggaggggatcacgcagaggtggatgtcccaaagtctcagcaggccactaccaaaaccacattgacaggactgaggcccggaaccgagtacggtattggcgtatccgccgtaaaggaggataaggagtctaaccccgccacaataaacgccgctactgaactggacacccctaaggaccttcaggtcagcgaaacagctgaaacttcgctgacattactttggaagacccctctggctaagttcgacagataccggcttaattactccttgccaacagggcaatgggtgggcgtgcagctgcctaggaatactactagttacgtgttaagggggttggagccaggccaggaatataacgttttgctcactgccgaaaaggggcgccataaatccaagccagcacgggtgaaagcctccacagccaaggagccagaaattggcaatctcaatgtgtccgatataactccagagtccttcaatctgagttggatggcgaccgacggcatctttgaaaccttcaccattgagattatcgacagcaaccgcctcctcgaaaccgtggagtacaacatctctggggccgaaaggacggcacatatctcaggcttgcctcctagtactgattttatcgtctacctgagcgggctcgcaccaagcatccggacaaaaaccatttccgccactgctactacggaggccgagccggaagtggacaatcttttggtctctgatgccacacccgacggcttccggctaagctggactgctgatgagggggtctttgacaactttgttttgaagattagggataccaagaaacaatcagagcctttagaaataacacttctggcccctgaacgaactcgcgacatcactggactcagagaagccactgagtacgagatcgagctgtacggaatttctaagggcaggagatctcaaaccgtgtctgccattgctacgaccgccatgggtagcccgaaggaagtgatattttctgatattaccgaaaattctgcgacagtgagttggagagccccgaccgcccaggtagagtcctttcgtatcacgtacgtgcctatcacggggggcactcctagtatggtcactgtggatggcacaaaaacacagacccgactcgtgaaactgatacctggggtggagtatctagtatcaatcatcgccatgaaaggatttgaagagagtgagcccgtgagcggaagttttaccacagctctggacggcccaagcggactggttactgcaaacatcaccgattccgaggcactcgcccgctggcagcccgcaatagctacagtggatagttatgtgatcagctacaccggagaaaaggtacccgagatcacgcgaactgtgagcggaaataccgttgagtacgctcttacggaccttgagcctgctactgagtacaccttgcggattttcgcagagaaggggccccaaaaatccagcactatcacagccaaatttacaactgatctcgacagcccccgggacctgactgccacagaagtccagagcgaaactgccctattaacatggaggcccccgagggcttccgtgaccgggtatctccttgtctatgagtccgttgatgggacggtcaaggaggttatcgtgggacctgatactacgtcctactctttagctgacctatctccctccacacattatactgctaagatacaggcattaaatggacccctgcgtagtaatatgattcaaactatctttaccacaatcggcctactgtatcctttcccgaaggattgcagccaagccatgttaaacggcgacaccacttccggcctttataccatctatctcaacggtgacaaggcagaggccctggaggtcttctgtgatatgacttccgacggaggcgggtggattgtgtttctgcggcgcaaaaatggacgggaaaacttttatcaaaattggaaggcctacgcagcagggtttggcgaccgacgagaggagttctggctgggactggacaacctgaacaaaattaccgcccagggacagtacgagcttcgggtggacttgagggatcatggcgagaccgccttcgccgtgtacgacaagtttagcgttggggacgcaaagacgcggtataagctgaaggtcgagggctattctggaactgcaggtgactccatggcataccacaatggacgatcatttagcactttcgacaaggacactgactcggccatcactaactgtgcgctgtcctacaaaggagccttctggtaccgcaactgtcacagggtgaacttgatgggcagatacggtgataataaccatagccaaggtgtgaattggtttcattggaagggtcatgagcacagtatccagttcgcagagatgaaacttcgccccagcaattttaggaatctggaagggagacgaaagcgcgcttag

SEQ ID NO: 137517 - DNA, 5517 bp, synthetic construct
  misc_feature 1..5517: note = Description of Artificial Sequence: Synthetic coding sequence
  source 1..5517: mol_type = other DNA
atgggggctatgacacagttgctggccggcgtgtttctggcctttctcgcactggcgacggaggggggtgttctgaagaaggtcatccgtcacaagcggcagtctggggtgaatgccaccctccccgaggagaatcagcctgtcgtctttaaccacgtgtacaatattaagctgcctgtgggatcacagtgctccgtggacttggaatctgcatccggagagaaggatctagctcctcccagcgagccctctgagagtttccaagaacacactgtcgacggcgaaaatcaaattgtcttcacccacagaattaacatcccacgccgcgcgtgcggctgcgccgctgcccccgacgtcaaggagctgttgtcccgtttagaggaactggagaacttagtcagttccttaagagagcagtgtaccgccggcgcggggtgttgtctccagccagctactggccgtctggacacaagaccgttttgttccggtcggggaaatttttcaacagaaggctgtggctgtgtctgtgagcccgggtggaagggccctaactgctcagaacccgaatgtccagggaattgccacttgaggggaagatgtattgacggacaatgtatctgcgatgacgggttcactggcgaagactgttcgcaactcgcctgtccgagcgattgcaacgatcaaggcaagtgcgtcaatggggtgtgcatttgtttcgagggctacgcgggtgccgattgtagccgagaaatctgcccagtcccttgcagtgaggagcatggaacttgtgtcgacggattgtgtgtgtgtcacgatggattcgccggtgacgactgtaacaaacctctgtgcctcaacaactgctacaacagagggcgatgtgtggagaatgaatgcgtgtgtgatgaaggctttaccggtgaggattgctcagagcttatctgtccgaacgattgtttcgatcggggccgctgtatcaatgggacctgttattgcgaggagggctttaccggagaggactgcggcaaacctacctgtcctcatgcctgccacacccaggggcggtgtgaggagggacagtgcgtgtgcgatgaggggtttgctggggtggactgctcagagaagcggtgtcctgctgattgtcataaccgaggtcggtgcgtcgacggccggtgcgaatgtgacgatggattcactggggccgattgcggtgaactcaagtgccctaatggctgttcaggacatggtaggtgtgtaaatggccagtgtgtatgtgatgaaggctacacgggcgaggactgcagccagctgcggtgtccaaacgactgtcatagcaggggaagatgcgtggaaggaaagtgtgtgtgcgagcagggattcaaaggctatgattgcagcgacatgtcttgtcctaatgactgccaccagcacggacgctgcgttaacgggatgtgcgtctgtgacgatggctataccggggaggactgcagagaccgccagtgtcccagggactgttctaacagaggcctgtgcgtcgacgggcagtgcgtgtgcgaggacggtttcacaggtcccgattgtgcagaattgagttgcccaaatgattgtcacggacagggacgctgtgtcaatgggcagtgtgtgtgccacgagggatttatgggcaaagactgcaaagagcagaggtgtccaagtgattgccacggtcaaggccgctgtgtggatgggcaatgtatttgtcacgagggttttaccggactcgactgtggacagcattcctgtcccagtgattgtaataacttaggccagtgcgtcagcggtagatgcatttgtaacgaagggtacagcggcgaggactgcagtgaagtgtcacctccaaaagatcttgtcgtgactgaggtgaccgaggaaacggtcaatctggcctgggacaacgagatgcgggtgaccgagtacctggttgtctataccccaactcacgaggggggcctcgagatgcaatttcgggtgccaggagaccagacatccaccattattcaggagctggagcccggagtcgagtacttcatcagggttttcgccatattagagaataaaaaatcgattcctgtcagtgcaagagtcgccacctacctacccgcacccgaggggcttaagttcaaatccattaaggagactagcgtggaagtcgaatgggatcctctagacattgcattcgaaacctgggagatcatattcaggaatatgaataaagaggacgaaggagagataacaaaaagcctcagacggcctgaaacgagctaccgacagaccgggctggccccaggccaggaatacgaaattagtctccacatagtaaagaacaatacaagaggacctggactgaaaagggtcaccacaacccgcctagatgcgcccagccaaattgaagttaaggacgtcaccgacaccacggcccttataacttggttcaaacccctggccgagattgatggtatcgagctgacctacggcatcaaagacgtgcccggcgatcgtacaaccatcgacctgacagaggatgagaaccagtatagtatcgggaaccttaagccagataccgagtacgaagtcagcttgatttccaggcggggggatatgtctagtaatccagctaaggagacgttcacgacagggctcgacgcgccgcgaaatcttagaagagtgagccagacagacaatagtatcacattggagtggcgtaacggtaaggccgccatcgattcttataggatcaaatacgcccccatctctggaggtgatcacgccgaggttgacgtgccaaagagtcagcaggcaaccactaagaccacactcacggggttgagaccagggaccgaatatgggattggggtgagcgccgtcaaggaagacaaggagagcaacccggccacgattaacgcggccaccgagcttgacacaccaaaagatttgcaggtaagtgagacagccgagactagcctgacactgctttggaagacccctctggctaagttcgacaggtaccgcttaaattactcactccctacagggcagtgggtgggggtccagctgccccgaaacacgacttcctacgttctccgcggactggagcccggccaggagtacaatgtgctgctgactgcagagaaaggcagacacaaatccaagcctgcccgcgtcaaggcatccaccgccaaggaaccggagatcgggaacttgaatgtgtctgatatcactcctgaatccttcaatttatcctggatggccacagacgggattttcgaaactttcaccatcgagatcatcgattctaaccgtcttctcgaaaccgtcgaatataacatctcgggggccgagaggacagctcacatatccggactcccgcccagcacagacttcattgtgtacctcagcgggttggctccatccatcagaaccaagacaatttctgcaacggccaccacagaaccaaaaccgcagttggggactctgattttctccaatattaccccgaaatcgtttaatatgtcgtggactacccaagctggcctgttcgccaagatcgtgatcaatgtcagtgatgctcatagcctccatgagtcgcagcaattcactgtgtcaggtgatgccaagcaagcccacatcacaggactggtggagaacactgggtacgatgtctctgtcgcgggcactaccctggcaggtgacccaacgcgacctctcactgctttcgtaattacagaggctgaacctgaggtggataatctgctggtcagcgacgccactccagatggctttaggttgtcatggactgcagacgaaggcgtattcgataactttgtactgaagattagagacaccaaaaaacagtcggagcccctggaaatcaccttactggcccccgaacggacccgcgacataactggcctcagagaagcaacagagtatgagatcgaactctacggaatttccaaagggcgccgctcgcaaactgtttcagcgatagcaaccacagctatgggatccccaaaggaagtgattttctctgacattaccgaaaatagcgccaccgtgtcttggcgcgcgccaactgctcaggttgagagcttcagaattacgtacgtccccattaccggcggcacgcccagtatggttaccgttgatggaaccaagacacagaccagactggtgaagctcattcccggggtagaatacctggtgagcatcattgccatgaaaggatttgaggagtcggaaccagtgagtggcagctttacaaccgccctggacggcccctccggacttgtgactgcgaacattaccgacagcgaagcgttggcgaggtggcagccagctatcgctacagttgattcttatgtcatctcttacaccggggagaaggtccctgagattaccagaaccgttagcggaaatactgtggagtacgcccttacagaccttgaacctgctacggaatataccctgcgcatcttcgccgagaaaggccctcaaaaaagcagcaccatcactgctaagtttacaactgatctggactctcctcgagacctaactgctaccgaagtgcagtccgaaaccgcactgctgacatggcgacctccgcgagcctccgtgactggctatctgctggtctacgagagcgtggatgggactgtcaaggaggtgattgtagggcctgatacaacctcatattctctcgccgatctgtccccgtctacccactataccgccaaaattcaggccctgaacgggcctctgcgctcaaacatgattcaaactatcttcacgaccataggactactctatccgtttccaaaagactgctcacaggccatgctgaatggagatactacttccggcctgtacacaatatatttgaacggagataaggctgaggccctggaggttttctgcgatatgaccagcgacggaggcgggtggatcgtctttctgcggaggaaaaacggacgggagaacttttaccagaactggaaggcttacgcggcggggttcggggatcgcagagaggagttctggctgggattggacaatctcaacaaaatcaccgcgcaaggccagtacgaacttcgggtggatctccgggatcatggtgagactgccttcgcagtctatgacaagttcagcgtgggggacgctaaaactaggtataagctaaaagtcgagggctacagtggcactgccggcgactctatggcgtatcacaatggcagaagtttcagcacattcgataaggacacagatagcgccatcaccaattgcgccttatcctacaagggagcattttggtaccgtaattgccacagagtcaatcttatgggccgatatggcgacaacaaccactcgcagggggtcaactggtttcactggaagggccacgaacacagtatacagtttgcggagatgaaactgcgtccttctaattttcgtaatcttgagggcagacggaagcgcgcttag

SEQ ID NO: 137518 - DNA, 4077 bp, synthetic construct
  misc_feature 1..4077: note = Description of Artificial Sequence: Synthetic coding sequence
  source 1..4077: mol_type = other DNA
atgggcgcggacggagagaccgtcgtgctgaagaacatgctgatcggaataaatcttatcctcttgggcagcatgataaagccatccgagtgccagcttgaggtgaccaccgagcgtgtgcagagacagtctgtggaggaggaggggggcatcgcaaactataataccagcagcaaggaacaaccggtcgtcttcaaccatgtgtacaacatcaacgtgccactcgacaatctctgtagctcgggcctggaagctagcgcagagcaggaggtgagtgcggaggatgaaactctggctgaatacatggggcagacatcagatcatgagtcacaggtcacttttacacaccgtattaatttcccaaagaaggcttgcccttgcgccagcagcgcccaagttctgcaggagcttttgagccgtatcgagatgcttgagcgcgaggtatcagtactgagggaccaatgcaatgccaactgttgccaggagagcgccgctacaggacagttggattacattccccattgtagtggtcacggtaacttcagttttgaatcctgcggctgcatatgcaatgaaggatggttcggaaagaattgctcagagccctactgccctttggggtgcagttctaggggcgtttgcgtcgatggtcagtgtatctgcgattctgagtactcaggagatgactgttcagagttgagatgccctacggactgctcctcacgcggcctctgtgttgatggcgaatgcgtctgcgaagagccatacaccggcgaggattgtcgggaattgcgctgtccgggcgactgttcaggcaagggcaggtgcgccaacggaacttgcttgtgtgaggagggttacgtgggggaggattgcggtcagcgccaatgtctgaatgcgtgttcaggccgtgggcagtgcgaggaggggttatgcgtgtgtgaggaagggtaccaaggccccgattgtagtgcagttgccccccccgaagacctgagagtcgcaggcattagcgacaggagcatcgagctggagtgggatggccctatggcagtgacggaatacgtgatctcttatcagccaacggcgctgggggggcttcaacttcaacagagggtgcctggcgattggtctggtgtgaccatcaccgaactggagccggggctgacctataacatttccgtttatgcagtgataagtaacatattgtccctaccaattaccgccaaagtggccactcacctgtctactccacaggggcttcagtttaagaccattactgaaactacggtggaggtccaatgggagccttttagcttctccttcgacggctgggaaataagtttcatcccaaaaaacaatgaagggggtgtgatcgcgcaggtgccttcagatgtcaccagcttcaaccaaacaggactgaagccaggcgaggagtacatcgtaaatgttgtggcattgaaggagcaggccaggagccctccgactagcgccagcgtgagcactgtaatagatggtccgacgcagatactggtgagagatgtgtcagacaccgtggcattcgtagaatggattcctcctcgtgcaaaggtggatttcatactgctgaagtatgggctggtggggggggaagggggcagaaccaccttccgcctccagcctccactctcccagtattccgtacaggctctgcgtccaggtagcaggtatgaggtctcagtgagcgcagtgcggggcacaaacgagtccgactcggcaactacccagttcacgacggagatcgacgctccaaagaatctgcgagtggggtctcggacggcgacatcgctagacctcgaatgggataactcagaagctgaggtccaggaatacaaggttgtttatagcacattagccggagagcagtatcatgaggtgcttgtgcctcgcggaatcggaccgacaactagggccactttgaccgacttggtgccgggtacggaatacggtgtgggcatttccgctgtgatgaactctcagcagtctgtaccagctacgatgaacgctcgaactgagctcgactcccctcgcgatttaatggtcactgcaagctccgagacctccatctcgcttatttggaccaaggcttcaggccctatcgaccactacaggatcacctttaccccctcaagcggaatcgccagtgaggtaaccgtccccaaagaccgcacttcatataccttgactgatctggagccaggggccgaatatataatctctgtcactgccgaaagagggcggcaacagagtctggagtccaccgtcgacgccttcaccggcttccgccccataagccatctgcacttctctcacgtgactagctccagtgtgaacatcacctggtcagatccttcccctcctgccgatcgcctcattctcaactacagccctagagacgaagaggaggagatgatggaggtcagcctagacgcaacaaagcggcatgctgtcttaatgggtttgcagcccgcaaccgagtatattgtgaacctcgtcgcggtgcacggaaccgtgacatctgagccgatcgtgggctcaatcacaacaggaatagatccccctaaggacatcaccatctcaaacgttacaaaagactccgttatggtctcctggtccccccccgtagcaagctttgattactaccgagtttcttatcggcctacccaggttgggaggctcgactctagcgtcgttccaaataccgtgaccgagttcacaattactcggctaaatcctgccactgagtatgagatctcactgaacagcgtgaggggaagggaggagagcgagcggatatgtactctggtgcataccgcaatggacaaccccgtggacctcatcgccacaaacattacccctacagaagctctgctccagtggaaagctccagttggggaagtcgagaattatgttatcgtgttgacccatttcgctgtcgccggcgaaacaatcttggttgacggagtttcagaggagttccgcttagtggatctcctgccatcgacgcactataccgctacaatgtatgctacaaatggcccactgacaagcgggaccatctccacaaacttttcgacactcctcgacccacctgccaatctgaccgcttccgaggtgaccagacagtcagctctgatctcatggcaaccgccacgcgcagagatagagaactatgtgctgacttacaagtccacagatgggtcacgaaaagaactgatcgtcgacgcagaggacacctggattcgtctcgaagggctactggaaaacaccgattacactgtactgctccaggctgcacaggacaccacgtggtctagtattaccagcacagcctttacaaccgggggtcgcgtgtttcctcatcctcaggactgcgcgcaacatttgatgaatggagacacactctcgggggtatatcccatcttccttaatggggagctctcacagaaacttcaggtctattgcgatatgactacagacggtggtggatggattgtgtttcaaaggagacaaaatgggcagacagacttcttcaggaaatgggctgattatagggtcgggttcgggaacgtcgaggatgaattctggcttggcttggataacatccatcgtatcacgagtcaaggtcgctatgagttgcgagtggatatgcgagacgggcaagaggcagcttttgctagctatgaccgattcagcgtcgaggatagtagaaacctctacaagctgcgcatcgggagctacaatggaaccgccggcgattctcttagttaccaccaagggcgacctttttcaactgaagatcgagacaacgatgtggcagtgaccaactgcgccatgagttacaagggcgcctggtggtataaaaactgccataggaccaacctgaacggaaaatatggagaatccagacacagtcagggcatcaactggtaccactggaaaggtcatgaattctcgatcccctttgtcgaaatgaaaatgaggccttacaaccaccggctgatggccggccggaaacggcagagccttcaattctag

SEQ ID NO: 137519 - DNA, 3807 bp, synthetic construct
  misc_feature 1..3807: note = Description of Artificial Sequence: Synthetic coding sequence
  source 1..3807: mol_type = other DNA
atgggagccgacggcgagacagttgtcctgaaaaacatgctgatcggtatcaacctgattctcctgggttccatgatcaagccttctgaatgccagctagaagtgaccaccgaaagagttcagaggcagagcgttgaggaagagggtggtattgcaaattacaacactagttctaaagagcagcccgtggtgttcaatcacgtctataatatcaacgtccccctggacaacctatgcagcagcggcctcgaagcaagcgctgagcaggaagtctctgctgaggacgagactctggctgaatatatgggccagacctctgaccatgagtctcaggtgacattcacccacaggattaactttcccaaaaaagcgtgtccctgtgcgtcgtctgcccaggtactccaggaattactctctcgaattgaaatgctggagagggaagtcagcgtactgcgcgatcagtgtaatgctaattgctgtcaggaatccgccgccacaggccaactggattatattccccactgcagcggacacgggaactttagcttcgagtcgtgcgggtgtatctgtaacgaaggatggttcggcaagaactgttctgaaccttattgtcctcttggatgcagctccagaggggtgtgtgtggatggacagtgtatttgtgactccgaatactccggtgatgattgcagtgaactgcggtgtcctacggactgctccagtcgcggcctctgtgtggacggagagtgtgtgtgcgaggagccgtatacgggcgaggattgccgggaactgaggtgtcccggggactgcagtgggaagggtcgctgcgccaatggaacatgcctatgcgaggaaggatatgtgggtgaggattgcggccaacgccaatgtcttaacgcctgctctggccgaggacagtgcgaagagggattatgtgtatgcgaggagggataccagggtcctgattgttccgctgtggccccgccggaagatctaagagtcgcaggcattagcgatcgcagcatcgagctggagtgggatgggccaatggctgtgactgaatacgtgatctcataccagcctactgcgctgggagggcttcaactgcaacagagggtaccgggtgactggagtggggtgactattactgaattggaacccggtctcacgtacaatatttccgtctacgccgtaatctctaatatcttgtcattaccgatcacagctaaagtggccactcacctgagtacgccccagggtctgcagtttaagacaattaccgagaccacagtggaggtccaatgggaacccttctccttcagtttcgacgggtgggagattagttttataccaaagaataacgaggggggggtgatcgcccaggtccctagtgacgtcacttccttcaaccagaccgggctcaaacccggagaggagtatatcgtgaacgtggtggctttgaaagagcaagcacgctcccctcccacatccgccagcgtgtctactgttatagatggacctacgcaaatcttagtgcgggatgtgtcagacactgtggcattcgtggagtggatcccaccacgagccaaagtcgatttcatccttctcaagtatggactcgtcggcggggagggcggtcgcaccacctttcgcttgcagcctccccttagccagtattctgtgcaggctctacggcctggcagtcgctacgaggtaagtgtgagtgctgtgcgcgggacgaacgagtccgacagcgccacaacccaatttacaactgaaatcgacgcaccgaaaaatctgcgcgtggggagtagaaccgccacgtccctcgaccttgagtgggacaactcagaagcagaggtccaggagtataaggtggtctattcgaccttagcgggcgagcagtaccacgaggtactcgtcccccgggggattggccccactactcgagctacactgactgaccttgtccccggcacagaatatggggtcggaatttcggccgtgatgaatagtcagcagtcggtaccagccacaatgaatgctcgaacagagctggatagtccaagggatttgatggtgaccgcttcatcggagacttctatttcactgatctggactaaagcgagcggcccgatcgaccattaccgtatcacatttactcctagcagcggcatcgcgtccgaggtgactgttcccaaggaccgcaccagctacactttgacagacctcgaacccggcgccgagtatataatcagcgtcaccgcagagcgtggccgacagcagtctcttgagtccaccgttgacgccttcacaggcattgaccctcccaaggacattaccattagcaacgttaccaaagattctgtaatggtgagttggtcgccccctgtggcctcttttgactactatcgagtctcttaccggcccacccaggtcggacggctcgacagctccgtggtgccaaatacagtgaccgagttcacaattactcgcctgaacccagctactgaatacgaaataagcctcaattcagttagaggtagggaggaatccgagagaatctgtaccctcgtacataccgctatggataacccagtggatctcattgccaccaatattacaccaactgaagccctcctgcagtggaaggccccagtgggtgaggtggagaattatgtaatcgtgttaactcactttgctgtcgccggagaaacaatcctggtggacggggtttctgaggagtttcgactggtcgatcttctaccctcaactcattataccgctaccatgtatgcaactaatgggccccttaccagcgggacaatctctacgaacttctcaacacttctggacccccctgcaaacttaactgccagtgaagtgacgcggcagtctgcactgattagttggcagccaccccgagccgaaattgagaactacgtgctcacctataagtctaccgacgggtcgcgtaaggagctgatcgtagacgcggaggacacatggatcaggctggaaggtctgctggagaacaccgattataccgttctcctccaggccgcacaggatactacctggtcctccatcaccagcactgccttcacaactggcggccgcgttttcccccatccccaggactgtgcccagcatcttatgaacggcgacacactttctggcgtgtacccgatattcctcaatggcgaattatcccaaaagctgcaggtgtattgtgacatgactaccgatggcgggggttggattgttttccagcgaaggcagaacgggcagactgatttcttccgaaaatgggccgattatcgtgtgggcttcggtaacgtggaggacgagttttggttgggccttgacaatatacaccgcattacctcccaaggtcggtatgaactgcgcgtggatatgcgcgacggacaggaggctgcttttgctagttacgaccggtttagcgtggaggacagcaggaacctgtacaagctacggattggatcttacaacggtactgcaggggactccctgtcctatcatcagggaaggccattttccaccgaagatagagataatgatgttgcagtcacaaattgtgccatgtcctataaaggggcttggtggtataaaaactgccacagaacaaatcttaacgggaagtacggcgagtctcggcacagccagggcatcaattggtaccattggaaaggtcacgagtttagcattccattcgtggaaatgaaaatgcgcccatataatcaccgtctgatggccggcagaaaacggcagagtctacaattttag

SEQ ID NO: 137520 - DNA, 4077 bp, synthetic construct
  misc_feature 1..4077: note = Description of Artificial Sequence: Synthetic coding sequence
  source 1..4077: mol_type = other DNA
atgggcgccgacggagaaaccgtagtgcttaaaaatatgctgatcggcatcaatcttatcttgctgggatcaatgattaaaccatcagagtgtcaactggaggtgaccaccgagcgtgttcagcgccaatccgtcgaggaggaggggggcatcgccaactataacacctccagtaaagagcagcctgtcgtgtttaatcatgtatacaacattaatgtaccacttgataatctctgttcgtcgggcctggaggcatcagccgaacaggaagtgtcagcagaggacgagacacttgcagagtacatggggcagaccagtgatcacgagtctcaggtcaccttcacacaccggatcaactttcccaagaaagcatgtccctgtgcatccagtgcccaggtgctccaagaactgctttctcgcatagagatgttggagcgagaagtcagtgtccttcgcgaccaatgtaatgctaattgttgtcaggaaagtgccgccactgggcagctggattatatcccccattgttctggacatggtaacttttcattcgagagttgtggctgcatctgcaatgagggatggttcggcaaaaattgctcggagccatattgccctctcgggtgcagttcccggggtgtgtgtgtggacgggcagtgcatctgcgactctgagtacagcggcgatgattgttctgagctgaggtgcccaactgactgttcatcccgaggcctctgtgtagatggggagtgcgtttgcgaggaaccctacactggcgaagattgcagagaactgcggtgccctggggattgctccggtaaaggcaggtgtgctaatggtacatgtctatgtgaggaagggtacgtgggcgaagactgcggccagagacagtgcttaaacgcatgctctggacggggccaatgtgaagaaggactgtgtgtatgtgaagaaggctatcagggcccagactgttccgccgtagcgcccccagaagacctgcgggtggccggcattagtgatcgcagcatcgagttggagtgggacggccccatggccgtcactgaatatgtgatttcgtaccagcctacagccctggggggtctacagttgcagcagagggtacctggagactggtcaggagtgacaattacagaactggaaccagggttgacttacaacatttcagtctatgcggttatatcgaatatcctttctcttcccatcacggctaaggtggctacacacctatcgacacctcaagggctgcagttcaaaacaataacagaaactaccgtggaggtccaatgggagcctttctcatttagttttgacggatgggagatttcattcatacccaaaaacaatgagggaggcgttatcgcccaggtgccctcagacgtcacatcttttaatcagaccgggctcaagccaggggaggaatatatagtgaatgtggtggctttgaaggagcaggcacgatctcccccaacatcagcctccgtttccacagtcatagacgggccgactcagattctggtgcgtgacgtgagcgacactgtagcattcgtggaatggatcccaccacgagctaaagtagatttcatcctcctgaagtacgggttagtgggtggggagggcggaaggactaccttcagactgcaaccacctctctcacagtactctgtacaggctctaaggccaggctctcggtacgaggtgagcgtgtctgccgtaagaggcactaatgagtctgattctgcaactacgcaatttacaactgagatcgatgctcctaagaaccttagggtcgggtcccgcacggccaccagtctagatctcgaatgggataactccgaggcagaagtgcaggagtacaaggttgtctactccacgctggcgggggaacagtaccacgaggtcctcgtacctagaggcatcggccctacaactcgagctaccctgactgacctggtgccagggaccgagtatggagtcggcatatcagctgtgatgaactctcagcaatctgtgcccgcgactatgaatgctaggactgagctggacagcccgagggatctcatggtaactgcctcctccgaaacctccatttctcttatctggaccaaggctagtggccctatcgaccattaccgaataacatttaccccctcatcaggaattgctagcgaagttactgttccgaaagataggacatcctacactctcacagatcttgaaccaggagctgagtacatcatctcagtgacggctgaaagaggccgtcaacagtccttggagtccaccgtagacgccttcacaggattccgtccaatcagccacctgcattttagtcatgtcacctcctcttcagttaacatcacatggtctgatccttcaccccccgcagatagactaatcttgaactattcgcccagggacgaggaggaggagatgatggaagttagcctcgacgcaactaagcggcacgccgtgctgatgggactccaacctgctacagagtacattgtgaatctggtcgcagtccatggtacggtcacaagcgagcccatcgtggggagcatcactacaggcatcgaccctcccaaagatatcaccatcagcaacgttaccaaggactccgtgatggtctcatggagcccacccgtggcctcattcgattactatcgagtgtcttaccgaccaactcaagtggggaggctcgatagctctgtggtgcccaatactgtgacggaattcaccatcactcggcttaatcccgccaccgagtatgaaatttcccttaattcggttagaggacgcgaggagtccgaaagaatctgtaccttagttcacaccgccatggacaatcctgtagatctcatcgctactaacattaccccaaccgaggccctgctccagtggaaagcccccgttggagaagttgaaaactacgtcatcgtgctgacacatttcgcagtggccggtgaaacaatcttggtagacggcgtatccgaggaatttagactcgtggatctactgccatccacacactacacagccactatgtacgccacaaacggccctctgactagcggaaccatttctaccaatttcagcaccctcctcgatccacctgccaatctgacagctagcgaagtgacccgtcagtccgccttgattagctggcagcccccccgggctgaaatagagaattacgttctcacctacaagtcaactgatggttcccgcaaggaactgattgttgatgcagaagatacttggataagactggaggggctgttagagaacactgactacaccgtcctgctccaggcagcccaggacacgacttggagctctataacctctaccgcctttacaaccggcggcagagttttcccacatccacaggattgcgcccaacacttgatgaatggagacacactgagtggagtttatcccattttcctcaacggggaactctcgcaaaagctccaggtctactgcgacatgaccaccgacgggggcggctggatcgtgttccaacgcagacagaacggacagaccgatttttttaggaaatgggccgattaccgcgtcggattcggcaacgtagaagacgagttttggctgggccttgacaatattcatcgcattacctcgcagggccgttatgagctgcgcgtggatatgcgagatggtcaggaagctgcgtttgcctcatacgaccgcttctctgtggaagatagtagaaacctgtacaaactcaggattggatcctacaatgggaccgcaggagacagcctctcctatcatcaagggaggcccttcagtaccgaggatcgggataacgacgtcgccgtcacaaattgcgccatgagttataagggcgcctggtggtataagaattgtcaccgcaccaatctgaatggaaaatacggcgaaagcagacattcacagggaatcaattggtatcactggaagggacacgaattttctatccctttcgtggaaatgaaaatgcgaccgtataaccaccgtctaatggctggtagaaaaagacagtctttacagttctag

SEQ ID NO: 137521 - DNA, 534 bp, synthetic construct
  misc_feature 1..534: note = Description of Artificial Sequence: Synthetic coding sequence
  source 1..534: mol_type = other DNA
tagatcaacttccctaagaaagcttgcccttgcgccagttctgcacaggtgctccaagagttgttatcaagaatcgagatgttggagcgagaagtctctgttctgcgggatcagtgcaacgctaactgctgccaggagtctgccgccacggtggctccccctgaggatcttcgggttgcgggcatctcagatcgctcgattgaactggagtgggatggtccaatggccgtcaccgagtacgtgatctcctaccagcccacggctctgggggggctgcaactgcagcaacgggtaccgggcgactggagcggagtcactatcactgagctcgagcccggactgacctataacatctccgtttacgcagtgatctcgaacattctctcccttcccatcaccgccaaggtggcaactcacctgagcactcctcaggggctccagttcaagaccattactgaaaccacagtagaagtgcagtgggaacccttctccttctcctttgacggctgggaaattagctttataccgaaatag
